United States Patent Application Publication US 2018/0126003 A1 - sequence listing, part 85

SEQ ID NO: 154133 - DNA, 3276 bp, Artificial Sequence
  derived and/or modified sequence
atgagacccagcggcaccgccggcgccgccctgctggccctgctggccgccctgtgccccgccagcagagccctggaggagaagaaggtgtgccagggcaccagcaacaagctgacccagctgggcaccttcgaggaccacttcctgagcctgcagagaatgttcaacaactgcgaggtggtgctgggcaacctggagatcacctacgtgcagagaaactacgacctgagcttcctgaagaccatccaggaggtggccggctacgtgctgatcgccctgaacaccgtggagagaatccccctggagaacctgcagatcatcagaggcaacatgtactacgagaacagctacgccctggccgtgctgagcaactacgacgccaacaagaccggcctgaaggagctgcccatgagaaacctgcagggccagaagtgcgaccccagctgccccaacggcagctgctggggcgccggcgaggagaactgccagaagctgaccaagatcatctgcgcccagcagtgcagcggcagatgcagaggcaagagccccagcgactgctgccacaaccagtgcgccgccggctgcaccggccccagagagagcgactgcctggtgtgcagaaagttcagagacgaggccacctgcaaggacacctgcccccccctgatgctgtacaaccccaccacctaccagatggacgtgaaccccgagggcaagtacagcttcggcgccacctgcgtgaagaagtgccccagaaactacgtggtgaccgaccacggcagctgcgtgagagcctgcggcgccgacagctacgagatggaggaggacggcgtgagaaagtgcaagaagtgcgagggcccctgcagaaaggtgtgcaacggcatcggcatcggcgagttcaaggacagcctgagcatcaacgccaccaacatcaagcacttcaagaactgcaccagcatcagcggcgacctgcacatcctgcccgtggccttcagaggcgacagcttcacccacaccccccccctggacccccaggagctggacatcctgaagaccgtgaaggagatcaccggcttcctgctgatccaggcctggcccgagaacagaaccgacctgcacgccttcgagaacctggagatcatcagaggcagaaccaagcagcacggccagttcagcctggccgtggtgagcctgaacatcaccagcctgggcctgagaagcctgaaggagatcagcgacggcgacgtgatcatcagcggcaacaagaacctgtgctacgccaacaccatcaactggaagaagctgttcggcaccagcggccagaagaccaagatcatcagcaacagaggcgagaacagctgcaaggccaccggccaggtgtgccacgccctgtgcagccccgagggctgctggggccccgagcccagagactgcgtgagctgcagaaacgtgagcagaggcagagagtgcgtggacaagtgcaacctgctggagggcgagcccagagagttcgtggagaacagcgagtgcatccagtgccaccccgagtgcctgccccaggccatgaacatcacctgcaccggcagaggccccgacaactgcatccagtgcgcccactacatcgacggcccccactgcgtgaagacctgccccgccggcgtgatgggcgagaacaacaccctggtgtggaagtacgccgacgccggccacgtgtgccacctgtgccaccccaactgcacctacggctgcaccggccccggcctggagggctgccccaccaacggccccaagatccccagcatcgccaccggcatggtgggcgccctgctgctgctgctggtggtggccctgggcatcggcctgttcatgagaagaagacacatcgtgagaaagagaaccctgagaagactgctgcaggagagagagctggtggagcccctgacccccagcggcgaggcccccaaccaggccctgctgagaatcctgaaggagaccgagttcaagaagatcaaggtgctgggcagcggcgccttcggcaccgtgtacaagggcctgtggatccccgagggcgagaaggtgaagatccccgtggccatcaaggagctgagagaggccaccagccccaaggccaacaaggagatcctggacgaggcctacgtgatggccagcgtggacaacccccacgtgtgcagactgctgggcatctgcctgaccagcaccgtgcagctgatcacccagctgatgcccttcggctgcctgctggactacgtgagagagcacaaggacaacatcggcagccagtacctgctgaactggtgcgtgcagatcgccaagggcatgaactacctggaggacagaagactggtgcacagagacctggccgccagaaacgtgctggtgaagaccccccagcacgtgaagatcaccgacttcggcctggccaagctgctgggcgccgaggagaaggagtaccacgccgagggcggcaaggtgcccatcaagtggatggccctggagagcatcctgcacagaatctacacccaccagagcgacgtgtggagctacggcgtgaccgtgtgggagctgatgaccttcggcagcaagccctacgacggcatccccgccagcgagatcagcagcatcctggagaagggcgagagactgccccagccccccatctgcaccatcgacgtgtacatgatcatggtgaagtgctggatgatcgacgccgacagcagacccaagttcagagagctgatcatcgagttcagcaagatggccagagacccccagagatacctggtgatccagggcgacgagagaatgcacctgcccagccccaccgacagcaacttctacagagccctgatggacgaggaggacatggacgacgtggtggacgccgacgagtacctgatcccccagcagggcttcttcagcagccccagcaccagcagaacccccctgctgagcagcctgagcgccaccagcaacaacagcaccgtggcctgcatcgacagaaacggcctgcagagctgccccatcaaggaggacagcttcctgcagagatacagcagcgaccccaccggcgccctgaccgaggacagcatcgacgacaccttcctgcccgtgcccggcgagtggctggtgtggaagcagagctgcagcagcaccagcagcacccacagcgccgccgccagcctgcagtgccccagccaggtgctgccccccgccagccccgagggcgagaccgtggccgacctgcagacccagtag

SEQ ID NO: 154134 - DNA, 1395 bp, Artificial Sequence
  derived and/or modified sequence
atgagcagcctgaccaagatcatctgcgcccagcagtgcagcggcagatgcagaggcaagagccccagcgactgctgccacaaccagtgcgccgccggctgcaccggccccagagagagcgactgcctggtgtgcagaaagttcagagacgaggccacctgcaaggacacctgcccccccctgatgctgtacaaccccaccacctaccagatggacgtgaaccccgagggcaagtacagcttcggcgccacctgcgtgaagaagtgccccagaaactacgtggtgaccgaccacggcagctgcgtgagagcctgcggcgccgacagctacgagatggaggaggacggcgtgagaaagtgcaagaagtgcgagggcccctgcagaaaggtgtgcaacggcatcggcatcggcgagttcaaggacagcctgagcatcaacgccaccaacatcaagcacttcaagaactgcaccagcatcagcggcgacctgcacatcctgcccgtggccttcagaggcgacagcttcacccacaccccccccctggacccccaggagctggacatcctgaagaccgtgaaggagatcaccggcttcctgctgatccaggcctggcccgagaacagaaccgacctgcacgccttcgagaacctggagatcatcagaggcagaaccaagcagcacggccagttcagcctggccgtggtgagcctgaacatcaccagcctgggcctgagaagcctgaaggagatcagcgacggcgacgtgatcatcagcggcaacaagaacctgtgctacgccaacaccatcaactggaagaagctgttcggcaccagcggccagaagaccaagatcatcagcaacagaggcgagaacagctgcaaggccaccggccaggtgtgccacgccctgtgcagccccgagggctgctggggccccgagcccagagactgcgtgagctgcagaaacgtgagcagaggcagagagtgcgtggacaagtgcaacctgctggagggcgagcccagagagttcgtggagaacagcgagtgcatccagtgccaccccgagtgcctgccccaggccatgaacatcacctgcaccggcagaggccccgacaactgcatccagtgcgcccactacatcgacggcccccactgcgtgaagacctgccccgccggcgtgatgggcgagaacaacaccctggtgtggaagtacgccgacgccggccacgtgtgccacctgtgccaccccaactgcacctacggctgcaccggccccggcctggagggctgccccaccaacggccccaagatccccagcatcgccaccggcatggtgggcgccctgctgctgctgctggtggtggccctgggcatcggcctgttcatgagaagatag

SEQ ID NO: 154135 - DNA, 9821 bp, Artificial Sequence
  derived and/or modified sequence
gccggagtcccgagctagccccggcggccgccgccgcccagaccggacgacaggccacctcgtcggcgtccgcccgagtccccgcctcgccgccaacgccacaaccaccgcgcacggccccctgactccgtccagtattgatcgggagagccggagcgagctcttcggggagcagcgatgcgaccctccgggacggccggggcagcgctcctggcgctgctggctgcgctctgcccggcgagtcgggctctggaggaaaagaaagtttgccaaggcacgagtaacaagctcacgcagttgggcacttttgaagatcattttctcagcctccagaggatgttcaataactgtgaggtggtccttgggaatttggaaattacctatgtgcagaggaattatgatctttccttcttaaagaccatccaggaggtggctggttatgtcctcattgccctcaacacagtggagcgaattcctttggaaaacctgcagatcatcagaggaaatatgtactacgaaaattcctatgccttagcagtcttatctaactatgatgcaaataaaaccggactgaaggagctgcccatgagaaatttacaggaaatcctgcatggcgccgtgcggttcagcaacaaccctgccctgtgcaacgtggagagcatccagtggcgggacatagtcagcagtgactttctcagcaacatgtcgatggacttccagaaccacctgggcagctgccaaaagtgtgatccaagctgtcccaatgggagctgctggggtgcaggagaggagaactgccagaaactgaccaaaatcatctgtgcccagcagtgctccgggcgctgccgtggcaagtcccccagtgactgctgccacaaccagtgtgctgcaggctgcacaggcccccgggagagcgactgcctggtctgccgcaaattccgagacgaagccacgtgcaaggacacctgccccccactcatgctctacaaccccaccacgtaccagatggatgtgaaccccgagggcaaatacagctttggtgccacctgcgtgaagaagtgtccccgtaattatgtggtgacagatcacggctcgtgcgtccgagcctgtggggccgacagctatgagatggaggaagacggcgtccgcaagtgtaagaagtgcgaagggccttgccgcaaagtgtgtaacggaataggtattggtgaatttaaagactcactctccataaatgctacgaatattaaacacttcaaaaactgcacctccatcagtggcgatctccacatcctgccggtggcatttaggggtgactccttcacacatactcctcctctggatccacaggaactggatattctgaaaaccgtaaaggaaatcacagggtttttgctgattcaggcttggcctgaaaacaggacggacctccatgcctttgagaacctagaaatcatacgcggcaggaccaagcaacatggtcagttttctcttgcagtcgtcagcctgaacataacatccttgggattacgctccctcaaggagataagtgatggagatgtgataatttcaggaaacaaaaatttgtgctatgcaaatacaataaactggaaaaaactgtttgggacctccggtcagaaaaccaaaattataagcaacagaggtgaaaacagctgcaaggccacaggccaggtctgccatgccttgtgctcccccgagggctgctggggcccggagcccagggactgcgtctcttgccggaatgtcagccgaggcagggaatgcgtggacaagtgcaaccttctggagggtgagccaagggagtttgtggagaactctgagtgcatacagtgccacccagagtgcctgcctcaggccatgaacatcacctgcacaggacggggaccagacaactgtatccagtgtgcccactacattgacggcccccactgcgtcaagacctgcccggcaggagtcatgggagaaaacaacaccctggtctggaagtacgcagacgccggccatgtgtgccacctgtgccatccaaactgcacctacggatgcactgggccaggtcttgaaggctgtccaacgaatgggcctaagatcccgtccatcgccactgggatggtgggggccctcctcttgctgctggtggtggccctggggatcggcctcttcatgcgaaggcgccacatcgttcggaagcgcacgctgcggaggctgctgcaggagagggagcttgtggagcctcttacacccagtggagaagctcccaaccaagctctcttgaggatcttgaaggaaactgaattcaaaaagatcaaagtgctgggctccggtgcgttcggcacggtgtataagggactctggatcccagaaggtgagaaagttaaaattcccgtcgctatcaaggaattaagagaagcaacatctccgaaagccaacaaggaaatcctcgatgaagcctacgtgatggccagcgtggacaacccccacgtgtgccgcctgctgggcatctgcctcacctccaccgtgcagctcatcacgcagctcatgcccttcggctgcctcctggactatgtccgggaacacaaagacaatattggctcccagtacctgctcaactggtgtgtgcagatcgcaaagggcatgaactacttggaggaccgtcgcttggtgcaccgcgacctggcagccaggaacgtactggtgaaaacaccgcagcatgtcaagatcacagattttgggctggccaaactgctgggtgcggaagagaaagaataccatgcagaaggaggcaaagtgcctatcaagtggatggcattggaatcaattttacacagaatctatacccaccagagtgatgtctggagctacggggtgactgtttgggagttgatgacctttggatccaagccatatgacggaatccctgccagcgagatctcctccatcctggagaaaggagaacgcctccctcagccacccatatgtaccatcgatgtctacatgatcatggtcaagtgctggatgatagacgcagatagtcgcccaaagttccgtgagttgatcatcgaattctccaaaatggcccgagacccccagcgctaccttgtcattcagggggatgaaagaatgcatttgccaagtcctacagactccaacttctaccgtgccctgatggatgaagaagacatggacgacgtggtggatgccgacgagtacctcatcccacagcagggcttcttcagcagcccctccacgtcacggactcccctcctgagctctctgagtgcaaccagcaacaattccaccgtggcttgcattgatagaaatgggctgcaaagctgtcccatcaaggaagacagcttcttgcagcgatacagctcagaccccacaggcgccttgactgaggacagcatagacgacaccttcctcccagtgcctgaatacataaaccagtccgttcccaaaaggcccgctggctctgtgcagaatcctgtctatcacaatcagcctctgaaccccgcgcccagcagagacccacactaccaggacccccacagcactgcagtgggcaaccccgagtatctcaacactgtccagcccacctgtgtcaacagcacattcgacagccctgcccactgggcccagaaaggcagccaccaaattagcctggacaaccctgactaccagcaggacttctttcccaaggaagccaagccaaatggcatctttaagggctccacagctgaaaatgcagaatacctaagggtcgcgccacaaagcagtgaatttattggagcatgaccacggaggatagtatgagccctaaaaatccagactctttcgatacccaggaccaagccacagcaggtcctccatcccaacagccatgcccgcattagctcttagacccacagactggttttgcaacgtttacaccgactagccaggaagtacttccacctcgggcacattttgggaagttgcattcctttgtcttcaaactgtgaagcatttacagaaacgcatccagcaagaatattgtccctttgagcagaaatttatctttcaaagaggtatatttgaaaaaaaaaaaaagtatatgtgaggatttttattgattggggatcttggagtttttcattgtcgctattgatttttacttcaatgggctcttccaacaaggaagaagcttgctggtagcacttgctaccctgagttcatccaggcccaactgtgagcaaggagcacaagccacaagtcttccagaggatgcttgattccagtggttctgcttcaaggcttccactgcaaaacactaaagatccaagaaggccttcatggccccagcaggccggatcggtactgtatcaagtcatggcaggtacagtaggataagccactctgtcccttcctgggcaaagaagaaacggaggggatggaattcttccttagacttacttttgtaaaaatgtccccacggtacttactccccactgatggaccagtggtttccagtcatgagcgttagactgacttgtttgtcttccattccattgttttgaaactcagtatgctgcccctgtcttgctgtcatgaaatcagcaagagaggatgacacatcaaataataactcggattccagcccacattggattcatcagcatttggaccaatagcccacagctgagaatgtggaatacctaaggatagcaccgcttttgttctcgcaaaaacgtatctcctaatttgaggctcagatgaaatgcatcaggtcctttggggcatagatcagaagactacaaaaatgaagctgctctgaaatctcctttagccatcaccccaaccccccaaaattagtttgtgttacttatggaagatagttttctccttttacttcacttcaaaagctttttactcaaagagtatatgttccctccaggtcagctgcccccaaaccccctccttacgctttgtcacacaaaaagtgtctctgccttgagtcatctattcaagcacttacagctctggccacaacagggcattttacaggtgcgaatgacagtagcattatgagtagtgtggaattcaggtagtaaatatgaaactagggtttgaaattgataatgctttcacaacatttgcagatgttttagaaggaaaaaagttccttcctaaaataatttctctacaattggaagattggaagattcagctagttaggagcccaccttttttcctaatctgtgtgtgccctgtaacctgactggttaacagcagtcctttgtaaacagtgttttaaactctcctagtcaatatccaccccatccaatttatcaaggaagaaatggttcagaaaatattttcagcctacagttatgttcagtcacacacacatacaaaatgttccttttgcttttaaagtaatttttgactcccagatcagtcagagcccctacagcattgttaagaaagtatttgatttttgtctcaatgaaaataaaactatattcatttccactctattatgctctcaaatacccctaagcatctatactagcctggtatgggtatgaaagatacaaagataaataaaacatagtccctgattctaagaaattcacaatttagcaaaggaaatggactcatagatgctaaccttaaaacaacgtgacaaatgccagacaggacccatcagccaggcactgtgagagcacagagcagggaggttgggtcctgcctgaggagacctggaagggaggcctcacaggaggatgaccaggtctcagtcagcggggaggtggaaagtgcaggtgcatcaggggcaccctgaccgaggaaacagctgccagaggcctccactgctaaagtccacataaggctgaggtcagtcaccctaaacaacctgctccctctaagccaggggatgagcttggagcatcccacaagttccctaaaagttgcagcccccagggggattttgagctatcatctctgcacatgcttagtgagaagactacacaacatttctaagaatctgagattttatattgtcagttaaccactttcattattcattcacctcaggacatgcagaaatatttcagtcagaactgggaaacagaaggacctacattctgctgtcacttatgtgtcaagaagcagatgatcgatgaggcaggtcagttgtaagtgagtcacattgtagcattaaattctagtatttttgtagtttgaaacagtaacttaataaaagagcaaaagctattctagctttcttcttcatattttaattttccaccataaagtttagttgctaaattctattaattttaagattgtgcttcccaaaatagttctcacttcatctgtccagggaggcacagttctgtctggtagaagccgcaaagcccttagcctcttcacggatctggcgactgtgatgggcaggtcaggagaggagctgcccaaagtcccatgattttcacctaacagccctgatcagtcagtactcaaagcttggactccatccctgaaggtcttcctgattgatagcctggccttaataccctacagaaagcctgtccattggctgtttcttcctcagtcagttcctggaagaccttaccccatgaccccagcttcagatgtggtctttggaaacagaggtcgaaggaaagtaaggagctgagagctcacattcataggtgccgccagccttcgtgcatcttcttgcatcatctctaaggagctcctctaattacaccatgcccgtcaccccatgagggatcagagaagggatgagtcttctaaactctatattcgctgtgagtccaggttgtaagggggagcactgtggatgcatcctattgcactccagctgatgacaccaaagcttaggtgtttgctgaaagttcttgatgttgtgacttaccacccctgcctcacaactgcagacataaggggactatggattgcttagcaggaaaggcactggttctcaagggcggctgcccttgggaatcttctggtcccaaccagaaagactgtggcttgattttctcaggtgcagcccagccgtagggccttttcagagcaccccctggttattgcaacattcatcaaagtttctagaacctctggcctaaaggaagggcctggtgggatctacttggcactcgctggggggccaccccccagtgccactctcactaggcctctgattgcacttgtgtaggatgaagctggtgggtgatgggaactcagcacctcccctcaggcagaaaagaatcatctgtggagcttcaaaagaaggggcctggagtctctgcagaccaattcaacccaaatctcgggggctctttcatgattctaatgggcaaccagggttgaaacccttatttctagggtcttcagttgtacaagactgtgggtctgtaccagagcccccgtcagagtagaataaaaggctgggtagggtagagattcccatgtgcagtggagagaacaatctgcagtcactgataagcctgagacttggctcatttcaaaagcgttcaattcatcctcaccagcagttcagctggaaaggggcaaatacccccacctgagctttgaaaacgccctgggaccctctgcattctctaagtaagttatagaaaccagtctcttccctcctttgtgagtgagctgctattccacgtaggcaacacctgttgaaattgccctcaatgtctactctgcatttctttcttgtgataagcacacacttttattgcaacataatgatctgctcacatttccttgcctgggggctgtaaaaccttacagaacagaaatccttgcctctttcaccagccacacctgccataccaggggtacagctttgtactattgaagacacagacaggatttttaaatgtaaatctatttttgtaactttgttgcgggatatagttctctttatgtagcactgaactttgtacaatatatttttagaaactcatttttctactaaaacaaacacagtttactttagagagactgcaatagaatcaaaatttgaaactgaaatctttgtttaaaagggttaagttgaggcaagaggaaagccctttctctctcttataaaaaggcacaacctcattggggagctaagctaggtcattgtcatggtgaagaagagaagcatcgtttttatatttaggaaattttaaaagatgatggaaagcacatttagcttggtctgaggcaggttctgttggggcagtgttaatggaaagggctcactgttgttactactagaaaaatccagttgcatgccatactctcatcatctgccagtgtaaccctgtacatgtaagaaaagcaataacatagcactttgttggtttatatatataatgtgacttcaatgcaaattttatttttatatttacaattgatatgcatttaccagtataaactagacatgtctggagagcctaataatgttcagcacactttggttagttcaccaacagtcttaccaagcctgggcccagccaccctagagaagttattcagccctggctgcagtgacatcacctgaggagcttttaaaagcttgaagcccagctacacctcagaccgattaaacgcaaatctctggggctgaaacccaagcattcgtagtttttaaagctcctgaggtcattccaatgtgcggccaaagttgagaactactggcctagggattagccacaaggacatggacttggaggcaaattctgcaggtgtatgtgattctcaggcctagagagctaagacacaaagacctccacatctgtcgctgagagtcaagaacctgaacagagtttccatgaaggttctccaagcactagaagggagagtgtctaaacaatggttgaaaagcaaaggaaatataaaacagacacctctttccatttcctaaggtttctctctttattaagggtggactagtaataaaatataatattcttgctgcttatgcagctgacattgttgccctccctaaagcaaccaagtagcctttatttcccacagtgaaagaaaacgctggcctatcagttacattacaaaaggcagatttcaagaggattgagtaagtagttggatggctttcataaaaacaagaattcaagaagaggattcatgctttaagaaacatttgttatacattcctcacaaattatacctgggataaaaactatgtagcaggcagtgtgttttccttccatgtctctctgcactacctgcagtgtgtcctctgaggctgcaagtctgtcctatctgaattcccagcagaagcactaagaagctccaccctatcacctagcagataaaactatggggaaaacttaaatctgtgcatacatttctggatgcatttacttatctttaaaaaaaaaggaatcctatgacctgatttggccacaaaaataatcttgctgtacaatacaatctcttggaaattaagagatcctatggatttgatgactggtattagaggtgacaatgtaaccgattaacaacagacagcaataacttcgttttagaaacattcaagcaatagctttatagcttcaacatatggtacgttttaaccttgaaagttttgcaatgatgaaagcagtatttgtacaaatgaaaagcagaattctcttttatatggtttatactgttgatcagaaatgttgattgtgcattgagtattaaaaaattagatgtatattattcattgttctttactcctgagtaccttataataataataatgtattctttgttaacaa

SEQ ID NO: 154136 - DNA, 5595 bp, Artificial Sequence
  derived and/or modified sequence
ccccggcgcagcgcggccgcagcagcctccgccccccgcacggtgtgagcgcccgacgcggccgaggcggccggagtcccgagctagccccggcggccgccgccgcccagaccggacgacaggccacctcgtcggcgtccgcccgagtccccgcctcgccgccaacgccacaaccaccgcgcacggccccctgactccgtccagtattgatcgggagagccggagcgagctcttcggggagcagcgatgcgaccctccgggacggccggggcagcgctcctggcgctgctggctgcgctctgcccggcgagtcgggctctggaggaaaagaaagtttgccaaggcacgagtaacaagctcacgcagttgggcacttttgaagatcattttctcagcctccagaggatgttcaataactgtgaggtggtccttgggaatttggaaattacctatgtgcagaggaattatgatctttccttcttaaagaccatccaggaggtggctggttatgtcctcattgccctcaacacagtggagcgaattcctttggaaaacctgcagatcatcagaggaaatatgtactacgaaaattcctatgccttagcagtcttatctaactatgatgcaaataaaaccggactgaaggagctgcccatgagaaatttacaggaaatcctgcatggcgccgtgcggttcagcaacaaccctgccctgtggtggagagcatccagtggcgggacatagtcagcagtgactttctcagcaacatgtcgatggacttccagaaccacctgggcagctgccaaaagtgtgatccaagctgtcccaatgggagctgctggggtgcaggagaggagaactgccagaaactgaccaaaatcatctgtgcccagcagtgctccgggcgctgccgtggcaagtcccccagtgactgctgccacaaccagtgtgctgcaggctgcacaggcccccgggagagcgactgcctggtctgccgcaaattccgagacgaagccacgtgcaaggacacctgccccccactcatgctctacaaccccaccacgtaccagatggatgtgaaccccgagggcaaatacagctttggtgccacctgcgtgaagaagtgtccccgtaattatgtggtgacagatcacggctcgtgcgtccgagcctgtggggccgacagctatgagatggaggaagacggcgtccgcaagtgtaagaagtgcgaagggccttgccgcaaagtgtgtaacggaataggtattggtgaatttaaagactcactctccataaatgctacgaatattaaacacttcaaaaactgcacctccatcagtggcgatctccacatcctgccggtggcatttaggggtgactccttcacacatactcctcctctggatccacaggaactggatattctgaaaaccgtaaaggaaatcacagggtttttgctgattcaggcttggcctgaaaacaggacggacctccatgcctttgagaacctagaaatcatacgcggcaggaccaagcaacatggtcagttttctcttgcagtcgtcagcctgaacataacatccttgggattacgctccctcaaggagataagtgatggagatgtgataatttcaggaaacaaaaatttgtgctatgcaaatacaataaactggaaaaaactgtttgggacctccggtcagaaaaccaaaattataagcaacagaggtgaaaacagctgcaaggccacaggccaggtctgccatgccttgtgctcccccgagggctgctggggcccggagcccagggactgcgtctcttgccggaatgtcagccgaggcagggaatgcgtggacaagtgcaaccttctggagggtgagccaagggagtttgtggagaactctgagtgcatacagtgccacccagagtgcctgcctcaggccatgaacatcacctgcacaggacggggaccagacaactgtatccagtgtgcccactacattgacggcccccactgcgtcaagacctgcccggcaggagtcatgggagaaaacaacaccctggtctggaagtacgcagacgccggccatgtgtgccacctgtgccatccaaactgcacctacggatgcactgggccaggtcttgaaggctgtccaacgaatgggcctaagatcccgtccatcgccactgggatggtgggggccctcctcttgctgctggtggtggccctggggatcggcctcttcatgcgaaggcgccacatcgttcggaagcgcacgctgcggaggctgctgcaggagagggagcttgtggagcctcttacacccagtggagaagctcccaaccaagctctcttgaggatcttgaaggaaactgaattcaaaaagatcaaagtgctgggctccggtgcgttcggcacggtgtataagggactctggatcccagaaggtgagaaagttaaaattcccgtcgctatcaaggaattaagagaagcaacatctccgaaagccaacaaggaaatcctcgatgaagcctacgtgatggccagcgtggacaacccccacgtgtgccgcctgctgggcatctgcctcacctccaccgtgcagctcatcacgcagctcatgcccttcggctgcctcctggactatgtccgggaacacaaagacaatattggctcccagtacctgctcaactggtgtgtgcagatcgcaaagggcatgaactacttggaggaccgtcgcttggtgcaccgcgacctggcagccaggaacgtactggtgaaaacaccgcagcatgtcaagatcacagattttgggctggccaaactgctgggtgcggaagagaaagaataccatgcagaaggaggcaaagtgcctatcaagtggatggcattggaatcaattttacacagaatctatacccaccagagtgatgtctggagctacggggtgactgtttgggagttgatgacctttggatccaagccatatgacggaatccctgccagcgagatctcctccatcctggagaaaggagaacgcctccctcagccacccatatgtaccatcgatgtctacatgatcatggtcaagtgctggatgatagacgcagatagtcgcccaaagttccgtgagttgatcatcgaattctccaaaatggcccgagacccccagcgctaccttgtcattcagggggatgaaagaatgcatttgccaagtcctacagactccaacttctaccgtgccctgatggatgaagaagacatggacgacgtggtggatgccgacgagtacctcatcccacagcagggcttcttcagcagcccctccacgtcacggactcccctcctgagctctctgagtgcaaccagcaacaattccaccgtggcttgcattgatagaaatgggctgcaaagctgtcccatcaaggaagacagcttcttgcagcgatacagctcagaccccacaggcgccttgactgaggacagcatagacgacaccttcctcccagtgcctgaatacataaaccagtccgttcccaaaaggcccgctggctctgtgcagaatcctgtctatcacaatcagcctctgaaccccgcgcccagcagagacccacactaccaggacccccacagcactgcagtgggcaaccccgagtatctcaacactgtccagcccacctgtgtcaacagcacattcgacagccctgcccactgggcccagaaaggcagccaccaaattagcctggacaaccctgactaccagcaggacttctttcccaaggaagccaagccaaatggcatctttaagggctccacagctgaaaatgcagaatacctaagggtcgcgccacaaagcagtgaatttattggagcatgaccacggaggatagtatgagccctaaaaatccagactctttcgatacccaggaccaagccacagcaggtcctccatcccaacagccatgcccgcattagctcttagacccacagactggttttgcaacgtttacaccgactagccaggaagtacttccacctcgggcacattttgggaagttgcattcctttgtcttcaaactgtgaagcatttacagaaacgcatccagcaagaatattgtccctttgagcagaaatttatctttcaaagaggtatatttgaaaaaaaaaaaaagtatatgtgaggatttttattgattggggatcttggagtttttcattgtcgctattgatttttacttcaatgggctcttccaacaaggaagaagcttgctggtagcacttgctaccctgagttcatccaggcccaactgtgagcaaggagcacaagccacaagtcttccagaggatgcttgattccagtggttctgcttcaaggcttccactgcaaaacactaaagatccaagaaggccttcatggccccagcaggccggatcggtactgtatcaagtcatggcaggtacagtaggataagccactctgtcccttcctgggcaaagaagaaacggaggggatggaattcttccttagacttacttttgtaaaaatgtccccacggtacttactccccactgatggaccagtggtttccagtcatgagcgttagactgacttgtttgtcttccattccattgttttgaaactcagtatgctgcccctgtcttgctgtcatgaaatcagcaagagaggatgacacatcaaataataactcggattccagcccacattggattcatcagcatttggaccaatagcccacagctgagaatgtggaatacctaaggatagcaccgcttttgttctcgcaaaaacgtatctcctaatttgaggctcagatgaaatgcatcaggtcctttggggcatagatcagaagactacaaaaatgaagctgctctgaaatctcctttagccatcaccccaaccccccaaaattagtttgtgttacttatggaagatagttttctccttttacttcacttcaaaagctttttactcaaagagtatatgttccctccaggtcagctgcccccaaaccccctccttacgctttgtcacacaaaaagtgtctctgccttgagtcatctattcaagcacttacagctctggccacaacagggcattttacaggtgcgaatgacagtagcattatgagtagtgtggaattcaggtagtaaatatgaaactagggtttgaaattgataatgctttcacaacatttgcagatgttttagaaggaaaaaagttccttcctaaaataatttctctacaattggaagattggaagattcagctagttaggagcccaccttttttcctaatctgtgtgtgccctgtaacctgactggttaacagcagtcctttgtaaacagtgttttaaactctcctagtcaatatccaccccatccaatttatcaaggaagaaatggttcagaaaatattttcagcctacagttatgttcagtcacacacacatacaaaatgttccttttgcttttaaagtaatttttgactcccagatcagtcagagcccctacagcattgttaagaaagtatttgatttttgtctcaatgaaaataaaactatattcatttccactct

SEQ ID NO: 154137 - DNA, 2529 bp, Artificial Sequence
  derived and/or modified sequence
gccccggcggccgccgccgcccagaccggacgacaggccacctcgtcggcgtccgcccgagtccccgcctcgccgccaacgccacaaccaccgcgcacggccccctgactccgtccagtattgatcgggagagccggagcgagctcttcggggagcagcgatgcgaccctccgggacggccggggcagcgctcctggcgctgctggctgcgctctgcccggcgagtcgggctctggaggaaaagaaagtttgccaaggcacgagtaacaagctcacgcagttgggcacttttgaagatcattttctcagcctccagaggatgttcaataactgtgaggtggtccttgggaatttggaaattacctatgtgcagaggaattatgatctttccttcttaaagaccatccaggaggtggctggttatgtcctcattgccctcaacacagtggagcgaattcctttggaaaacctgcagatcatcagaggaaatatgtactacgaaaattcctatgccttagcagtcttatctaactatgatgcaaataaaaccggactgaaggagctgcccatgagaaatttacaggaaatcctgcatggcgccgtgcggttcagcaacaaccctgccctgtgcaacgtggagagcatccagtggcgggacatagtcagcagtgactttctcagcaacatgtcgatggacttccagaaccacctgggcagctgccaaaagtgtgatccaagctgtcccaatgggagctgctggggtgcaggagaggagaactgccagaaactgaccaaaatcatctgtgcccagcagtgctccgggcgctgccgtggcaagtcccccagtgactgctgccacaaccagtgtgctgcaggctgcacaggcccccgggagagcgactgcctggtctgccgcaaattccgagacgaagccacgtgcaaggacacctgccccccactcatgctctacaaccccaccacgtaccagatggatgtgaaccccgagggcaaatacagctttggtgccacctgcgtgaagaagtgtccccgtaattatgtggtgacagatcacggctcgtgcgtccgagcctgtggggccgacagctatgagatggaggaagacggcgtccgcaagtgtaagaagtgcgaagggccttgccgcaaagtgtgtaacggaataggtattggtgaatttaaagactcactctccataaatgctacgaatattaaacacttcaaaaactgcacctccatcagtggcgatctccacatcctgccggtggcatttaggggtgactccttcacacatactcctcctctggatccacaggaactggatattctgaaaaccgtaaaggaaatcacagggtttttgctgattcaggcttggcctgaaaacaggacggacctccatgcctttgagaacctagaaatcatacgcggcaggaccaagcaacatggtcagttttctcttgcagtcgtcagcctgaacataacatccttgggattacgctccctcaaggagataagtgatggagatgtgataatttcaggaaacaaaaatttgtgctatgcaaatacaataaactggaaaaaactgtttgggacctccggtcagaaaaccaaaattataagcaacagaggtgaaaacagctgcaaggccacaggccaggtctgccatgccttgtgctcccccgagggctgctggggcccggagcccagggactgcgtctcttgccggaatgtcagccgaggcagggaatgcgtggacaagtgcaaccttctggagggtgagccaagggagtttgtggagaactctgagtgcatacagtgccacccagagtgcctgcctcaggccatgaacatcacctgcacaggacggggaccagacaactgtatccagtgtgcccactacattgacggcccccactgcgtcaagacctgcccggcaggagtcatgggagaaaacaacaccctggtctggaagtacgcagacgccggccatgtgtgccacctgtgccatccaaactgcacctacggatgcactgggccaggtcttgaaggctgtccaacgaatggaagctacatagtgtctcactttccaagatcattctacaagatgtcagtgcactgaaacatgcaggggcgtgttgagtgccaaggatcttgacaagttgttttgaagatggcattttgctaagtccctgagggtcactggtcctcaaagcggcatggcggcatggcgtggctggttctgccacatgccagctgtgtgacctctgagactccacttcttcagtgctgaaaataaagaaggagttttactaaggaccaaacaagataatgaatgtgaaactgctccacgaaccccaaagaattatgcacatagatgcgatcattaagatgcgaagccatcgagttaccacctggcatgcttaaactgtaaagagtgggtcaaagtaaactgaattggaaaatccaaagttatgcagaaaaacaataaagaggtcttacgtagcaataccgaac

SEQ ID NO: 154138 - DNA, 3938 bp, Artificial Sequence
  derived and/or modified sequence
actggacttcagaacaagagggagctctgggctgctggctggttgtgcatttgctgtgggttccctccggcaggcgacctctccgcgctgagaaggttatccggataaccaatttgccaaggcacgagtaacaagctcacgcagttgggcacttttgaagatcattttctcagcctccagaggatgttcaataactgtgaggtggtccttgggaatttggaaattacctatgtgcagaggaattatgatctttccttcttaaagaccatccaggaggtggctggttatgtcctcattgccctcaacacagtggagcgaattcctttggaaaacctgcagatcatcagaggaaatatgtactacgaaaattcctatgccttagcagtcttatctaactatgatgcaaataaaaccggactgaaggagctgcccatgagaaatttacaggaaatcctgcatggcgccgtgcggttcagcaacaaccctgccctgtgcaacgtggagagcatccagtggcgggacatagtcagcagtgactttctcagcaacatgtcgatggacttccagaaccacctgggcagctgccaaaagtgtgatccaagctgtcccaatgggagctgctggggtgcaggagaggagaactgccagaaactgaccaaaatcatctgtgcccagcagtgctccgggcgctgccgtggcaagtcccccagtgactgctgccacaaccagtgtgctgcaggctgcacaggcccccgggagagcgactgcctggtctgccgcaaattccgagacgaagccacgtgcaaggacacctgccccccactcatgctctacaaccccaccacgtaccagatggatgtgaaccccgagggcaaatacagctttggtgccacctgcgtgaagaagtgtccccgtaattatgtggtgacagatcacggctcgtgcgtccgagcctgtggggccgacagctatgagatggaggaagacggcgtccgcaagtgtaagaagtgcgaagggccttgccgcaaagtgtgtaacggaataggtattggtgaatttaaagactcactctccataaatgctacgaatattaaacacttcaaaaactgcacctccatcagtggcgatctccacatcctgccggtggcatttaggggtgactccttcacacatactcctcctctggatccacaggaactggatattctgaaaaccgtaaaggaaatcacagggtttttgctgattcaggcttggcctgaaaacaggacggacctccatgcctttgagaacctagaaatcatacgcggcaggaccaagcaacatggtcagttttctcttgcagtcgtcagcctgaacataacatccttgggattacgctccctcaaggagataagtgatggagatgtgataatttcaggaaacaaaaatttgtgctatgcaaatacaataaactggaaaaaactgtttgggacctccggtcagaaaaccaaaattataagcaacagaggtgaaaacagctgcaaggccacaggccaggtctgccatgccttgtgctcccccgagggctgctggggcccggagcccagggactgcgtctcttgccggaatgtcagccgaggcagggaatgcgtggacaagtgcaaccttctggagggtgagccaagggagtttgtggagaactctgagtgcatacagtgccacccagagtgcctgcctcaggccatgaacatcacctgcacaggacggggaccagacaactgtatccagtgtgcccactacattgacggcccccactgcgtcaagacctgcccggcaggagtcatgggagaaaacaacaccctggtctggaagtacgcagacgccggccatgtgtgccacctgtgccatccaaactgcacctacggatgcactgggccaggtcttgaaggctgtccaacgaatgggcctaagatcccgtccatcgccactgggatggtgggggccctcctcttgctgctggtggtggccctggggatcggcctcttcatgcgaaggcgccacatcgttcggaagcgcacgctgcggaggctgctgcaggagagggagcttgtggagcctcttacacccagtggagaagctcccaaccaagctctcttgaggatcttgaaggaaactgaattcaaaaagatcaaagtgctgggctccggtgcgttcggcacggtgtataagggactctggatcccagaaggtgagaaagttaaaattcccgtcgctatcaaggaattaagagaagcaacatctccgaaagccaacaaggaaatcctcgatgaagcctacgtgatggccagcgtggacaacccccacgtgtgccgcctgctgggcatctgcctcacctccaccgtgcagctcatcacgcagctcatgcccttcggctgcctcctggactatgtccgggaacacaaagacaatattggctcccagtacctgctcaactggtgtgtgcagatcgcaaagggcatgaactacttggaggaccgtcgcttggtgcaccgcgacctggcagccaggaacgtactggtgaaaacaccgcagcatgtcaagatcacagattttgggctggccaaactgctgggtgcggaagagaaagaataccatgcagaaggaggcaaagtgcctatcaagtggatggcattggaatcaattttacacagaatctatacccaccagagtgatgtctggagctacggggtgactgtttgggagttgatgacctttggatccaagccatatgacggaatccctgccagcgagatctcctccatcctggagaaaggagaacgcctccctcagccacccatatgtaccatcgatgtctacatgatcatggtcaagtgctggatgatagacgcagatagtcgcccaaagttccgtgagttgatcatcgaattctccaaaatggcccgagacccccagcgctaccttgtcattcagggggatgaaagaatgcatttgccaagtcctacagactccaacttctaccgtgccctgatggatgaagaagacatggacgacgtggtggatgccgacgagtacctcatcccacagcagggcttcttcagcagcccctccacgtcacggactcccctcctgagctctctgagtgcaaccagcaacaattccaccgtggcttgcattgatagaaatgggctgcaaagctgtcccatcaaggaagacagcttcttgcagcgatacagctcagaccccacaggcgccttgactgaggacagcatagacgacaccttcctcccagtgcctgaatacataaaccagtccgttcccaaaaggcccgctggctctgtgcagaatcctgtctatcacaatcagcctctgaaccccgcgcccagcagagacccacactaccaggacccccacagcactgcagtgggcaaccccgagtatctcaacactgtccagcccacctgtgtcaacagcacattcgacagccctgcccactgggcccagaaaggcagccaccaaattagcctggacaaccctgactaccagcaggacttctttcccaaggaagccaagccaaatggcatctttaagggctccacagctgaaaatgcagaatacctaagggtcgcgccacaaagcagtgaatttattggagcatgaccacggaggatagtatgagccctaaaaatccagactctttcgatacccaggaccaagccacagcaggtcctccatcccaacagccatgcccgcattagctcttagacccacagactggttttgcaacgtttacaccgactagccaggaagtacttccacctcgggcacattttgggaagttgcattcctttgtcttcaaactgtgaagcatttacagaaacgcatccagcaagaatattgtccctttgagcagaaatttatctttcaaagaggtatatttg

SEQ ID NO: 154139 - DNA, 3844 bp, Artificial Sequence
  derived and/or modified sequence
gtccgggcagcccccggcgcagcgcggccgcagcagcctccgccccccgcacggtgtgagcgcccgacgcggccgaggcggccggagtcccgagctagccccggcggccgccgccgcccagaccggacgacaggccacctcgtcggcgtccgcccgagtccccgcctcgccgccaacgccacaaccaccgcgcacggccccctgactccgtccagtattgatcgggagagccggagcgagctcttcggggagcagcgatgcgaccctccgggacggccggggcagcgctcctggcgctgctggctgcgctctgcccggcgagtcgggctctggaggaaaagaaagtttgccaaggcacgagtaacaagctcacgcagttgggcacttttgaagatcattttctcagcctccagaggatgttcaataactgtgaggtggtccttgggaatttggaaattacctatgtgcagaggaattatgatctttccttcttaaagaccatccaggaggtggctggttatgtcctcattgccctcaacacagtggagcgaattcctttggaaaacctgcagatcatcagaggaaatatgtactacgaaaattcctatgccttagcagtcttatctaactatgatgcaaataaaaccggactgaaggagctgcccatgagaaatttacagggccaaaagtgtgatccaagctgtcccaatgggagctgctggggtgcaggagaggagaactgccagaaactgaccaaaatcatctgtgcccagcagtgctccgggcgctgccgtggcaagtcccccagtgactgctgccacaaccagtgtgctgcaggctgcacaggcccccgggagagcgactgcctggtctgccgcaaattccgagacgaagccacgtgcaaggacacctgccccccactcatgctctacaaccccaccacgtaccagatggatgtgaaccccgagggcaaatacagctttggtgccacctgcgtgaagaagtgtccccgtaattatgtggtgacagatcacggctcgtgcgtccgagcctgtggggccgacagctatgagatggaggaagacggcgtccgcaagtgtaagaagtgcgaagggccttgccgcaaagtgtgtaacggaataggtattggtgaatttaaagactcactctccataaatgctacgaatattaaacacttcaaaaactgcacctccatcagtggcgatctccacatcctgccggtggcatttaggggtgactccttcacacatactcctcctctggatccacaggaactggatattctgaaaaccgtaaaggaaatcacagggtttttgctgattcaggcttggcctgaaaacaggacggacctccatgcctttgagaacctagaaatcatacgcggcaggaccaagcaacatggtcagttttctcttgcagtcgtcagcctgaacataacatccttgggattacgctccctcaaggagataagtgatggagatgtgataatttcaggaaacaaaaatttgtgctatgcaaatacaataaactggaaaaaactgtttgggacctccggtcagaaaaccaaaattataagcaacagaggtgaaaacagctgcaaggccacaggccaggtctgccatgccttgtgctcccccgagggctgctggggcccggagcccagggactgcgtctcttgccggaatgtcagccgaggcagggaatgcgtggacaagtgcaaccttctggagggtgagccaagggagtttgtggagaactctgagtgcatacagtgccacccagagtgcctgcctcaggccatgaacatcacctgcacaggacggggaccagacaactgtatccagtgtgcccactacattgacggcccccactgcgtcaagacctgcccggcaggagtcatgggagaaaacaacaccctggtctggaagtacgcagacgccggccatgtgtgccacctgtgccatccaaactgcacctacggatgcactgggccaggtcttgaaggctgtccaacgaatgggcctaagatcccgtccatcgccactgggatggtgggggccctcctcttgctgctggtggtggccctggggatcggcctcttcatgcgaaggcgccacatcgttcggaagcgcacgctgcggaggctgctgcaggagagggagcttgtggagcctcttacacccagtggagaagctcccaaccaagctctcttgaggatcttgaaggaaactgaattcaaaaagatcaaagtgctgggctccggtgcgttcggcacggtgtataagggactctggatcccagaaggtgagaaagttaaaattcccgtcgctatcaaggaattaagagaagcaacatctccgaaagccaacaaggaaatcctcgatgaagcctacgtgatggccagcgtggacaacccccacgtgtgccgcctgctgggcatctgcctcacctccaccgtgcagctcatcacgcagctcatgcccttcggctgcctcctggactatgtccgggaacacaaagacaatattggctcccagtacctgctcaactggtgtgtgcagatcgcaaagggcatgaactacttggaggaccgtcgcttggtgcaccgcgacctggcagccaggaacgtactggtgaaaacaccgcagcatgtcaagatcacagattttgggctggccaaactgctgggtgcggaagagaaagaataccatgcagaaggaggcaaagtgcctatcaagtggatggcattggaatcaattttacacagaatctatacccaccagagtgatgtctggagctacggggtgactgtttgggagttgatgacctttggatccaagccatatgacggaatccctgccagcgagatctcctccatcctggagaaaggagaacgcctccctcagccacccatatgtaccatcgatgtctacatgatcatggtcaagtgctggatgatagacgcagatagtcgcccaaagttccgtgagttgatcatcgaattctccaaaatggcccgagacccccagcgctaccttgtcattcagggggatgaaagaatgcatttgccaagtcctacagactccaacttctaccgtgccctgatggatgaagaagacatggacgacgtggtggatgccgacgagtacctcatcccacagcagggcttcttcagcagcccctccacgtcacggactcccctcctgagctctctgagtgcaaccagcaacaattccaccgtggcttgcattgatagaaatgggctgcaaagctgtcccatcaaggaagacagcttcttgcagcgatacagctcagaccccacaggcgccttgactgaggacagcatagacgacaccttcctcccagtgcctggtgagtggcttgtctggaaacagtcctgctcctcaacctcctcgacccactcagcagcagccagtctccagtgtccaagccaggtgctccctccagcatctccagagggggaaacagtggcagatttgcagacacagtgaagggcgtaaggagcagataaacacatgaccgagcctgcacaagctctttgttgtgtctggttgtttgctgtacctctgttgtaagaatgaatctgcaaaatttctagcttatgaagcaaatcacggacatacacatctgtgtgtgtgagtgttcatgatgtgtgtacatctgtgtatgtgtgtgtgtgtatgtgtgtgtttgtgacagatttgatccctgttctctctgctggctctatcttgacctgtgaaacgtatatttaactaattaaatattagttaatattaataaattttaagctttatccaga

SEQ ID NO: 154140 - DNA, 4735 bp, Artificial Sequence
  derived and/or modified sequence
atgagttctctgaccaaaatcatctgtgcccagcagtgctccgggcgctgccgtggcaagtcccccagtgactgctgccacaaccagtgtgctgcaggctgcacaggcccccgggagagcgactgcctggtctgccgcaaattccgagacgaagccacgtgcaaggacacctgccccccactcatgctctacaaccccaccacgtaccagatggatgtgaaccccgagggcaaatacagctttggtgccacctgcgtgaagaagtgtccccgtaattatgtggtgacagatcacggctcgtgcgtccgagcctgtggggccgacagctatgagatggaggaagacggcgtccgcaagtgtaagaagtgcgaagggccttgccgcaaagtgtgtaacggaataggtattggtgaatttaaagactcactctccataaatgctacgaatattaaacacttcaaaaactgcacctccatcagtggcgatctccacatcctgccggtggcatttaggggtgactccttcacacatactcctcctctggatccacaggaactggatattctgaaaaccgtaaaggaaatcacagggtttttgctgattcaggcttggcctgaaaacaggacggacctccatgcctttgagaacctagaaatcatacgcggcaggaccaagcaacatggtcagttttctcttgcagtcgtcagcctgaacataacatccttgggattacgctccctcaaggagataagtgatggagatgtgataatttcaggaaacaaaaatttgtgctatgcaaatacaataaactggaaaaaactgtttgggacctccggtcagaaaaccaaaattataagcaacagaggtgaaaacagctgcaaggccacaggccaggtctgccatgccttgtgctcccccgagggctgctggggcccggagcccagggactgcgtctcttgccggaatgtcagccgaggcagggaatgcgtggacaagtgcaaccttctggagggtgagccaagggagtttgtggagaactctgagtgcatacagtgccacccagagtgcctgcctcaggccatgaacatcacctgcacaggacggggaccagacaactgtatccagtgtgcccactacattgacggcccccactgcgtcaagacctgcccggcaggagtcatgggagaaaacaacaccctggtctggaagtacgcagacgccggccatgtgtgccacctgtgccatccaaactgcacctacggatgcactgggccaggtcttgaaggctgtccaacgaatgggcctaagatcccgtccatcgccactgggatggtgggggccctcctcttgctgctggtggtggccctggggatcggcctcttcatgcgaaggcgccacatcgttcggaagcgcacgctgcggaggctgctgcaggagagggagcttgtggagcctcttacacccagtggagaagctcccaaccaagctctcttgaggatcttgaaggaaactgaattcaaaaagatcaaagtgctgggctccggtgcgttcggcacggtgtataagggactctggatcccagaaggtgagaaagttaaaattcccgtcgctatcaaggaattaagagaagcaacatctccgaaagccaacaaggaaatcctcgatgaagcctacgtgatggccagcgtggacaacccccacgtgtgccgcctgctgggcatctgcctcacctccaccgtgcagctcatcacgcagctcatgcccttcggctgcctcctggactatgtccgggaacacaaagacaatattggctcccagtacctgctcaactggtgtgtgcagatcgcaaagggcatgaactacttggaggaccgtcgcttggtgcaccgcgacctggcagccaggaacgtactggtgaaaacaccgcagcatgtcaagatcacagattttgggctggccaaactgctgggtgcggaagagaaagaataccatgcagaaggaggcaaagtgcctatcaagtggatggcattggaatcaattttacacagaatctatacccaccagagtgatgtctggagctacggggtgactgtttgggagttgatgacctttggatccaagccatatgacggaatccctgccagcgagatctcctccatcctggagaaaggagaacgcctccctcagccacccatatgtaccatcgatgtctacatgatcatggtcaagtgctggatgatagacgcagatagtcgcccaaagttccgtgagttgatcatcgaattctccaaaatggcccgagacccccagcgctaccttgtcattcagggggatgaaagaatgcatttgccaagtcctacagactccaacttctaccgtgccctgatggatgaagaagacatggacgacgtggtggatgccgacgagtacctcatcccacagcagggcttcttcagcagcccctccacgtcacggactcccctcctgagctctctgagtgcaaccagcaacaattccaccgtggcttgcattgatagaaatgggctgcaaagctgtcccatcaaggaagacagcttcttgcagcgatacagctcagaccccacaggcgccttgactgaggacagcatagacgacaccttcctcccagtgcctgaatacataaaccagtccgttcccaaaaggcccgctggctctgtgcagaatcctgtctatcacaatcagcctctgaaccccgcgcccagcagagacccacactaccaggacccccacagcactgcagtgggcaaccccgagtatctcaacactgtccagcccacctgtgtcaacagcacattcgacagccctgcccactgggcccagaaaggcagccaccaaattagcctggacaaccctgactaccagcaggacttctttcccaaggaagccaagccaaatggcatctttaagggctccacagctgaaaatgcagaatacctaagggtcgcgccacaaagcagtgaatttattggagcatgaccacggaggatagtatgagccctaaaaatccagactctttcgatacccaggaccaagccacagcaggtcctccatcccaacagccatgcccgcattagctcttagacccacagactggttttgcaacgtttacaccgactagccaggaagtacttccacctcgggcacattttgggaagttgcattcctttgtcttcaaactgtgaagcatttacagaaacgcatccagcaagaatattgtccctttgagcagaaatttatctttcaaagaggtatatttgaaaaaaaaaaaaagtatatgtgaggatttttattgattggggatcttggagtttttcattgtcgctattgatttttacttcaatgggctcttccaacaaggaagaagcttgctggtagcacttgctaccctgagttcatccaggcccaactgtgagcaaggagcacaagccacaagtcttccagaggatgcttgattccagtggttctgcttcaaggcttccactgcaaaacactaaagatccaagaaggccttcatggccccagcaggccggatcggtactgtatcaagtcatggcaggtacagtaggataagccactctgtcccttcctgggcaaagaagaaacggaggggatggaattcttccttagacttacttttgtaaaaatgtccccacggtacttactccccactgatggaccagtggtttccagtcatgagcgttagactgacttgtttgtcttccattccattgttttgaaactcagtatgctgcccctgtcttgctgtcatgaaatcagcaagagaggatgacacatcaaataataactcggattccagcccacattggattcatcagcatttggaccaatagcccacagctgagaatgtggaatacctaaggatagcaccgcttttgttctcgcaaaaacgtatctcctaatttgaggctcagatgaaatgcatcaggtcctttggggcatagatcagaagactacaaaaatgaagctgctctgaaatctcctttagccatcaccccaaccccccaaaattagtttgtgttacttatggaagatagttttctccttttacttcacttcaaaagctttttactcaaagagtatatgttccctccaggtcagctgcccccaaaccccctccttacgctttgtcacacaaaaagtgtctctgccttgagtcatctattcaagcacttacagctctggccacaacagggcattttacaggtgcgaatgacagtagcattatgagtagtgtggaattcaggtagtaaatatgaaactagggtttgaaattgataatgctttcacaacatttgcagatgttttagaaggaaaaaagttccttcctaaaataatttctctacaattggaagattggaagattcagctagttaggagcccaccttttttcctaatctgtgtgtgccctgtaacctgactggttaacagcagtcctttgtaaacagtgttttaaactctcctagtcaatatccaccccatccaatttatcaaggaagaaatggttcagaaaatattttcagcctacagttatgttcagtcacacacacatacaaaatgttccttttgcttttaaagtaatttttgactcccagatcagtcagagcccctacagcattgttaagaaagtatttgatttttgtctcaatgaaaataaaactatattcatttccactct

SEQ ID NO: 154141 - DNA, 3633 bp, Artificial Sequence
  derived and/or modified sequence
atgcgcccaagtggaacagctggcgccgcccttctggcattgctagctgctttgtgccctgcctccagagccctggaggaaaagaaggtgtgccagggcacatccaataaattgacacagctcgggactttcgaagaccatttcttgtcactgcagcgcatgtttaataattgcgaggttgtgctgggaaacctggagatcacctacgtgcagagaaattatgacctgagcttcctcaaaactatacaagaagttgccggatatgtgctgattgccttgaacacagttgagcgtattcccctggagaatctgcagatcatacggggcaacatgtattacgagaatagctatgcgctggcggtgctatccaactatgatgctaataaaacaggactaaaggagctgccgatgcgcaacctgcaggagattctgcacggtgctgtgagatttagcaacaacccagccctttgtaatgtggaaagtattcagtggcgtgatattgtgagctctgattttttatctaatatgtctatggatttccagaatcatctaggcagctgccagaaatgcgacccgtcttgccccaacggtagctgttggggagccggagaagagaattgccagaaattgaccaagattatatgcgcccaacagtgctcagggaggtgccgtggcaaatccccttccgactgctgtcacaaccagtgcgctgccgggtgtacaggcccaagggaatccgattgcctagtatgtcgcaagttcagggacgaagctacttgtaaggatacatgccccccactgatgctgtataatccaaccacctaccagatggacgtgaatcctgaggggaagtactcattcggcgccacctgcgtgaaaaagtgcccaaggaattatgtggtgacggaccatgggtcgtgtgtgcgagcctgcggggccgacagttatgagatggaagaggatggcgtgagaaagtgtaagaagtgtgaggggccctgccgaaaagtatgcaatggcatcgggattggcgagtttaaagactctctgtctatcaacgcaacaaatattaaacacttcaagaactgtacatctatttctggagacctgcacattctgccagtcgccttcagaggcgactcttttacccatacaccgcccttggatccgcaggagttagacatcctcaaaactgtcaaagagatcaccggattcctgctaatccaggcctggcccgagaaccgaactgatctgcacgcttttgagaatttggagattattagaggcagaacaaaacaacatgggcagttcagtctggccgtcgtgagtctcaacatcactagcctcggcctgagatctttgaaagaaatctccgatggggacgtgatcatttctggcaacaaaaatctgtgttatgccaacaccatcaactggaaaaagctgtttggcaccagcggtcagaaaaccaagatcatatcaaatcggggcgagaactcctgcaaagctactggacaggtgtgccacgccctgtgctcaccagaaggatgttgggggcccgaaccacgggactgtgtgtcttgtcggaacgtctccaggggccgggagtgtgtcgataagtgcaatctgctggagggcgaacctcgggagttcgtggagaacagcgagtgtatccagtgtcaccccgagtgtctgcctcaggccatgaacatcacctgtacagggagaggacctgataattgcatccaatgtgctcattacatagatggtccacactgcgtaaaaacctgccctgccggcgtgatgggagagaataacactctggtatggaagtatgcggacgccggacatgtgtgccatctttgccatccaaattgcacctacggttgcacaggcccaggactcgaaggctgtcctacaaatggcccaaagatcccttctattgccactggcatggtgggcgcactgttactcctcctggttgtggctttggggattgggctgttcatgcgccggcgccatatcgttcggaaacggactctgcggcgtctcctgcaagaaagagagttagtggagccccttacccctagtggggaggcgccaaatcaggccctcctgcgcatcctgaaagagaccgagtttaaaaagatcaaagtactcggcagtggtgctttcggcaccgtttacaaggggctatggatccctgaaggagagaaagtcaaaatacccgtcgccatcaaagaactgcgcgaggcaacctctcccaaggcgaacaaagaaattttggacgaggcgtacgtcatggcctcagtcgacaatccccacgtctgtaggcttctaggaatctgcctcacttcgacagttcagctcatcactcagctgatgccctttgggtgcctcctcgactatgtgcgcgagcacaaggacaatatcgggtcacagtacttgctgaattggtgcgtgcaaatcgccaagggaatgaactacctggaggaccggcgcctagttcaccgcgatcttgcagcccggaacgtgcttgtgaagacaccccagcatgttaagatcacagatttcggcctggccaagctgctgggagcagaagaaaaagaataccatgctgaagggggaaaagtgcccataaagtggatggctctggagtctattctgcacaggatctacacccaccagagcgatgtctggagctatggtgtcaccgtttgggagctgatgactttcgggtccaaaccttatgacgggattccagcctcagagatcagctcgatattagagaaaggagagagactcccccagcctccaatctgcaccatcgacgtgtatatgattatggtcaagtgttggatgatcgacgccgactctcggccaaagtttagggagttgatcatcgaattttccaaaatggctcgggacccgcaaaggtacctggtcattcagggggacgagcggatgcacctgccatcaccaactgacagtaatttttatcgagcactgatggacgaggaggatatggacgacgttgtcgacgccgatgagtacctgattccacaacagggatttttcagctcaccatcaacaagtaggacaccattgttgtcatccctctctgcaacatccaataatagtaccgtggcgtgtatagatcgaaatggccttcaatcctgccctattaaggaggattctttcctgcaacgatattccagtgacccaaccggagcactgacggaggactctatcgatgacacctttctgcccgtacccgagtacatcaatcagtcggtgccgaagcggcccgccggcagcgttcagaaccccgtgtatcacaaccagccactgaatcctgccccttccagggatccacactaccaggacccgcattctacagctgttggaaaccccgaatatttaaacaccgttcaacccacctgcgtaaattccacatttgacagccctgctcactgggcccaaaagggctcacaccagatctccctggataacccagattaccaacaggatttcttccccaaggaggccaaacccaacggcatattcaagggatcgaccgccgagaacgctgaatatctgagggttgccccccagtcttctgagtttattggagcgtag

SEQ ID NO: 154142 - DNA, 3243 bp, Artificial Sequence
  derived and/or modified sequence
aaccgcaccgagggagcagcccatgaaaagtttacgggtaaccccgcctggcggcgcgctgtacagcaacaaccgtgtccggttgtggagtctattcaatggagggatatagtttcaagcgattttctgagcaacatgtccatggattttcaaaaccacctaggatcttgccagaagtgtgatccatcctgccccaatggaagttgctggggcgcgggagaagaaaactgccagaagctcaccaagattatttgtgcccagcagtgtagtgggcgatgtcggggaaaatctcccagtgattgctgtcacaaccagtgcgccgcaggctgtactggccctcgtgaatctgattgtctggtttgccggaagtttagggatgaagccacttgtaaggacacctgccctccactgatgctgtataacccaactacgtatcagatggacgttaatcctgaggggaagtactctttcggtgccacatgtgtgaagaagtgccctcgcaactacgtagtcacggaccatggaagctgcgtccgggcctgcggagccgattcctatgaaatggaggaggacggggtccgaaaatgtaaaaagtgcgaagggccctgtcggaaggtttgtaatggaattgggattggagagttcaaggattcactgtcaatcaatgccacaaacattaaacattttaaaaactgcacctcaatttccggggatctgcatatcctccctgttgcatttaggggcgatagctttacccacacgccacctttggacccacaggagctggacatccttaagacagtcaaagagattacgggatttctcttaatccaagcctggcctgagaaccgtacggacctgcatgctttcgaaaacctggagataatcagaggtcggacaaaacagcacggccagttctctttggccgtagtgtctctgaatattacatctctcggtttgagaagcctgaaggaaatctcagatggagacgttattatatcaggaaataagaacctgtgctacgctaataccatcaactggaagaagttgttcggcacgtcaggacagaagactaaaatcatatctaaccgtggcgagaattcctgtaaggccaccggacaggtatgtcacgcactgtgtagcccggagggctgctgggggcctgaacccagagactgcgtttcttgtcggaacgtttcgagaggacgcgagtgtgtggacaaatgtaacctccttgaaggggagccccgggagttcgttgaaaatagcgagtgtatccagtgtcaccccgaatgtctgccgcaggctatgaatattacctgcaccggacgcggaccagataattgtatccagtgtgcacactatattgatggaccccactgtgtcaagacgtgccctgccggcgtgatgggagagaacaacacactcgtctggaagtatgctgacgccggacacgtgtgtcatctgtgccatccaaactgcacatatggttgcaccggtccagggctagaggggtgccccacaaatggtcctaaaattcccagcatagctactggaatggtgggcgccctgctgctgttgctggtggtggccctcggaatcggcctgttcatgcgccgtagacacattgtccgcaaaagaacactgagaagactgcttcaggagagggaactggttgaacccttgactccatctggggaggcaccgaatcaagctttgctccgaatccttaaagaaacagaattcaagaaaattaaggtcctcggttctggcgcattcggcaccgtctacaagggactgtggataccagagggagaaaaggttaagattcctgtggccataaaggagctgagagaggcaacctcacctaaggcaaacaaggagatcctagacgaggcttacgtgatggcgtcagtcgacaatcctcacgtctgccgattgttaggcatttgcctgacttccacagtccagctgattacgcaactcatgccatttgggtgtctgttggattatgtgcgggaacacaaagacaacataggttcacaatacctcctgaattggtgcgtgcagattgctaagggaatgaactacctcgaagataggcgtttggtgcacagggaccttgcagcgaggaatgtgctggtgaagaccccacagcacgttaagatcaccgacttcggtctggcaaagttgctgggcgctgaagagaaagaataccacgccgaagggggtaaggtgcctataaagtggatggccctcgagagcatccttcatcgaatatatactcatcagagtgatgtctggagctatggagtgacagtctgggagctcatgacctttgggtcgaaaccttacgacggtatccccgcaagcgagatctcctccatactggaaaagggcgaacggctaccacagccccctatatgtactatcgacgtttatatgattatggttaaatgctggatgatcgatgcagattcacgccccaaatttcgggagctaatcatcgagtttagcaaaatggctagggatcctcaaagatacctggttatccagggtgacgagagaatgcacctccccagcccaaccgattcgaacttctaccgagcgctgatggatgaagaagatatggatgatgttgtagatgcagatgagtatctcatcccacagcagggctttttttcgtcaccatccaccagtaggactcccctcctgtcttcgctatccgccacgtcaaataatagtactgtggcctgtatcgacaggaatggactgcagtcctgtccaattaaggaggactccttcctgcagagatactccagtgatcccacgggagccctcactgaggactcaatagacgatacatttcttccagtcccagaatatatcaatcagtccgtgcccaagcgtcccgccggttcagtgcagaatccagtctatcacaaccagcctctgaatccggcaccttctagagatccacactaccaggatccacacagcaccgctgtgggaaatccggagtacctgaacacagtgcagcccacctgcgtgaattcaacatttgatagtccggcccattgggcccagaagggcagccaccaaatttcacttgataatccagactaccaacaggatttcttccctaaggaggccaagccaaatggtatattcaaggggtctactgccgaaaacgcggagtacctacgcgttgctcctcagagcagtgagtttataggagcttag

SEQ ID NO: 154143 - DNA, 1974 bp, Artificial Sequence
  derived and/or modified sequence
atgcgtccatccggtactgcgggagcagcactcttagcgttgctggcagcactgtgccccgctagcagagctctggaggaaaaaaaggtctgccagggcactagtaataaactgacgcagctgggtactttcgaggaccacttcctcagcttgcagcgcatgttcaacaattgtgaagtcgtgctgggcaacctggaaatcacctacgtccagaggaattatgacctgtcatttttgaaaacaatacaagaagtcgccggttatgtgctgatcgctttgaacacggtggagaggattccattggagaatcttcaaattattcggggcaacatgtactatgagaattcctacgcactggccgtgctgagcaactacgacgccaacaagactgggctgaaggagctacccatgcgtaatcttcaggaaatactccatggagcagtcaggttctccaacaaccctgccttgtgtaacgtggagtcaatccaatggcgggatatcgtgagttcagacttcttgtctaatatgtcaatggatttccagaaccacctgggatcctgccagaagtgcgacccttcctgtcctaacggttcttgctggggggcgggcgaggagaactgccagaagctcactaaaattatatgcgcgcaacagtgttccggaagatgccgcggcaagtcccctagcgactgttgccataatcaatgtgcagcaggctgtacgggaccgcgggaaagcgactgtcttgtgtgccgtaagtttagagacgaagccacatgcaaagatacatgcccccccctgatgctgtacaatccaacgacataccaaatggacgttaatccagagggcaagtactctttcggagcaacctgcgtcaagaagtgcccgcgcaactacgttgttacagaccacgggtcgtgcgtccgggcctgcggagctgatagttacgaaatggaggaagatggagtgagaaagtgcaagaaatgtgagggcccatgtcggaaagtgtgcaacggtatcggcattggagagttcaaagattccctgtccatcaatgctactaacattaaacacttcaagaactgcacctcgatttccggagaccttcatatcctcccagtggccttccggggcgactcctttacacacacccctccattggatccacaagagttggacatcttgaagactgtgaaggagatcacgggtttcctcctgattcaggcctggcctgagaatcggacagatctgcacgcgtttgagaatttggagatcatcagaggacgcacaaagcagcatggccagtttagccttgccgttgttagtctcaatattacatccctggggcttcggtccctgaaagagatttccgacggagacgtgatcatcagcggcaacaagaacctgtgctacgctaacacaataaactggaagaagctctttggcacctccggccaaaaaacaaagataatctccaacaggggagaaaattcttgcaaggccaccggacaagtctgccatgctttatgttccccagaagggtgttgggggcccgaaccaagggactgtgtgtcctgtcgaaatgtgtcaaggggcagagagtgtgtcgataaatgcaatctgcttgagggcgagccacgcgagtttgtggaaaatagcgaatgcatccagtgtcatccagagtgccttccacaagccatgaatattacgtgcacaggcagaggtccggacaactgcatccagtgcgcccactatatagacggtccacattgcgtcaaaacctgtcccgccggagttatgggcgagaacaacacacttgtgtggaagtatgccgacgccgggcatgtgtgtcatctttgtcatcctaactgcacctatggatgtactgggcccgggctggaaggatgccccactaacggctcttacattgtaagtcactttccgcgcagcttctacaagatgtccgtccactag

SEQ ID NO: 154144 - DNA, 3474 bp, Artificial Sequence
  derived and/or modified sequence
atgtttaataattgcgaggtggtcctgggaaatttggaaattacctatgtgcagagaaattacgatctctcattcctaaagaccattcaagaagtagccgggtatgtgctcatagctctgaacaccgtggaaaggattccgcttgaaaacttacagatcattcgtggaaatatgtattatgaaaattcttacgctttagccgttttgtctaattacgatgcaaataaaactgggcttaaagaattgccgatgcgcaacttgcaagaaatattacatggagctgtaagatttagtaacaatcccgccctctgtaatgtcgaaagcatccagtggagggacatagtttcctcagactttctgtctaacatgagtatggattttcagaaccacctcggctcctgtcagaagtgtgatcctagctgccctaatggctcatgttggggagctggcgaagagaattgccagaagcttacaaagatcatctgtgcacagcagtgctccggccggtgccggggtaaaagtccctccgattgctgtcataaccagtgcgccgctggatgcaccggcccacgggagagtgattgccttgtgtgtcggaaatttagggacgaagccacctgtaaggatacctgtcctccactgatgctttataaccccacaacttatcagatggacgtgaatcccgaaggtaagtatagctttggtgccacttgcgtgaagaagtgcccccggaactacgtggtgaccgaccacgggtcttgtgtgcgggcttgtggagctgacagctatgaaatggaagaggacggcgtacgcaaatgtaagaagtgcgaaggcccgtgtcgcaaggtgtgcaatggtatcggaattggcgagttcaaagattcactcagcataaatgcaacaaatatcaagcacttcaagaactgtacgtcaatttcaggcgaccttcatattctccccgtggcttttaggggggatagcttcacccacactcccccgctggaccctcaggaactcgatatcctgaagacagtgaaagagatcacagggtttttactgatccaggcttggcctgagaatcgaactgatctacatgcgtttgaaaacctcgaaatcatcaggggcagaacaaagcagcatggccagttcagccttgccgtggtctcactgaacatcacaagcctggggctccgcagcctaaaggaaatctccgacggcgacgtcattatctcgggcaataaaaatttatgctatgccaacacaattaactggaagaaactttttgggacaagcggacagaaaaccaagatcattagtaaccgaggggaaaacagttgcaaggctacagggcaagtgtgccatgctctatgctcacctgagggctgttgggggccggagccccgagattgcgtgtcctgccggaacgtgtctaggggccgcgaatgcgtagacaaatgtaatctcctagagggcgagcccagggaatttgttgagaacagtgagtgcatacagtgtcacccagaatgtctgccccaggcgatgaatattacttgcaccggccgtggcccggataactgcatccagtgcgctcactacatcgacggcccacactgcgtaaagacttgcccagctggagtgatgggagagaacaacaccctggtatggaagtacgcagacgccggccacgtgtgccacctgtgccacccaaactgtacctatggatgcaccggcccaggactcgagggatgccccaccaatggccccaagattccatcaatagcaacgggcatggtgggcgccttgttgctgcttctggtggtggcacttggcatcggattgtttatgcgcaggcgtcacatcgtgcgaaagagaacactccggaggctattacaagagcgggaactagtggagcccctgaccccaagtggtgaggcgcccaatcaggcactgctgagaatcttgaaagagacagaatttaagaagatcaaagtgctgggatctggtgcatttgggaccgtgtacaagggcctctggattccggagggcgaaaaagtcaagatcccagtagccatcaaggaactgagagaagcaacatcccctaaggccaacaaagagatactggacgaggcttacgtaatggcttcagtcgacaacccacacgtttgtcgactcttgggtatctgtctgacgtctaccgtccagttaataacccagctgatgccattcggctgtctgctggattacgtcagagaacataaggacaacataggatcacaatacctgctgaactggtgcgtgcaaatagccaagggcatgaactacctggaagacagaagattagtccaccgtgatttagccgctcgtaatgtactcgtgaagactccacagcatgtgaaaataacggattttggcctggctaagctgctcggagccgaggaaaaagagtatcacgccgagggcggcaaggtgcccattaagtggatggctctggaaagcattctacatcggatttacactcaccagagcgatgtctggtcgtacggggtcacagtttgggaattaatgacctttggctctaaaccgtacgacggcatccctgctagtgagatttccagtatcctggagaagggcgagagactcccacagcctccaatctgcacgatagacgtatatatgatcatggtgaaatgctggatgattgacgcagacagtcgaccaaaatttcgtgagctcatcatagagttttctaagatggctcgggatccacaaaggtacttagtcatccagggagatgagagaatgcacctgccatccccgaccgactctaatttttaccgagctctgatggatgaggaggatatggacgatgtcgtcgatgctgacgagtacctcatacctcagcagggctttttcagttctcctagtacttcccggactcccttattatccagcctctcagctacgagcaacaatagtaccgtagcatgcatcgatagaaacgggctccaaagctgccccattaaagaggacagctttttgcaaagatattcttcggatcctacaggagcgttgactgaggactctattgatgacacgtttttaccggttcctgagtatatcaaccaatcagtgccaaaacgaccagccggatctgttcagaatccagtgtaccacaatcagcctctcaatccagctccgtctagggacccacactaccaagacccacattccactgccgtggggaaccctgaatacctgaatactgtccagcccacctgtgtgaattctacgttcgactcccctgcccactgggcccagaagggctctcaccagatttcattagacaatcctgattaccagcaggacttctttccaaaggaagcaaagcctaacgggatctttaaaggcagtacagcagagaatgcggagtatctgagggtggctccacagagctcagaattcataggggcttag

SEQ ID NO: 154145 - DNA, 3276 bp, Artificial Sequence
  derived and/or modified sequence
atgagaccaagcggcaccgccggtgctgcgttgctcgctctcctagctgctctatgcccagcctctagggcccttgaagaaaagaaggtgtgccagggtacaagcaacaaacttacccagctgggtacgttcgaagatcacttcctgtcgttacagagaatgttcaacaattgtgaagtggttctcgggaacctcgaaattacatatgtccaacggaattatgacctgtcttttcttaagaccatccaggaggttgccggatacgttctcatagctctgaacaccgtagagcgcatcccccttgagaatttacagattattaggggcaacatgtattatgaaaactcctacgccttggccgttctgtccaactacgacgccaacaaaactggactcaaagaactaccaatgcgcaatttgcagggtcagaagtgcgatccctcttgccctaatggaagctgttggggcgcaggggaggaaaactgtcagaagctcactaaaatcatatgcgctcagcagtgcagcggccggtgcagaggcaagtcccccagcgattgctgtcataaccaatgcgcagccgggtgtaccggaccacgggaaagcgactgcttggtgtgtcgcaagtttagagacgaggctacatgtaaagatacatgccccccattaatgctgtacaatcccaccacctaccagatggacgtgaatccagaggggaagtactcgtttggggcaacttgcgtgaaaaagtgcccaaggaactacgtggtcacggaccatgggagctgcgttcgcgcctgcggtgcagactcatacgaaatggaagaggatggggtcagaaagtgtaaaaagtgcgagggcccatgccgtaaagtttgcaacggaatcgggatcggagagttcaaagattctttatctattaacgctacgaatatcaagcacttcaagaattgtacatccatcagtggtgacctgcacattttgcctgtggcattccggggtgattctttcacacatacacccccactggatcctcaagagctggacatcctcaaaaccgtgaaggaaatcactggattcctactaatccaggcctggcccgagaatagaactgatttgcatgcgtttgaaaacttagagatcattcgcggacgcacaaagcagcatgggcaattctctcttgctgtggttagtctgaacataacaagtctgggtctccggagcctgaaagagatctctgatggtgacgtcatcatatcaggcaacaagaacttatgttatgccaatactattaattggaaaaaactcttcggcacatcaggccagaagactaagatcatttccaatcgcggcgagaacagctgtaaagcaaccggccaggtgtgtcacgcactgtgttcacccgaaggctgctgggggccagaaccaagggactgtgtgagctgcagaaatgtgagccggggccgcgagtgcgtggataaatgtaatctcctggagggagagcctcgggagtttgtggagaattcggaatgcatccagtgtcatccggagtgtctgccccaggccatgaacattacctgcactggaagagggccagacaactgtattcagtgtgctcactacatcgatggtccacattgcgtgaaaacctgcccggccggggtgatgggtgagaacaacaccctggtctggaaatacgctgatgcaggacacgtttgccacctctgccatccgaattgcacctacggatgcactgggcccggccttgagggttgtcccacgaacggccctaagattcccagtatcgccacagggatggtgggagccctgctgctactgctcgttgtggcgctgggcatcgggctgtttatgaggcgccgtcacatcgtgcgcaagagaacccttcgccgcctcctgcaggagcgggagcttgtagaacccttaaccccctccggggaggctcctaatcaggcgctcttgagaatactaaaggagactgaatttaagaaaattaaggttctcggatcgggagccttcgggaccgtgtacaagggcctgtggataccagagggggagaaagtgaaaatccccgtggcaattaaagagctccgggaagcgaccagtcctaaggcaaataaggagatccttgatgaggcatatgtgatggccagcgtagacaatcctcacgtgtgcagactgctgggaatttgtctcaccagcaccgtgcagctgatcacccaactcatgcccttcggttgtttgctggactatgtgagggagcataaggacaatattggctctcagtatctcctgaattggtgtgttcagatcgcaaaaggaatgaattatctggaggaccgacgactcgtgcaccgtgacctcgctgcaagaaatgttctggttaagaccccccagcacgttaagataaccgattttggactggctaaacttctcggggctgaggaaaaagaataccacgccgaaggcggtaaggtgcctatcaagtggatggcactcgaatctatcctgcaccggatttacacacatcagagtgacgtctggtcctatggtgtgaccgtctgggaacttatgacctttggatcaaagccatatgatggcatcccggcatcagagatctcatctatcctggagaagggcgagcgcctccctcaacctccaatatgcacaattgacgtttatatgataatggtgaaatgctggatgatcgatgctgattctagaccaaagtttcgcgaactgattattgagtttagcaagatggctagagatccccagcgatacttggtaatacaaggtgacgaaaggatgcacctgccatcccccacagatagcaatttttatagagctctgatggacgaagaggatatggatgatgtggtcgatgccgatgaatatttgatcccccagcaaggcttcttttctagtccctccacctcacgtacacctctgctgtcatccctctctgccacaagcaataattctaccgtggcttgcattgaccggaatggcctccagtcttgtccaataaaagaggatagcttcctgcagcgctattccagtgaccccaccggcgcactgaccgaagactctattgacgacaccttcctgcccgtcccaggtgagtggctggtctggaaacaatcctgctcatcaaccagctccactcattctgccgccgcatctctgcaatgccccagtcaggtgctcccacctgcttctccagagggcgaaacagtggcagatctacagacccaatag

SEQ ID NO: 154146 - DNA, 1395 bp, Artificial Sequence
  derived and/or modified sequence
atgtcaagtctcacgaaaattatctgtgcccagcagtgcagtggtagatgtagggggaaatctcccagcgactgttgtcacaaccagtgcgccgcaggatgcaccgggccaagagaaagcgattgcttggtctgtcgaaagttccgtgacgaggcaacgtgcaaggacacctgccctccacttatgttatacaatcccacaacctaccagatggatgtgaaccccgaagggaaatactcgtttggggctacctgcgttaagaaatgcccacggaactacgtggtcaccgaccatgggagttgcgtccgagcctgcggtgccgattcttacgagatggaggaggatggggtacggaagtgtaagaaatgcgaggggccctgtcgtaaagtgtgcaatggcatcgggatcggcgagttcaaagactctttatccataaacgctactaatattaagcactttaaaaactgcacatcgattagtggggacttgcatatactgcccgtcgctttccgcggagacagcttcactcatacaccgccactcgacccccaagagcttgatattttaaagacagttaaagagatcaccggattcctgctgatacaggcatggccagagaatcgcacggatttgcacgctttcgaaaacctcgaaataatccggggtcgaactaagcagcatggccagttcagcctggccgtggtgagcttaaacatcacctcgctcgggcttaggtcacttaaggagatctctgacggagacgtgataatcagcggcaacaaaaatctatgctacgccaacacaatcaattggaaaaaactgttcgggacatccggccaaaagaccaaaatcatctctaacaggggcgagaattcttgtaaggcgactggccaggtttgccacgccttatgctcccccgaaggctgctggggccctgagcctcgcgactgcgtgtcttgcagaaatgtgtccagaggccgggaatgcgttgataaatgcaaccttctcgaaggtgaaccacgggagttcgtcgaaaatagcgagtgcattcaatgtcatccggagtgtctgccacaggcaatgaacatcacctgtacaggaagaggccccgataattgtatccaatgcgcgcactacatagacggccctcattgcgtaaagacgtgccctgccggcgtaatgggagaaaacaacacgctggtatggaagtatgcagatgccggccatgtttgccatctgtgtcaccccaactgtacctatggttgtaccggccccggattggaggggtgtcctacaaacggtcctaagattccaagtatagcaaccggaatggtgggtgctctcttgctactgttagtggtagctctggggatcggtctcttcatgcgtaggtag

SEQ ID NO: 154147 - DNA, 3633 bp, Artificial Sequence
  derived and/or modified sequence
atgaggcccagcggcacagctggagctgccctgctggccctgctggccgccctgtgcccagccagccgggccctggaggagaagaaggtgtgccagggcaccagcaacaagctgacccagctgggcacctttgaggaccacttcctgagcctgcagaggatgttcaacaactgtgaggtggtgctgggcaacctggagatcacctacgtgcagaggaactatgacctgtccttcctgaagaccatccaggaggtggccggctacgtgctgattgccctgaacacagtggagcgcatccccctggagaacctgcagatcatccggggcaacatgtactatgagaacagctatgccctggccgtgctgagcaactatgatgccaacaagacaggcctgaaggagctgcccatgaggaacctgcaggagatcctgcatggagctgtgcgcttcagcaacaacccagccctgtgcaatgtggagagcatccagtggagggacatcgtgtccagtgacttcctgagcaacatgtccatggacttccagaaccacctgggcagctgccagaagtgtgaccccagctgccccaacggcagctgctggggcgctggggaggagaactgccagaagctgaccaagatcatctgtgcccagcagtgcagcggccgctgccggggcaagagccccagcgactgctgccacaaccagtgtgccgccggctgcaccggcccccgggagagtgactgcctggtgtgcaggaagttcagagatgaggccacctgcaaggacacctgcccccccctgatgctgtacaaccccaccacctaccagatggatgtgaaccctgagggcaagtacagctttggagccacctgtgtgaagaagtgccccagaaattatgtggtgacagaccacggcagctgtgtgcgggcctgtggggctgacagctatgagatggaggaggatggagtgaggaagtgcaagaagtgtgagggcccctgcaggaaggtgtgcaatggcatcggcatcggggagttcaaggacagcctgagcatcaatgccaccaacatcaagcacttcaagaactgcaccagcatcagcggggacctgcacatcctgcctgtggccttccggggggacagcttcacccacaccccacccctggacccccaggagctggacatcctgaagacagtgaaggagatcaccggcttcctgctgatccaggcctggccagagaacagaacagacctgcacgcctttgagaacctggagatcatccggggccgcaccaagcagcacggccagttcagcctggccgtggtgtccctgaacatcaccagcctgggcctgcggagcctgaaggagatcagtgatggagatgtgatcatcagcggcaacaagaacctgtgctacgccaacaccatcaactggaagaagctgtttggcaccagcggccagaagaccaagatcatcagcaacagaggagagaacagctgcaaggccaccggccaggtgtgccacgccctgtgcagccctgagggctgctggggccctgagccccgggactgtgtgtcctgcagaaatgtgtcccggggccgggagtgtgtggacaagtgcaacctgctggagggggagccccgggagtttgtggagaacagcgagtgcatccagtgccacccagaatgtctgccccaggccatgaacatcacctgcaccggccggggccctgacaactgcatccagtgtgcccactacattgatggcccccactgtgtgaagacctgcccagctggggtgatgggagagaacaacaccctggtgtggaagtatgcagatgctggccacgtgtgccacctgtgccaccccaactgcacctacggctgcaccggccctggcctggagggctgccccaccaacggccccaagatccccagcatcgccaccggcatggtgggcgccctgctgctgctgctggtggtggccctgggcatcggcctcttcatgagaagaagacacatcgtgaggaagaggaccctgcggcggctgctgcaggagcgggagctggtggagcccctgaccccatctggagaggcccccaaccaggccctgctgcgcatcctgaaggagacagagttcaagaagatcaaggtgctgggcagcggggcctttggaacagtgtacaagggcctgtggatccctgagggggagaaggtgaagatccctgtggccatcaaggagctgcgggaggccaccagccccaaggccaacaaggagatcctggatgaggcctacgtgatggcctctgtggacaacccccacgtgtgccgcctgctgggcatctgcctgaccagcacagtgcagctgatcacccagctgatgcccttcggctgcctgctggactatgtgcgggagcacaaggacaacatcggcagccagtacctgctgaactggtgtgtgcagatcgccaagggcatgaactacctggaggaccggcggctggtgcaccgggacctggccgccagaaatgtgctggtgaagaccccccagcacgtgaagatcacagactttggcctggccaagctgctgggcgctgaggagaaggagtaccacgccgagggcggcaaggtgcccatcaagtggatggccctggagagcatcctgcaccgcatctacacccaccagagtgatgtgtggagctatggagtgacagtgtgggagctgatgaccttcggcagcaagccctatgatggcatcccagccagcgagatcagcagcatcctggagaagggggagcggctgccccagccccccatctgcaccattgatgtgtacatgatcatggtgaagtgctggatgattgatgctgacagccggcccaagttccgggagctgatcatcgagttcagcaagatggcccgggacccccagcgctacctggtgatccagggagatgagaggatgcacctgcccagccccacagacagcaacttctaccgggccctgatggatgaggaggacatggatgatgtggtggatgctgatgagtacctgatcccccagcagggcttcttcagcagccccagcaccagcaggacccccctgctgagcagcctgagcgccaccagcaacaacagcacagtggcctgcatcgacagaaatggcctgcagagctgccccatcaaggaggacagcttcctgcagcgctacagcagtgaccccaccggggccctgacagaagattccattgatgacaccttcctgcctgtgcctgagtacatcaaccagagcgtgcccaagaggcctgctggctctgtgcagaaccctgtgtaccacaaccagcccctgaacccagcccccagccgggacccccactaccaggacccccacagcacagctgtgggcaaccctgagtacctgaacacagtgcagcccacctgtgtgaacagcacctttgacagccctgcccactgggcccagaagggcagccaccagatcagcctggacaacccagactaccagcaggacttcttccccaaggaggccaagcccaacggcatcttcaagggcagcacagcagaaaatgctgagtacctgcgggtggccccccagagcagcgagttcatcggggcctag

SEQ ID NO: 154148 - DNA, 3243 bp, Artificial Sequence
  derived and/or modified sequence
aacagaacagaaggagctgcccacgagaagttcaccggcaacccagcctggaggagagctgtgcagcagcagccctgccctgtggtggagagcatccagtggagggacatcgtgtccagtgacttcctgagcaacatgtccatggacttccagaaccacctgggcagctgccagaagtgtgaccccagctgccccaacggcagctgctggggcgctggggaggagaactgccagaagctgaccaagatcatctgtgcccagcagtgcagcggccgctgccggggcaagagccccagcgactgctgccacaaccagtgtgccgccggctgcaccggcccccgggagagtgactgcctggtgtgcaggaagttcagagatgaggccacctgcaaggacacctgcccccccctgatgctgtacaaccccaccacctaccagatggatgtgaaccctgagggcaagtacagctttggagccacctgtgtgaagaagtgccccagaaattatgtggtgacagaccacggcagctgtgtgcgggcctgtggggctgacagctatgagatggaggaggatggagtgaggaagtgcaagaagtgtgagggcccctgcaggaaggtgtgcaatggcatcggcatcggggagttcaaggacagcctgagcatcaatgccaccaacatcaagcacttcaagaactgcaccagcatcagcggggacctgcacatcctgcctgtggccttccggggggacagcttcacccacaccccacccctggacccccaggagctggacatcctgaagacagtgaaggagatcaccggcttcctgctgatccaggcctggccagagaacagaacagacctgcacgcctttgagaacctggagatcatccggggccgcaccaagcagcacggccagttcagcctggccgtggtgtccctgaacatcaccagcctgggcctgcggagcctgaaggagatcagtgatggagatgtgatcatcagcggcaacaagaacctgtgctacgccaacaccatcaactggaagaagctgtttggcaccagcggccagaagaccaagatcatcagcaacagaggagagaacagctgcaaggccaccggccaggtgtgccacgccctgtgcagccctgagggctgctggggccctgagccccgggactgtgtgtcctgcagaaatgtgtcccggggccgggagtgtgtggacaagtgcaacctgctggagggggagccccgggagtttgtggagaacagcgagtgcatccagtgccacccagaatgtctgccccaggccatgaacatcacctgcaccggccggggccctgacaactgcatccagtgtgcccactacattgatggcccccactgtgtgaagacctgcccagctggggtgatgggagagaacaacaccctggtgtggaagtatgcagatgctggccacgtgtgccacctgtgccaccccaactgcacctacggctgcaccggccctggcctggagggctgccccaccaacggccccaagatccccagcatcgccaccggcatggtgggcgccctgctgctgctgctggtggtggccctgggcatcggcctcttcatgagaagaagacacatcgtgaggaagaggaccctgcggcggctgctgcaggagcgggagctggtggagcccctgaccccatctggagaggcccccaaccaggccctgctgcgcatcctgaaggagacagagttcaagaagatcaaggtgctgggcagcggggcctttggaacagtgtacaagggcctgtggatccctgagggggagaaggtgaagatccctgtggccatcaaggagctgcgggaggccaccagccccaaggccaacaaggagatcctggatgaggcctacgtgatggcctctgtggacaacccccacgtgtgccgcctgctgggcatctgcctgaccagcacagtgcagctgatcacccagctgatgcccttcggctgcctgctggactatgtgcgggagcacaaggacaacatcggcagccagtacctgctgaactggtgtgtgcagatcgccaagggcatgaactacctggaggaccggcggctggtgcaccgggacctggccgccagaaatgtgctggtgaagaccccccagcacgtgaagatcacagactttggcctggccaagctgctgggcgctgaggagaaggagtaccacgccgagggcggcaaggtgcccatcaagtggatggccctggagagcatcctgcaccgcatctacacccaccagagtgatgtgtggagctatggagtgacagtgtgggagctgatgaccttcggcagcaagccctatgatggcatcccagccagcgagatcagcagcatcctggagaagggggagcggctgccccagccccccatctgcaccattgatgtgtacatgatcatggtgaagtgctggatgattgatgctgacagccggcccaagttccgggagctgatcatcgagttcagcaagatggcccgggacccccagcgctacctggtgatccagggagatgagaggatgcacctgcccagccccacagacagcaacttctaccgggccctgatggatgaggaggacatggatgatgtggtggatgctgatgagtacctgatcccccagcagggcttcttcagcagccccagcaccagcaggacccccctgctgagcagcctgagcgccaccagcaacaacagcacagtggcctgcatcgacagaaatggcctgcagagctgccccatcaaggaggacagcttcctgcagcgctacagcagtgaccccaccggggccctgacagaagattccattgatgacaccttcctgcctgtgcctgagtacatcaaccagagcgtgcccaagaggcctgctggctctgtgcagaaccctgtgtaccacaaccagcccctgaacccagcccccagccgggacccccactaccaggacccccacagcacagctgtgggcaaccctgagtacctgaacacagtgcagcccacctgtgtgaacagcacctttgacagccctgcccactgggcccagaagggcagccaccagatcagcctggacaacccagactaccagcaggacttcttccccaaggaggccaagcccaacggcatcttcaagggcagcacagcagaaaatgctgagtacctgcgggtggccccccagagcagcgagttcatcggggcctag

SEQ ID NO: 154149 - DNA, 1974 bp, Artificial Sequence
  derived and/or modified sequence
atgaggcccagcggcacagctggagctgccctgctggccctgctggccgccctgtgcccagccagccgggccctggaggagaagaaggtgtgccagggcaccagcaacaagctgacccagctgggcacctttgaggaccacttcctgagcctgcagaggatgttcaacaactgtgaggtggtgctgggcaacctggagatcacctacgtgcagaggaactatgacctgtccttcctgaagaccatccaggaggtggccggctacgtgctgattgccctgaacacagtggagcgcatccccctggagaacctgcagatcatccggggcaacatgtactatgagaacagctatgccctggccgtgctgagcaactatgatgccaacaagacaggcctgaaggagctgcccatgaggaacctgcaggagatcctgcatggagctgtgcgcttcagcaacaacccagccctgtgcaatgtggagagcatccagtggagggacatcgtgtccagtgacttcctgagcaacatgtccatggacttccagaaccacctgggcagctgccagaagtgtgaccccagctgccccaacggcagctgctggggcgctggggaggagaactgccagaagctgaccaagatcatctgtgcccagcagtgcagcggccgctgccggggcaagagccccagcgactgctgccacaaccagtgtgccgccggctgcaccggcccccgggagagtgactgcctggtgtgcaggaagttcagagatgaggccacctgcaaggacacctgcccccccctgatgctgtacaaccccaccacctaccagatggatgtgaaccctgagggcaagtacagctttggagccacctgtgtgaagaagtgccccagaaattatgtggtgacagaccacggcagctgtgtgcgggcctgtggggctgacagctatgagatggaggaggatggagtgaggaagtgcaagaagtgtgagggcccctgcaggaaggtgtgcaatggcatcggcatcggggagttcaaggacagcctgagcatcaatgccaccaacatcaagcacttcaagaactgcaccagcatcagcggggacctgcacatcctgcctgtggccttccggggggacagcttcacccacaccccacccctggacccccaggagctggacatcctgaagacagtgaaggagatcaccggcttcctgctgatccaggcctggccagagaacagaacagacctgcacgcctttgagaacctggagatcatccggggccgcaccaagcagcacggccagttcagcctggccgtggtgtccctgaacatcaccagcctgggcctgcggagcctgaaggagatcagtgatggagatgtgatcatcagcggcaacaagaacctgtgctacgccaacaccatcaactggaagaagctgtttggcaccagcggccagaagaccaagatcatcagcaacagaggagagaacagctgcaaggccaccggccaggtgtgccacgccctgtgcagccctgagggctgctggggccctgagccccgggactgtgtgtcctgcagaaatgtgtcccggggccgggagtgtgtggacaagtgcaacctgctggagggggagccccgggagtttgtggagaacagcgagtgcatccagtgccacccagaatgtctgccccaggccatgaacatcacctgcaccggccggggccctgacaactgcatccagtgtgcccactacattgatggcccccactgtgtgaagacctgcccagctggggtgatgggagagaacaacaccctggtgtggaagtatgcagatgctggccacgtgtgccacctgtgccaccccaactgcacctacggctgcaccggccctggcctggagggctgccccaccaacggcagctacatcgtgagccacttccccaggagcttctacaagatgtctgtgcactag

SEQ ID NO: 154150 - DNA, 3474 bp, Artificial Sequence
  derived and/or modified sequence
atgttcaacaactgtgaggtggtgctgggcaacctggagatcacctacgtgcagagaaattatgacctgtccttcctgaagaccatccaggaggtggccggctacgtgctgattgccctgaacacagtggagcgcatccccctggagaacctgcagatcatccggggcaacatgtactatgaaaattcctatgccctggccgtgctgagcaactatgatgccaacaagacaggcctgaaggagctgcccatgaggaacctgcaggagatcctgcacggggctgtgcgcttcagcaacaacccagccctgtgcaatgtggagagcatccagtggagggacatcgtgtccagtgacttcctgagcaacatgtccatggacttccagaaccacctgggcagctgccagaagtgtgaccccagctgccccaacggcagctgctggggcgctggggaggagaactgccagaagctgaccaagatcatctgtgcccagcagtgcagcggccgctgccggggcaagagccccagcgactgctgccacaaccagtgtgccgccggctgcaccggcccccgggagagtgactgcctggtgtgcaggaagttcagagatgaggccacctgcaaggacacctgcccccccctgatgctgtacaaccccaccacctaccagatggatgtgaaccctgagggcaagtacagctttggagccacctgtgtgaagaagtgccccaggaactacgtggtgacagaccacggcagctgtgtgcgggcctgtggggctgacagctatgagatggaggaggatggagtgaggaagtgcaagaagtgtgagggcccctgcaggaaggtgtgcaatggaattggaattggagagttcaaggacagcctgagcatcaatgccaccaacatcaagcacttcaagaactgcaccagcatcagcggggacctgcacatcctgcctgtggccttccggggggacagcttcacccacaccccacccctggacccccaggagctggacatcctgaagacagtgaaggagatcaccggcttcctgctgatccaggcctggccagaaaatagaacagacctgcacgcctttgagaacctggagatcatccggggccgcaccaagcagcacggccagttcagcctggccgtggtgtccctgaacatcaccagcctgggcctgcggagcctgaaggagatcagtgatggagatgtgatcatcagcggcaacaagaacctgtgctacgccaacaccatcaactggaagaagctgtttggcaccagcggccagaagaccaagatcatcagcaacagaggagagaacagctgcaaggccaccggccaggtgtgccacgccctgtgcagccctgagggctgctggggccctgagccccgggactgtgtgtcctgcagaaatgtgtcccggggcagagaatgtgtggacaagtgcaacctgctggagggggagccccgggagtttgtggagaacagcgagtgcatccagtgccaccctgagtgcctgccccaggccatgaacatcacctgcaccggccggggccctgacaactgcatccagtgtgcccactacattgatggcccccactgtgtgaagacctgcccagctggggtgatgggagagaacaacaccctggtgtggaagtatgcagatgctggccacgtgtgccacctgtgccaccccaactgcacctacggctgcaccggccctggcctggagggctgccccaccaacggccccaagatccccagcatcgccaccggcatggtgggcgccctgctgctgctgctggtggtggccctgggcatcggcctcttcatgagaagaagacacatcgtgaggaagaggaccctgcggcggctgctgcaggagcgggagctggtggagcccctgacccccagcggggaggcccccaaccaggccctgctgcgcatcctgaaggagacagagttcaagaagatcaaggtgctgggcagcggggccttcggcaccgtgtacaagggcctgtggatccctgagggggagaaggtgaagatccctgtggccatcaaggagctgcgggaggccaccagccccaaggccaacaaggagatcctggatgaggcctacgtgatggcctctgtggacaacccccacgtgtgccgcctgctgggcatctgcctgaccagcacagtgcagctgatcacccagctgatgcccttcggctgcctgctggactatgtgcgggagcacaaggacaacatcggcagccagtacctgctgaactggtgtgtgcagatcgccaagggcatgaactacctggaggaccggcggctggtgcaccgggacctggccgccagaaatgtgctggtgaagaccccccagcacgtgaagatcacagactttggcctggccaagctgctgggcgctgaggagaaggagtaccacgccgagggcggcaaggtgcccatcaagtggatggccctggagagcatcctgcaccgcatctacacccaccagagtgatgtgtggagctatggagtgacagtgtgggagctgatgaccttcggcagcaagccctatgatggcatcccagccagcgagatcagcagcatcctggagaagggggagcggctgccccagccccccatctgcaccattgatgtgtacatgatcatggtgaagtgctggatgattgatgctgacagccggcccaagttccgggagctgatcatcgagttcagcaagatggcccgggacccccagcgctacctggtgatccagggagatgagaggatgcacctgcccagccccacagacagcaacttctaccgggccctgatggatgaggaggacatggatgatgtggtggatgctgatgagtacctgatcccccagcagggcttcttcagcagccccagcaccagcaggacccccctgctgagcagcctgagcgccaccagcaacaacagcacagtggcctgcatcgacagaaatggcctgcagagctgccccatcaaggaggacagcttcctgcagcgctacagcagtgaccccactggagccctgacagaggacagcattgatgacaccttcctgcctgtgcctgagtacatcaaccagagcgtgcccaagaggcctgctggctctgtgcagaaccctgtgtaccacaaccagcccctgaacccagcccccagccgggacccccactaccaggacccccacagcacagctgtgggcaaccctgagtacctgaacacagtgcagcccacctgtgtgaacagcacctttgacagccctgcccactgggcccagaagggcagccaccagatcagcctggacaacccagactaccagcaggacttcttccccaaggaggccaagcccaacggcatcttcaagggcagcacagcagaaaatgctgagtacctgcgggtggccccccagagcagcgagttcatcggggcctag

SEQ ID NO: 154151 - DNA, 3276 bp, Artificial Sequence
  derived and/or modified sequence
atgaggcccagcggcacagctggagctgccctgctggccctgctggccgccctgtgcccagccagccgggccctggaggagaagaaggtgtgccagggcaccagcaacaagctgacccagctgggcacctttgaggaccacttcctgagcctgcagaggatgttcaacaactgtgaggtggtgctgggcaacctggagatcacctacgtgcagaggaactatgacctgtccttcctgaagaccatccaggaggtggccggctacgtgctgattgccctgaacacagtggagcgcatccccctggagaacctgcagatcatccggggcaacatgtactatgagaacagctatgccctggccgtgctgagcaactatgatgccaacaagacaggcctgaaggagctgcccatgaggaacctgcagggccagaagtgtgaccccagctgccccaacggcagctgctggggcgctggggaggagaactgccagaagctgaccaagatcatctgtgcccagcagtgcagcggccgctgccggggcaagagccccagcgactgctgccacaaccagtgtgccgccggctgcaccggcccccgggagagtgactgcctggtgtgcaggaagttcagagatgaggccacctgcaaggacacctgcccccccctgatgctgtacaaccccaccacctaccagatggatgtgaaccctgagggcaagtacagctttggagccacctgtgtgaagaagtgccccaggaactacgtggtgacagaccacggcagctgtgtgcgggcctgtggggctgacagctatgagatggaggaggatggagtgaggaagtgcaagaagtgtgagggcccctgcaggaaggtgtgcaatggaattggaattggagagttcaaggacagcctgagcatcaatgccaccaacatcaagcacttcaagaactgcaccagcatcagcggggacctgcacatcctgcctgtggccttccggggggacagcttcacccacaccccacccctggacccccaggagctggacatcctgaagacagtgaaggagatcaccggcttcctgctgatccaggcctggccagaaaatagaacagacctgcacgcctttgagaacctggagatcatccggggccgcaccaagcagcacggccagttcagcctggccgtggtgtccctgaacatcaccagcctgggcctgcggagcctgaaggagatcagtgatggagatgtgatcatcagcggcaacaagaacctgtgctacgccaacaccatcaactggaagaagctgtttggcaccagcggccagaagaccaagatcatcagcaacagaggagagaacagctgcaaggccaccggccaggtgtgccacgccctgtgcagccctgagggctgctggggccctgagccccgggactgtgtgtcctgcagaaatgtgtcccggggcagagaatgtgtggacaagtgcaacctgctggagggggagccccgggagtttgtggagaacagcgagtgcatccagtgccaccctgagtgcctgccccaggccatgaacatcacctgcaccggccggggccctgacaactgcatccagtgtgcccactacattgatggcccccactgtgtgaagacctgcccagctggggtgatgggagagaacaacaccctggtgtggaagtatgcagatgctggccacgtgtgccacctgtgccaccccaactgcacctacggctgcaccggccctggcctggagggctgccccaccaacggccccaagatccccagcatcgccaccggcatggtgggcgccctgctgctgctgctggtggtggccctgggcatcggcctcttcatgagaagaagacacatcgtgaggaagaggaccctgcggcggctgctgcaggagcgggagctggtggagcccctgacccccagcggggaggcccccaaccaggccctgctgcgcatcctgaaggagacagagttcaagaagatcaaggtgctgggcagcggggccttcggcaccgtgtacaagggcctgtggatccctgagggggagaaggtgaagatccctgtggccatcaaggagctgcgggaggccaccagccccaaggccaacaaggagatcctggatgaggcctacgtgatggcctctgtggacaacccccacgtgtgccgcctgctgggcatctgcctgaccagcacagtgcagctgatcacccagctgatgcccttcggctgcctgctggactatgtgcgggagcacaaggacaacatcggcagccagtacctgctgaactggtgtgtgcagatcgccaagggcatgaactacctggaggaccggcggctggtgcaccgggacctggccgccagaaatgtgctggtgaagaccccccagcacgtgaagatcacagactttggcctggccaagctgctgggcgctgaggagaaggagtaccacgccgagggcggcaaggtgcccatcaagtggatggccctggagagcatcctgcaccgcatctacacccaccagagtgatgtgtggagctatggagtgacagtgtgggagctgatgaccttcggcagcaagccctatgatggcatcccagccagcgagatcagcagcatcctggagaagggggagcggctgccccagccccccatctgcaccattgatgtgtacatgatcatggtgaagtgctggatgattgatgctgacagccggcccaagttccgggagctgatcatcgagttcagcaagatggcccgggacccccagcgctacctggtgatccagggagatgagaggatgcacctgcccagccccacagacagcaacttctaccgggccctgatggatgaggaggacatggatgatgtggtggatgctgatgagtacctgatcccccagcagggcttcttcagcagccccagcaccagcaggacccccctgctgagcagcctgagcgccaccagcaacaacagcacagtggcctgcatcgacagaaatggcctgcagagctgccccatcaaggaggacagcttcctgcagcgctacagcagtgaccccactggagccctgacagaggacagcattgatgacaccttcctgcctgtgcctggagagtggctggtgtggaagcagagctgcagcagcaccagcagcacccacagcgctgctgccagcctgcagtgccccagccaggtgctgcccccagccagccctgagggggagaccgtggccgacctgcagacccagtag

SEQ ID NO: 154152 - DNA, 1395 bp, Artificial Sequence
  derived and/or modified sequence
atgagcagcctgaccaagatcatctgtgcccagcagtgcagcggccgctgccggggcaagagccccagcgactgctgccacaaccagtgtgccgccggctgcaccggcccccgggagagtgactgcctggtgtgcaggaagttcagagatgaggccacctgcaaggacacctgcccccccctgatgctgtacaaccccaccacctaccagatggatgtgaaccctgagggcaagtacagctttggagccacctgtgtgaagaagtgccccagaaattatgtggtgacagaccacggcagctgtgtgcgggcctgtggggctgacagctatgagatggaggaggatggagtgaggaagtgcaagaagtgtgagggcccctgcaggaaggtgtgcaatggcatcggcatcggggagttcaaggacagcctgagcatcaatgccaccaacatcaagcacttcaagaactgcaccagcatcagcggggacctgcacatcctgcctgtggccttccggggggacagcttcacccacaccccacccctggacccccaggagctggacatcctgaagacagtgaaggagatcaccggcttcctgctgatccaggcctggccagagaacagaacagacctgcacgcctttgagaacctggagatcatccggggccgcaccaagcagcacggccagttcagcctggccgtggtgtccctgaacatcaccagcctgggcctgcggagcctgaaggagatcagtgatggagatgtgatcatcagcggcaacaagaacctgtgctacgccaacaccatcaactggaagaagctgtttggcaccagcggccagaagaccaagatcatcagcaacagaggagagaacagctgcaaggccaccggccaggtgtgccacgccctgtgcagccctgagggctgctggggccctgagccccgggactgtgtgtcctgcagaaatgtgtcccggggccgggagtgtgtggacaagtgcaacctgctggagggggagccccgggagtttgtggagaacagcgagtgcatccagtgccacccagaatgtctgccccaggccatgaacatcacctgcaccggccggggccctgacaactgcatccagtgtgcccactacattgatggcccccactgtgtgaagacctgcccagctggggtgatgggagagaacaacaccctggtgtggaagtatgcagatgctggccacgtgtgccacctgtgccaccccaactgcacctacggctgcaccggccctggcctggagggctgccccaccaacggccccaagatccccagcatcgccaccggcatggtgggcgccctgctgctgctgctggtggtggccctgggcatcggcctcttcatgagaagatag

SEQ ID NO: 154153 - DNA, 3633 bp, Artificial Sequence
  derived and/or modified sequence
atgcggcccagcggcaccgccggcgccgccctgctggccctgctggccgctctctgccccgcatctcgggccctcgaggagaaaaaggtttgccaggggactagtaataagttgacccagctaggaactttcgaggaccactttctctcactccaacgcatgtttaataactgtgaagttgttctgggtaatctcgagatcacatatgttcaacgcaactacgacctctcctttctaaaaacaatccaggaggtcgccgggtacgtcctgatcgcattgaacacggtggagcggatccctttggaaaatctgcagatcatccgcggcaacatgtactacgaaaattcctatgctctggccgtcctaagcaactacgatgccaacaagacgggattgaaagagctgccaatgaggaacctgcaggagatcctccacggagccgtccgattctcgaacaatccagccctatgcaacgttgagtccatccaatggagggatattgtctcatctgacttcctgtctaatatgagtatggactttcaaaatcatctaggatcatgtcagaaatgtgatcccagttgccctaatggaagctgttggggcgccggcgaggaaaactgccagaagcttaccaagattatttgtgctcagcagtgcagtggccgctgtagaggcaaatccccgtcagactgttgccacaaccagtgtgctgctgggtgtacaggaccccgagagagtgactgtctggtctgccggaagtttagagacgaggctacatgtaaggacacttgtccaccactgatgttatacaaccctaccacatatcaaatggatgtcaacccggagggcaagtacagctttggagccacatgtgtgaagaaatgccctcggaattatgtggtcacggatcatgggtcctgtgtgagagcctgcggtgctgatagttatgagatggaagaggatggtgtgcggaaatgtaagaagtgtgaaggtccttgccgcaaggtctgcaacggcatcggaataggggaattcaaggatagtctaagtatcaatgccacaaatataaaacactttaagaactgcacaagcatttcaggagacctgcatattctgccagtcgcttttcggggggatagtttcacacatacaccccccctggatccccaggagcttgacattctgaaaaccgtgaaggagattaccggatttctgcttatacaggcttggcccgagaaccgaacagatttgcatgcctttgagaatttggaaatcatcagagggcgaaccaaacagcatggacagttcagcctggcagtggtttcactgaatataaccagtctgggactgaggtcacttaaagagatatcagacggtgacgtgataattagcggcaacaaaaacctgtgttacgcaaatacaattaactggaaaaagctattcggaactagcgggcagaaaactaaaattatttccaatcgcggagagaacagttgcaaggccacagggcaagtgtgtcacgccctgtgcagcccggagggctgttggggtccagaaccaagagattgtgtgtcgtgtcgcaacgtgtcgaggggacgcgagtgtgtggacaagtgcaacctgctggaaggcgagccccgggagttcgttgagaattcagagtgcatacagtgccatcccgagtgcctgcctcaagctatgaatatcacttgcaccggccgcggcccagataactgcatccagtgcgctcattatatcgatggcccccactgtgtcaagacatgccccgccggcgtcatgggtgaaaacaatactctggtgtggaagtatgctgacgccggtcacgtgtgtcacctgtgtcaccctaactgtacctacggttgtaccggtcccggattagaaggttgccccactaacggccccaagatcccctctattgctacaggaatggtgggtgcgctgctccttctgctggtggtagcacttggtatcgggctgtttatgaggcggcggcacatcgtgagaaaacggactctccggcggcttctccaagagcgtgagctggtggagcccctgaccccctctggcgaggctcctaaccaagccctcctacggatactgaaggagaccgaatttaaaaagattaaagtgttaggatccggggccttcggcaccgtgtacaagggcctctggattcccgagggcgagaaggtgaagatacctgtggccatcaaggaactgcgggaggctacatccccaaaagccaataaagagatcctggacgaagcatacgtaatggccagtgtcgacaatccccatgtttgcagattgctgggcatatgcctcacctcaacagtacagttgatcacacaactgatgccatttgggtgtctcttagactatgtgagggagcacaaagacaacatcgggagtcagtatctcctaaactggtgcgtgcagattgcaaaagggatgaattaccttgaggatagaaggctggttcatcgtgatctagcagcgaggaacgtgttagtgaagactccccagcacgtgaagattacagattttggcctggcaaaactcctcggagccgaggaaaaggagtaccatgccgaggggggaaaggtccctataaaatggatggctctggaatcaatcctgcaccgaatctacacccatcagagtgacgtgtggtcgtatggagtcaccgtctgggaactcatgacattcggctctaaaccttatgatgggatcccggcctccgagatttcatccatcttggaaaagggtgagcggctcccccagccccccatctgcaccatcgatgtgtatatgattatggtcaaatgctggatgatcgacgctgattcgcgcccaaagtttcgcgaattgatcattgagttcagcaagatggccagagatcctcaacggtacctcgtcatacagggggatgagcgcatgcacctgccttccccgaccgactcgaatttttacagagctctgatggacgaggaggatatggacgacgttgtggatgcagacgagtatctgattccacagcagggctttttcagttcaccttccacatcacgtacccccttgctctcatctctgagcgccacttctaacaactccaccgtggcatgtatcgatcgtaatgggttgcaaagctgcccaattaaggaggacagtttcttgcagcggtattcttccgacccaaccggtgctctaacagaagactctatcgacgacactttcctgcccgtccccgaatacatcaaccagagtgttccaaaaaggccagcaggcagtgtgcagaatcctgtctaccataatcagccactgaaccctgccccatcccgagacccccactaccaagatccccactctactgccgtgggaaacccagagtatttgaacaccgtgcagccgacctgtgttaatagcactttcgactcaccggctcactgggcccagaaggggtcgcatcaaatttcactggataacccagactatcaacaggacttcttccctaaggaggcaaaacccaacggaatattcaaaggaagcaccgccgaaaatgccgagtaccttagagtggccccccagagttcagaatttatcggtgcctag

SEQ ID NO: 154154 - DNA, 3243 bp, Artificial Sequence
  derived and/or modified sequence
aaccggaccgagggcgccgcccacgagaagttcaccggcaaccccgcctggaggcgagccgtacagcaacagccgtgtccggttgtggaaagcatacagtggagagacattgtttccagcgacttcttatcaaacatgtccatggacttccagaaccatctgggcagctgccaaaagtgtgacccctcttgtccgaatggaagctgctggggggccggagaagaaaactgccagaaactgactaaaatcatctgtgcacagcaatgttccggaagatgcagaggcaaatctccgtctgactgttgccataatcaatgcgcagccggctgtacaggtcctcgcgaatcggattgtttggtttgtagaaagttcagggatgaagcaacgtgcaaggatacgtgtccaccacttatgctgtacaaccctacaacgtaccagatggatgtaaatcccgagggtaagtacagcttcggagccacttgtgtgaaaaagtgtccacggaactacgtggtgactgaccatggttcttgcgttagagcctgcggtgccgactcctatgaaatggaagaggacggcgtcaggaagtgtaaaaagtgtgagggcccatgtaggaaggtgtgcaacggtatcggtatcggtgaattcaaagattcactaagcattaacgcaaccaatatcaaacactttaagaattgcactagcatctctggcgatttacacatacttcccgttgcctttcgcggagacagcttcacacatactccccccttggacccacaagagctcgacatcctgaagaccgtgaaagaaattacagggtttctcctgatccaggcctggcccgagaacaggaccgatcttcatgcctttgagaacctcgaaatcattcgggggcggacaaaacaacacggacagttctccttagccgtggtgagtctgaatataacgtctcttggcctcaggagtctgaaggagattagtgacggggacgtcatcatcagcggtaacaagaacttatgttacgcgaatacaatcaattggaagaagctgttcgggactagcgggcagaagaccaaaattattagtaatcggggagagaacagctgtaaggccaccggtcaggtttgccacgccctgtgtagccctgagggctgctggggccccgagcctcgggactgcgtcagctgtcgaaacgtttcacgcggcagagaatgcgtagataaatgcaacctgttagagggcgaaccgagagagttcgtggagaactccgaatgcatacagtgccaccccgaatgcctcccacaagccatgaatattacatgcaccggacggggaccagacaactgtattcagtgcgctcattacattgatggccctcactgcgtcaagacctgtccagccggagtcatgggtgagaacaatactctggtgtggaaatatgcggacgccggtcacgtgtgtcatctgtgtcaccccaactgcacctatggctgcactgggccggggttggaagggtgtcccaccaacgggccaaagattccttcgatcgctacagggatggtgggcgccttactactgctcctcgtcgtcgcattaggaatcggactttttatgcggagacgtcacatagtgagaaagcggacgcttaggagacttctgcaggagcgcgagctcgtagaaccactgacgccaagtggcgaagcccccaaccaagcgctacttcggatcttgaaagagaccgagttcaagaaaattaaggtcctgggatccggggcctttgggaccgtgtacaagggactgtggatccctgaaggtgagaaagtgaaaatacccgtggcgatcaaggaacttagagaggccacttcacccaaagcaaacaaagagatactggatgaagcttatgtcatggcttcagtggacaacccacatgtgtgccggttgctcggaatctgtctcacgagtaccgtccaactcataacacagcttatgcccttcggatgcctgctcgactacgttcgcgagcacaaggacaacatcggaagccaatacctgctgaactggtgtgtgcagatcgccaaagggatgaactacctggaggacagaagactggtgcacagagacctggctgcccggaacgtcctggtgaaaactccgcagcacgtgaaaatcaccgattttgggctcgccaagcttttgggagcagaggagaaggagtaccacgccgagggaggcaaagtgcccatcaaatggatggcattggaatcaatccttcacagaatttatactcatcagagcgacgtgtggtcttatggggttaccgtttgggaactcatgaccttcgggagtaagccttacgatggtatcccagccagtgaaataagctcaatcctagagaagggtgaacggcttccccagcctcccatttgtaccatagatgtctacatgatcatggttaagtgctggatgatcgatgctgacagcaggcctaaattccgtgaactaatcattgagtttagcaagatggctagggaccctcagaggtatctggtgattcagggggatgaaagaatgcatcttccctcacctacagatagtaatttttacagagccttgatggacgaagaagacatggacgacgtggtagatgctgacgaatacctgatcccgcagcagggcttcttctcttctccatccacctctcgcacccctctactgagctccctgtccgccacctcaaacaacagcaccgtggcctgcattgatcggaacggcctccagagctgcccaatcaaggaggacagctttttacagagatactctagcgaccctactggggctttgaccgaggactccatcgatgataccttccttcccgttcccgaatacatcaaccagtcagtgccaaagagaccagcaggcagtgtccagaaccccgtgtaccacaaccagcccctcaatcctgcgccgagtcgcgacccacactaccaggaccctcattctactgcggtggggaaccccgagtacctgaacacagtgcaacccacatgtgttaactctaccttcgacagccccgcccattgggcccaaaagggtagtcatcagattagcctcgacaatcctgactaccagcaagatttcttccctaaggaagccaaaccaaacggaatattcaagggaagtacagcggaaaacgcagaatatttgcgagttgcccctcagtcaagcgaatttattggggcatag

SEQ ID NO: 154155 - DNA, 1974 bp, Artificial Sequence
  derived and/or modified sequence
atgcggcccagcggcaccgccggcgccgccctgctggccctgctggccgccctgtgcccagctagtagagcgctagaggaaaagaaagtgtgccagggtacctcaaataagctgacacaacttggcacattcgaggaccactttctgtctctccagcgtatgttcaacaattgtgaagtagtattaggcaaccttgagatcacatacgtgcagcgaaattatgatctgagcttcttaaaaaccatccaggaagtggctggctacgtgctcatagctctgaacaccgtagaaagaatacccttggagaatcttcagataatacgagggaacatgtactatgaaaactcatatgcgctcgcggtactgtccaactatgacgcaaataaaaccgggctcaaagaactgcccatgcggaatctccaagagatcctgcacggagcggtgaggttctctaacaacccggctctgtgcaacgtcgagagtatccagtggcgtgacattgtgtctagtgacttcctatctaacatgtcaatggactttcagaaccatctgggctcatgccaaaaatgtgaccctagctgccctaacggaagttgttggggcgcaggagaggagaattgccaaaaattgaccaagatcatctgtgctcaacagtgcagtggccggtgccgggggaagtcccccagcgactgttgtcataaccagtgcgccgcggggtgcaccggaccacgggagtcggactgcctggtgtgccgaaagttccgcgacgaagccacttgcaaggacacttgcccacccttgatgctttacaacccgaccacataccagatggacgttaacccagaagggaagtacagcttcggagcaacatgtgtgaagaagtgtcctagaaattacgtggttactgaccacggttcatgcgtcagagcatgtggagcagactcatacgagatggaggaggacggagtgcgcaaatgcaaaaaatgtgagggtccatgtcggaaggtttgcaatgggattggcatcggggaattcaaggactcactgagcattaatgccactaacatcaaacactttaagaattgtacaagcatctctggtgacctgcacatactgcccgtggcattcaggggcgattcctttacacatacgccccccctcgaccctcaagagcttgacatcttaaagaccgtcaaggagataacgggattcctgctgattcaggcgtggccggagaaccgcactgacctccacgcctttgagaatttggagataatccgcggacgcaccaagcaacatggccaattcagtctagctgtggtgtcattaaatataacgagcctgggacttcgctctctgaaggagatcagcgatggtgatgttattatctccggtaataaaaatctctgctacgctaatactattaattggaaaaagttgttcggcacttccggtcagaagacaaagatcatttccaatagaggagaaaactcctgtaaggcaacaggacaggtctgtcacgccctgtgcagcccagaaggatgttgggggcccgagcctcgtgattgtgtgagctgtagaaatgtctccagggggagggagtgtgtcgacaagtgtaatctcttggaaggcgaacctcgagagtttgtagaaaacagcgagtgcattcagtgtcacccagagtgtctgcctcaagctatgaatattacttgcaccggtcggggaccagacaattgcatccaatgtgctcattatatcgacggccctcactgtgtcaaaacctgtcccgccggtgtgatgggcgagaacaatacactcgtttggaagtacgccgacgctggtcatgtgtgccacctctgccaccctaattgcacctacgggtgcacgggtcccggtctcgagggatgccctacaaacggcagctacatagtgagccacttcccccgatcattctataagatgagtgtgcactag

SEQ ID NO: 154156 - DNA, 3474 bp, Artificial Sequence
  derived and/or modified sequence
atgttcaacaactgcgaggtggtgctgggcaacctggagatcacctacgttcagcgcaactacgatctgtccttcctgaagactatccaggaggtagccggctacgtcctgatcgccctcaacacagtggaaaggatcccattagaaaaccttcagatcattaggggcaatatgtattatgaaaactcctacgctcttgcagttctgtctaattacgatgccaataaaacaggcctgaaggagttgcccatgcgaaatctccaggagattctacacggcgcagtgaggttttctaataatcccgcactctgcaacgtcgagagcatccagtggcgcgatatcgtatcaagtgactttctctctaacatgagcatggatttccagaatcatctggggtcatgccagaagtgcgacccctcctgccccaatggaagctgttggggggccggcgaggagaattgccagaagttaacaaagatcatctgcgctcagcagtgctccggcaggtgccgggggaagtcaccaagtgactgttgccataatcagtgtgctgctggttgcaccggacccagagagtctgattgtctagtgtgcagaaagttcagggatgaagctacatgcaaggacacatgccccccccttatgctttacaaccctaccacatatcagatggatgtcaacccagaagggaaatattccttcggggccacgtgtgtcaaaaagtgtcccaggaattatgtggtgaccgaccacggatcttgcgttcgggcttgcggagcagactcctatgaaatggaagaggatggagttcggaaatgtaaaaagtgcgaaggtccgtgcagaaaggtgtgcaacgggattggcatcggggaattcaaagactcattgagcatcaatgcgacaaacattaagcacttcaagaactgcacaagtatctctggagatctgcacatccttcctgtcgcgttcagaggcgatagctttactcacactccgccactcgatccacaggaacttgacatattgaaaaccgtgaaggaaattactgggttcctgctgatccaggcatggcccgagaatcgaaccgatctgcatgcttttgaaaaccttgaaattattcgaggtcgtaccaagcagcacgggcagttttctctggcggtggtgtccttgaatattacaagcctcggattaagaagcctcaaggaaatcagcgacggggacgtcatcatctctggcaataaaaatctgtgttacgccaatacgatcaattggaagaagctctttggcacaagtggacagaagactaaaatcatttctaaccggggggaaaacagctgcaaagccaccggtcaggtttgtcacgctctttgctcacctgaaggctgctgggggcccgagccacgcgattgcgtctcttgccgcaacgttagccggggtagggagtgcgtggataaatgcaaccttctggaaggagaaccaagggaattcgtggagaattcagaatgcattcaatgccatcctgagtgcctccctcaggccatgaacatcacctgcacgggcaggggccctgacaattgcatccagtgcgcacactacattgacggaccgcactgtgtcaagacatgtcctgccggtgtgatgggtgagaataatacactggtgtggaagtacgctgatgccggtcatgtgtgccacctgtgccatcctaattgcacatatggctgtaccggcccaggtctggaggggtgccctactaatggtcccaagatcccaagcatcgctaccggaatggtcggggctctcttgctgctcctggttgttgcacttggaatcggactgtttatgagaagacggcacattgtgaggaagagaacactccgccgtttactgcaggaacgcgagctggtggagcccttgaccccttctggcgaggcccccaaccaggctctgctccggattttgaaggagaccgagttcaagaaaataaaagtcctcggtagcggggcttttggcaccgtgtataagggcctatggataccggaaggggagaaggttaagatacccgtggccatcaaagaactgagagaggccaccagcccaaaagccaataaagagattctggacgaggcttacgtgatggcctcagtggacaatccccacgtgtgtaggttgcttgggatatgtctcactagtacagtgcagttgatcactcaattgatgccattcggatgcctgctggattacgtgagggagcataaagacaacatcggtagccagtatctcctgaactggtgcgtgcagattgcaaagggaatgaactaccttgaggacagaaggctcgtgcacagagatcttgccgcgcgcaatgtgctggtgaaaaccccgcagcacgttaagatcacagatttcggactcgccaaactgctgggggctgaagaaaaagaataccatgcggagggtggaaaagtacccattaagtggatggcattagagtctatccttcatcgcatttacacccatcagtcagatgtctggtcgtacggcgttactgtgtgggaactcatgacttttgggtctaaaccttatgatggcatccccgcttccgaaatcagtagtatactggagaaaggagagagattgccacagccccctatctgcacgatcgatgtttatatgatcatggtcaagtgctggatgatagatgccgattcccggcccaaattccgagagctcatcatagaattctcaaagatggcccgagatccacagaggtatctggtcatccaaggcgatgagcgcatgcaccttccaagtcctaccgattctaacttttatagagcacttatggatgaggaggacatggatgacgtggtagacgccgacgaatacctgattcctcagcagggtttcttttcttccccctccacctcccgaactccactgcttagcagcctcagtgcaacctctaacaattctaccgtcgcatgtatcgaccggaatggcttgcaatcctgccctatcaaggaggattcctttctccaacgttactccagcgaccctacaggggctctgacagaggacagcatcgatgataccttcttgcctgtccctgaatatattaatcagtctgtgcctaaacggcccgcggggtcagtccagaaccccgtctatcacaaccagcccctcaatccagcgccttcccgggatccccactatcaagatcctcactccacggcagtggggaaccctgagtacttgaataccgtgcagccaacctgtgtcaatagcacttttgattcccccgcccactgggcacagaagggctcgcaccagatcagtctggacaatcccgactaccagcaggacttctttccgaaggaggccaagcccaatggcatattcaaaggtagcacagccgagaatgccgagtatctcagggtggctcctcagtcttccgaatttattggcgcttag

SEQ ID NO: 154157 - DNA, 3276 bp, Artificial Sequence
  derived and/or modified sequence
atgcggcccagcggcaccgccggcgccgccctgctggccctgctggcagctttgtgccccgcaagcagagcgttggaggagaaaaaggtgtgccagggaactagtaacaaactgactcagctgggcactttcgaggatcactttctctccctgcaaaggatgtttaataactgtgaagtggtgttgggaaacctggagatcacctacgtgcaaagaaactatgatctgagctttctcaaaactatccaggaggtggccgggtacgtactgatcgcccttaataccgtcgaacgaattcccctcgagaatctacagataatcaggggcaatatgtattacgagaatagttacgctctggctgtgctctccaattatgacgcaaataaaactggtttaaaagagttaccaatgcggaacctccagggccagaaatgtgatccgtcttgcccaaatggtagttgctggggagcaggcgaggagaactgtcagaaacttacgaaaatcatttgtgcccaacagtgttcgggcagatgcaggggaaagagcccaagcgattgctgccacaaccagtgtgccgcaggatgcacgggtccaagagagagtgattgtctcgtgtgccgcaagtttcgtgatgaggctacctgtaaagacacatgcccaccacttatgctttataatccaacaacgtaccaaatggacgtgaacccggagggcaagtattctttcggcgctacatgtgtcaaaaagtgccccagaaactatgtagtaacagaccacgggtcatgcgtgcgtgcttgcggggcggactcatatgaaatggaggaagacggggtgcgcaagtgtaaaaagtgcgaaggtccctgccggaaggtgtgtaacggaatcggtatcggcgagtttaaagactctttgagcataaacgctaccaacattaagcattttaaaaattgtacctctatctcaggggatcttcatattctgccagttgccttcagaggagactcgttcacgcatacaccacctttggatccccaagagctggacattctgaaaacagtcaaagagattactggatttttgctgatacaggcctggcccgagaacagaacagatcttcatgcgtttgaaaacttagagattatacgcggaagaaccaagcagcatgggcagttcagtctggccgtcgtgtctctgaacattacgtctctgggcctccggtccctcaaggaaatcagtgacggggacgtcatcatttcaggtaataagaacctgtgctacgctaatactatcaactggaagaaattgttcggcacgtccggacagaagactaaaatcatcagcaaccgcggcgagaattcctgtaaggccactggtcaagtgtgtcacgctttatgttctcccgaaggatgctggggaccagagccaagggattgtgtgagctgcaggaatgtttctcgcggcagggaatgtgtcgacaagtgtaatctgctggagggcgaacctagggaattcgtagagaattccgagtgcattcagtgtcaccctgagtgtctccctcaggctatgaacataacgtgtaccgggcgaggacccgacaactgcattcagtgcgcacactacattgacggaccacactgcgtgaagacgtgtcccgctggggttatgggcgaaaacaatacgctggtatggaagtatgccgatgccggccacgtgtgccacctgtgtcacccaaattgcacgtatgggtgtactggtcctgggctggaaggatgtccaaccaatggccccaagatcccaagcatagcaacggggatggtgggagccctcttattactgctcgtcgtggctctcgggatcggtctttttatgcgccgcagacatatagtgcgaaagagaacattgcggaggctgctacaagagcgggagctagtcgaacctcttaccccctcaggtgaggcaccgaaccaggctctgctaagaattcttaaagagacagagtttaaaaaaataaaggtgctggggagcggtgcattcggaacagtttacaagggcctgtggattcccgagggtgaaaaggttaaaattcccgtcgcgatcaaggaactgcgcgaggcaacttctcctaaagccaataaagaaatcctcgacgaggcctacgtcatggcaagcgtggacaatccacatgtgtgtaggttgctgggtatatgcctaacctccaccgtccaactgattacacagcttatgcccttcggttgcttgctggattatgtgagagagcacaaggacaatattggtagccagtacctcctgaattggtgcgttcagatagccaaagggatgaattacctggaggaccggcgactggtgcatagagacctggcagcccgaaatgtactcgtaaagactccccagcatgtcaagattaccgacttcggattggccaaactgctgggggctgaggaaaaggagtatcatgctgaaggagggaaagttccaattaaatggatggccctggaatcgattctccacaggatctatacacatcagtcagatgtgtggtcctatggcgtgaccgtctgggaactcatgacattcggaagcaagccctacgacggcatcccagcttccgaaatctctagtatccttgagaagggagaaaggttgccacagccccccatctgtaccatcgatgtgtatatgatcatggtgaagtgttggatgattgatgcagattcccggcccaaattcagagaactaataattgagttttccaagatggcgagagatccacaaagatatctcgtaatccagggagacgagaggatgcaccttccctcaccaacggattcgaatttttatagagcactgatggacgaagaggatatggacgatgtcgtcgacgcggacgagtatttaatcccacaacaggggttcttctcctccccatcaaccagcagaaccccgctcctatccagcctgtccgccacatccaacaactctactgtagcatgcatcgacaggaacgggctgcaaagctgccctattaaagaagattcattcttgcagcggtacagctccgaccccacaggcgcactgaccgaagattctattgatgacacatttttaccggtcccaggagaatggttggtgtggaaacaaagctgcagctctacctccagcacacacagtgctgccgcatcgctccagtgtccatcccaggtcctgcctcctgcttctccagaaggggagacagtggcggacctgcaaactcagtag

SEQ ID NO: 154158 - DNA, 1395 bp, Artificial Sequence
  derived and/or modified sequence
atgagcagcctgaccaagatcatctgcgcccagcagtgcagcggcagatgcagggggaagagccccagtgattgttgccacaatcaatgcgctgccggttgcactgggcctcgcgagagtgattgtctcgtctgtcgcaaattccgcgacgaagctacctgcaaagacacttgcccgcctctaatgttatataacccaacgacttaccaaatggacgtcaacccagaagggaaatacagcttcggggccacatgtgtgaagaagtgcccccggaactacgtggtgaccgaccacggatcatgtgtgagagcatgtggggcagactcttacgaaatggaggaggacggagttagaaagtgcaagaagtgcgagggaccttgcaggaaggtgtgtaacggcatcggcatcggcgagtttaaggactccttgtcaattaatgcaacgaatattaagcatttcaaaaactgcacttccatctcaggagacctgcacatcttgcctgttgccttccgaggcgacagtttcactcacacaccacctctggacccccaggagctcgatatccttaagacagtcaaagaaatcacaggtttccttttaatacaggcatggcctgaaaatcgcactgatttacacgcgttcgagaatttggagatcattcgcggccggacaaagcagcatggacagttcagtttagcagtggtgagcctcaacataacgagcttaggcctgcgtagcctgaaagaaatcagcgacggcgatgtaatcatttctgggaataaaaacctgtgttatgccaataccattaactggaaaaagttattcgggacgtccgggcagaaaacaaagattatatctaatcgtggcgaaaactcttgtaaagccactggacaggtgtgccacgcattgtgcagtcctgaaggttgttgggggcctgaaccaagggactgcgttagctgcaggaatgtatctcgaggcagagagtgcgttgataagtgcaatctgttggaaggtgaaccacgcgaatttgtagaaaacagcgagtgtattcagtgccacccagagtgtttgccgcaagccatgaacatcacatgtaccggccgagggcctgataattgcattcaatgtgcacactatattgatggtccacactgtgttaagacctgcccggccggggtcatgggtgaaaacaacacattagtatggaagtacgccgacgccgggcatgtgtgtcatctgtgtcacccaaactgcacgtacgggtgtacaggacccggactggagggctgcccaactaacggtccgaaaatcccctccattgctaccgggatggtgggggccctgctcctactcctggtcgtggcgctcgggatcgggctatttatgcgtaggtag

SEQ ID NO: 154159 - DNA, 3633 bp, Artificial Sequence
  derived and/or modified sequence
atgagacccagcgggactgctggggctgccctattagccctgctggcggcattgtgtcctgccagcagagcattagaggagaaaaaagtgtgtcagggcacatcaaacaagctgacccagctgggtacttttgaagaccattttctgagcctgcaacgcatgttcaacaactgcgaggtcgtattgggcaacctcgagataacttatgtgcagcggaattatgacttgagttttctgaaaacaattcaggaggtggccggttatgtgctcatcgcgctgaacacagtcgaacgaatccctcttgaaaatttacagatcatcagggggaacatgtactacgaaaacagctacgctctggccgtgctctctaactatgatgccaataagaccggactcaaagagctcccgatgcggaacctgcaggagatactgcatggggctgtgaggttttccaacaatcctgctctttgtaacgtggagagcatacagtggagggacatcgtgtcctctgacttcttgagtaatatgagcatggatttccagaaccatctaggtagctgccagaaatgcgacccttcgtgtcccaatggctcttgctggggggctggagaagagaactgccagaagttgacgaaaattatttgtgcccagcagtgtagcgggcgttgcagggggaaaagcccctctgattgctgtcataaccagtgtgccgcaggatgtactggcccacgagagagcgactgtctggtgtgccgcaaatttcgggacgaggctacttgcaaagacacatgtcctcccctgatgttatacaaccccacaacctaccagatggatgtcaatcctgagggaaagtatagctttggtgccacctgcgtaaaaaagtgtccacgcaattacgtggtcaccgaccatgggtcttgtgtgcgagcttgcggggctgattcttatgaaatggaagaagacggggttaggaagtgtaagaagtgtgagggcccttgcaggaaagtgtgcaacggaatcggaatcggcgaatttaaggatagtctcagcattaacgccacaaatatcaagcactttaagaactgtacctccataagtggcgacctccatatactacctgtcgctttccgtggcgattccttcacacacacccctccactggatccgcaagagctggatatactgaagaccgtcaaggaaatcacgggcttcctgcttattcaggcttggccagagaaccgcaccgatttgcatgctttcgaaaacttagagataatacggggacggaccaagcagcatggccaattctccctggccgttgtctcactgaatatcacgtctctgggcctcagaagcctgaaagagatcagcgacggagacgtcataatctctggcaataaaaacttgtgttatgccaacactattaattggaagaagctgttcggaacgagtggacagaagaccaaaattatctctaataggggcgaaaattcctgcaaagctacaggtcaggtgtgccatgccctgtgttcgcctgaggggtgctggggacctgagcctcgggattgtgtgagttgtcggaacgtatcccggggacgtgaatgtgtagataagtgtaacctgctggagggagagcccagagagttcgtggaaaattctgaatgcatccaatgccacccagaatgtctgccacaggccatgaacattacatgtacgggacggggtcccgacaattgcatccagtgcgcacactatatcgacgggcctcactgtgttaagacttgccccgcaggagtgatgggggaaaacaacaccctggtctggaagtatgctgacgccggacacgtctgtcacctttgccacccaaattgcacgtacggatgtaccgggccaggtctggaaggttgccccacaaatggtccaaagataccctccatcgcaacaggcatggtgggcgctctgcttctgctgttggtagttgccctggggattggcctgttcatgcggcgacgacacatagtcagaaagaggaccttgcgtcgactcctgcaggaaagagaactcgtagagccactgaccccttccggcgaagcgcctaatcaggcactgctgagaatcctcaaggaaacagaattcaagaaaataaaagtgctgggaagtggggcttttggcactgtttataaaggtctgtggattccggagggtgagaaagttaagattcctgtcgctatcaaagaactacgcgaggcaaccagccctaaagcaaataaggaaattctggatgaggcctatgtcatggctagcgtggacaatccacacgtgtgcagactgttagggatatgccttacgtcgaccgtccaattaattacccagctgatgcccttcggctgtctgctggactacgtgagagaacataaggacaatattggcagccagtatttactgaattggtgcgtacaaatagcaaaggggatgaactatttggaggaccgacgactagttcatcgagatttggcggcacggaacgtcttggtcaaaaccccccagcatgtcaagatcacagactttgggctagcaaaactcctcggcgctgaggaaaaggaatatcacgccgaggggggaaaagtcccaattaagtggatggccctcgagagcatcctgcataggatctacacgcatcagagtgacgtgtggtcctacggtgtgacagtttgggagctcatgacattcggctccaagccttacgatggaattcctgctagcgagatctcgagtatcctggaaaagggtgaacgcctgccacagcctccaatctgtactatcgatgtttacatgatcatggtaaagtgttggatgattgatgccgattccaggccaaaatttagagagcttatcatcgagtttagcaagatggctcgcgatcctcagagatatctggttattcagggggacgagagaatgcacctgccttcacctaccgattcaaacttttatcgtgctcttatggacgaagaagacatggacgacgtggtggatgctgacgaatatttgatcccccagcagggatttttcagttcaccctctacttcccgaacaccacttctttcctccctgtccgccacttccaacaactccacagtcgcctgcatcgatcgcaatggcctccagtcttgtccaattaaggaggattcatttctccagagatacagctctgacccaacaggggctttgactgaggattcaattgatgacacattcttgccagttcccgagtatatcaaccagtccgtacccaaaagacctgcgggtagtgtccagaatcccgtgtatcacaatcaaccccttaaccctgcaccttctcgcgatcctcactatcaagatcctcactccaccgctgtgggcaaccccgagtacttgaacactgtgcaaccaacttgcgttaactctacattcgattccccagctcactgggcccaaaaggggtcccatcagatctccctggacaatcctgattatcaacaagacttcttccccaaggaagccaagcctaacggcatctttaaaggcagcactgccgaaaatgccgagtatctgcgcgttgctcctcagtcatctgaattcatcggagcgtag

SEQ ID NO: 154160 - DNA, 3243 bp, Artificial Sequence
  derived and/or modified sequence
aatcgaaccgagggcgctgcccatgaaaaattcacgggaaaccctgcttggcgcagagcggtccagcagcagccttgcccagttgtggaaagtatccagtggcgagatatcgtctctagtgattttctgagtaatatgagtatggacttccagaaccacctcgggtcttgccagaagtgcgatcccagctgtccaaatggatcttgttggggcgcaggtgaagagaactgtcagaagcttaccaaaatcatttgcgcccagcaatgcagtggcagatgccgcggaaaaagcccgagtgattgctgtcataatcagtgcgcagcagggtgtacggggcctagggaatccgactgcctggtgtgtcgcaaatttagggatgaggctacctgcaaggacacttgccccccactgatgctatacaacccgacaacttaccagatggacgtgaacccggaaggaaagtactccttcggcgcaacttgcgtcaagaagtgtccaaggaactacgtggtgaccgaccacggtagctgcgttcgagcgtgcggtgctgatagctacgagatggaggaagacggtgtgcgaaagtgtaagaagtgcgagggaccatgcaggaaggtttgtaacggaatcggtatcggagaatttaaggactctctgtctatcaacgcaaccaatataaagcatttcaaaaactgtactagcatctccggagatcttcacatcctgccggtcgcattccgtggcgatagcttcacccacacgccacccctcgacccccaagagctggacattttaaaaaccgtgaaggagatcacaggcttcctactgattcaggcatggcccgagaaccgcacagacctgcatgccttcgaaaacttagagatcattagaggcaggaccaagcaacacggtcagttcagtctcgcagtggtgtccctaaatattactagcttgggtttgcgctcattgaaagagatttccgatggggatgttatcatcagcggaaataaaaatctgtgctacgcaaacaccattaattggaagaaattgtttgggaccagtggccagaagacgaagataatctcaaaccgcggagagaattcatgcaaggccacgggacaagtatgtcacgccttgtgttcccccgaaggctgttggggaccagaacccagggactgcgtctcctgcagaaacgtcagtcgcggtcgggaatgtgtggacaagtgcaacctattggaaggcgagccgagggaatttgtggaaaacagcgaatgcattcagtgccatcccgaatgtttgccgcaggcgatgaacattacctgcacgggacgtgggccagacaattgcatccagtgtgctcactacattgatggtccacattgtgtcaagacctgcccagcaggagtgatgggcgaaaacaatactcttgtgtggaagtatgctgacgccggtcacgtgtgtcatctgtgtcaccccaactgcacttacggttgcaccggaccaggcctcgagggatgccccactaatggtcctaaaattcctagcatcgctacagggatggtaggtgcacttctgttgctactggttgtggctctcggcattgggctctttatgaggcgcaggcacatcgtgcgaaagaggaccctgaggcgccttctgcaggaacgagaactcgtggagcctctcaccccatccggcgaggcgcctaaccaggccctcctgaggattcttaaagaaaccgaatttaaaaaaatcaaagtactaggcagcggtgctttcgggactgtgtataaggggctttggatcccggaaggcgaaaaagtaaagattcctgtcgcaatcaaggagctccgggaagcaacaagcccaaaggcaaacaaggagattctggatgaagcctatgtgatggcctccgtggacaacccacacgtgtgcaggctattaggcatctgcttgacatctacggtccaactgatcacccaacttatgcccttcggatgccttttggactacgtccgggagcacaaggacaatatcggctcacagtatctgctcaattggtgtgttcaaatcgcgaaaggtatgaactacctcgaggatcgcaggttggtgcaccgcgacttggcggctagaaatgtgctggtcaaaacaccacaacatgtcaaaatcaccgatttcggtctcgctaaactgctgggtgcagaggaaaaggaataccatgcagagggtggcaaggttcctattaaatggatggcactggagagcatcctgcacaggatctacacccaccaatctgatgtgtggagctacggtgttacagtttgggaactgatgactttcgggtcaaagccctacgatggcatcccggcttcagaaatctcaagtattctggagaaaggagagcgcctgccacagcccccaatatgtactatcgacgtgtatatgattatggtaaagtgctggatgattgacgccgatagcagacccaaatttagggagctcattattgaattttccaagatggctagggacccccagcggtatctggtgatccagggcgacgaaagaatgcatctgccgtctcccacagactccaacttttacagagcactcatggacgaggaggacatggacgacgtggtggatgccgacgagtatctcatcccacagcagggctttttctcctcccccagcacctcacggacacctctactgagctctttgagcgctacctcaaataactcgacagtggcatgcatcgataggaacggactgcagagctgtcctatcaaggaggacagttttttgcagcgctactcaagcgacccaactggtgccctgacggaagatagtattgatgatacattcctgccagtgccagagtacattaatcagtccgtcccaaagcgacccgcaggatcagttcagaaccccgtgtatcacaaccaaccgttaaacccagcgccttccagggacccccactatcaggatccccactcaacggccgtgggtaaccccgaatacctcaataccgtgcagcctacttgcgtcaattccacctttgactcgcccgctcactgggctcagaaaggctctcaccaaatctccctcgataatccagattaccagcaagactttttcccaaaagaagctaaaccaaatggtatttttaaaggcagcaccgcagagaatgccgaatatctccgtgtggccccacagtcctccgaatttatcggtgcttag

SEQ ID NO: 154161 - DNA, 1974 bp, Artificial Sequence
  derived and/or modified sequence
atgagaccttcaggcactgccggtgcagcactcctagctctgctggctgccctttgtcccgcatctcgggcactcgaggaaaagaaagtctgccagggtacctctaacaaactgacacagctgggaactttcgaagaccactttctgtccctacagcggatgttcaataactgcgaggttgtgctgggcaatctggaaatcacctatgttcagcgcaactatgacctcagcttcctcaagacaatacaggaggtggcaggctacgtactaatcgcccttaacacagtcgagcgtataccgttggagaatctgcagatcatccggggaaatatgtattatgagaacagttacgctctggcagtgttgagcaattacgacgccaacaaaacagggctcaaggagttgcctatgcgtaaccttcaggagattctccacggagcggtccggtttagtaataaccctgccctctgtaatgtcgagagtatacagtggagagatatcgtcagcagcgatttcctctccaatatgtctatggattttcagaaccatctgggctcctgtcaaaaatgtgatccctcttgccctaatggaagctgttggggcgcaggagaagagaactgtcagaaactgactaaaataatttgtgcgcagcaatgctctggcagatgtaggggcaaaagccccagcgactgttgtcacaatcagtgtgcggctggctgcaccgggcctagagaatcagactgcttggtctgccgcaagttcagggatgaagccacttgcaaggacacctgtccgcctcttatgctgtacaatccaacaacttaccagatggacgtgaacccagaaggtaagtattcctttggcgctacatgtgtgaagaagtgcccacggaattatgtggtaactgatcacggtagctgcgtccgtgcatgcggcgctgattcatacgagatggaagaagatggggttcgaaagtgcaagaagtgcgaaggcccatgccgcaaggtctgtaatggcatcggcatcggcgagttcaaggactccctttccattaatgcaactaacataaagcattttaagaattgtactagcatttcaggcgatttgcacatattaccagttgcttttaggggtgattcctttactcacactcccccattggatcctcaggaactggatattcttaaaacagtgaaggagattaccggatttctgctgattcaggcctggccagagaaccgtacagacctgcacgcgttcgagaacctggagatcataagaggcagaaccaagcagcacggccagttcagcctggccgtggtgtcccttaatataactagcctgggacttcgaagcctaaaggagatctcagatggggatgtcatcatttcaggaaataagaacttgtgctacgccaacactatcaattggaaaaagcttttcggtacatctgggcagaaaactaaaattatatctaacagaggggaaaacagctgcaaggctacaggccaggtgtgtcacgccttgtgttctccggagggatgctggggcccagagccaagggactgtgtctcctgtaggaacgtgagccggggaagggaatgtgttgataagtgcaacctgctggaaggggagcccagagaattcgttgagaactccgagtgtattcagtgccacccagagtgccttcctcaagctatgaacataacttgtacagggagaggtccagacaactgtattcagtgcgcccactatatcgatggccctcattgtgttaaaacctgccccgctggagtgatgggggagaataatactttagtgtggaaatatgccgatgctgggcacgtctgtcacctctgtcaccctaactgtacatacggatgtaccggccctgggcttgaagggtgcccgacaaatggcagttatatcgtatcacacttccctcggagcttttacaagatgagcgttcactag

SEQ ID NO: 154162 - DNA, 3474 bp, Artificial Sequence
  derived and/or modified sequence
atgttcaataactgcgaggtcgtgctggggaacctggagatcacttacgtgcaacgcaattacgacctttccttcctgaagaccattcaggaagttgctggttacgtgctcatcgcactcaatactgtggagaggatacctctcgaaaacttacaaatcattcggggaaacatgtattatgaaaactcttatgctctggctgtactgtctaactatgacgccaacaagacagggcttaaggagttgcctatgagaaatctgcaagagatactccacggagctgtacggttctcaaacaatcctgccctctgcaatgttgagtcgatccagtggagggatatcgtgtcaagcgactttctctccaacatgtcaatggacttccagaaccacttaggctcgtgtcagaagtgcgaccctagctgtcccaacgggtcatgttggggagccggagaagagaattgtcaaaaattgaccaaaatcatatgtgctcagcagtgcagcgggaggtgcagagggaagagcccctctgattgctgccacaaccagtgcgccgcaggatgtaccggccctagggagtccgactgtctggtctgtagaaaatttagggacgaggcaacgtgcaaggatacttgtccgccattgatgttgtataaccccaccacctaccagatggacgtgaatcccgagggcaagtactcatttggcgctacgtgcgtcaagaagtgtcccaggaattacgtagtcacagatcatggctcttgtgtacgggcatgcggggctgacagctatgaaatggaagaggatggtgtgcgcaagtgcaaaaagtgtgagggcccatgccgaaaggtgtgtaacggaattggtattggggagtttaaggattctctgtccataaacgccaccaatatcaaacacttcaagaactgcactagtatttctggggacctgcatatactgcccgttgcttttcgcggtgacagcttcacgcacactccacctcttgacccccaggagctcgatatcctgaaaactgtcaaggagataaccgggttcctcctgatacaagcctggcctgagaaccgaactgacctacacgcatttgagaatttggaaataataagaggaaggaccaaacagcacggtcagttttctctagctgtggtcagtctgaacatcacctctctcggcctcagatcgctgaaagagatcagtgacggggatgtgatcatttccggaaacaagaatctgtgctacgctaatacgattaattggaagaaattgttcggcacaagtggacagaaaactaaaatcatttctaacaggggagagaactcttgtaaggctacaggacaagtgtgccatgccctgtgtagcccagaggggtgctggggcccagagccgcgagactgcgtctcgtgccggaacgtgagtagaggtagggaatgcgtggataagtgtaacttactcgagggagaaccacgcgagtttgtcgaaaactcagagtgcatccaatgtcacccagaatgcctgcctcaggctatgaacatcacctgtacagggaggggtccagacaattgcatacagtgcgcacattacatcgatggacctcactgcgtgaaaacctgtcctgccggagttatgggggagaacaacaccctggtctggaaatacgcggatgctgggcacgtgtgccacctctgccatcctaattgcacctacggatgcactggtcccggactcgaaggctgtccaacaaatgggccaaagattccgagtattgccactgggatggttggcgcattactgttgctattggtcgttgcccttggaatcggtctgtttatgaggcgcagacatatcgtaagaaagcgaacactgcggaggttgttacaagaaagggaactggttgagcccctgacccccagtggcgaggctccaaaccaggcactgctcagaattcttaaggaaacggagtttaaaaaaataaaagtactaggttctggagcctttgggacggtgtacaagggcctgtggatcccagagggagaaaaagtgaagatccctgtcgccattaaagagctaagagaagccacctccccgaaggcaaacaaggaaatcctggatgaagcgtacgtgatggcctctgttgataatccacacgtctgccggctgctggggatttgtcttacatcaactgtgcagcttatcactcaattgatgcctttcggatgtctgttagattatgtgagagaacacaaagacaatattggatcccagtacctccttaattggtgcgtgcaaattgcaaaggggatgaattacctggaggaccggaggttagttcacagagacctagccgctcgtaacgtgctggttaagacaccccagcacgtcaaaattacagatttcggactggcaaaactgctcggggctgaagaaaaagagtatcacgctgaaggcggaaaggtccccatcaagtggatggccctcgagtctatcttgcacaggatctatacgcatcagagtgatgtttggtcttatggcgtgacggtgtgggaattgatgacttttggatccaaaccttatgacggcattcctgcgagtgaaattagctctattctggaaaagggagagaggttgccccaaccccctatttgcacaatcgacgtgtatatgattatggtgaaatgctggatgatcgatgccgattcgcggccaaagtttagagaacttattatcgaattctcaaagatggctcgtgacccacagcgctacctagtaatccagggagacgagcggatgcatttgcccagcccaacagacagtaacttttatcgtgctctcatggatgaggaggacatggacgacgtggtagatgccgatgaatacctgattccacagcagggcttcttttccagtcccagtaccagcaggacccctctgctgtcaagtctttctgctaccagcaataattccacagtggcttgtatagaccgcaacggcctgcaatcctgccctatcaaggaagattcttttctccaaagatatagcagtgacccaaccggtgctctcaccgaagattccattgacgacacatttctcccagtgcctgagtatataaatcagagcgtcccaaaacgacctgccggaagcgtgcagaatcccgtctaccataaccagcccctcaacccggctccgtcgagagaccctcattatcaggatccgcattccaccgcagtcggcaatccggagtacctgaataccgtgcagcccacctgtgtcaactccacttttgattcacctgcgcattgggcacagaagggtagtcaccagatttccctagataatcccgattatcagcaggacttctttccgaaggaagccaaacctaatgggatctttaagggcagtactgctgaaaacgcggaatatctaagggtggctccccaatcttccgagtttattggggcatag

SEQ ID NO: 154163 - DNA, 3276 bp, Artificial Sequence
  derived and/or modified sequence
atgcgtccttccgggactgccggagctgcactactcgctttgttagccgcactatgcccagccagtagagctttggaggaaaagaaggtgtgccaggggactagcaacaagttgacacagttgggaacttttgaggaccacttcctcagcctgcagcggatgttcaataactgcgaagtcgtgctgggcaaccttgaaataacatacgttcaaaggaattacgacctgagctttctgaagactattcaggaagttgcaggctacgtgctaatagcccttaacactgtggagagaatccccttggagaacctgcaaatcattcgcggtaacatgtactacgaaaattcctatgcactggccgttctgagcaactacgacgcgaataagactggactcaaagagcttccaatgaggaatcttcagggacaaaagtgcgacccttcatgccctaacggctcttgctggggagctggggaagaaaattgccaaaaactgactaaaattatttgcgcgcagcaatgttccggtcggtgccgtggcaagagccccagtgattgctgccataatcagtgtgctgctggatgcacagggcctcgcgagagcgattgcctggtgtgtcggaaatttcgcgatgaggcaacctgcaaggacacatgcccacccctgatgctgtataacccaactacctaccagatggacgtgaaccccgagggcaaatactcatttggcgctacgtgcgttaagaagtgcccccgaaactacgtcgtcacagaccatggctcctgcgtgcgggcttgtggggcagattcatacgagatggaggaggacggcgtcagaaaatgcaaaaaatgtgaaggtccttgccggaaagtttgcaatgggatcggaataggcgaattcaaggactccctctcaattaacgccacgaatatcaagcactttaaaaattgcacatcaatttccggagacctgcacatcctcccggtggcttttcggggtgactcttttacacatactccccctttggatccccaggagctcgatatactgaaaaccgtgaaggaaataacgggcttccttttgatccaggcgtggccagaaaatagaaccgacctacatgcgttcgagaacctagaaataattaggggcaggactaaacagcacggtcagttctctctggcagtggtgtccctgaacattacgagcctcgggctgaggtctttaaaagaaattagtgacggggacgtgattataagcggaaataagaatctgtgctatgccaataccattaattggaaaaagttgtttggaacgtccggccagaaaacaaaaatcattagcaaccgtggagaaaacagctgtaaggccacaggacaggtgtgtcacgccctttgtagcccagaaggctgctggggacccgagcccagagactgtgtctcttgccgaaatgtaagccgcggacgggaatgcgtggataagtgcaacctactcgagggtgaaccccgagaatttgtagaaaattcagagtgcattcagtgtcatccagaatgcctgcctcaggccatgaacatcacatgcactgggagggggcctgacaactgtatacagtgtgctcactatatcgatggacctcactgtgtgaagacatgccctgctggggtgatgggtgaaaacaacaccctggtgtggaaatacgccgacgctggccacgtctgccacctgtgccaccccaattgcacctatggctgtactggacccggacttgagggctgtccaactaacgggccaaaaattccgtctatagctaccggcatggtgggcgcactactcttactactcgtcgttgccttgggcatcggactattcatgcggcgacgacatattgtgcgaaaacggactcttcgacgcctattacaggaaagagaattggttgagccgctgacccccagcggggaggcccctaatcaggccttattaagaattctgaaagaaaccgagtttaagaagatcaaggtgttgggaagtggcgctttcgggacagtgtacaagggactctggattcccgagggtgagaaggttaagattcccgtcgctattaaggaactgagagaggcaaccagccctaaggccaataaggaaatcctggacgaagcatacgtcatggcatccgtggataatccacatgtctgccggctcctcggtatttgtcttacttctactgtgcagctgatcacccagctcatgccctttggttgtctgctggactatgtgagggagcacaaggataatatcggcagccagtacctactgaattggtgtgtacagatcgccaagggtatgaactatctcgaggataggcgccttgttcaccgcgatttggccgctcggaacgtgctggtgaaaacgcctcaacacgtgaaaattacagattttggccttgcaaagctgctgggggcagaggagaaagagtatcatgcagaggggggtaaggtcccgattaagtggatggcgctcgagtctattctgcacagaatttatacccaccagtcagacgtgtggagctacggggtgacggtctgggagctgatgactttcggcagtaagccatacgatggcatcccagcgtcagaaatttcctccattttggagaagggggagcgcctcccacaacccccaatctgtactatcgatgtatacatgattatggtcaagtgttggatgattgatgccgactctcgcccaaaatttcgggaactaatcatcgagtttagcaaaatggccagggacccacagcgctacctggtgatccaaggcgacgagcgcatgcatctgccttctccaactgattctaacttctaccgggcactgatggacgaggaggacatggatgacgtggtggatgcggacgagtatcttatccctcagcaagggtttttcagttcaccaagtacctctcggacccccctgctgtcttcactctctgctacctccaacaatagcaccgtcgcttgcatagaccgcaacgggctgcagtcttgccccatcaaagaggactcattcctgcagaggtactcaagcgacccaacgggagccctcacagaagattccatagatgacacctttttgccagtcccaggcgagtggctggtatggaagcagtcctgttcatctacctcctcaactcattccgctgccgcaagcctccagtgccccagccaggtgctaccacctgccagcccggaaggagaaacagtcgctgacctgcaaacacagtag

SEQ ID NO: 154164 - DNA, 1395 bp, Artificial Sequence
  derived and/or modified sequence
atgagttccctgacaaagattatttgcgctcagcagtgcagtggcagatgccgagggaagagtccttccgactgctgccacaatcagtgtgccgctggatgcaccggtccgagagaatctgattgcctcgtgtgcaggaagtttcgcgatgaggccacctgtaaggatacttgcccgccacttatgctttacaatcccactacttaccagatggatgtcaatccggaaggcaagtactccttcggggcaacatgcgtgaaaaaatgtccccgaaactacgttgtgacagaccacgggtcttgcgtgagagcatgtggagcagactcatacgagatggaggaagatggggtgcggaaatgtaagaaatgcgaagggccatgtcgaaaagtgtgcaatggcattgggattggtgagtttaaagattctctgtccatcaatgctacaaatataaaacacttcaaaaactgcacctcgataagtggggacctacacatcttgcctgtggccttcaggggagattcttttacacacacacctccactcgaccctcaggaattagacattctaaagactgtcaaggagattaccggattcctgctcattcaggcttggcctgagaacaggaccgacttgcacgccttcgagaatcttgaaatcatccggggacgaactaagcagcatggtcaatttagtctcgccgtggtgagcctgaacattacatccctgggcttgcggtccctaaaagagatatcagacggcgatgtgatcatctccggaaacaagaatctgtgctatgcgaacacaatcaattggaagaaactctttggcacgagcggacagaaaactaagatcatttccaaccgcggagaaaatagttgtaaagccaccgggcaggtgtgccatgcattatgctcaccagaaggttgttggggacccgagccgagagactgcgtctcgtgtaggaacgtgagcagaggccgtgagtgcgtggacaaatgtaatctattggagggtgagcccagagaattcgttgagaacagtgagtgcatacagtgccatccagagtgtctgcctcaagccatgaatattacttgtactgggagagggcctgataactgtatccagtgcgcccactacatagatggcccacactgcgtaaaaacctgtcccgctggtgtgatgggtgagaataacaccttagtgtggaagtatgccgacgcgggacatgtctgccatctgtgccaccccaattgcacctatggctgtactggccctggactggagggctgtccaacaaatggtcctaagattccctccattgcaaccggcatggtgggggctctgttactcctattggttgttgccctgggtatcggactattcatgagacgatag

SEQ ID NO: 154165 - protein, 428 aa, Artificial Sequence
  derived and/or modified sequence
MDPSVTLWQFLLQLLREQGNGHIISWTSRDGGEFKLVDAEEVARLWGLRKNKTNMNYDKLSRALRYYYDKNIIRKVSGQKFVYKFVSYPEVAGCSTEDCPPQPEVSVTSTMPNVAPAAIHAAPGDTVSGKPGTPKGAGMAGPGGLARSSRNEYMRSGLYSTFTIQSLQPQPPPHPRPAVVLPSAAPAGAAAPPSGSRSTSPSPLEACLEAEEAGLPLQVILTPPEAPNLKSEELNVEPGLGRALPPEVKVEGPKEELEVAGERGFVPETTKAEPEVPPQEGVPARLPAVVMDTAGQAGGHAASSPEISQPQKGRKPRDLELPLSPSLLGGPGPERTPGSGSGSGLQAPGPALTPSLLPTHTLTPVLLTPSSLPPSIHFWSTLSPIAPRSPAKLSFQFPSSGSAQVHIPSISVDGLSTPVVLSPGPQKP

SEQ ID NO: 154166 - protein, 121 aa, Artificial Sequence
  derived and/or modified sequence
MDTAGQAGGHAASSPEISQPQKGRKPRDLELPLSPSLLGGPGPERTPALLPTHTLTPVLLTPSSLPPSIHFWSTLSPIAPRSPAKLSFQFPSSGSAQVHIPSISVDGLSTPVVLSPGPQKP

SEQ ID NO: 154167 - DNA, 2833 bp, Artificial Sequence
  derived and/or modified sequence
ctcgggcccacgtgagctgtagggaaacgcaggggcggcttctaggtgctgccgccgccaccgccaccaccacctccaccgccgcctcggaacccaggcctggggggcggtggggccgcgtatggagcccccgccccccggagctgccaacattgccaacgccaccgccacgctacacacaggtacccctgggatggcgtgagcactcccccagcgatggacccatctgtgacgctgtggcagtttctgctgcagctgctgagagagcaaggcaatggccacatcatctcctggacttcacgggatggtggtgaattcaagctggtggatgcagaggaggtggcccggctgtgggggctacgcaagaacaagaccaacatgaattacgacaagctcagccgggccttgcggtactactatgacaagaacatcatccgcaaggtgagcggccagaagttcgtctacaagtttgtgtcctaccctgaggtcgcagggtgctccactgaggactgcccgccccagccagaggtgtctgttacctccaccatgccaaatgtggcccctgctgctatacatgccgccccaggggacactgtctctggaaagccaggcacacccaagggtgcaggaatggcaggcccaggcggtttggcacgcagcagccggaacgagtacatgcgctcgggcctctattccaccttcaccatccagtctctgcagccgcagccaccccctcatcctcggcctgctgtggtgctccccagtgcagctcctgcaggggcagcagcgcccccctcggggagcaggagcaccagtccaagccccttggaggcctgtctggaggctgaagaggccggcttgcctctgcaggtcatcctgaccccgcccgaggccccaaacctgaaatcggaagagcttaatgtggagccgggtttgggccgggctttgcccccagaagtgaaagtagaagggcccaaggaagagttggaagttgcgggggagagagggtttgtgccagaaaccaccaaggccgagccagaagtccctccacaggagggcgtgccagcccggctgcccgcggttgttatggacaccgcagggcaggcgggcggccatgcggcttccagccctgagatctcccagccgcagaagggccggaagccccgggacctagagcttccactcagcccgagcctgctaggtgggccgggacccgaacggaccccaggatcgggaagtggctccggcctccaggctccggggccggcgctgaccccatccctgcttcctacgcatacattgaccccggtgctgctgacacccagctcgctgcctcctagcattcacttctggagcaccctgagtcccattgcgccccgtagcccggccaagctctccttccagtttccatccagtggcagcgcccaggtgcacatcccttctatcagcgtggatggcctctcgacccccgtggtgctctccccagggccccagaagccatgactactaccaccaccaccaccaccccttctggggtcactccatccatgctctctccagccagccatctcaaggagaaacatagttcaactgaaagactcatgctctgattgtggtggggtggggatccttgggaagaattactcccaagagtaactctcattatctcctccacagaaaacacacagcttccacaacttctctgttttctgtcagtcccccagtggccgcccttacacgtctcctacttcaatggtaggggcggtttatttatttattttttgaaggccactgggaggagcctgacctaaccttttagggtggttaggacatctcccccacctccccacttttttccccaagacaagacaatcgaggtctggcttgagaacgacctttctttctttatttctcagcctgcccttggggagatgagggagccctgtctgcgtttttggatgtgagtagaagagttagtttgttttgttttattattcctggccatactcaggggtccaggaagaatttgtaccatttaatgggttgggagtcttggccaaggaagaatcacacccttggaatagaaatttccacctccccaacctttctctcagacagcttatccttttcaaccaactttttggccagggaggaatgtcccttttgttcttccccctgagaagccattcctttgtctgccaacctccctggggtcctgcctgtttcctcccaatggagggtttttttggggggtggtccccgtctggggggcccctccagccagtactccaggtctccctgtctctcccccgctgccattttgatagtataatctatttttaaatggggcttttcaataggggagagggagtcatctcttcctatatttggtggggtgggtgggaaggaagggatttgggggggaatcttcctgccgcctcccccactccaagtgtttatttttgataccaaacatgaattttcagttccctccctcccagccccccaatttcctgcgggcgggtacaaaggaccctttcaatgtccctggagttgggagggaggaatgggggacataaagcctgtcctgtctctattctaggcaagagagagtgggttcaaaagactcctgggctcacctgttagcgctggcccagcccaggccttgggacctgggggttggtgatttgggggacagtgctacactcgtctccactgtttgttttacttccccaaaatggaccttttttttttctaaagagtcccagagaatggggaattgttcctgtaaatatatatttttcaaagtgaaaaaaaaaaaaaaaaaaaaaaa

SEQ ID NO: 154168 - DNA, 1287 bp, Artificial Sequence
  derived and/or modified sequence
atggaccccagcgtgaccctgtggcagttcctgctgcagctgctgagagagcagggcaacggccacatcatcagctggaccagcagagacggcggcgagttcaagctggtggacgccgaggaggtggccagactgtggggcctgagaaagaacaagaccaacatgaactacgacaagctgagcagagccctgagatactactacgacaagaacatcatcagaaaggtgagcggccagaagttcgtgtacaagttcgtgagctaccccgaggtggccggctgcagcaccgaggactgccccccccagcccgaggtgagcgtgaccagcaccatgcccaacgtggcccccgccgccatccacgccgcccccggcgacaccgtgagcggcaagcccggcacccccaagggcgccggcatggccggccccggcggcctggccagaagcagcagaaacgagtacatgagaagcggcctgtacagcaccttcaccatccagagcctgcagccccagccccccccccaccccagacccgccgtggtgctgcccagcgccgcccccgccggcgccgccgccccccccagcggcagcagaagcaccagccccagccccctggaggcctgcctggaggccgaggaggccggcctgcccctgcaggtgatcctgaccccccccgaggcccccaacctgaagagcgaggagctgaacgtggagcccggcctgggcagagccctgccccccgaggtgaaggtggagggccccaaggaggagctggaggtggccggcgagagaggcttcgtgcccgagaccaccaaggccgagcccgaggtgcccccccaggagggcgtgcccgccagactgcccgccgtggtgatggacaccgccggccaggccggcggccacgccgccagcagccccgagatcagccagccccagaagggcagaaagcccagagacctggagctgcccctgagccccagcctgctgggcggccccggccccgagagaacccccggcagcggcagcggcagcggcctgcaggcccccggccccgccctgacccccagcctgctgcccacccacaccctgacccccgtgctgctgacccccagcagcctgccccccagcatccacttctggagcaccctgagccccatcgcccccagaagccccgccaagctgagcttccagttccccagcagcggcagcgcccaggtgcacatccccagcatcagcgtggacggcctgagcacccccgtggtgctgagccccggcccccagaagccctag

SEQ ID NO: 154169 - DNA, 366 bp, Artificial Sequence
  derived and/or modified sequence
atggacaccgccggccaggccggcggccacgccgccagcagccccgagatcagccagccccagaagggcagaaagcccagagacctggagctgcccctgagccccagcctgctgggcggccccggccccgagagaacccccgccctgctgcccacccacaccctgacccccgtgctgctgacccccagcagcctgccccccagcatccacttctggagcaccctgagccccatcgcccccagaagccccgccaagctgagcttccagttccccagcagcggcagcgcccaggtgcacatccccagcatcagcgtggacggcctgagcacccccgtggtgctgagccccggcccccagaagccctag

SEQ ID NO: 154170 - DNA, 2695 bp, Artificial Sequence
  derived and/or modified sequence
cgcgtatggagcccccgccccccggagctgccaacattgccaacgccaccgccacgctacacacaggtacccctgggatggcgtgagcactcccccagcgatggacccatctgtgacgctgtggcagtttctgctgcagctgctgagagagcaaggcaatggccacatcatctcctggacttcacgggatggtggtgaattcaagctggtggatgcagaggaggtggcccggctgtgggggctacgcaagaacaagaccaacatgaattacgacaagctcagccgggccttgcggtactactatgacaagaacatcatccgcaaggtgagcggccagaagttcgtctacaagtttgtgtcctaccctgaggtcgcagggtgctccactgaggactgcccgccccagccagaggtgtctgttacctccaccatgccaaatgtggcccctgctgctatacatgccgccccaggggacactgtctctggaaagccaggcacacccaagggtgcaggaatggcaggcccaggcggtttggcacgcagcagccggaacgagtacatgcgctcgggcctctattccaccttcaccatccagtctctgcagccgcagccaccccctcatcctcggcctgctgtggtgctccccagtgcagctcctgcaggggcagcagcgcccccctcggggagcaggagcaccagtccaagccccttggaggcctgtctggaggctgaagaggccggcttgcctctgcaggtcatcctgaccccgcccgaggccccaaacctgaaatcggaagagcttaatgtggagccgggtttgggccgggctttgcccccagaagtgaaagtagaagggcccaaggaagagttggaagttgcgggggagagagggtttgtgccagaaaccaccaaggccgagccagaagtccctccacaggagggcgtgccagcccggctgcccgcggttgttatggacaccgcagggcaggcgggcggccatgcggcttccagccctgagatctcccagccgcagaagggccggaagccccgggacctagagcttccactcagcccgagcctgctaggtgggccgggacccgaacggaccccaggatcgggaagtggctccggcctccaggctccggggccggcgctgaccccatccctgcttcctacgcatacattgaccccggtgctgctgacacccagctcgctgcctcctagcattcacttctggagcaccctgagtcccattgcgccccgtagcccggccaagctctccttccagtttccatccagtggcagcgcccaggtgcacatcccttctatcagcgtggatggcctctcgacccccgtggtgctctccccagggccccagaagccatgactactaccaccaccaccaccaccccttctggggtcactccatccatgctctctccagccagccatctcaaggagaaacatagttcaactgaaagactcatgctctgattgtggtggggtggggatccttgggaagaattactcccaagagtaactctcattatctcctccacagaaaacacacagcttccacaacttctctgttttctgtcagtcccccagtggccgcccttacacgtctcctacttcaatggtaggggcggtttatttatttattttttgaaggccactgggaggagcctgacctaaccttttagggtggttaggacatctcccccacctccccacttttttccccaagacaagacaatcgaggtctggcttgagaacgacctttctttctttatttctcagcctgcccttggggagatgagggagccctgtctgcgtttttggatgtgagtagaagagttagtttgttttgttttattattcctggccatactcaggggtccaggaagaatttgtaccatttaatgggttgggagtcttggccaaggaagaatcacacccttggaatagaaatttccacctccccaacctttctctcagacagcttatccttttcaaccaactttttggccagggaggaatgtcccttttgttcttccccctgagaagccattcctttgtctgccaacctccctggggtcctgcctgtttcctcccaatggagggtttttttggggggtggtccccgtctggggggcccctccagccagtactccaggtctccctgtctctcccccgctgccattttgatagtataatctatttttaaatggggcttttcaataggggagagggagtcatctcttcctatatttggtggggtgggtgggaaggaagggatttgggggggaatcttcctgccgcctcccccactccaagtgtttatttttgataccaaacatgaattttcagttccctccctcccagccccccaatttcctgcgggcgggtacaaaggaccctttcaatgtccctggagttgggagggaggaatgggggacataaagcctgtcctgtctctattctaggcaagagagagtgggttcaaaagactcctgggctcacctgttagcgctggcccagcccaggccttgggacctgggggttggtgatttgggggacagtgctacactcgtctccactgtttgttttacttccccaaaatggaccttttttttttctaaagagtcccagagaatggggaattgttcctgtaaatatatatttttcaaagtga

SEQ ID NO: 154171 - DNA, 2258 bp, Artificial Sequence
  derived and/or modified sequence
gagctgtagggaaacgcaggggcggcttctaggtgctgccgccgccaccgccaccaccacctccaccgccgcctcggaacccaggcctggggggcggtggggccgcgtatggagcccccgccccccggagctgccaacattgccaacgccaccgccacgctacacacagcctcaactttcaggagacccgtccgtggccttatttattccacccttcctgtacatcgtagcgaatcaatccgtggcgccgcactcctccgcatccctctttaacagtacccctgggatggcgtgagcactcccccagcgatggacccatctgtgacgctgtggcagtttctgctgcagctgctgagagagcaaggcaatggccacatcatctcctggacttcacgggatggtggtgaattcaagctggtggatgcagaggaggtggcccggctgtgggggctacgcaagaacaagaccaacatgaattacgacaagctcagccgggccttgcggtactactatgacaagaacatcatccgcaaggtgagcggccagaagttcgtctacaagtttgtgtcctaccctgaggtcgcagggtgctccactgaggactgcccgccccagccagaggtgtctgttacctccaccatgccaaatgtggcccctgctgctatacatgccgccccaggggacactgtctctggaaagccaggcacacccaagggtgcaggaatggcaggcccaggcggtttggcacgcagcagccggaacgagtacatgcgctcgggcctctattccaccttcaccatccagtctctgcagccgcagccaccccctcatcctcggcctgctgtggtgctccccagtgcagctcctgcaggggcagcagcgcccccctcggggagcaggagcaccagtccaagccccttggaggcctgtctggaggctgaagaggccggcttgcctctgcaggtcatcctgaccccgcccgaggccccaaacctgaaatcggaagagcttaatgtggagccgggtttgggccgggctttgcccccagaagtgaaagtagaagggcccaaggaagagttggaagttgcgggggagagagggtttgtgccagaaaccaccaaggccgagccagaagtccctccacaggagggcgtgccagcccggctgcccgcggttgttatggacaccgcagggcaggcgggcggccatgcggcttccagccctgagatctcccagccgcagaagggccggaagccccgggacctagagcttccactcagcccgagcctgctaggtgggccgggacccgaacggaccccaggatcgggaagtggctccggcctccaggctccggggccggcgctgaccccatccctgcttcctacgcatacattgaccccggtgctgctgacacccagctcgctgcctcctagcattcacttctggagcaccctgagtcccattgcgccccgtagcccggccaagctctccttccagtttccatccagtggcagcgcccaggtgcacatcccttctatcagcgtggatggcctctcgacccccgtggtgctctccccagggccccagaagccatgactactaccaccaccaccaccaccccttctggggtcactccatccatgctctctccagccagccatctcaaggagaaacatagttcaactgaaagactcatgctctgattgtggtggggtggggatccttgggaagaattactcccaagagtaactctcattatctcctccacagaaaacacacagcttccacaacttctctgttttctgtcagtcccccagtggccgcccttacacgtctcctacttcaatggtaggggcggtttatttatttattttttgaaggccactgggaggagcctgacctaaccttttagggtggttaggacatctcccccacctccccacttttttccccaagacaagacaatcgaggtctggcttgagaacgacctttctttctttatttctcagcctgcccttggggagatgagggagccctgtctgcgtttttggatgtgagtagaagagttagtttgttttgttttattattcctggccatactcaggggtccaggaagaatttgtaccatttaatgggttgggagtcttggccaaggaagaatcacacccttggaatagaaatttccacctccccaacctttctctcagacagcttatccttttcaaccaactttttggccagggaggaatgtccctttt

SEQ ID NO: 154172 - DNA, 1859 bp, Artificial Sequence
  derived and/or modified sequence
ctgaaatcggaagagcttaatgtggagccgggtttgggccgggctttgcccccagaagtgaaagtagaagggcccaaggaagagttggaagttgcgggggagagagggtttgtgccagaaaccaccaaggccgagccagaagtccctccacaggagggcgtgccagcccggctgcccgcggttgttatggacaccgcagggcaggcgggcggccatgcggcttccagccctgagatctcccagccgcagaagggccggaagccccgggacctagagcttccactcagcccgagcctgctaggtgggccgggacccgaacggaccccagccctgcttcctacgcatacattgaccccggtgctgctgacacccagctcgctgcctcctagcattcacttctggagcaccctgagtcccattgcgccccgtagcccggccaagctctccttccagtttccatccagtggcagcgcccaggtgcacatcccttctatcagcgtggatggcctctcgacccccgtggtgctctccccagggccccagaagccatgactactaccaccaccaccaccaccccttctggggtcactccatccatgctctctccagccagccatctcaaggagaaacatagttcaactgaaagactcatgctctgattgtggtggggtggggatccttgggaagaattactcccaagagtaactctcattatctcctccacagaaaacacacagcttccacaacttctctgttttctgtcagtcccccagtggccgcccttacacgtctcctacttcaatggtaggggcggtttatttatttattttttgaaggccactgggaggagcctgacctaaccttttagggtggttaggacatctcccccacctccccacttttttccccaagacaagacaatcgaggtctggcttgagaacgacctttctttctttatttctcagcctgcccttggggagatgagggagccctgtctgcgtttttggatgtgagtagaagagttagtttgttttgttttattattcctggccatactcaggggtccaggaagaatttgtaccatttaatgggttgggagtcttggccaaggaagaatcacacccttggaatagaaatttccacctccccaacctttctctcagacagcttatccttttcaaccaactttttggccagggaggaatgtcccttttgttcttccccctgagaagccattcctttgtctgccaacctccctggggtcctgcctgtttcctcccaatggagggtttttttggggggtggtccccgtctggggggcccctccagccagtactccaggtctccctgtctctcccccgctgccattttgatagtataatctatttttaaatggggcttttcaataggggagagggagtcatctcttcctatatttggtggggtgggtgggaaggaagggatttgggggggaatcttcctgccgcctcccccactccaagtgtttatttttgataccaaacatgaattttcagttccctccctcccagccccccaatttcctgcgggcgggtacaaaggaccctttcaatgtccctggagttgggagggaggaatgggggacataaagcctgtcctgtctctattctaggcaagagagagtgggttcaaaagactcctgggctcacctgttagcgctggcccagcccaggccttgggacctgggggttggtgatttgggggacagtgctacactcgtctccactgtttgttttacttccccaaaatggaccttttttttttctaaagagtcccagagaatggggaattgttcctgtaaatatatatttttcaaagtg

SEQ ID NO: 154173 - DNA, 1287 bp, Artificial Sequence
  derived and/or modified sequence
atggatcctagtgtgaccctgtggcagttcctgttgcagctactccgcgaacaggggaacggccacatcatctcgtggacctccagggacggtggcgaatttaaacttgtcgatgctgaggaggtggcaagattgtgggggttgcggaagaacaagaccaacatgaattacgacaagctgagcagagctctgaggtattattatgataagaacattataagaaaggtgagcggccagaaattcgtgtataagttcgtttcctaccctgaggtagctggctgcagcactgaagattgccctccacagcctgaggtgagtgtaacttctaccatgcccaacgtcgctccagccgccatacacgcggcaccaggggataccgtttctggtaagcctggaactcccaagggggctggcatggccggtccgggtggcctagctcggtcttcaagaaacgagtacatgcggtccggtctctatagcacatttacaatacagtcccttcaacctcaacccccaccgcacccccgacctgcggtggtgctcccttctgctgccccggccggggccgccgcaccaccttctgggtctagaagtactagtccctccccactcgaggcctgtctggaggcggaggaagccgggcttcccctgcaggttatcctgactcccccagaggcaccaaacctcaagtctgaagagttgaacgtggagcctgggctgggcagagccttgcccccagaggtgaaagtcgaaggccccaaggaggaactcgaggtagccggagagcgtggtttcgtgcccgaaacgacgaaggcagagccagaggtgcccccacaagagggggtgccagcccgtctgcctgcggtcgtcatggacactgcaggccaggccggcggccacgcggcaagctctccagagatctctcagccccagaagggcagaaagccgcgcgacctcgaactccccctcagtccaagccttctaggaggccccggtccagaacgcacacccggaagcggatccgggtctggactgcaagcgcccggaccggctctcacgccatcattgcttccaacgcacaccctgacacccgtgttactgactccttcttcactccctcccagcattcacttctggtccactctgtcaccaatcgcccctaggagccccgcaaaactgagtttccagttcccttctagcggttctgcccaggttcacatcccctccatctcagtagacgggcttagcacaccagtcgtgctcagccctggaccacagaagccttag

SEQ ID NO: 154174 - DNA, 1287 bp, Artificial Sequence
  derived and/or modified sequence
atggatcccagtgtgaccctgtggcaattcctgctgcagctactccgggagcagggcaacgggcacatcatctcgtggacttcccgggacggtggcgaattcaaactggtggacgcggaggaagtagctcgtttgtggggacttaggaagaacaagactaacatgaattacgataaactgtctagagcactgagatattactatgataaaaacataatccggaaagtttcgggccagaaatttgtgtacaagtttgtcagttatcctgaggtagcaggttgtagcaccgaagattgcccacctcagcctgaagtttccgtcacctctactatgcccaatgtggctcctgccgcaattcacgccgcccctggagatacagtgtccggcaagccaggcacccctaagggagccggaatggccggacccggcggccttgcaaggtccagccgtaacgagtatatgaggtccggactttacagtacattcacaattcagagtctccaacctcagccgccaccacatccccgcccggccgttgttttgccttcagccgctccggccggtgcagcagctccaccttctggctcaagaagcacaagcccatcccctcttgaggcatgtttagaggccgaggaggcaggcctgccactgcaggttatcctcacccctcctgaagcgccaaacttaaaatctgaggagctcaacgttgagcctggcctgggtcgcgcgttgccacccgaagttaaggttgaaggaccaaaagaagagctggaggtcgctggggagcggggctttgtgcccgagaccacaaaggcagaaccagaggtgccccctcaggagggggtacccgctcgcctccctgccgtggtgatggacactgcgggacaggccggtggacatgctgcatcttccccagagatctctcaaccacaaaaagggcggaagccgagggatttggaattacccctgtctccctccctgctgggtgggcccggtccagaaagaacccctggatccggatctggctcagggttacaggccccgggcccggctcttacgcctagcctattgcccacccacaccctgaccccagtgctcctcacaccctcaagcctgcctccttccatccacttctggtcaactttatctccaatagctcctagatctccagctaaacttagcttccagtttccctcaagtggaagcgctcaagtgcatattcccagcatctctgtggacggattgagcactcccgtagtactgtctccaggcccacagaaaccttag

SEQ ID NO: 154175 - DNA, 366 bp, Artificial Sequence
  derived and/or modified sequence
atggatacggccggccaggcaggaggccatgccgcctcctcaccagagatcagtcaaccccagaaaggccgcaaacccagggatcttgaactccccctgagtcctagtctgcttggagggcctggtccagagcggacccccgccctccttcctacacacactttgactcccgtactgctcacaccttcatccctcccaccttctatacatttctggtcaaccctgagtccaattgctccgcggagtcctgcaaagctgagcttccagttcccctcctctggctcggcacaggtccacattccctcaatctcagttgacggcctctccaccccagtggtgctgagcccaggccctcagaaaccctag

SEQ ID NO: 154176 - DNA, 1287 bp, Artificial Sequence
  derived and/or modified sequence
atggaccccagcgtgaccctgtggcagttcctgctgcagctgctgcgggagcagggcaatggccacatcatctcctggaccagcagagatggaggagagttcaagctggtggatgctgaggaggtggcccggctgtggggcctgaggaagaacaagaccaacatgaactatgacaagctgagccgggccctgcgctactactatgacaagaacatcatcaggaaggtgtctggccagaagtttgtgtacaagtttgtgtcctacccagaggtggccggctgcagcacagaggactgccccccccagcctgaggtgtctgtgaccagcaccatgcccaacgtggccccagctgccatccatgctgcccctggggacacagtgtctgggaagccaggcacccccaagggagctggcatggccggccctgggggcctggcccggagcagcagaaatgagtacatgaggagcggcctgtacagcaccttcaccatccagagcctgcagccccagcccccaccccaccccaggcctgctgtggtgctgcccagcgctgccccagctggagctgctgccccacccagcggcagccgcagcaccagccccagccccctggaggcctgcctggaggccgaggaggccggcctgcccctgcaggtgatcctgaccccacctgaggcccccaacctgaagtctgaggagctgaatgtggagcccggcctgggccgggccctgcccccagaggtgaaggtggagggccccaaggaggagctggaggtggccggggagcggggctttgtgcctgagaccaccaaggccgagcctgaggtgcccccccaggagggcgtgcctgcccggctgcctgctgtggtgatggacacagctggccaggccggcggccatgctgccagcagccctgagatcagccagccccagaagggcaggaagccccgggacctggagctgcccctgagccccagcctgctgggcggccctggccctgagaggaccccaggcagcggcagcggcagcggcctgcaggcccctggccctgccctgacccccagcctgctgcccacccacaccctgacccctgtgctgctgacccccagcagcctgcccccatccatccacttctggagcaccctgagccccatcgcccccaggagccctgccaagctgtccttccagttccccagcagcggcagcgcccaggtgcacatccccagcatctctgtggatggcctgagcacccctgtggtgctgagccctggcccccagaagccctag

SEQ ID NO: 154177 - DNA, 366 bp, Artificial Sequence
  derived and/or modified sequence
atggacacagctggccaggccggcggccatgctgccagcagccctgagatcagccagccccagaagggcaggaagccccgggacctggagctgcccctgagccccagcctgctgggcggccctggccctgagaggaccccagccctgctgcccacccacaccctgacccctgtgctgctgacccccagcagcctgccccccagcatccacttctggagcaccctgagccccatcgcccccaggagccctgccaagctgtccttccagttccccagcagcggcagcgcccaggtgcacatccccagcatctctgtggatggcctgagcacccctgtggtgctgagccctggcccccagaagccctag

SEQ ID NO: 154178 - DNA, 1287 bp, Artificial Sequence
  derived and/or modified sequence
atggaccccagcgtgaccctgtggcagttcctgctgcagctgctgagggaacagggaaacggccatattatctcttggacttctagagacggcggcgagtttaagctcgtggatgctgaagaggtcgctcgcctgtggggccttcgcaaaaataaaaccaatatgaattatgataagctgtctagagctctacggtactactacgataagaatattatccggaaagtgtcggggcagaagtttgtgtacaaattcgtaagttaccccgaagtggcaggctgtagcacagaagactgcccaccacagcctgaggtgtccgtgacttcgaccatgccgaacgtagctcccgccgccatccatgcagcgccaggagacaccgtgtccggcaaaccaggcactccgaagggggccgggatggcaggacccgggggccttgcaaggtcctctcgcaatgaatacatgaggtctggactgtattccactttcacaatccagagcctccaaccacagcccccaccccaccctcggccagcagtcgtcctaccctctgccgccccagcaggggccgccgctcctccatccggatctaggagcacatcaccaagcccactggaggcttgtctggaggccgaggaagcaggactacccctgcaggttatcctgacgccaccggaggctccgaacctgaagtctgaggaactgaacgtcgaacctggcctgggcagggccctcccgccggaggtcaaagtcgagggcccaaaggaagagctggaagtggcaggcgaaagaggtttcgtaccggagactactaaagccgaacctgaagtgccacctcaggagggagtgcctgcccggctgccagctgtggtaatggatactgccggccaggctgggggacatgccgcttcttcccccgaaatctcccaaccccagaagggacgaaaaccccgggacttggagctcccactatccccgtcccttctcggaggacccgggcctgagagaacaccaggatctggatccggatccggtctgcaggcacctggacctgctctaacccccagcttgctacccactcataccctgacacccgtgctgctgacgccatcatcactgcctccttctattcacttctggtctacactgagccccatagcccccaggagcccagcaaagttgagctttcagttcccatccagcggtagcgcccaagttcatatcccgtctatatcggtagacgggctctctactccagttgtactcagccctggtcctcaaaagccatag

SEQ ID NO: 154179 - DNA, 1287 bp, Artificial Sequence
  derived and/or modified sequence
atggaccccagcgtgaccctgtggcagttcctgctgcagctgctgcgggagcaaggaaatggacacatcatcagttggactagcagggacggaggtgaattcaagcttgtcgacgctgaggaggttgcaaggttgtgggggttgcgtaagaacaaaaccaatatgaattatgacaaactgtctagagcactgcgctactattatgataaaaatattatcagaaaggtaagtggccagaagttcgtgtataaatttgtgagctacccagaggtagccggctgtagtacagaagattgccccccacagcccgaagtcagcgttacctcaactatgcctaacgttgccccggctgctatccacgcagccccaggcgacaccgtaagtggaaaaccgggaacccctaaaggcgctggaatggccgggcccggcggcctggcgcgtagcagcaggaatgaatacatgagatcaggcctgtactcaaccttcacaatacagtctttgcagccccaaccacctcctcaccctcggcccgcggtcgtcctcccttcggcagccccggcaggtgctgccgctcctcctagcggctccaggtctacctcaccctcacctctcgaagcatgtctggaggctgaagaggcaggattgcccctacaagtcatccttaccccgcctgaggcccctaatctgaagtccgaagaactgaacgtagagccagggctggggagagccctgccccctgaggttaaggtggagggcccaaaagaggagctggaggttgcaggcgaacgcggatttgtgcctgaaacaacaaaagctgaaccagaggtcccgccccaggagggcgtgccagcccgactacccgctgtagtgatggacacggcagggcaggccgggggtcatgccgcatctagcccggagatctcccaacctcagaagggccgaaaaccaagggacttggagttaccgctctctccaagtctgctggggggtcccggaccagaaagaactccaggctccggctctggctctgggcttcaggcacccgggcccgcactgacaccaagcctacttccgactcatactctaacccccgtcctgttaaccccctcctctctgccaccaagcattcatttctggagcaccctaagccctatcgctcccaggtcgcctgcaaaattatccttccagtttcccagcagcggaagtgcccaggtgcacatccctagcataagcgtcgacggactgtccaccccagttgtactgagccctggccctcaaaaaccatag

SEQ ID NO: 154180 - DNA, 366 bp, Artificial Sequence
  derived and/or modified sequence
atggacaccgccggccaggccggcggccacgccgccagcagccccgaaatctcccagcctcaaaaagggaggaagccccgggatcttgaactccccctgagcccgagccttctgggtggacccggccccgaacggactcctgcgctactccctacacataccctgactccagtgctgcttactccatcttcactccctccctctattcatttctggtccacactctcgccaatcgcgccccgctcacctgcaaagctgtcattccagtttccttcaagtgggagtgcacaggtgcacattccgagcattagcgtggacggattgtctactcctgtcgtgctgtcaccaggacctcagaagccatag

SEQ ID NO: 154181 - DNA, 1287 bp, Artificial Sequence
  derived and/or modified sequence
atggacccctccgtaactctgtggcagtttctgctccagctactgcgagagcaaggcaatggccacatcatctcgtggacctctagagatgggggagagtttaaactggtcgatgcagaagaggtggctcgtctctgggggctgcgcaaaaataagacgaacatgaattacgacaagctgtcccgtgccctaagatactactatgacaaaaacattatccggaaggtgtcaggacagaaatttgtgtacaaatttgttagttacccagaagtggctggttgtagcacggaggactgtccgcctcaacccgaggtctccgtgaccagcacaatgccaaatgtcgccccagccgctatccatgcagccccaggggatacggtgagcggtaagcccggtactcctaaaggtgccggaatggccggacctggaggtctcgctcggtcatcacgtaatgaatatatgcgatctgggctgtactccacctttacaatccagagtttgcagcctcaaccgccaccacacccaagacccgctgtcgtgttgcccagcgctgcccctgcaggtgcagccgctccccctagtgggagtagaagcaccagcccttctcctctagaggcttgcctggaggcagaagaggctgggttgccactgcaggtaatcttgacaccccctgaagcccctaacttgaagtctgaggagctgaacgtagagcccggactagggagagcattgccacccgaagtcaaagtggagggccctaaagaagaactggaagtcgctggtgagaggggatttgtccccgaaacaaccaaagcggaacctgaggtccccccacaagagggggtgccggctagactgccagcagtggtcatggacacggcagggcaggcgggagggcacgcagcttcgtccccggagatctcacagcctcagaagggcagaaagcccagggacctggagctccctctcagcccctcgctgctaggcggtcctggaccagagcgaactcctggttctggctccggctcaggcttgcaggctccaggtccagccttaactccctccctgctgcccacccacactcttaccccagttcttctaacgccttccagcttgcctcctagtattcatttctggtctaccctgtcccctattgcaccacggtcaccagcaaagcttagtttccagtttccctctagcggctcggcgcaagtccatattccctctattagcgtggatggcctttcgacccctgtggttctgtccccagggcctcaaaagccctag

SEQ ID NO: 154182 - DNA, 1287 bp, Artificial Sequence
  derived and/or modified sequence
atggacccaagtgtgacattgtggcagttcctgttgcaattgttgcgggagcagggtaatggccacatcatctcttggacctccagagacggcggagagttcaaactcgtagatgctgaggaggtcgcaagactgtggggtcttcgaaaaaataagaccaacatgaactatgacaaacttagtcgcgctttgcgctactattatgacaagaacatcatccgcaaggttagcggacaaaaattcgtatacaaatttgtgagttacccagaggtggccggatgcagtactgaagactgccctccacagccggaggtttccgttaccagtacgatgcccaacgtggcccctgcagccatacatgccgcaccaggcgatactgtctcggggaagcctggcacacctaaaggggcagggatggctggtccaggaggactggctcggagttcacggaatgagtatatgcgcagcgggttgtactccacattcactatacagtctcttcaaccacagccgcctccacatcccaggcctgcggttgtactgcctagcgctgctccagccggtgctgcagccccaccgagtgggtcccggagcacctccccatcacctcttgaggcttgtttggaggctgaggaagctggactgcctctgcaagtaatactcacaccaccggaagcccctaatcttaagagcgaggaattgaacgttgagccgggtttgggtcgagccttgcctcccgaggtgaaggtcgagggacctaaggaggagctagaggtggcaggggagagaggctttgtgcccgagaccacgaaggctgagccagaggtcccaccgcaagagggggtaccagccagactccccgctgtggtcatggacacagctggacaggccggaggacacgctgcatcaagtcccgagatctcccagccgcagaaaggtcgtaagcccagggacctggagttgcctctgtcacctagtctgttgggcggtcccggacccgagcgcacccccggaagcggaagcgggtcaggactgcaggccccagggcctgccttgactccttccctcttgccgactcatacactcacccccgttctgctgaccccttcgagcctacccccatctatacatttctggagcactctctctcccatagcccctcgcagcccagctaagttatccttccagtttcccagcagtggatcagcgcaggtccacattccctcaatcagtgttgacggactgagcacaccagtcgtgttgtcacctggccctcagaagccttag

SEQ ID NO: 154183 - DNA, 366 bp, Artificial Sequence
  derived and/or modified sequence
atggatacggcaggacaagctggcggtcacgcagcaagttctccggagatctcgcagccccagaagggcaggaagcctcgcgatctggaactacccctgtctccatccctattgggaggcccaggaccggagcggacccctgcactgttacctacacatactcttacccccgtattgttgaccccctcgtcactgccaccctccattcacttctggagcacactgagccccatcgcccctagatctccagctaagcttagtttccagttcccgtcttccggatctgcacaggtgcacatacctagcatttccgtggatggattgagcaccccagtcgtgttgtcgcctgggcctcagaaaccatag

SEQ ID NO: 154184 - DNA, 1287 bp, Artificial Sequence
  derived and/or modified sequence
atggacccctcagtgacgctatggcaatttctgttgcagctgcttcgagaacagggaaacggacacattatatcatggacgtccagagacggaggggagttcaaactcgtcgacgccgaagaggtcgcacgcctgtggggcctgaggaaaaacaaaaccaatatgaattacgacaaattaagcagagcgctgcgttactattacgataaaaatataatccggaaggtgtcgggccaaaagtttgtttacaaattcgtcagttaccctgaggtggccggttgtagcaccgaggattgccccccccagcctgaagtgtccgtcacttctaccatgcctaacgtggctccggcagcaatacatgctgcccccggggacaccgtaagcggaaagccgggcactcccaaaggggctggaatggcgggacccggaggcctcgcgcgatcttcgagaaacgagtatatgcgatccgggctctattctaccttcacaattcagagcctgcagccccagccacccccacatcctcggcccgcagttgttcttccctccgcggctccagcaggagcagcagctcccccttcgggatccaggagtacttctccatccccactcgaagcctgcttggaggcagaagaagcgggtttgccactgcaagtgattttaactcctccagaagcgccaaatctgaaaagcgaggagctgaacgtggagccaggacttggcagggcactgccgccggaagtgaaagtggagggccctaaggaggagctggaagtggcaggcgagcgcggctttgtaccagaaacaacgaaggccgagccagaggttcccccccaggagggggttccagcaaggctgcctgccgttgtgatggacacagctggacaagcagggggccatgctgcgtcgtcaccggagatatcacaaccccaaaaaggaaggaagcctagggatctggagctgcctctcagcccgagtttactgggaggtcccggtcctgaaagaacgccaggctctggatctggctctggcctgcaagctcctggccctgccctcactcctagtcttctgccaacccacaccctgactcctgtcctgctgaccccttccagtctgcccccatctatacacttctggtccacccttagcccaatcgctcccagatcacctgcaaagctgtcattccagtttccttcatctggatctgcccaggttcatattccgagtattagcgtggatggactgtccactcctgtggtgctgtctccagggcctcagaaaccatag

SEQ ID NO: 154185 - DNA, 1287 bp, Artificial Sequence
  derived and/or modified sequence
atggaccccagcgtgaccctgtggcagttcctgctgcagctgctgcgagaacagggaaatgggcatattatatcctggacatctcgtgacggcggcgaattcaagctcgtggacgccgaggaggtggccagattgtggggcctaagaaaaaataaaacgaatatgaattacgacaaactctcacgcgccctgagatactactacgataagaacataattcggaaagtgagcgggcagaaatttgtctataagtttgtttcctacccagaagtggccggatgctcaaccgaagactgcccaccccagcccgaggtatccgtcacctcaacaatgcccaacgtagccccggccgcgatccacgcagccccaggagacactgttagtggaaaacctggaactcccaaaggcgctggcatggccgggcctggaggactggcacggtccagccggaacgagtatatgcgttctggcctgtactcaacattcaccatccagagcctgcagccccagccacctccccaccccagaccggccgttgtgttgcccagtgctgcgccagccggagctgcggcacccccttcaggatcacgatcaacctcaccaagtccactggaggcatgcttggaagctgaagaagccggactgccgttacaagtgattctaactcctcccgaggcgccaaatctgaaatccgaggaactcaatgtcgagccgggcctcggccgggcccttcccccagaggtcaaagtcgagggacccaaggaggaattggaagtggcgggagaaagagggtttgtacctgagacaaccaaagctgaacccgaagtgcctccgcaggaaggtgttccggctagactgccagcagtggttatggatacggcaggacaggcaggcggacatgctgcttccagtcccgagatcagccagcctcagaagggccgtaagcctagagacctggagctccccctgtccccatcattgctcggcggacctggtccagaaagaactcccggttcagggtcaggatccggtctccaggctcccggcccagccctaacgccttcgctgctgccaactcacaccttgacccccgtgctgcttaccccttcatcactccccccttccattcacttctggtcaaccctgagcccaattgccccccggtcccccgccaaactgtccttccagtttcctagctccggctctgcccaagtgcacatcccatcaattagtgtggatggcctgtccacacctgtcgtgctcagtcctgggccccaaaaaccttag

SEQ ID NO: 154186 - DNA, 1287 bp, Artificial Sequence
  derived and/or modified sequence
atggacccctctgttacactgtggcaatttctgttacaactcttgagagagcaagggaacgggcacattatttcctggaccagtagagacgggggtgaatttaaattggtggacgctgaggaggttgctaggctgtggggactgcggaagaacaagacaaacatgaactatgataagctatcacgagccttaagatattattacgacaaaaatatcatccggaaagtgtctggacagaagttcgtctataagttcgttagctacccagaggtagctggttgctccacagaagactgccctccccagcccgaggtcagtgtgacctccaccatgcccaacgtggcacccgctgcgatccacgcggctcccggtgacacagtgtcaggcaaaccgggaacacccaagggcgcaggcatggccggaccgggaggtctagcacggtcctcacggaacgagtatatgcggagtgggctgtattcaactttcaccattcagtcactgcagcctcagcctccaccacatccacgtcctgcagtggtgctgccttcggccgcaccggctggcgctgctgcccctccctccggctctcgcagcacctcacctagcccactggaggcctgtcttgaagcggaggaagccggactgcccttgcaagtgatcctgacaccacctgaggctccgaaccttaagtctgaggagctgaatgttgaacctggattgggtagagctcttcctccagaggtgaaggtcgagggtccgaaagaagaactagaggtggccggagagagggggtttgtgcccgagacaactaaagcggagccagaagtccctccgcaggaaggcgtgcctgcaagactgcccgcagtggtgatggacaccgcaggccaggcgggagggcacgccgcttcttccccagagatctcccagcctcagaaggggcgtaaacccagggatttggagcttcctttatctcctagtctactggggggacccggacccgagagaaccccaggcagtggatctgggtcggggttgcaggcccctggccctgcactgaccccctcacttttgcccactcatacccttacacctgttttactgacaccctcctccctccccccttccatccatttctggagtaccctgagccctatcgctccaagatcccctgcaaaactcagctttcaatttccgtcatccggaagcgcccaggtgcacatcccttccatctctgttgacggactgtcaacccctgttgtcctttcaccaggacctcagaagccttag

SEQ ID NO: 154187 - protein, 550 aa, Artificial Sequence
  derived and/or modified sequence
MWKASAGHAVSIAQDDAGADDWETDPDFVNDVSEKEQRWGAKTVQGSGHQEHINIHKLRENVFQEHQTLKEKELETGPKASHGYGGKFGVEQDRMDKSAVGHEYQSKLSKHCSQVDSVRGFGGKFGVQMDRVDQSAVGFEYQGKTEKHASQKDYSSGFGGKYGVQADRVDKSAVGFDYQGKTEKHESQRDYSKGFGGKYGIDKDKVDKSAVGFEYQGKTEKHESQKDYVKGFGGKFGVQTDRQDKCALGWDHQEKLQLHESQKDYKTGFGGKFGVQSERQDSAAVGFDYKEKLAKHESQQDYSKGFGGKYGVQKDRMDKNASTFEDVTQVSSAYQKTVPVEAVTSKTSNIRANFENLAKEKEQEDRRKAEAERAQRMAKERQEQEEARRKLEEQARAKTQTPPVSPAPQPTEERLPSSPVYEDAASFKAELSYRGPVSGTEPEPVYSMEAADYREASSQQGLAYATEAVYESAEAPGHYPAEDSTYDEYENDLGITAVALYDYQAAGDDEISFDPDDIITNIEMIDDGWWRGVCKGRYGLFPANYVELRQ

SEQ ID NO: 154188 - DNA, 1653 bp, Artificial Sequence
  derived and/or modified sequence
atgtggaaggccagcgccggccacgccgtgagcatcgcccaggacgacgccggcgccgacgactgggagaccgaccccgacttcgtgaacgacgtgagcgagaaggagcagagatggggcgccaagaccgtgcagggcagcggccaccaggagcacatcaacatccacaagctgagagagaacgtgttccaggagcaccagaccctgaaggagaaggagctggagaccggccccaaggccagccacggctacggcggcaagttcggcgtggagcaggacagaatggacaagagcgccgtgggccacgagtaccagagcaagctgagcaagcactgcagccaggtggacagcgtgagaggcttcggcggcaagttcggcgtgcagatggacagagtggaccagagcgccgtgggcttcgagtaccagggcaagaccgagaagcacgccagccagaaggactacagcagcggcttcggcggcaagtacggcgtgcaggccgacagagtggacaagagcgccgtgggcttcgactaccagggcaagaccgagaagcacgagagccagagagactacagcaagggcttcggcggcaagtacggcatcgacaaggacaaggtggacaagagcgccgtgggcttcgagtaccagggcaagaccgagaagcacgagagccagaaggactacgtgaagggcttcggcggcaagttcggcgtgcagaccgacagacaggacaagtgcgccctgggctgggaccaccaggagaagctgcagctgcacgagagccagaaggactacaagaccggcttcggcggcaagttcggcgtgcagagcgagagacaggacagcgccgccgtgggcttcgactacaaggagaagctggccaagcacgagagccagcaggactacagcaagggcttcggcggcaagtacggcgtgcagaaggacagaatggacaagaacgccagcaccttcgaggacgtgacccaggtgagcagcgcctaccagaagaccgtgcccgtggaggccgtgaccagcaagaccagcaacatcagagccaacttcgagaacctggccaaggagaaggagcaggaggacagaagaaaggccgaggccgagagagcccagagaatggccaaggagagacaggagcaggaggaggccagaagaaagctggaggagcaggccagagccaagacccagaccccccccgtgagccccgccccccagcccaccgaggagagactgcccagcagccccgtgtacgaggacgccgccagcttcaaggccgagctgagctacagaggccccgtgagcggcaccgagcccgagcccgtgtacagcatggaggccgccgactacagagaggccagcagccagcagggcctggcctacgccaccgaggccgtgtacgagagcgccgaggcccccggccactaccccgccgaggacagcacctacgacgagtacgagaacgacctgggcatcaccgccgtggccctgtacgactaccaggccgccggcgacgacgagatcagcttcgaccccgacgacatcatcaccaacatcgagatgatcgacgacggctggtggagaggcgtgtgcaagggcagatacggcctgttccccgccaactacgtggagctgagacagtag

SEQ ID NO: 154189 - DNA, 3272 bp, Artificial Sequence
  derived and/or modified sequence
gatgcggccccgcccccgccctcggaaccggaagtagagcctggtgcctgggagcggctggcgcggcggaatccagggccgacccgggccggaccgaccccaggcggcgacggaatcagtccccaatgcctggaaattcctcattggattactgtgttttaaacagaatttcgtgaacagccttttatctccaagcggaaagaaagatgtggaaagcttcagcaggccacgctgtgtccatcgcccaggatgacgcgggggccgatgactgggagaccgaccctgattttgtgaatgatgtgagtgagaaggagcaaagatggggtgccaagacggtgcagggctccgggcaccaggagcatatcaacatacacaagctgagggagaatgtctttcaagagcatcagacccttaaggagaaggaacttgaaacaggaccaaaagcttcccatggctatggagggaaatttggtgtggaacaagaccgaatggataagtcagctgtcggccacgaatatcagtcgaaactttccaagcactgctcgcaggtggactcggtccgtggcttcggaggcaagtttggtgtccagatggacagagttgatcagtctgctgtaggctttgaataccaggggaagactgagaagcatgcctcccagaaagactactccagtggttttggcggcaagtatggcgtgcaggccgaccgagtagacaagagcgcggtgggcttcgactaccagggcaagacggagaagcacgagtcacagagagattactccaaaggtttcggcggcaaatacggtatcgacaaggacaaagtggataagagcgccgttggctttgagtatcaaggcaaaacggagaagcacgagtcccagaaagactatgtgaaagggtttggaggaaaatttggtgtgcagacagacagacaagacaaatgtgcccttggctgggatcaccaggagaaattgcagctgcatgaatcccaaaaagattataagactggttttggaggcaaattcggtgttcagtcggagaggcaggactccgctgctgtggggtttgattacaaggagaagctggccaagcacgagtcccagcaagactactccaaaggattcggcgggaagtatggggtgcagaaggatcggatggataagaatgcgtcaacctttgaggatgtcacccaggtgtcctctgcctaccagaagacagtacctgtcgaagctgtgaccagcaaaacaagtaacatcagagctaactttgaaaacctcgctaaggagaaagagcaggaggacaggcggaaggcggaggcggagagagcccagcggatggccaaggagcggcaggagcaggaagaggccaggaggaagctggaggagcaagccagagccaaaacgcaaacgccccctgtgtcgcccgcacctcagccaaccgaggagaggctgccctcgagccccgtctatgaggatgcggcttccttcaaggcagagctgagctacagaggccctgtgagtgggacggagccggagcccgtgtacagcatggaggccgctgactaccgagaggccagcagccagcagggcctggcctatgccacagaggctgtctatgaaagcgcagaggccccgggccactatcccgcagaggacagcacctacgatgagtacgagaacgatctggggatcacagccgtcgccctgtacgactaccaggctgcgggcgatgatgagatctcatttgaccctgatgacatcatcaccaacatcgagatgattgacgacggctggtggcgcggggtgtgcaagggccggtacgggctcttcccagccaactatgtggagctgcggcagtagggcccccagcccccccccggagctgcgccctggatcctcacactacagatcaggccttctttggttcttgggtggttttgggttttttctgtttttttttttttttttttttttttgaaggtggggaggggaatatacacattgcttttatatttaatacttttgctgatgcttttgaaaatgtttatgccacagaatttgctaatatattgtaatcacattccttaggaggactttggtaattggttttatgcattgatggttttttttttcttttttgccaaattgactgtcacgcggcagcttcagggagctcgcattctcttgtgttcgtgttgccctcgtgcccatcaagtgcagtcgggacctcccaggacaagcacgaggcctcaggtcggccctgtggcgggtaggcaggaaggactgtcccagacgaggggcttcctctagagtctcactgctggggaggagaggactgggcctgatggaagttaacccggagctaagtcacccagagcacaggagctgccatgtcagatgggaaatctgcctatgtcataccgtgacagcccgcaggatcaggtgacttctagcagagaccctggtttttttcctgtgcccactccggcttgtcctcatctctacccatcccctgatgcccaggtcaccgggagggctgctgggagcctctcctgtccccgccgggcagtgtcactgagtccttgaaatcctcccctgccccgcgggtctctggattgggacgcacagtgcagttgaggtctgcgtcgggcttggcttttcacaaaggctgatgtcttaactgtcacccatatggtccctgggccaccgggcagcctggggcggtgtgtgtgccatgtcacagcatggcctctcggccttgggaaggaaggcagtgcctgctctgctgtgagccgccaggaaccctcctcctgtcaatgggggtgtagtatttttgccaaaatatcatgttcaatttcagtagtttgatcagttgaaggctagaagtgtgaagtgcagatgagtgtgtgttcttccccaaggtccccccacagctccaggacaccgctgtcctggcatttgtggccactcactttgtaggaaactcatctccttcctgaggagccgggaggctggaccagtcccgtcgtgcagtcaggtgggcggtgtgtctttccagaaggtcacgtggaaatgtctcgggacttgggtcccggagtgcccgtgaagcgtgtttttgctcctgaggtgcattttctcatcatccttgctttaccacaatgagcaatgaggtcgggttttatatgcaacttattgtatctgaattcctgtagcacacctcataggtatgatttttttaaattaaagaattcagaataaacattttttgatcca

SEQ ID NO: 154190 - DNA, 1653 bp, Artificial Sequence
  derived and/or modified sequence
atgtggaaagctagtgcaggccacgcggtttctattgcccaggacgatgcaggagccgacgattgggagacggatcccgacttcgtgaacgacgtgtctgagaaggagcagcgatggggcgcgaaaaccgttcaagggtctgggcaccaagaacatataaatatccacaagctcagagagaatgtgttccaggaacatcagaccctgaaagaaaaagagctggagaccgggcccaaagcctctcatggttacggtggtaagtttggcgttgagcaggaccgcatggacaaaagtgccgtcgggcatgagtatcagagtaaactgagcaaacattgtagtcaagtggacagcgtgcgagggttcggtgggaaatttggcgtccagatggaccgcgttgatcagtcagccgtcggcttcgagtaccaggggaagacagagaaacacgcgagccaaaaagattatagttcaggattcggagggaagtatggagtccaggcagaccgagtggataagagcgccgtggggttcgactaccaggggaaaaccgagaaacatgaaagtcaacgcgattactcaaaagggttcggtggcaaatatgggatcgataaggacaaagtggacaaaagtgccgtcggcttcgagtatcagggcaagactgagaagcatgagagccagaaagactatgtgaagggatttggcggcaaatttggtgtccaaaccgacaggcaagacaagtgtgcactaggctgggaccaccaagagaagctgcaacttcacgagagccagaaggactacaagactgggtttggaggaaagttcggcgtccagtccgagcggcaggactcggccgccgtgggcttcgactacaaagaaaagttggccaaacacgaatcacagcaggattactcaaaaggcttcggaggcaagtatggcgtacagaaagaccgcatggacaagaacgcctccacctttgaagacgtcactcaagtcagctccgcttatcagaagaccgtacctgtggaggctgtgaccagcaaaacctccaatatccgcgctaatttcgaaaaccttgctaaagagaaggagcaggaagaccgaaggaaagctgaagctgagagggcccagaggatggccaaggaacgacaggagcaagaggaggctagaagaaaactggaggaacaggctcgtgctaagacgcagacaccacccgtatcccctgcaccccagcccacagaagaacgtctgccctcttcacctgtgtacgaagacgcagcctctttcaaggccgagctttcctaccgaggtcccgtgtctggaacagagcccgagccagtatattctatggaggctgccgattaccgagaagcgtcttcgcagcagggactcgcatatgcaacagaggcagtgtacgaatcagctgaagccccaggtcattatccggctgaggattccacatacgatgagtatgaaaacgaccttggcataaccgccgtggccttgtacgactatcaagctgccggggatgatgagatctccttcgatcctgacgacattattaccaacatcgagatgatcgatgacgggtggtggcgcggagtctgtaaaggtaggtatggcttgtttcccgccaactatgtcgaactgaggcaatag

SEQ ID NO: 154191 - DNA, 1653 bp, Artificial Sequence
  derived and/or modified sequence
atgtggaaggccagcgctggccatgctgtgtccatcgcccaggatgatgctggagcagatgactgggagacagatcctgactttgtgaatgatgtgtctgagaaggagcagcgctggggcgccaagacagtgcagggcagcggccaccaggagcacatcaacatccacaagctgcgggagaatgtgttccaggagcaccagaccctgaaggagaaggagctggagaccggccccaaggccagccacggctacggcggcaagtttggagtggagcaggacaggatggacaagtctgctgtgggccacgagtaccagagcaagctgagcaagcactgcagccaggtggacagcgtgcggggctttggaggcaagtttggagtgcagatggacagagtggaccagagcgctgtgggctttgagtaccagggcaagacagagaagcacgccagccagaaggactacagcagcggctttggaggcaagtatggagtgcaggccgacagagtggacaagtctgctgtgggctttgactaccagggcaagacagagaagcatgagagccagagggactacagcaaaggatttggaggcaagtatggaattgacaaggacaaggtggacaagtctgctgtgggctttgagtaccagggcaagacagagaagcatgagagccagaaggactatgtgaagggctttggaggcaagtttggagtgcagacagaccggcaggacaagtgtgccctgggctgggaccaccaggagaagctgcagctgcacgagagccagaaggactacaagacaggctttggaggcaagtttggagtgcagagcgagcggcaggacagcgctgctgtgggctttgactacaaggagaagctggccaagcatgagagccagcaggactacagcaagggctttggaggcaagtatggagtgcagaaggacaggatggacaagaatgccagcacctttgaagatgtgacccaggtgagcagcgcctaccagaagacagtgcctgtggaggccgtgaccagcaagaccagcaacatccgggccaactttgagaacctggccaaggagaaggagcaggaggacaggaggaaggccgaggccgagcgggcccagaggatggccaaggagcggcaggagcaggaggaggcccggaggaagctggaggagcaggcccgggccaagacccagaccccacctgtgtccccagccccccagcccacagaggagcggctgcccagcagccctgtgtatgaagatgctgccagcttcaaggccgagctgagctaccggggccctgtgtctggaacagagcctgagcctgtgtacagcatggaggccgctgactaccgggaggccagcagccagcagggcctggcctatgccacagaggccgtgtatgagagcgctgaggcccctggccactacccagctgaggacagcacctatgatgaatatgaaaatgacctgggcatcacagctgtggccctgtatgactaccaggccgctggagatgatgagatcagctttgatcctgatgacatcatcaccaacatcgagatgattgatgatggctggtggaggggcgtgtgcaagggccgctatggcctcttccctgccaactacgtggagctgcggcagtag

SEQ ID NO: 154192 - DNA, 1653 bp, Artificial Sequence
  derived and/or modified sequence
atgtggaaggccagcgccggccacgccgtgagcatcgcccaggacgacgcaggcgctgacgactgggagaccgaccccgatttcgtgaacgacgtatctgaaaaggaacaacgttggggtgccaagacggtgcagggatctggacatcaggaacacataaacattcataagttacgggagaacgtgtttcaagaacatcagaccctcaaagagaaggaactggagactggacctaaggctagtcatgggtatggagggaaattcggagtggaacaggacaggatggacaaatcagccgtgggccacgagtatcagtccaaactctccaaacattgttcacaggtggactctgtgcgaggctttggcggcaaatttggtgtccaaatggatagagttgaccagagcgctgtcgggttcgaatatcagggcaagaccgaaaagcatgcctcccagaaggactatagctctggctttggtgggaaatacggcgtgcaagctgatcgcgttgacaaatccgccgtgggatttgattaccagggaaaaacggaaaaacacgagtctcagcgagactatagtaaaggattcggagggaagtatggcatcgataaagacaaggtagataagtctgctgtggggtttgagtatcagggtaagacagagaagcatgaaagtcaaaaggattacgtaaaggggtttggtggaaagttcggcgtacaaaccgataggcaggacaagtgcgcacttggttgggatcaccaggagaaattacaactccatgagtctcaaaaagattacaagactggttttggcgggaaatttggagtgcagtccgaacgacaggatagcgcggcagtcgggttcgattataaggagaagttagcaaagcatgaaagtcagcaggactattcgaagggctttggaggtaaatacggagtccagaaggatcgcatggataaaaatgcttcaacctttgaggatgtgacccaggtctccagtgcttaccagaagactgtcccagtcgaggccgtcacatctaagacgtctaatattagagccaatttcgagaatcttgctaaagaaaaggaacaggaggacagacggaaagctgaggcggaacgagcacagcgtatggcaaaggagcggcaggaacaagaagaggcacgcaggaaactcgaagaacaggcccgtgccaagacccagacccccccagttagtcctgctccccagcctacggaagagagactaccctccagccccgtgtacgaagacgcggcttcgtttaaggcagaactgagctacaggggacccgtgtctggtactgagccggaacccgtctacagcatggaggcagcggactaccgggaggccagttcacaacaaggactggcatatgcaacagaagctgtctacgagtcggcagaagcgcccggacactatcctgctgaagactcaacttacgacgaatacgaaaatgacctggggattacagccgttgctctgtatgattaccaggccgccggagatgacgaaatctcatttgacccggatgatatcatcaccaacatcgaaatgatcgacgacgggtggtggcgcggggtgtgtaagggccgctatggtctcttcccagctaattacgttgaactgcgacaatag

SEQ ID NO: 154193 - DNA, 1653 bp, Artificial Sequence
  derived and/or modified sequence
atgtggaaagcgagcgctggtcacgccgtctctatcgcccaagatgatgcaggagctgacgattgggaaacagatccagacttcgtgaacgacgtgtcggagaaggaacagcgctggggagccaagacagttcaaggctcgggacatcaggaacatatcaatatccacaagctccgagaaaacgtctttcaggagcaccagaccctgaaggaaaaggagctggagacaggacccaaagcctctcatggttatggcggaaagtttggggtggagcaggacagaatggacaaatctgctgtgggccacgagtaccagtccaaactttcaaagcattgttcccaagtcgatagcgttaggggatttggcggtaaattcggagtgcaaatggatcgcgtcgaccagtccgctgtcgggttcgagtatcagggaaagaccgaaaagcatgctagtcaaaaagattactctagtggatttgggggaaagtacggtgtccaggccgaccgggtggataagtccgctgttggcttcgattaccagggtaaaaccgagaagcacgaatcacagagagattacagtaagggttttggaggaaagtatggcatcgataaggacaaggtagataagtcagcagtaggcttcgagtatcagggcaaaacggagaagcatgagagccagaaggactatgtcaagggctttgggggtaaattcggagttcagactgacagacaggataaatgtgctctcggctgggaccatcaggagaagctccaactgcacgagtcccaaaaagactacaagacagggtttggcggtaaatttggagttcagtcagagagacaagatagcgcagccgtcggattcgactacaaggagaaactggctaaacatgagagccaacaggattactcaaaggggttcgggggaaagtatggcgtgcagaaagaccgaatggacaagaatgcgtcaaccttcgaggacgtcacacaggtgagcagtgcttatcagaaaactgttcctgtggaggcggttacaagtaaaacttccaacatccgtgccaacttcgaaaacttagctaaagaaaaagagcaggaggacagaaggaaggcggaagcggagcgagcccagcgcatggccaaagaaaggcaggagcaagaggaggccaggagaaagctggaagagcaagctcgagccaaaactcaaactcctcctgtgtccccggcaccacagccaacagaggagaggctaccctcctccccagtttatgaggacgccgctagctttaaggcagaactcagctacagaggtcctgtgagcgggacggagcccgaaccagtctacagcatggaagccgctgactaccgggaagcaagcagtcagcagggactggcttacgccaccgaggccgtttatgaaagcgcagaggcccctgggcattacccagccgaagattcaacctatgatgagtacgaaaacgatctggggattaccgccgtggccctctatgactaccaggccgcaggtgatgacgagattagcttcgatccagacgacattatcaccaatatcgaaatgattgacgacggttggtggcggggagtgtgtaagggcaggtacgggctgttccctgcgaattatgtggagctgcgccagtag

SEQ ID NO: 154194 - protein, 976 aa, Artificial Sequence
  derived and/or modified sequence
MERRWPLGLGLVLLLCAPLPPGARAKEVTLMDTSKAQGELGWLLDPPKDGWSEQQQILNGTPLYMYQDCPMQGRRDTDHWLRSNWIYRGEEASRVHVELQFTVRDCKSFPGGAGPLGCKETFNLLYMESDQDVGIQLRRPLFQKVTTVAADQSFTIRDLVSGSVKLNVERCSLGRLTRRGLYLAFHNPGACVALVSVRVFYQRCPETLNGLAQFPDTLPGPAGLVEVAGTCLPHARASPRPSGAPRMHCSPDGEWLVPVGRCHCEPGYEEGGSGEACVACPSGSYRMDMDTPHCLTCPQQSTAESEGATICTCESGHYRAPGEGPQVACTGPPSAPRNLSFSASGTQLSLRWEPPADTGGRQDVRYSVRCSQCQGTAQDGGPCQPCGVGVHFSPGARGLTTPAVHVNGLEPYANYTFNVEAQNGVSGLGSSGHASTSVSISMGHAESLSGLSLRLVKKEPRQLELTWAGSRPRSPGANLTYELHVLNQDEERYQMVLEPRVLLTELQPDTTYIVRVRMLTPLGPGPFSPDHEFRTSPPVSRGLTGGEIVAVIFGLLLGAALLLGILVFRSRRAQRQRQQRQRDRATDVDREDKLWLKPYVDLQAYEDPAQGALDFTRELDPAWLMVDTVIGEGEFGEVYRGTLRLPSQDCKTVAIKTLKDTSPGGQWWNFLREATIMGQFSHPHILHLEGVVTKRKPIMIITEFMENGALDAFLREREDQLVPGQLVAMLQGIASGMNYLSNHNYVHRDLAARNILVNQNLCCKVSDFGLTRLLDDFDGTYETQGGKIPIRWTAPEAIAHRIFTTASDVWSFGIVMWEVLSFGDKPYGEMSNQEVMKSIEDGYRLPPPVDCPAPLYELMKNCWAYDRARRPHFQKLQAHLEQLLANPHSLRTIANFDPRMTLRLPSLSGSDGIPYRTVSEWLESIRMKRYILHFHSAGLDTMECVLELTAEDLTQMGITLPGHQKRILCSIQGFKD

SEQ ID NO: 154195 - DNA, 2931 bp, Artificial Sequence
  derived and/or modified sequence
atggagagaaggtggccactgggtctgggattagtgcttctcctgtgtgcacctcttccgccaggagcgcgagctaaggaggtcacccttatggatacctctaaagcccagggagaactggggtggctcctggaccctcctaaggatgggtggtcggagcagcagcagatcctgaacggcacaccactgtacatgtaccaggactgtccaatgcagggccgcagggacactgatcactggctcaggagcaactggatctatagaggagaagaggctagtagagtgcatgtggaactgcagttcactgtgcgcgattgtaaatcttttcccgggggggctggtcccttaggttgtaaggaaacctttaatttgttgtacatggaaagtgaccaggatgtgggtatccagctgcggaggcccctgttccaaaaggttaccactgtggctgccgatcaaagcttcactattagggacctggtctctggctctgtgaaattaaatgtcgaaagatgcagcctgggccggctcacccgacggggcttgtaccttgcgtttcataatcccggcgcctgcgttgctctagtgtcagtgcgggtcttctatcagcggtgtccagagactctaaatggactcgcgcagtttcctgatactctcccaggacccgccgggctggtggaagtagctggtacatgtctgccccacgctagagctagtccaaggccctcaggcgcgccgcggatgcattgttctcccgacggcgaatggcttgtgccagtagggcgatgccactgcgagccgggatacgaggagggcgggtcaggcgaggcctgcgttgcatgcccatcgggatcttatagaatggatatggatactccgcattgtttaacctgtcctcagcagtctactgctgaatccgagggtgcaaccatatgcacctgcgagagcggccactatagagcacctggggagggaccccaggtggcctgtaccgggcctccttctgcccctcgcaacctctctttcagcgcatccggtacccagctctccctaaggtgggaacccccagccgataccggaggccgacaagatgtgagatactctgtacgatgctcccagtgccagggcacagcacaggatggcggcccatgtcagccatgcggtgtgggcgttcactttagccccggggccaggggactgactactcccgctgtgcacgtgaacggccttgaaccctacgccaactacaccttcaacgtcgaggcccagaacggcgtgagcggtttaggttccagcggacatgccagcaccagtgtcagtatctctatgggacacgccgagtcactcagtggactcagcctgcgccttgtcaaaaaagagcctaggcaattagaactgacatgggccggatctcggcctcggtcgccgggggctaatctcacttatgaactccacgtgctgaatcaggacgaggagaggtaccaaatggttctggaaccgagagtgttgttaacggaactccagcctgacacaacatatattgtgagagtaagaatgctgacgccactgggtcccggcccgttcagtccggatcacgaattccgcacttctccaccagtcagcagaggcttgaccggaggcgagatagtcgcagtcatattcggactgttgctgggtgcagctctccttctgggtatcctggtgtttcgatctcgcagggcccagcgacagcgtcagcagcgacaacgcgatcgggccacagacgtggatcgggaggacaagctgtggttaaagccctacgtggaccttcaggcatacgaagatccagcccagggtgctctagacttcactcgcgaacttgatcccgcgtggcttatggtggatacggtcatcggtgaaggagaattcggagaggtgtataggggcacgttaagacttcctagtcaagactgcaagaccgtcgctattaagaccctgaaagatacttcccccgggggccagtggtggaacttcctcagggaggcaacaatcatgggacagttttcacacccccatattctacatctggagggagttgttacaaagcgcaaaccaatcatgatcatcaccgaatttatggagaatggggccctggacgcttttttgcgagaaagagaggaccaactagtacccggacaactggttgcaatgttgcaaggtatcgcttctgggatgaattacctgagcaatcacaattacgtacatcgagatctggccgcaaggaacatcctcgtaaatcagaatctgtgctgcaaagtctctgattttggtctgacccgccttctcgatgacttcgacggcacgtacgaaacccagggcggcaagattccaatcagatggacggctcccgaagccattgcccacaggatctttacaacagcttccgatgtatggtcctttggaatcgtaatgtgggaggtactgtcctttggcgacaagccttatggcgagatgagcaaccaagaggtgatgaaaagtattgaggacgggtacaggttgccaccaccggtggactgcccagctcccctttatgaacttatgaaaaattgctgggcctatgatagagcccggagaccacactttcagaagctgcaggcccacctcgaacagcttctggccaacccgcattccctcagaacaatcgccaattttgatcccagaatgactctgaggctgccatctttgtctggatcagacggtataccatatcgtactgtctccgaatggctggagtcaattcggatgaaacgttacattttgcattttcactctgccggcctggatacaatggagtgcgtgcttgaacttaccgccgaggatttgacgcagatgggcatcacattgccagggcatcagaaaaggatcctgtgttcaattcaggggttcaaagattag

SEQ ID NO: 154196 - DNA, 2931 bp, Artificial Sequence
  derived and/or modified sequence
atggagcggcgctggcccctgggcctgggcctggtgctgctgctgtgtgcccccctgcccccaggggcccgggccaaggaggtgaccctgatggacaccagcaaggcccagggcgagctgggctggctgctggacccccccaaggatggctggagcgagcagcagcagatcctgaatggcacccccctgtacatgtaccaggactgccccatgcagggccggcgggacacagaccactggctgcggagcaactggatctacagaggagaggaggccagccgggtgcacgtggagctgcagttcaccgtgcgggactgcaagagcttccctgggggcgccggccccctgggctgcaaggagaccttcaacctgctgtacatggagagtgaccaggatgtgggcatccagctgcggcggcccctcttccagaaggtgaccaccgtggccgctgaccagagcttcaccatccgggacctggtgtctggctctgtgaagctgaatgtggagcgctgcagcctgggccgcctgacccggcggggcctgtacctggccttccacaaccctggggcctgtgtggccctggtgtctgtgcgggtcttctaccagcgctgcccagagaccctgaatggcctggcccagttcccagacaccctgcccggccctgctggcctggtggaggtggccggcacctgcctgccccacgcccgggccagcccccggcccagcggggcccccaggatgcactgcagcccagatggagagtggctggtgcctgtgggccgctgccactgtgagcccggctatgaggagggcggcagcggggaggcctgtgtggcctgccccagcggcagctacaggatggacatggacaccccccactgcctgacctgcccccagcagagcacagctgagagcgagggcgccaccatctgcacctgtgagagcggccactaccgggcccctggagagggcccccaggtggcctgcaccggcccccccagcgcccccaggaacctgtccttcagcgccagcggcacccagctgagcctgcgctgggagcccccagctgacaccggcggccggcaggatgtgcgctacagcgtgcgctgcagccagtgccagggcacagcccaggacggcggcccctgccagccctgtggggtgggcgtgcacttcagccctggggcccggggcctgaccaccccagctgtgcacgtgaatggcctggagccctatgccaactacaccttcaacgtggaggcccagaatggagtgtctggcctgggcagcagcggccacgccagcacctctgtgtccatctccatgggccatgctgagagcctgagcggcctgagcctgcggctggtgaagaaggagccccggcagctggagctgacctgggccggcagccggcccaggagccctggggccaacctgacctatgagctgcacgtgctgaaccaggatgaggagcgctaccagatggtgctggagccccgggtgctgctgacagagctgcagcctgacaccacctacatcgtgcgggtgaggatgctgacccccctgggccctggccccttctccccagaccacgagttccgcaccagcccccctgtgtcccggggcctgaccggcggggagatcgtggccgtcatcttcggcctgctgctgggcgccgccctgctgctgggcatcctggtgttccgcagcagaagagcccagaggcagaggcagcagaggcagagggaccgggccacagatgtggaccgggaggacaagctgtggctgaagccctacgtggacctgcaggcctatgaggaccctgcccagggcgccctggacttcacccgggagctggaccctgcctggctgatggtggacaccgtcatcggggagggggagtttggagaggtgtaccggggcaccctgcggctgcccagccaggactgcaagacagtggccatcaagaccctgaaggacaccagccctgggggccagtggtggaacttcctgcgggaggccaccatcatgggccagttcagccacccccacatcctgcacctggagggcgtggtgaccaagaggaagcccatcatgatcatcacagagttcatggagaatggagccctggatgccttcctgcgggagcgggaggaccagctggtgcccggccagctggtggccatgctgcagggcatcgccagcggcatgaactacctgagcaaccacaactacgtgcaccgggacctggccgccaggaacatcctggtgaaccagaacctgtgctgcaaggtgtctgactttggcctgacccggctgctggatgactttgatggcacctatgagacccagggcggcaagatccccatccgctggacagcccctgaggccatcgcccaccgcatcttcaccacagccagtgatgtgtggagctttggcatcgtgatgtgggaggtgctgagctttggagacaagccctatggagagatgagcaaccaggaggtgatgaagagcattgaagatggctaccgcctgcccccacctgtggactgcccagcccccctgtatgagctgatgaagaactgctgggcctatgaccgggcccggcggccccacttccagaagctgcaggcccacctggagcagctgctggccaacccccacagcctgcggaccatcgccaactttgaccccaggatgaccctgcggctgcccagcctgagcggcagtgatggcatcccctacagaacagtgtctgagtggctggagagcatccgcatgaagcgctacatcctgcacttccacagcgctggcctggacaccatggagtgtgtgctggagctgacagctgaggacctgacccagatgggcatcaccctgcccggccaccagaagaggatcctgtgcagcatccagggcttcaaggactag

SEQ ID NO: 154197 - DNA, 2931 bp, Artificial Sequence
  derived and/or modified sequence
atggagcggcggtggcccctgggcctgggcctggtgctgctgctgtgcgctcctctcccccccggggctagggccaaggaggttacactgatggataccagtaaggcacaaggggagctgggctggctgttggacccacctaaagacggctggtcagaacaacagcagatcctgaacggaaccccgctgtatatgtaccaagactgtcctatgcaagggcgcagggataccgaccactggctgcgcagtaactggatctaccggggcgaagaggcatcacgggtgcacgtggagctgcagtttaccgtccgtgattgcaaatcatttcctggaggggctggaccgctcgggtgtaaagaaacatttaacctgttgtacatggagagcgatcaggacgttggaatccagctcaggcgcccattgtttcaaaaggttacgactgtcgccgccgaccagagctttactataagagaccttgtctcagggtctgtgaagctgaatgtggaaagatgcagcctggggcggctcacaagaaggggcctatatcttgcttttcacaatcctggcgcatgtgtcgcactcgtctccgtgcgggtcttttaccagagatgcccagaaactctcaacggactagcacagtttcccgacactctgcccggcccagccggtttagttgaggtggcgggcacatgtttgccccatgcaagggcctcccccagacccagcggggcccctcgtatgcattgcagtcctgacggggaatggctggtgccagtcggcaggtgtcactgtgaacctgggtatgaagagggcggcagtggtgaggcatgtgttgcttgcccatccggctcttaccggatggacatggatacaccacactgtttgacctgtccacaacagtccactgcagagagcgaaggggccactatctgtacgtgtgagagcggccactaccgcgcaccaggagagggcccccaggtcgcctgtaccggaccaccctctgctcctcgtaacttatctttttccgcaagcggaacccaactgtcactgcgctgggaacctccggccgataccggaggacgccaagatgtccgctacagtgttagatgctcccagtgtcaggggacggcacaggacggggggccatgtcaaccctgtggagtgggagtccatttctccccaggggccagagggttaacaactcccgcagtgcacgtgaacgggttggagccatacgccaattacaccttcaacgtggaagcacagaatggagtcagtggtctgggctcttctggacacgcatcaactagcgtgtctatttcaatggggcacgcggagtccctgtcaggactgtcactgcgactggtgaaaaaggagccccggcaacttgagttgacgtgggcagggagccgacctcggtcccccggcgctaacctgacctacgagctgcacgtgctgaatcaggacgaagaacgatatcagatggtgctggagcctcgcgttttgcttacagaactccagccggatactacatacatagtgcgcgtgcgcatgctgacaccactggggcccggtcccttctcccctgaccacgaatttcgcacctcacccccagtctccagaggactgacaggaggggagatcgtggctgtaattttcggcttattgctgggtgctgcactgctactgggaatacttgtcttccgctcccgtcgagcgcaacgacaacgtcagcagcgccagagggacagggccaccgacgtggaccgagaggacaagctgtggctgaagccctatgttgacctgcaggcctacgaggaccccgcacagggggccctagatttcaccagggaactggaccccgcctggctgatggtggacacagttattggagaaggagagttcggcgaggtctacagaggcacccttcgtctcccttcccaagattgtaaaacggttgccatcaagaccctgaaggatacatctccaggtggccagtggtggaacttcctgcgggaagcgactatcatggggcagttctcccacccccacattcttcacttggaaggtgtcgttactaagagaaagcctatcatgatcatcactgaattcatggaaaacggagccctggacgctttcctgcgggagcgagaggatcagcttgttcctggccagctggttgccatgttgcagggcatagcatctggtatgaactacttgtccaatcacaattacgtccaccgagacctagccgcacgaaacatcttggtcaaccagaatctgtgttgcaaagtctcggacttcggcctgacccgcctcctagatgacttcgatggaacatacgagacacagggtggcaagattcccattagatggaccgcccctgaggccatcgcccacaggattttcaccaccgccagcgacgtatggtcctttggtatagtaatgtgggaggttctgtcatttggtgataaaccttacggagagatgagcaatcaggaagtcatgaaatccattgaggacggatacaggttaccccccccagtcgattgccccgctcctttgtacgaactgatgaagaactgttgggcctacgatcgggctaggaggccgcacttccagaagctgcaggcccacttggaacagctgctggccaacccacactcgctgcgcacaatcgctaacttcgaccctcggatgacactcaggctgcccagcctgagcggatcagatggaattccgtaccgcacagtgtcagagtggcttgaaagcatcagaatgaaaaggtatatcctgcacttccattccgccgggttggatacgatggagtgtgtcctggaactcacagccgaggacttaacacagatgggaatcaccttgcctggtcaccagaagcgcatcctctgctccattcagggattcaaggactag

SEQ ID NO: 154198 - DNA, 2931 bp, Artificial Sequence
  derived and/or modified sequence
atggagcgtcgatggcctctagggctcggactggtcttgctcctgtgcgcaccattgccacccggtgcacgagcgaaggaagttaccttgatggacacctctaaggctcaaggtgagttgggctggctcctagatcctccaaaggacggatggtctgagcagcaacaaattctcaacgggactccactatacatgtaccaggattgtccaatgcaaggcaggcgcgacacagatcactggcttcggtctaactggatttaccggggagaagaggcatcccgcgtgcacgtggagcttcagttcacagttagggattgcaagtctttccccggtggggctggcccacttggatgcaaggaaacctttaatcttctgtatatggagagcgatcaagatgtgggcatccaactgcgtcgtccgctgtttcagaaggtcaccaccgtggcggctgaccagtcttttacaatccgagacttagtgagcggctccgtcaagcttaatgtggaaagatgctccctgggtaggctgaccagacggggactttatttagccttccataaccctggcgcttgtgtcgccctcgtatctgtgcgtgtgttttaccagaggtgcccagaaacattgaacggcctggcacaattcccagacactcttcctggaccagcgggtttagtggaagtcgccggtacctgcctgccgcatgcgagggccagcccacgcccttccggcgcaccacggatgcactgtagtcccgacggagagtggctcgtgccagtcgggagatgtcattgcgagcccggatacgaggaaggcggatcaggcgaagcttgtgtcgcctgtcccagcgggtcctacagaatggacatggacaccccacattgcctcacctgtcctcagcaatccacagccgagtcggagggggctacaatctgcacctgcgagagtgggcattacagagcacctggggaaggccctcaggtggcgtgtacaggtccaccaagcgcccctcggaatcttagtttcagtgctagcggtacccagttgtccctgcgctgggaaccccctgctgacaccggcggaaggcaggacgtcagatatagtgtcagatgttctcagtgccaaggaactgctcaggatggcggaccttgccagccctgcggtgtgggggttcacttctcacccggagccagaggcctgacaacacctgctgttcacgtgaacggtcttgaaccctacgcaaattatacctttaatgttgaagcccaaaatggtgtctctggcctgggttcatctggacacgcttctacatctgtctccatctctatgggtcacgccgagagcctgtcgggattgtcactgcggctggtgaagaaagagccgaggcagctggaactgacctgggctggcagccggccaaggtccccaggggcaaaccttacctacgagttgcacgtcttaaaccaagatgaagaacgctaccagatggtactggagcccagggtgctgctgacagaactgcagcccgacactacctacatcgtacgggtacggatgcttactccgttgggtcccggacctttcagccctgatcatgaattccgcacatctccacctgtgtctagagggctcactggcggagaaattgtggcagttatctttggtttgctcctcggtgcagccctactcctaggtatccttgtgttcagatcccgacgggctcagcgccagcggcaacagagacagcgtgacagagcaactgacgtcgaccgagaagacaagttgtggctgaagccttatgtggacttgcaggcttatgaggacccagcacagggtgcactggatttcacccgagagcttgaccctgcttggctgatggtcgatacagtgattggcgagggagagttcggggaagtgtatcgagggaccctcaggctcccttctcaggactgcaaaaccgtggcaatcaagacactcaaagacactagtcccggaggacagtggtggaacttcctgagagaagcaaccataatggggcagttttctcatcctcacattctacatttagagggtgtagtcacgaaacgcaagccaataatgataatcaccgagttcatggaaaacggcgcactggatgcgttcctgagagagagggaagatcagctcgttcccggacagctggtggctatgctgcagggcatcgctagcggtatgaactacttgtctaatcacaattacgtgcacagggacctagccgcacggaatatactcgtaaatcagaacctttgttgcaaagtcagtgatttcggcctgacacgcctgctggatgactttgacgggacttatgagactcagggtggaaagattccaatacgctggacagcccctgaggccatcgcccacagaatctttacaactgcctcagatgtctggagcttcggcatcgtaatgtgggaggtgctctctttcggcgacaaaccttacggagaaatgtccaatcaggaagttatgaagtcaatcgaggatggttatcggttgcccccacccgtcgactgtcctgcccctctgtacgagctgatgaaaaactgttgggcctatgaccgagcacgacgtccccacttccagaaactccaggcccatctcgaacaattgcttgccaatcctcatagcctccgcaccatcgctaattttgacccaaggatgactttaagactcccaagcctgtccggcagcgatggcatcccttacagaaccgtgagcgagtggctcgaatctatccgaatgaagcgctatattctgcacttccacagtgccggtttggatactatggaatgtgtgcttgaactgacagctgaggatctgacacagatgggcatcaccctaccgggacatcaaaagaggatcctctgcagcatccagggattcaaggactag

SEQ ID NO: 154199 - DNA, 2931 bp, Artificial Sequence
  derived and/or modified sequence
atggagagaagatggcccctgggcctgggcctggtgctgctgctgtgcgcccccctgccccccggcgccagagccaaggaggtgaccctgatggacaccagcaaggcccagggcgagctgggctggctgctggacccccccaaggacggctggagcgagcagcagcagatcctgaacggcacccccctgtacatgtaccaggactgccccatgcagggcagaagagacaccgaccactggctgagaagcaactggatctacagaggcgaggaggccagcagagtgcacgtggagctgcagttcaccgtgagagactgcaagagcttccccggcggcgccggccccctgggctgcaaggagaccttcaacctgctgtacatggagagcgaccaggacgtgggcatccagctgagaagacccctgttccagaaggtgaccaccgtggccgccgaccagagcttcaccatcagagacctggtgagcggcagcgtgaagctgaacgtggagagatgcagcctgggcagactgaccagaagaggcctgtacctggccttccacaaccccggcgcctgcgtggccctggtgagcgtgagagtgttctaccagagatgccccgagaccctgaacggcctggcccagttccccgacaccctgcccggccccgccggcctggtggaggtggccggcacctgcctgccccacgccagagccagccccagacccagcggcgcccccagaatgcactgcagccccgacggcgagtggctggtgcccgtgggcagatgccactgcgagcccggctacgaggagggcggcagcggcgaggcctgcgtggcctgccccagcggcagctacagaatggacatggacaccccccactgcctgacctgcccccagcagagcaccgccgagagcgagggcgccaccatctgcacctgcgagagcggccactacagagcccccggcgagggcccccaggtggcctgcaccggcccccccagcgcccccagaaacctgagcttcagcgccagcggcacccagctgagcctgagatgggagccccccgccgacaccggcggcagacaggacgtgagatacagcgtgagatgcagccagtgccagggcaccgcccaggacggcggcccctgccagccctgcggcgtgggcgtgcacttcagccccggcgccagaggcctgaccacccccgccgtgcacgtgaacggcctggagccctacgccaactacaccttcaacgtggaggcccagaacggcgtgagcggcctgggcagcagcggccacgccagcaccagcgtgagcatcagcatgggccacgccgagagcctgagcggcctgagcctgagactggtgaagaaggagcccagacagctggagctgacctgggccggcagcagacccagaagccccggcgccaacctgacctacgagctgcacgtgctgaaccaggacgaggagagataccagatggtgctggagcccagagtgctgctgaccgagctgcagcccgacaccacctacatcgtgagagtgagaatgctgacccccctgggccccggccccttcagccccgaccacgagttcagaaccagcccccccgtgagcagaggcctgaccggcggcgagatcgtggccgtgatcttcggcctgctgctgggcgccgccctgctgctgggcatcctggtgttcagaagcagaagagcccagagacagagacagcagagacagagagacagagccaccgacgtggacagagaggacaagctgtggctgaagccctacgtggacctgcaggcctacgaggaccccgcccagggcgccctggacttcaccagagagctggaccccgcctggctgatggtggacaccgtgatcggcgagggcgagttcggcgaggtgtacagaggcaccctgagactgcccagccaggactgcaagaccgtggccatcaagaccctgaaggacaccagccccggcggccagtggtggaacttcctgagagaggccaccatcatgggccagttcagccacccccacatcctgcacctggagggcgtggtgaccaagagaaagcccatcatgatcatcaccgagttcatggagaacggcgccctggacgccttcctgagagagagagaggaccagctggtgcccggccagctggtggccatgctgcagggcatcgccagcggcatgaactacctgagcaaccacaactacgtgcacagagacctggccgccagaaacatcctggtgaaccagaacctgtgctgcaaggtgagcgacttcggcctgaccagactgctggacgacttcgacggcacctacgagacccagggcggcaagatccccatcagatggaccgcccccgaggccatcgcccacagaatcttcaccaccgccagcgacgtgtggagcttcggcatcgtgatgtgggaggtgctgagcttcggcgacaagccctacggcgagatgagcaaccaggaggtgatgaagagcatcgaggacggctacagactgcccccccccgtggactgccccgcccccctgtacgagctgatgaagaactgctgggcctacgacagagccagaagaccccacttccagaagctgcaggcccacctggagcagctgctggccaacccccacagcctgagaaccatcgccaacttcgaccccagaatgaccctgagactgcccagcctgagcggcagcgacggcatcccctacagaaccgtgagcgagtggctggagagcatcagaatgaagagatacatcctgcacttccacagcgccggcctggacaccatggagtgcgtgctggagctgaccgccgaggacctgacccagatgggcatcaccctgcccggccaccagaagagaatcctgtgcagcatccagggcttcaaggactag

SEQ ID NO: 154200 - DNA, 3363 bp, Artificial Sequence
  derived and/or modified sequence
gcccccgcccggcccgcccggctctcctagtcccttgcaacctggcgctgccatccgggccactgtcccaggtcccggcccggagctatggagcggcgctggcccctggggctagggctggtgctgctgctctgcgccccgctgcccccgggggcgcgcgccaaggaagttactctgatggacacaagcaaggcacagggagagctgggctggctgctggatcccccaaaagatgggtggagtgaacagcaacagatactgaatgggacacccctgtacatgtaccaggactgcccaatgcaaggacgcagagacactgaccactggcttcgctccaattggatctaccgcggggaggaggcttcccgcgtccacgtggagctgcagttcaccgtgcgggactgcaagagtttccctgggggagccgggcctctgggctgcaaggagaccttcaaccttctgtacatggagagtgaccaggatgtgggcattcagctccgacggcccttgttccagaaggtaaccacggtggctgcagaccagagcttcaccattcgagaccttgtgtctggctccgtgaagctgaatgtggagcgctgctctctgggccgcctgacccgccgtggcctctacctcgctttccacaacccgggtgcctgtgtggccctggtgtctgtccgggtcttctaccagcgctgtcctgagaccctgaatggcttggcccaattcccagacactctgcctggccccgctgggttggtggaagtggcggggacctgcttgccccacgcgcgggccagccccaggccctcaggtgcaccccgcatgcactgcagccctgatggcgagtggctggtgcctgtaggacggtgccactgtgagcctggctatgaggaaggtggcagtggcgaagcatgtgttgcctgccctagcggctcctaccggatggacatggacacaccccattgtctcacgtgcccccagcagagcactgctgagtctgagggggccaccatctgtacctgtgagagcggccattacagagctcccggggagggcccccaggtggcatgcacaggtcccccctcggccccccgaaacctgagcttctctgcctcagggactcagctctccctgcgttgggaacccccagcagatacggggggacgccaggatgtcagatacagtgtgaggtgttcccagtgtcagggcacagcacaggacggggggccctgccagccctgtggggtgggcgtgcacttctcgccgggggcccgggggctcaccacacctgcagtgcatgtcaatggccttgaaccttatgccaactacacctttaatgtggaagcccaaaatggagtgtcagggctgggcagctctggccatgccagcacctcagtcagcatcagcatggggcatgcagagtcactgtcaggcctgtctctgagactggtgaagaaagaaccgaggcaactagagctgacctgggcggggtcccggccccgaagccctggggcgaacctgacctatgagctgcacgtgctgaaccaggatgaagaacggtaccagatggttctagaacccagggtcttgctgacagagctgcagcctgacaccacatacatcgtcagagtccgaatgctgaccccactgggtcctggccctttctcccctgatcatgagtttcggaccagcccaccagtgtccaggggcctgactggaggagagattgtagccgtcatctttgggctgctgcttggtgcagccttgctgcttgggattctcgttttccggtccaggagagcccagcggcagaggcagcagaggcagcgtgaccgcgccaccgatgtggatcgagaggacaagctgtggctgaagccttatgtggacctccaggcatacgaggaccctgcacagggagccctggactttacccgggagcttgatccagcgtggctgatggtggacactgtcataggagaaggagagtttggggaagtgtatcgagggaccctgaggctccccagccaggactgcaagactgtggccattaagaccttaaaagacacatccccaggtggccagtggtggaacttccttcgagaggcaactatcatgggccagtttagccacccgcatattctgcatctggaaggcgtcgtcacaaagcgaaagccgatcatgatcatcacagaatttatggagaatggagccctggatgccttcctgagggagcgggaggaccagctggtccctgggcagctagtggccatgctgcagggcatagcatctggcatgaactacctcagtaatcacaattatgtccaccgggacctggctgccagaaacatcttggtgaatcaaaacctgtgctgcaaggtgtctgactttggcctgactcgcctcctggatgactttgatggcacatacgaaacccagggaggaaagatccctatccgttggacagcccctgaagccattgcccatcggatcttcaccacagccagcgatgtgtggagctttgggattgtgatgtgggaggtgctgagctttggggacaagccttatggggagatgagcaatcaggaggttatgaagagcattgaggatgggtaccggttgccccctcctgtggactgccctgcccctctgtatgagctcatgaagaactgctgggcatatgaccgtgcccgccggccacacttccagaagcttcaggcacatctggagcaactgcttgccaacccccactccctgcggaccattgccaactttgaccccaggatgactcttcgcctgcccagcctgagtggctcagatgggatcccatatcgaaccgtctctgagtggctcgagtccatacgcatgaaacgctacatcctgcacttccactcggctgggctggacaccatggagtgtgtgctggagctgaccgctgaggacctgacgcagatgggaatcacactgcccgggcaccagaagcgcattctttgcagtattcagggattcaaggactgatccctcctctcaccccatgcccaatcagggtgcaaggagcaaggacggggccaaggtcgctcatggtcactccctgcgccccttcccacaacctgccagactaggctatcggtgctgcttctgcccactttcaggagaaccctgctctgcaccccagaaaacctctttgttttaaaagggaggtgggggtagaagtaaaaggatgatcatgggagggagctgaggggttaatatatatacatacatacacatatatatatttttgtaaataaacaggaactgattttctgcctccatcccacccatgagggctgcaggcactacaaaagagctgactactgagaa

SEQ ID NO: 154201 - protein, 983 aa, Artificial Sequence
  derived and/or modified sequence
MDCQLSILLLLSCSVLDSFGELIPQPSNEVNLLDSKTIQGELGWISYPSHGWEEISGVDEHYTPIRTYQVCNVMDHSQNNWLRTNWVPRNSAQKIYVELKFTLRDCNSIPLVLGTCKETFNLYYMESDDDHGVKFREHQFTKIDTIAADESFTQMDLGDRILKLNTEIREVGPVNKKGFYLAFQDVGACVALVSVRVYFKKCPFTVKNLAMFPDTVPMDSQSLVEVRGSCVNNSKEEDPPRMYCSTEGEWLVPIGKCSCNAGYEERGFMCQACRPGFYKALDGNMKCAKCPPHSSTQEDGSMNCRCENNYFRADKDPPSMACTRPPSSPRNVISNINETSVILDWSWPLDTGGRKDVTFNIICKKCGWNIKQCEPCSPNVRFLPRQFGLTNTTVTVTDLLAHTNYTFEIDAVNGVSELSSPPRQFAAVSITTNQAAPSPVLTIKKDRTSRNSISLSWQEPEHPNGIILDYEVKYYEKQEQETSYTILRARGTNVTISSLKPDTIYVFQIRARTAAGYGTNSRKFEFETSPDSFSISGESSQVVMIAISAAVAIILLTVVIYVLIGRFCGYKSKHGADEKRLHFGNGHLKLPGLRTYVDPHTYEDPTQAVHEFAKELDATNISIDKVVGAGEFGEVCSGRLKLPSKKEISVAIKTLKVGYTEKQRRDFLGEASIMGQFDHPNIIRLEGVVTKSKPVMIVTEYMENGSLDSFLRKHDAQFTVIQLVGMLRGIASGMKYLSDMGYVHRDLAARNILINSNLVCKVSDFGLSRVLEDDPEAAYTTRGGKIPIRWTSPEAIAYRKFTSASDVWSYGIVLWEVMSYGERPYWEMSNQDVIKAVDEGYRLPPPMDCPAALYQLMLDCWQKDRNNRPKFEQIVSILDKLIRNPGSLKIITSAAARPSNLLLDQSNVDITTFRTTGDWLNGVWTAHCKEIFTGVEYSSCDTIAKISTDDMKKVGVTVVGPQKKIISSIKALETQSKNGPVPV

SEQ ID NO: 154202 - DNA, 2952 bp, Artificial Sequence
  derived and/or modified sequence
atggactgtcaactgtcaatactcctgttgctcagttgtagcgtgttggacagcttcggcgaactaattccccaaccttccaatgaggtgaacctgcttgattccaagaccatccaaggagagctgggatggatttcatatccctcacatggctgggaggagatcagcggcgtagatgagcattatactcccatccgtacctaccaggtgtgtaacgtcatggatcacagtcaaaataactggctcaggacaaactgggtgcctcggaattcagcccaaaagatttacgttgaactgaaatttacgttgcgcgactgcaatagtatcccactcgtgcttggcacctgtaaagaaacatttaacctctattatatggagtctgacgacgatcacggcgttaaattcagagaacatcagtttacgaagatcgacacaatcgctgccgatgaaagttttactcaaatggacctgggagaccgaatcttgaaacttaataccgagatcagagaagtggggcccgtgaataagaagggattttatctggccttccaggatgtgggcgcttgcgtggccctcgtgagcgtccgggtctactttaagaagtgtccttttacagtaaaaaatctggcaatgtttcccgatactgtgccgatggactcccagtcattagttgaggtcagagggagttgcgtgaacaactcaaaggaagaggatccgccgcgtatgtattgctccacagaaggcgagtggctagtgcctattggaaaatgtagttgcaacgcaggatacgaagaacgcggtttcatgtgccaggcctgcagacctgggttctacaaggccttagatggtaatatgaagtgtgcaaaatgtcccccccactcttcaacacaggaggacggttccatgaactgccgctgcgagaacaactactttcgagctgataaggatcctccaagtatggcatgcacacgacccccatcttctccgcgaaatgttattagtaatattaatgaaacgagcgttattttggactggtcatggcctttggatacaggcggccggaaggacgttacctttaatattatttgtaagaaatgcggatggaacatcaaacagtgcgagccctgttcacccaatgtacgctttctgccccggcaatttggactgacaaacacaacagtaaccgtcaccgacctgttggcacataccaactatacctttgagatagatgccgttaacggtgtgagtgaactctcatcgcctccccgccagtttgccgccgtttcaattaccaccaaccaggcagcaccctctccagtgctcacaattaagaaagaccgaacctccagaaacagcattagcttgtcgtggcaagaacccgagcatccaaatgggataatcctagactacgaggttaaatattatgagaagcaggaacaggagactagctacactatcttacgcgccagggggaccaatgttacaatcagtagtctaaagcccgacacaatctacgttttccagattagggctaggacggccgcgggatatgggacgaacagtaggaaatttgagtttgaaactagccctgactctttctctatctccggtgagtcttcccaagttgtcatgattgccatatccgctgctgtggcgatcatcctcttgaccgtcgtgatttacgtgctgataggcaggttctgcggctacaaatccaagcatggggcggatgaaaagcgacttcacttcggaaacggtcatctcaagctcccagggttaagaacctacgttgatccccacacctatgaagaccccacccaggcggtccacgaatttgccaaggaactggatgcgaccaatatttccatagacaaagtggtgggtgctggggaattcggagaggtgtgttccggacgtctcaaactgcccagtaaaaaggaaatctcagtggccatcaaaactctgaaggtgggttacactgagaaacagaggagagactttttgggggaggcaagcataatgggacagtttgaccaccctaatatcatccggttggagggcgtcgttacaaaatccaagcctgttatgatcgtgacggaatatatggaaaatgggtcactcgatagctttctacggaagcatgacgcgcagttcaccgtcatccagctcgtggggatgctgcgcggcattgctagcggtatgaagtatctctccgatatgggttacgttcatagagacctcgccgcaaggaacatactgatcaatagtaaccttgtgtgtaaggtgagcgattttggcctgagccgcgttctcgaagatgaccccgaggccgcttatacgaccagaggaggaaagattcctatccgatggacatctcctgaggccattgcctacagaaagttcactagcgccagcgacgtttggtcttacggcatcgtactgtgggaagtcatgtcatatggtgagcgtccttattgggaaatgtcaaatcaggacgtaattaaggccgtggacgagggatacagactgccaccccccatggactgccctgccgccctgtaccagctcatgctcgactgttggcagaaagaccgcaataatcgtccaaagtttgagcaaattgtctccatccttgacaagttaattagaaaccctggaagcctgaagattatcacttcggctgcagcccgtcctagcaacctactgctagaccagagcaatgtggacatcaccaccttccggaccaccggagattggctgaacggggtgtggactgcgcactgcaaggaaatattcactggcgtcgagtacagctcttgtgatactattgccaaaatctccacggatgacatgaagaaggtgggtgtcacagtggtaggcccacagaagaagataatcagctctatcaaagcactcgagacgcagtccaagaatggacctgtgcctgtatag

SEQ ID NO: 154203 - DNA, 2952 bp, Artificial Sequence
  derived and/or modified sequence
atggactgccagctgagcatcctgctgctgctgagctgcagcgtgctggacagctttggagagctgatcccccagcccagcaatgaggtgaacctgctggacagcaagaccatccagggcgagctgggctggatctcctaccccagccacggctgggaggagatcagcggcgtggatgagcactacacccccatccgcacctaccaggtgtgcaatgtgatggaccacagccagaacaactggctgcggaccaactgggtgcccagaaattctgcccagaagatctacgtggagctgaagttcaccctgcgggactgcaacagcatccccctggtgctgggcacctgcaaggagaccttcaacctgtactacatggagagtgatgatgaccatggagtgaagttccgggagcaccagttcaccaagattgacaccatcgccgcagatgagagcttcacccagatggacctgggggaccgcatcctgaagctgaacacagagatccgggaggtgggccctgtgaacaagaagggcttctacctggccttccaggatgtgggcgcctgtgtggccctggtgtctgtgcgggtgtacttcaagaagtgccccttcaccgtgaagaacctggccatgtttcctgacacagtgcccatggacagccagagcctggtggaggtgcggggcagctgtgtgaacaacagcaaggaggaggacccccccaggatgtactgcagcacagaaggagagtggctggtgcccatcggcaagtgcagctgcaatgccggctatgaggagcggggcttcatgtgccaggcctgcaggcctggcttctacaaggccctggatggcaacatgaagtgtgccaagtgccccccccacagcagcacccaggaggatggctccatgaactgccgctgtgagaacaactacttccgggctgacaaggaccccccatccatggcctgcaccaggcctcccagcagccccagaaatgtcatcagcaacatcaatgagaccagcgtcatcctggactggagctggcccctggacacaggaggcaggaaggatgtgaccttcaacatcatctgcaagaagtgtggctggaacatcaagcagtgtgagccctgcagccccaacgtgcgcttcctgccccggcagtttggcctgaccaacaccaccgtgacagtgacagacctgctggcccacaccaactacacctttgaaattgatgctgtgaatggagtgtctgagctgagcagccccccccggcagtttgctgctgtgtccatcaccaccaaccaggccgcccccagccctgtgctgaccatcaagaaggacaggaccagcaggaacagcatcagcctgtcctggcaggagcctgagcaccccaacggcatcatcctggactatgaggtgaagtactatgagaagcaggagcaggagaccagctacaccatcctgcgggcccggggcaccaacgtgaccatcagcagcctgaagccagacaccatctacgtgttccagatccgggccaggacagctgctggctacggcaccaacagcaggaagtttgaatttgagaccagcccagacagcttcagcatcagcggggagagcagccaggtggtgatgattgccatctctgctgctgtggccatcatcctgctgactgtggtgatctacgtgctgattggccgcttctgtggctacaagagcaagcacggggctgatgagaagaggctgcactttggaaatggccacctgaagctgcccggcctgcggacctacgtggacccccacacctatgaggaccccacccaggccgtgcatgaatttgccaaggagctggatgccaccaacatcagcattgacaaggtggtgggcgctggggagtttggagaggtgtgcagcggccgcctgaagctgcccagcaagaaggagatctctgtggccatcaagaccctgaaggtgggctacacagagaagcagaggcgggacttcctgggggaggccagcatcatgggccagtttgaccaccccaacatcatccggctggagggcgtggtgaccaagagcaagcctgtgatgattgtgacagagtacatggagaatggcagcctggacagcttcctgaggaagcatgatgcccagttcaccgtcatccagctggtgggcatgctgcggggcatcgccagcggcatgaagtacctgagtgacatgggctacgtgcaccgggacctggccgccaggaacatcctgatcaacagcaacctggtgtgcaaggtgtctgactttggcctgagccgggtgctggaggatgatcctgaggccgcctacaccacccggggcggcaagatccccatccgctggaccagccctgaggccatcgcctacaggaagttcaccagcgccagtgatgtgtggagctatggcatcgtgctgtgggaggtgatgtcctatggagagcggccctactgggagatgagcaaccaggacgtcatcaaggctgtggatgagggctaccgcctgcccccacccatggactgcccagctgccctgtaccagctgatgctggactgctggcagaaggacaggaacaaccggcccaagtttgagcagatcgtgtccatcctggacaagctgatcagaaatcctggcagcctgaagatcatcaccagcgctgctgcccggcccagcaacctgctgctggaccagagcaatgtggacatcaccaccttccgcaccaccggggactggctgaatggagtgtggacagcccactgcaaggagatcttcaccggggtggagtacagcagctgtgacaccatcgccaagatcagcacagatgacatgaagaaggtgggcgtgacagtggtgggcccccagaagaagatcatcagcagcatcaaggccctggagacccagagcaagaatggacctgtgcctgtgtag

SEQ ID NO: 154204 - DNA, 2952 bp, Artificial Sequence
  derived and/or modified sequence
atggactgccagctgagcatcctgctgctgctgagctgcagcgtgctcgacagctttggagagctgatcccccagccctctaacgaagtcaatctcctcgatagtaagactattcagggcgagctgggctggatcagttacccaagccatggctgggaggaaatcagcggggtggacgagcattatacacctatacgcacataccaggtatgcaatgtgatggaccactctcagaataattggttgaggactaactgggtaccgaggaactccgcccagaagatctatgtcgagttgaaattcacccttcgagattgcaatagcatccccctcgtgctcggcacttgtaaggagacattcaacctctactacatggagagtgatgacgaccacggcgttaagttcagagagcaccagttcaccaaaattgacacgatcgcggctgatgagtcctttacgcagatggacttaggtgatcgaatcctgaaactgaataccgagatacgtgaggtgggccccgttaataagaaaggcttctatctggcgtttcaagacgtcggcgcttgcgttgctttggtgtcagtgagagtttactttaagaagtgccctttcaccgtgaagaacctagccatgtttccagacacagttcctatggatagtcagtcactggtcgaagtgaggggctcttgcgtaaacaatagcaaggaggaggaccccccccgcatgtattgttccactgagggtgagtggctcgtaccgataggcaagtgttcatgtaacgcaggatacgaggagcggggctttatgtgtcaagcatgccgcccaggcttttacaaagcactcgatgggaatatgaaatgtgctaagtgcccgcctcattcctcgacgcaggaggacgggtctatgaattgcaggtgcgaaaacaactacttccgcgccgacaaggaccctccatcaatggcatgtacccgaccccctagttcgcctcggaatgtaatcagcaacataaatgaaaccagtgtaatcctggattggagctggccattggacactggaggcaggaaggatgttacctttaatattatatgcaagaaatgcggatggaatatcaaacagtgcgaaccttgttcacctaatgtgcgcttcctccccagacagttcgggctgacaaacaccaccgttacggtcactgacttgttggctcatacaaattacactttcgagattgacgctgtgaacggggtatcagaactctcatcgcctcctcgtcaattcgctgccgtgtccataacaaccaaccaggctgcgccttcgcctgtgctaaccatcaaaaaagaccgtacatctaggaacagcatttccctctcctggcaggagcccgagcatcctaatggcattattctcgattatgaagttaagtactacgaaaaacaagaacaggaaacatcctatacaatactgagagctcgcggtaccaatgtgaccattagctcccttaaaccagatactatctacgttttccagatccgcgccagaacagccgccgggtacggaactaattctaggaaattcgaattcgagacaagcccggatagtttcagcatctccggagagtccagccaggtggtcatgatcgccatatccgcagcagtagccataattttgctcacagttgtgatctacgtgctgatcggccggttttgtggttataagagtaagcatggggctgatgagaaacggttgcatttcggtaatggccacctgaagctacctggcctcagaacctatgttgatccccacacgtatgaggatcctacacaggccgtgcacgaatttgcgaaagagttagacgccacaaacatttctatagataaggtggtgggtgcaggtgagtttggagaagtgtgcagcggcaggctgaagctgccttcaaagaaggagatctctgtagctattaaaacattaaaggtgggttacaccgaaaaacagaggagagacttcctgggcgaagctagcatcatgggtcagtttgatcatcccaacattatccgcctggagggggtggtgacaaaaagcaaacctgtgatgatcgttactgagtatatggagaacggctctctcgatagctttctgcgcaagcacgatgctcaatttaccgtgatccaacttgtcggcatgttgagagggattgcatcagggatgaagtacctctccgacatggggtatgtgcaccgtgatttagcggctcggaacatcctaataaactctaaccttgtttgtaaggtatcagactttggcctctctagagtgctggaagatgacccggaggctgcatacacgacccgcggtggcaagattcctattcgatggacttcaccagaggcaattgcctaccgcaagttcacatctgcatccgacgtgtggtcctatggcatagtactttgggaggtcatgtcatatggcgaacgaccttactgggaaatgagcaatcaggatgtgattaaggcagtggatgaagggtacagacttcccccacccatggattgccccgctgccctctatcagctaatgcttgactgttggcaaaaggaccgaaacaaccggccgaaattcgagcagatcgtgtccatccttgataagctaattaggaaccccggctcactgaaaatcatcacatcagccgctgctagaccatccaacctgctcctggatcagtctaacgtcgacattactacgtttagaaccaccggagattggctgaacggggtctggactgcacattgcaaagaaatctttaccggcgtcgaatattctagctgcgacaccatcgccaaaatctcgacagacgacatgaagaaggttggcgtaacagtggtcggcccccagaagaaaattatctcctctataaaagccctagaaacacagtccaagaacggcccagtccccgtttag

SEQ ID NO: 154205 - DNA, 2952 bp, Artificial Sequence
  derived and/or modified sequence
atggactgccaactgagtattttgctgctactgtcctgcagtgtgttggatagttttggtgagctgattccgcagcctagtaacgaggtgaatcttctggactccaagacgatccaaggggaactcggctggatcagctatccttcccatgggtgggaggaaatctctggtgttgacgagcactataccccaattcgaacctaccaagtttgtaacgttatggaccactcacagaataactggctgagaactaattgggttccgcgaaattctgctcagaaaatttacgttgagctgaagttcacacttcgggactgtaacagcattccgctggtgttgggcacctgcaaggaaacctttaacctatactatatggagtccgacgacgaccatggagtgaaattccgcgagcaccagttcaccaagatcgacacgatagcagctgacgaatcatttacccaaatggacctgggtgaccgaatactcaagctgaatactgaaatacgagaagtcggcccagtgaataaaaaaggcttctatttggccttccaggatgtaggcgcttgcgtggcactggtatcagtcagggtgtatttcaagaagtgccctttcacagtaaagaatctggctatgttccccgacacagtacctatggatagccagtctctggtagaggtccgagggtcatgtgttaataactcaaaggaagaggaccccccacgcatgtactgctccaccgaaggggagtggttagtgcccatcggaaagtgcagctgcaatgctgggtatgaagagaggggttttatgtgtcaagcttgtcgtcccggtttttacaaagcattagatgggaacatgaagtgtgcaaaatgcccacctcattcctccacacaggaagacggaagcatgaactgtcgttgtgaaaacaattacttccgagcggacaaggaccctccttcaatggcctgtacgagaccaccttcatccccaagaaacgttatttccaatatcaacgaaacctcagtcatcctggattggtcctggccactggacacgggtggacgaaaggacgtaactttcaacatcatttgtaaaaaatgcggttggaatattaagcaatgtgagccttgttctcccaatgtccgattcctgccccgtcagttcggcctgacaaacaccaccgtgacagtgacggacctactcgcgcacaccaactacaccttcgagatcgacgcagtcaatggagtgagtgagctgtcatctccaccgcgacaatttgcagctgtgtccattacgactaaccaggctgccccatcaccggtcttgaccataaaaaaggatagaacttccaggaatagcatttctctatcctggcaagaacctgagcatccaaacggcatcatcttggactatgaggtgaagtattacgagaagcaggaacaagaaacctcctacacgatactgagggccaggggtacaaacgttactatttcctctcttaagcctgacactatctatgtctttcaaattagagccaggacggcagcaggttacgggaccaactctagaaagttcgaattcgagacgtccccagactcgttcagtatctctggcgagtcgtcccaggtggttatgatagcaatttctgcagccgttgccattatcctccttaccgtagtgatctacgtgctcattggccgtttctgtggctacaaatccaaacatggtgccgatgaaaagagactgcacttcggcaatggccacttgaagctgcccggtctgcgaacgtacgtcgaccctcatacgtacgaggaccctacccaagcagtccatgagttcgcaaaagaactcgatgccaccaatattagcatcgataaagtggttggagccggagaattcggagaagtctgctctggaaggctgaaattaccctctaaaaaggagatttccgtagcaattaagaccctcaaggtggggtataccgaaaaacagaggagagactttctgggagaagccagcataatggggcaattcgatcatcccaacattatccgcctggaaggcgtcgtgactaagtcaaaaccggtgatgatcgttacggagtacatggagaacggcagcctagacagcttcctgcggaagcatgacgctcagtttaccgtgatccagttggttgggatgctgcgcggtatagcctccggaatgaagtacctcagcgacatgggttacgtccaccgcgacctggccgctagaaacatattgataaacagcaatctggtctgcaaagtttcggactttgggctttcgcgcgtgttagaggacgaccccgaggctgcctacaccacacgcggaggcaaaatccctattcgatggacatccccggaggctatcgcttacaggaagttcacaagtgcgagtgacgtgtggtcctatggtatcgtcctgtgggaagttatgagttacggagaaagaccatattgggagatgagtaaccaggacgttatcaaagccgtagacgaaggctacaggctgccaccaccaatggattgtcccgctgcgctgtaccagttgatgctagactgctggcagaaggatcgtaacaatcgtcccaagttcgagcaaatcgtgtctattttggacaaacttattagaaatcctggttcgctgaaaatcatcacctcagccgctgcacgtcccagcaacctactgctggatcaatccaatgtggatatcaccaccttccggacgacaggggactggcttaacggcgtctggactgctcactgcaaagaaattttcactggggtcgagtactcaagttgcgataccatcgcaaagatcagtactgatgacatgaagaaggtgggcgtgaccgtggttggacctcagaaaaagatcatcagttccattaaagcactcgagacccaaagcaaaaacggtcccgtgcccgtctag

SEQ ID NO: 154206 - DNA, 2952 bp, Artificial Sequence
  derived and/or modified sequence
atggactgccagctgagcatcctgctgctgctgagctgcagcgtgctggacagcttcggcgagctgatcccccagcccagcaacgaggtgaacctgctggacagcaagaccatccagggcgagctgggctggatcagctaccccagccacggctgggaggagatcagcggcgtggacgagcactacacccccatcagaacctaccaggtgtgcaacgtgatggaccacagccagaacaactggctgagaaccaactgggtgcccagaaacagcgcccagaagatctacgtggagctgaagttcaccctgagagactgcaacagcatccccctggtgctgggcacctgcaaggagaccttcaacctgtactacatggagagcgacgacgaccacggcgtgaagttcagagagcaccagttcaccaagatcgacaccatcgccgccgacgagagcttcacccagatggacctgggcgacagaatcctgaagctgaacaccgagatcagagaggtgggccccgtgaacaagaagggcttctacctggccttccaggacgtgggcgcctgcgtggccctggtgagcgtgagagtgtacttcaagaagtgccccttcaccgtgaagaacctggccatgttccccgacaccgtgcccatggacagccagagcctggtggaggtgagaggcagctgcgtgaacaacagcaaggaggaggacccccccagaatgtactgcagcaccgagggcgagtggctggtgcccatcggcaagtgcagctgcaacgccggctacgaggagagaggcttcatgtgccaggcctgcagacccggcttctacaaggccctggacggcaacatgaagtgcgccaagtgccccccccacagcagcacccaggaggacggcagcatgaactgcagatgcgagaacaactacttcagagccgacaaggacccccccagcatggcctgcaccagaccccccagcagccccagaaacgtgatcagcaacatcaacgagaccagcgtgatcctggactggagctggcccctggacaccggcggcagaaaggacgtgaccttcaacatcatctgcaagaagtgcggctggaacatcaagcagtgcgagccctgcagccccaacgtgagattcctgcccagacagttcggcctgaccaacaccaccgtgaccgtgaccgacctgctggcccacaccaactacaccttcgagatcgacgccgtgaacggcgtgagcgagctgagcagcccccccagacagttcgccgccgtgagcatcaccaccaaccaggccgcccccagccccgtgctgaccatcaagaaggacagaaccagcagaaacagcatcagcctgagctggcaggagcccgagcaccccaacggcatcatcctggactacgaggtgaagtactacgagaagcaggagcaggagaccagctacaccatcctgagagccagaggcaccaacgtgaccatcagcagcctgaagcccgacaccatctacgtgttccagatcagagccagaaccgccgccggctacggcaccaacagcagaaagttcgagttcgagaccagccccgacagcttcagcatcagcggcgagagcagccaggtggtgatgatcgccatcagcgccgccgtggccatcatcctgctgaccgtggtgatctacgtgctgatcggcagattctgcggctacaagagcaagcacggcgccgacgagaagagactgcacttcggcaacggccacctgaagctgcccggcctgagaacctacgtggacccccacacctacgaggaccccacccaggccgtgcacgagttcgccaaggagctggacgccaccaacatcagcatcgacaaggtggtgggcgccggcgagttcggcgaggtgtgcagcggcagactgaagctgcccagcaagaaggagatcagcgtggccatcaagaccctgaaggtgggctacaccgagaagcagagaagagacttcctgggcgaggccagcatcatgggccagttcgaccaccccaacatcatcagactggagggcgtggtgaccaagagcaagcccgtgatgatcgtgaccgagtacatggagaacggcagcctggacagcttcctgagaaagcacgacgcccagttcaccgtgatccagctggtgggcatgctgagaggcatcgccagcggcatgaagtacctgagcgacatgggctacgtgcacagagacctggccgccagaaacatcctgatcaacagcaacctggtgtgcaaggtgagcgacttcggcctgagcagagtgctggaggacgaccccgaggccgcctacaccaccagaggcggcaagatccccatcagatggaccagccccgaggccatcgcctacagaaagttcaccagcgccagcgacgtgtggagctacggcatcgtgctgtgggaggtgatgagctacggcgagagaccctactgggagatgagcaaccaggacgtgatcaaggccgtggacgagggctacagactgcccccccccatggactgccccgccgccctgtaccagctgatgctggactgctggcagaaggacagaaacaacagacccaagttcgagcagatcgtgagcatcctggacaagctgatcagaaaccccggcagcctgaagatcatcaccagcgccgccgccagacccagcaacctgctgctggaccagagcaacgtggacatcaccaccttcagaaccaccggcgactggctgaacggcgtgtggaccgcccactgcaaggagatcttcaccggcgtggagtacagcagctgcgacaccatcgccaagatcagcaccgacgacatgaagaaggtgggcgtgaccgtggtgggcccccagaagaagatcatcagcagcatcaaggccctggagacccagagcaagaacggccccgtgcccgtgtag

SEQ ID NO: 154207 - DNA, 5809 bp, Artificial Sequence
  derived and/or modified sequence
cccgctctgcttcagcgcacgctgaagacggcactaggacccagggaagtccccgagcggggttcgcggaaaggcagccagactcctccttatctccagtgtcaaacttgacatcagcctgcgagcggagcatggtaacttctccagcaatcagagcgctccccctcacatcagtggcatgcttcatggagatatgctcctctcactgccctctgcaccagcaacatggattgtcagctctccatcctcctccttctcagctgctctgttctcgacagcttcggggaactgattccgcagccttccaatgaagtcaatctactggattcaaaaacaattcaaggggagctgggctggatctcttatccatcacatgggtgggaagagatcagtggtgtggatgaacattacacacccatcaggacttaccaggtgtgcaatgtcatggaccacagtcaaaacaattggctgagaacaaactgggtccccaggaactcagctcagaagatttatgtggagctcaagttcactctacgagactgcaatagcattccattggttttaggaacttgcaaggagacattcaacctgtactacatggagtctgatgatgatcatggggtgaaatttcgagagcatcagtttacaaagattgacaccattgcagctgatgaaagtttcactcaaatggatcttggggaccgtattctgaagctcaacactgagattagagaagtaggtcctgtcaacaagaagggattttatttggcatttcaagatgttggtgcttgtgttgccttggtgtctgtgagagtatacttcaaaaagtgcccatttacagtgaagaatctggctatgtttccagacacggtacccatggactcccagtccctggtggaggttagagggtcttgtgtcaacaattctaaggaggaagatcctccaaggatgtactgcagtacagaaggcgaatggcttgtacccattggcaagtgttcctgcaatgctggctatgaagaaagaggttttatgtgccaagcttgtcgaccaggtttctacaaggcattggatggtaatatgaagtgtgctaagtgcccgcctcacagttctactcaggaagatggttcaatgaactgcaggtgtgagaataattacttccgggcagacaaagaccctccatccatggcttgtacccgacctccatcttcaccaagaaatgttatctctaatataaacgagacctcagttatcctggactggagttggcccctggacacaggaggccggaaagatgttaccttcaacatcatatgtaaaaaatgtgggtggaatataaaacagtgtgagccatgcagcccaaatgtccgcttcctccctcgacagtttggactcaccaacaccacggtgacagtgacagaccttctggcacatactaactacacctttgagattgatgccgttaatggggtgtcagagctgagctccccaccaagacagtttgctgcggtcagcatcacaactaatcaggctgctccatcacctgtcctgacgattaagaaagatcggacctccagaaatagcatctctttgtcctggcaagaacctgaacatcctaatgggatcatattggactacgaggtcaaatactatgaaaagcaggaacaagaaacaagttataccattctgagggcaagaggcacaaatgttaccatcagtagcctcaagcctgacactatatacgtattccaaatccgagcccgaacagccgctggatatgggacgaacagccgcaagtttgagtttgaaactagtccagactctttctccatctctggtgaaagtagccaagtggtcatgatcgccatttcagcggcagtagcaattattctcctcactgttgtcatctatgttttgattgggaggttctgtggctataagtcaaaacatggggcagatgaaaaaagacttcattttggcaatgggcatttaaaacttccaggtctcaggacttatgttgacccacatacatatgaagaccctacccaagctgttcatgagtttgccaaggaattggatgccaccaacatatccattgataaagttgttggagcaggtgaatttggagaggtgtgcagtggtcgcttaaaacttccttcaaaaaaagagatttcagtggccattaagaccctgaaagttggctacacagaaaagcagaggagagacttcctgggagaagcaagcattatgggacagtttgaccaccccaatatcattcgactggaaggagttgttaccaaaagtaagccagttatgattgtcacagaatacatggagaatggttccttggatagtttcctacgtaaacacgatgcccagtttactgtcattcagctagtggggatgcttcgagggatagcatctggcatgaagtacctgtcagacatgggctatgttcaccgagacctcgctgctcggaacatcttgatcaacagtaacttggtgtgtaaggtttctgatttcggactttcgcgtgtcctggaggatgacccagaagctgcttatacaacaagaggagggaagatcccaatcaggtggacatcaccagaagctatagcctaccgcaagttcacgtcagccagcgatgtatggagttatgggattgttctctgggaggtgatgtcttatggagagagaccatactgggagatgtccaatcaggatgtaattaaagctgtagatgagggctatcgactgccaccccccatggactgcccagctgccttgtatcagctgatgctggactgctggcagaaagacaggaacaacagacccaagtttgagcagattgttagtattctggacaagcttatccggaatcccggcagcctgaagatcatcaccagtgcagccgcaaggccatcaaaccttcttctggaccaaagcaatgtggatatcactaccttccgcacaacaggtgactggcttaatggtgtctggacagcacactgcaaggaaatcttcacgggtgtggagtacagttcttgtgacacaatagccaagatttccacagatgacatgaaaaaggttggtgtcaccgtggttgggccacagaagaagatcatcagtagcattaaagctctagaaacgcaatcaaagaatggcccagttcccgtgtaaagcacgggacggaagtgcttctggacggaagtggtggctgtggaaggcgtagcatcatcctgcagacagacaataattctggagatactggtggaagttccaagtccaataagacactcaaatatgagtacaaatgccttaaaatggaattgaaaaactctttattttcccctatcatttattggatgggtgggtggggtatttttttgtaattgcttttttaaatattagttaatggattaaatttaattcttcagcgtaaaatggtgaagaactagcatatagccattgatcataaactgactatcataaaatcaaaacaagtgaaataacaaaatggacatggtggctttgtttaggtagagccacaaaagaaaagacttgtaatatttttatatacagaggaaatctgtaacaggtattttgtttcttttaaagcaagcaacacagaggaatttatacctcaaactatctggccatatttactaccttatcactgcattattctcttttatctgtttaaagcatatagagatgaagtttgtagttgttttaagtactacacatttttaaattgttagcttccttaagtatatcatgtaaagaaatgtcttaatttttgaaaaaagtacatatttattttcttttgaattgtttttattgttttctatttatgccttgatgatttaatatggatttgttacagccaagtgccaaatgctctctcaaattgtcagcaatttaactagacacagataataatgggtttctttcagattttttgaaccatccacttacatatatttttaaaaaatgaaatccttttcctgttcatacactaaccaaatctctcaaatctgttatcccaatcattgttgcctctccgtttattataaactgtatgctcacaacttagtgtaatataccagcttgtatgcaatggattttcaaccagataacatacctttcctgctctggtgcttagagactatcaactccctcctttagtgaaggagccgtgttagagcttccgagaatagctccactggagagaagtggaatcctatatagaatgctgcactaattgacaacacagcctataggccaatgcatgagtaaaaaaaaaaacaattactggctcactggctttgaaaagtcacttactattgttgctgaaacttgctgagctgtttatagagaatgatgataacagaacttttcctctgtatcactggtgtttaggtgaattaattaaacattgtgatcattagtaccaggtattattatctttaagagtcttccacttcaatgcacatggtgcagttttggtgtgtaacttagaaggattgaacttctttgaatttactggacataacattttcagaatagttggtcatctagcaaccgcctcaaaatgtgtaagcaggagagaaatttctcatcacagggatttagacttactattacataaaggctaactatgagcttgctcattaattttgaaaagatgtacctggtggatatctagctagtaatatattctgaagcaacattttagctctattgatactctttctaatgctgatatgatcttgagtataagaaatgcatatgtcactagaatggataaaataatgctgcaaacttaatgttcttatgcaaaatggaacgctaatgaaacacagcttacaatcgcaaatcaaaactcacaagtgctcatctgttgtagatttagtgtaataagacttagattgtgctccttcggatatgattgtttctcaaatcttggcaatattccttagtcaaatcaggctactagaattctgtattggatatataagagcatgaaatttttaaaaatacacttgtgattataaaattaatcacaaatttcacttatacctgctatcagcagctagaaaacattttttttttaaatcaagtattttgtgtttggaatgttagaatgagatctgaatgtggtttcaatctaattttttcccagactactattttcttttttaggtactattctgagcatactcaacaaaacccatgcatttcataaactaatagaagttgaggattgttgaatctatttcacttattttggctgtggtttccatctgaaagtagaggttgtatacaccatatactgttcttcattttattaatatttttctccttgacctctcataaatttactttacacaattcttaccctgtacatatgtaaacataagtgtacgattcttaaccatggagtagaggtactagaatgcttacggccatctctttgtacaggaactgcattgactttcagtaaacataaagccacaactcctacatgatgttatgtaccatatgatctgttttgtatcttaaatttgatttacatatattatttatttctggtaactcactcagtttatgctgtgctaaatatcaatcaagccatgtataaatgtgatatgattggcaatatgtgtttactttaaacttgtcttttcaaaatattactcagtttatgttgtacaatgtagatggcctcttactaatgtaaaatgatttgtagtggaaacatttatatttttataataaacataatgaaaatattttttacagattggaa

SEQ ID NO: 154208 - protein, 404 aa, Artificial Sequence
  derived and/or modified sequence
MAMVTGGWGGPGGDTNGVDKAGGYPRAAEDDSASPPGAASDAEPGDEERPGLQVDCVVCGDKSSGKHYGVFTCEGCKSFFKRSIRRNLSYTCRSNRDCQIDQHHRNQCQYCRLKKCFRVGMRKEAVQRGRIPHSLPGAVAASSGSPPGSALAAVASGGDLFPGQPVSELIAQLLRAEPYPAAAGRFGAGGGAAGAVLGIDNVCELAARLLFSTVEWARHAPFFPELPVADQVALLRLSWSELFVLNAAQAALPLHTAPLLAAAGLHAAPMAAERAVAFMDQVRAFQEQVDKLGRLQVDSAEYGCLKAIALFTPDACGLSDPAHVESLQEKAQVALTEYVRAQYPSQPQRFGRLLLRLPALRAVPASLISQLFFMRLVGKTPIETLIRDMLLSGSTFNWPYGSGQ

SEQ ID NO: 154209 - protein, 377 aa, Artificial Sequence
  derived and/or modified sequence
MAMVTGGWGGPGGDAEPGDEERPGLQVDCVVCGDKSSGKHYGVFTCEGCKSFFKRSIRRNLSYTCRSNRDCQIDQHHRNQCQYCRLKKCFRVGMRKEAVQRGRIPHSLPGAVAASSGSPPGSALAAVASGGDLFPGQPVSELIAQLLRAEPYPAAAGRFGAGGGAAGAVLGIDNVCELAARLLFSTVEWARHAPFFPELPVADQVALLRLSWSELFVLNAAQAALPLHTAPLLAAAGLHAAPMAAERAVAFMDQVRAFQEQVDKLGRLQVDSAEYGCLKAIALFTPDACGLSDPAHVESLQEKAQVALTEYVRAQYPSQPQRFGRLLLRLPALRAVPASLISQLFFMRLVGKTPIETLIRDMLLSGSTFNWPYGSGQ

SEQ ID NO: 154210 - DNA, 1804 bp, Artificial Sequence
  derived and/or modified sequence
gtgcagcccgtgccccccgcgcgccggggccgaatgcgcgccgcgtagggtcccccgggccgagaggggtgcccggagggaagagcgcggtgggggcgccccggccccgctgccctggggctatggccatggtgaccggcggctggggcggccccggcggcgacacgaacggcgtggacaaggcgggcggctacccgcgcgcggccgaggacgactcggcctcgccccccggtgccgccagcgacgccgagccgggcgacgaggagcggccggggctgcaggtggactgcgtggtgtgcggggacaagtcgagcggcaagcattacggtgtcttcacctgcgagggctgcaagagctttttcaagcgaagcatccgccgcaacctcagctacacctgccggtccaaccgtgactgccagatcgaccagcaccaccggaaccagtgccagtactgccgtctcaagaagtgcttccgggtgggcatgaggaaggaggcggtgcagcgcggccgcatcccgcactcgctgcctggtgccgtggccgcctcctcgggcagccccccgggctcggcgctggcggcagtggcgagcggcggagacctcttcccggggcagccggtgtccgaactgatcgcgcagctgctgcgcgctgagccctaccctgcggcggccggacgcttcggcgcagggggcggcgcggcgggcgcggtgctgggcatcgacaacgtgtgcgagctggcggcgcggctgctcttcagcaccgtggagtgggcgcgccacgcgcccttcttccccgagctgccggtggccgaccaggtggcgctgctgcgcctgagctggagcgagctcttcgtgctgaacgcggcgcaggcggcgctgcccctgcacacggcgccgctactggccgccgccggcctccacgccgcgcctatggccgccgagcgcgccgtggctttcatggaccaggtgcgcgccttccaggagcaggtggacaagctgggccgcctgcaggtcgactcggccgagtatggctgcctcaaggccatcgcgctcttcacgcccgacgcctgtggcctctcagacccggcccacgttgagagcctgcaggagaaggcgcaggtggccctcaccgagtatgtgcgggcgcagtacccgtcccagccccagcgcttcgggcgcctgctgctgcggctccccgccctgcgcgcggtccctgcctccctcatctcccagctgttcttcatgcgcctggtggggaagacgcccattgagacactgatcagagacatgctgctgtcggggagtaccttcaactggccctacggctcgggccagtgaccatgacggggccacgtgtgctgtggccaggcctgcagacagacctcaagggacagggaatgctgaggcctcgaggggcctcccggggcccaggactctggcttctctcctcagacttctattttttaaagactgtgaaatgtttgtcttttctgttttttaaatgatcatgaaaccaaaaagagactgatcatccaggcctcagcctcatcctccccaggacccctgtccaggatggagggtccaatcctaggacagccttgttcctcagcacccctagcatgaacttgtgggatggtggggttggcttccctggcatgatggacaaaggcctggcgtcggccagaggggctgctccagtgggcaggggtagctagcgtgtgccaggcagatcctctggacacgtaacctatgtcagacactacatgatgactcaaggccaataataaagacatttcctacctgca

SEQ ID NO: 154211 - DNA, 1215 bp, Artificial Sequence
  derived and/or modified sequence
atggcaatggtcaccgggggctggggaggccctggaggggataccaacggggtagacaaagccggcggataccccagagcggcggaggatgactctgccagtccacccggcgccgcttctgatgctgagcccggcgacgaggagcgaccgggtctccaagtggactgcgtggtctgcggcgataagagctctggtaagcattatggtgtcttcacctgcgagggatgcaagagcttttttaagaggagcatacgacgcaatttgagctatacctgtagaagcaaccgagattgccagatcgatcaacaccaccggaatcagtgtcagtactgccgccttaaaaagtgttttagagtgggcatgaggaaggaagccgtccagcgcggccgcatcccacatagccttcctggtgcggtggccgcttctagcgggagcccgcccgggagcgctttagccgccgtggcctctggcggtgatttatttcctggacagccggtgagtgaactgatcgcccagctgctgcgtgccgagccctatcctgccgccgcaggacgtttcggggcaggtgggggagccgctggagctgtccttgggattgacaacgtgtgtgaactcgctgccagactcctgttttcaactgtggagtgggctcggcacgcccctttcttccccgagctccctgtggccgaccaagtggccctgcttcgtctctcctggtctgagcttttcgtgctaaatgccgcccaggcagccttacctcttcatacggctcctctgcttgccgcagccgggctgcacgccgctcctatggcggctgagcgagccgtggcctttatggatcaggtcagagcctttcaggaacaggtggataagcttggaaggctgcaggtcgattcagcagagtacgggtgccttaaagctatcgcactgttcaccccagatgcctgtgggttgtcagacccagcccatgtggaatcccttcaggaaaaagcccaggtcgctctgactgagtatgtccgtgcccagtatccgtcccagcctcagcgattcggacgcctgctacttagacttcccgctctgagggcagtgcctgcctccctgataagccagttgtttttcatgcgcctagtgggaaaaacccctattgagaccctgatacgcgatatgttgctgagcggtagcaccttcaactggccttatggcagcggacagtag

SEQ ID NO: 154212 - DNA, 1134 bp, Artificial Sequence
  derived and/or modified sequence
atggctatggtcacggggggctggggcggtcccgggggagacgctgagccaggcgatgaagaaagacccggccttcaagtcgactgcgttgtctgcggggacaaatctagtggtaagcactacggagtatttacatgcgaaggttgcaagagtttctttaagcggagtatccgcaggaatcttagctatacctgtcggagcaatcgcgactgccagatcgaccagcatcaccggaaccaatgccagtattgcagactgaagaagtgcttccgggttgggatgcgtaaggaagccgttcagcgtggaagaattccccatagtctccccggggctgtcgctgcctcaagcggctccccccctggatctgcactggccgccgtggccagcgggggggacctcttcccaggacaacctgtgtcagagctcattgcccagctgctgcgcgccgagccctaccccgccgccgctggccgctttggggccggcggaggagcagcgggagccgttctggggatcgacaatgtctgcgagcttgcagctaggctgctgttctcgacagtggagtgggcaagacacgctccattcttcccagaactgcctgtggcagaccaagtagcacttttgcgtttgtcctggagcgagttgtttgtccttaatgcagctcaggccgcgctgcccctccacacagcccctttattggccgcggctgggttgcacgccgcgcctatggcagccgagcgcgccgtagccttcatggatcaagttagagcttttcaggagcaggtcgataagctggggcggctgcaggtggatagtgctgagtacgggtgtttgaaagcgatcgcattattcactccagatgcttgtgggctctcagatccggctcacgtggagagcctgcaggaaaaggcacaggttgcgcttactgagtatgtaagggctcagtacccctcccagccgcagcggtttggccggctcctgctcaggctgcctgccctcagagccgtgcctgcttcacttatttctcagctctttttcatgcggctagtgggaaagacccccatcgagaccctcattagggacatgctgctatccggctcaacattcaactggccctacggttccggacaatag

SEQ ID NO: 154213 - DNA, 1215 bp, Artificial Sequence
  derived and/or modified sequence
atggccatggtgactggaggctggggcggccctggaggagacaccaacggggtggacaaggccggcggctaccccagggctgctgaagatgacagcgccagccccccaggggccgccagtgatgctgagcctggagatgaggagcggcccggcctgcaggtggactgtgtggtgtgtggggacaagagcagcggcaagcactacggcgtcttcacctgtgagggctgcaagagcttcttcaagaggagcatcagaagaaacctgagctacacctgccgcagcaacagagactgccagattgaccagcaccacaggaaccagtgccagtactgccgcctgaagaagtgcttccgggtgggcatgaggaaggaggccgtgcagaggggccgcatcccccacagcctgcccggggctgtggccgccagcagcggcagccccccaggcagcgccctggccgctgtggccagcggcggggacctcttccctggccagcctgtgtctgagctgattgcccagctgctgcgggcagagccctacccagctgctgctggccgctttggagctgggggcggcgctgctggagctgtgctgggcatcgacaacgtgtgtgagctggccgcccggctgctcttcagcacagtggagtgggcccggcatgcccccttcttccctgagctgcctgtggccgaccaggtggccctgctgcggctgtcctggagcgagctgtttgtgctgaatgctgcccaggccgccctgcccctgcacacagcccccctgctggccgctgctggcctgcatgctgcccccatggctgctgagagagctgtggccttcatggaccaggtgcgggccttccaggagcaggtggacaagctgggccgcctgcaggtggacagcgcagaatatggctgcctgaaggccatcgccctcttcaccccagatgcctgtggcctgagtgaccctgcccacgtggagagcctgcaggagaaggcccaggtggccctgacagaatatgtgcgggcccagtaccccagccagccccagcgcttcggccgcctgctgctgcggctgcctgccctgcgggctgtgcctgccagcctcatcagccagctgttcttcatgaggctggtgggcaagacccccatcgagaccctcatccgggacatgctgctgagcggcagcaccttcaactggccctacggcagcggccagtag

SEQ ID NO: 154214 - DNA, 1134 bp, Artificial Sequence
  derived and/or modified sequence
atggccatggtgactggaggctggggcggccctggaggagatgctgagcctggagatgaggagaggcctggcctgcaggtggactgtgtggtgtgtggggacaagagcagcggcaagcactatggagtcttcacctgtgagggctgcaagagcttcttcaagaggagcatcagaagaaacctgagctacacctgccgcagcaacagagactgccagattgaccagcaccacaggaaccagtgccagtactgccgcctgaagaagtgcttccgggtgggcatgaggaaggaggccgtgcagaggggccgcatcccccacagcctgcctggagctgtggccgccagcagcggcagccccccaggcagcgccctggccgctgtggccagcggcggggacctcttccctggccagcctgtgtctgagctgattgcccagctgctgcgggcagagccctacccagctgctgctggccgctttggagctgggggcggggccgccggggctgtgctgggcatcgacaacgtgtgtgagctggccgcccggctgctcttcagcacagtggagtgggcccggcatgcccccttcttccctgagctgcctgtggccgaccaggtggccctgctgcggctgtcctggagcgagctgtttgtgctgaatgctgcccaggccgccctgcccctgcacacagcccccctgctggccgccgccggcctgcacgccgcccccatggctgctgagagagctgtggccttcatggaccaggtgcgggccttccaggagcaggtggacaagctgggccgcctgcaggtggacagcgcagaatatggctgcctgaaggccatcgccctcttcaccccagatgcctgtggcctgagtgaccctgcccacgtggagagcctgcaggagaaggcccaggtggccctgacagaatatgtgcgggcccagtaccccagccagccccagagatttggccgcctgctgctgcggctgcctgccctgcgggctgtgcctgccagcctcatcagccagctgttcttcatgaggctggtgggcaagacccccatcgagaccctcatccgggacatgctgctgagcggcagcaccttcaactggccctacggcagcggccagtag

SEQ ID NO: 154215 - DNA, 1215 bp, Artificial Sequence
  derived and/or modified sequence
atggccatggtgaccggcggctggggcggccccggcggcgacaccaatggagtggacaaggccggtgggtacccaagggcagcagaagacgattccgcaagtccacctggagccgcatccgatgctgagccaggcgatgaagagcgccccggactccaggtggattgcgtggtgtgcggcgataagtcctccggaaaacactacggcgtcttcacttgcgaaggctgcaaatcatttttcaaaagaagcatccggcggaaccttagctatacctgtagatcgaaccgcgactgccagattgatcagcatcaccgcaaccagtgccagtactgcagactcaagaaatgcttcagagtcgggatgcggaaggaggctgtacagcgcggacggattcctcattccctgcctggagctgttgcggcctccagcggttctccccccgggagcgccttggccgcagttgcgagtgggggcgacctcttcccaggtcaacctgtgagtgaactgatcgcccagctgcttcgggctgagccataccccgccgcagctggaagattcggggccgggggcggcgccgctggcgctgtgcttggcatcgacaatgtttgtgagttggccgccaggctgctgtttagcactgtggagtgggcccggcacgccccttttttcccggagctgcctgtggccgatcaggtggcattgcttcgcctatcctggagcgaactatttgtgctcaacgccgcccaggccgccctgcctttacacaccgccccgctactggcagccgctgggctccatgcagcgcctatggctgcggagcgcgccgtggccttcatggaccaagtccgcgctttccaggaacaggtggataagctgggtaggctgcaagtagattctgctgaatatggttgtctgaaggctattgcactgttcacacctgacgcctgcggcctttcagatccagcgcacgtggaatccttacaggagaaagcccaggtcgcgcttactgagtacgtgcgcgcacagtacccgtcacagccccagcgcttcggacgactattgctgcgactaccagctttgcgtgcagtgccggcatcgttgatttcacagttgtttttcatgcgcctggtggggaagactccaattgagacgctcatccgggacatgctgctctccggcagcacattcaactggccttacgggtcaggccagtag

SEQ ID NO: 154216 - DNA, 1134 bp, Artificial Sequence
  derived and/or modified sequence
atggccatggtgaccggcggctggggcggccccggcggcgacgccgaaccaggggacgaggaaaggcccgggttacaggtggactgcgtggtctgcggggacaagtcttctgggaaacattacggagtgttcacctgcgagggctgcaagtccttcttcaagcgtagcataaggcgcaatctgtcctatacctgccggagcaaccgcgactgtcaaatcgaccagcatcacagaaaccagtgccagtattgtagactaaagaaatgctttagggtaggcatgaggaaagaggcagtgcagcggggccgaatcccccatagtcttcccggtgccgtcgctgcctctagtggaagccccccaggatcagccctggccgccgtggcctcaggaggagatctgtttccaggtcagccagtttctgagctgattgcacaactcctcagggctgagccgtatcccgccgctgcaggacggttcggcgcaggcggtggagcggctggggcggtattgggcatcgataacgtctgtgagctggccgcccggctgctgttctccactgttgagtgggccagacacgcacctttctttcccgagttaccagttgctgaccaagtggctttgctccggctatcatggagcgagctatttgtcctgaacgccgctcaggcagccctgccactccacacagcaccgctgcttgctgctgccgggctccacgccgcgcccatggccgcagaacgcgcggtggcttttatggaccaggtgagagccttccaagaacaggtggacaagttggggcggctccaggtggatagcgcagaatatgggtgcttaaaagccatcgctctgtttaccccggatgcgtgcggcctgtccgatccagctcacgtggaaagcctgcaagaaaaggctcaggtcgcccttactgaatatgtacgcgctcagtaccctagccagccccagcgttttggcagactgctcctgaggttaccagctctgcgggctgtgcctgcctccctgatcagccagctgtttttcatgcgactcgtgggcaagacacccatcgagacactgatccgggacatgcttcttagcggtagtaccttcaactggccttacggctcaggacagtag

SEQ ID NO: 154217 - DNA, 1392 bp, Artificial Sequence
  derived and/or modified sequence
atggccatggtgaccggcggctggggcggccccggcggcgacgccgagccgggcgacgaggagcggccggggctgcaggtggactgcgtggtgtgcggggacaagtcgagcggcaagcattacggtgtcttcacctgcgagggctgcaagagctttttcaagcgaagcatccgccgcaacctcagctacacctgccggtccaaccgtgactgccagatcgaccagcaccaccggaaccagtgccagtactgccgtctcaagaagtgcttccgggtgggcatgaggaaggaggcggtgcagcgcggccgcatcccgcactcgctgcctggtgccgtggccgcctcctcgggcagccccccgggctcggcgctggcggcagtggcgagcggcggagacctcttcccggggcagccggtgtccgaactgatcgcgcagctgctgcgcgctgagccctaccctgcggcggccggacgcttcggcgcagggggcggcgcggcgggcgcggtgctgggcatcgacaacgtgtgcgagctggcggcgcggctgctcttcagcaccgtggagtgggcgcgccacgcgcccttcttccccgagctgccggtggccgaccaggtggcgctgctgcgcctgagctggagcgagctcttcgtgctgaacgcggcgcaggcggcgctgcccctgcacacggcgccgctactggccgccgccggcctccacgccgcgcctatggccgccgagcgcgccgtggctttcatggaccaggtgcgcgccttccaggagcaggtggacaagctgggccgcctgcaggtcgactcggccgagtatggctgcctcaaggccatcgcgctcttcacgcccgacgcctgtggcctctcagacccggcccacgttgagagcctgcaggagaaggcgcaggtggccctcaccgagtatgtgcgggcgcagtacccgtcccagccccagcgcttcgggcgcctgctgctgcggctccccgccctgcgcgcggtccctgcctccctcatctcccagctgttcttcatgcgcctggtggggaagacgcccattgagacactgatcagagacatgctgctgtcggggagtaccttcaactggccctacggctcgggccagtgaccatgacggggccacgtgtgctgtggccaggcctgcagacagacctcaagggacagggaatgctgaggcctcgaggggcctcccggggcccaggactctggcttctctcctcagacttctattttttaaagactgtgaaatgtttgtcttttctgttttttaaatgatcatgaaaccaaaaagagactgatcatccaggcctcagcctcatcctccccaggacccctgtccaggatggagggtccaatcctaggacag

SEQ ID NO: 154218 - DNA, 1215 bp, Artificial Sequence
  derived and/or modified sequence
atggccatggtgacgggtggttggggcggaccgggtggcgacaccaacggagtcgacaaagccggagggtaccccagagccgcagaggacgactctgccagccccccaggtgccgcaagcgacgccgagccaggcgatgaagaacggcctggcctccaagttgattgcgttgtatgcggagataaaagcagcggaaaacactacggagtcttcacttgtgaaggctgtaagtcattcttcaagcgatcaattagacgtaatctgtcgtacacgtgccgctccaatagggattgccagatcgatcagcaccaccgaaatcagtgccagtattgccgactcaaaaaatgcttcagggtcgggatgagaaaggaggctgtacaacggggaaggatccctcattcactgccaggagccgttgcggcaagttcgggtagccccccaggatccgcgttagcagctgtggcgagcggaggcgatctgttccctgggcaaccagtgtctgaacttattgcccagttgctgagagcagagccttacccagccgctgctggcagattcggtgcaggtgggggagccgctggcgctgtgctggggatagacaatgtttgcgagcttgcggctcgcttactgtttagcaccgtcgaatgggctagacacgccccattcttcccagagctgcctgtggccgatcaggtcgcgttactgaggctgagttggtcggagttgttcgttctaaacgccgctcaagcagctctccctctgcacaccgcacccctgttggccgctgccggtctgcacgctgctcctatggctgcagaacgcgctgtggccttcatggaccaggtgcgagctttccaagagcaggtggataaactgggtaggttacaagttgattctgcagagtacggctgcctgaaggctatcgccttatttacccccgacgcctgtggcctgagtgaccccgctcacgtggagagtcttcaggaaaaggcacaggtggccctgaccgaatatgtcagagcccaatacccatcacagccacagaggttcggcaggttgcttctgagactccctgcactgagggctgtgccagcatcattgatttctcagttattctttatgagattggtgggtaagacgccaatagagaccttgatccgtgacatgctgttatctggatctacatttaactggccatacgggagcgggcagtag

SEQ ID NO: 154219 - DNA, 1134 bp, Artificial Sequence
  derived and/or modified sequence
atggctatggttaccggagggtgggggggaccgggtggggacgccgagcctggagatgaggagcgacctgggctccaggtcgattgtgtggtctgtggcgataagtcatctggtaagcactatggcgtgttcacgtgtgaaggctgcaaaagcttctttaagcgatctataagacgcaatctaagttacacctgccggtcaaacagagactgccaaatcgaccagcaccaccggaaccaatgtcagtactgtcgtctgaagaaatgtttcagagtgggcatgagaaaggaagcagttcaaagaggaaggatccctcactctctgcccggtgccgttgcggctagtagcggaagccctcctggttccgccctggccgcagtggcctccggaggtgacctttttcccggtcagcctgtaagcgaactcattgcgcagctgctgcgagccgagccatatccagcggcagccggaaggtttggagctggcggtggagcagccggtgctgtgctcggtatagacaacgtttgtgagctagctgcacgtctgctgttctctaccgtcgaatgggcaaggcatgccccttttttccccgagctacctgtcgccgaccaggtggctttgttgaggctgtcttggtccgagttatttgtgttaaacgcagcccaggccgctttacccctgcatacggccccactgcttgcggcagcaggtctgcacgcagcgccaatggctgctgagagagcagtcgctttcatggatcaggtgcgagcattccaggaacaggtggacaaattgggtcggttgcaggtcgattcagctgagtacggctgtctcaaggcaatcgctttgttcacacctgacgcatgcggcctctccgaccctgcacacgtagagtccttacaggaaaaggcccaagtggcgctcaccgagtacgtacgcgcacagtatccatcccagccacaacggttcggtcgcctactgttgagattacccgcacttagagctgtgcccgcttctctcattagccagctgttctttatgcgacttgtcgggaaaactccgattgaaaccctcattcgagacatgttactaagcggatcaaccttcaactggccctatgggtccgggcagtag

SEQ ID NO: 154220 - DNA, 1215 bp, Artificial Sequence
  derived and/or modified sequence
atggccatggtgaccggcggctggggcggccccggcggcgacaccaacggcgtggacaaggccggcggctaccccagagccgccgaggacgacagcgccagcccccccggcgccgccagcgacgccgagcccggcgacgaggagagacccggcctgcaggtggactgcgtggtgtgcggcgacaagagcagcggcaagcactacggcgtgttcacctgcgagggctgcaagagcttcttcaagagaagcatcagaagaaacctgagctacacctgcagaagcaacagagactgccagatcgaccagcaccacagaaaccagtgccagtactgcagactgaagaagtgcttcagagtgggcatgagaaaggaggccgtgcagagaggcagaatcccccacagcctgcccggcgccgtggccgccagcagcggcagcccccccggcagcgccctggccgccgtggccagcggcggcgacctgttccccggccagcccgtgagcgagctgatcgcccagctgctgagagccgagccctaccccgccgccgccggcagattcggcgccggcggcggcgccgccggcgccgtgctgggcatcgacaacgtgtgcgagctggccgccagactgctgttcagcaccgtggagtgggccagacacgcccccttcttccccgagctgcccgtggccgaccaggtggccctgctgagactgagctggagcgagctgttcgtgctgaacgccgcccaggccgccctgcccctgcacaccgcccccctgctggccgccgccggcctgcacgccgcccccatggccgccgagagagccgtggccttcatggaccaggtgagagccttccaggagcaggtggacaagctgggcagactgcaggtggacagcgccgagtacggctgcctgaaggccatcgccctgttcacccccgacgcctgcggcctgagcgaccccgcccacgtggagagcctgcaggagaaggcccaggtggccctgaccgagtacgtgagagcccagtaccccagccagccccagagattcggcagactgctgctgagactgcccgccctgagagccgtgcccgccagcctgatcagccagctgttcttcatgagactggtgggcaagacccccatcgagaccctgatcagagacatgctgctgagcggcagcaccttcaactggccctacggcagcggccagtag

SEQ ID NO: 154221 - DNA, 1134 bp, Artificial Sequence
  derived and/or modified sequence
atggccatggtgaccggcggctggggcggccccggcggcgacgccgagcccggcgacgaggagagacccggcctgcaggtggactgcgtggtgtgcggcgacaagagcagcggcaagcactacggcgtgttcacctgcgagggctgcaagagcttcttcaagagaagcatcagaagaaacctgagctacacctgcagaagcaacagagactgccagatcgaccagcaccacagaaaccagtgccagtactgcagactgaagaagtgcttcagagtgggcatgagaaaggaggccgtgcagagaggcagaatcccccacagcctgcccggcgccgtggccgccagcagcggcagcccccccggcagcgccctggccgccgtggccagcggcggcgacctgttccccggccagcccgtgagcgagctgatcgcccagctgctgagagccgagccctaccccgccgccgccggcagattcggcgccggcggcggcgccgccggcgccgtgctgggcatcgacaacgtgtgcgagctggccgccagactgctgttcagcaccgtggagtgggccagacacgcccccttcttccccgagctgcccgtggccgaccaggtggccctgctgagactgagctggagcgagctgttcgtgctgaacgccgcccaggccgccctgcccctgcacaccgcccccctgctggccgccgccggcctgcacgccgcccccatggccgccgagagagccgtggccttcatggaccaggtgagagccttccaggagcaggtggacaagctgggcagactgcaggtggacagcgccgagtacggctgcctgaaggccatcgccctgttcacccccgacgcctgcggcctgagcgaccccgcccacgtggagagcctgcaggagaaggcccaggtggccctgaccgagtacgtgagagcccagtaccccagccagccccagagattcggcagactgctgctgagactgcccgccctgagagccgtgcccgccagcctgatcagccagctgttcttcatgagactggtgggcaagacccccatcgagaccctgatcagagacatgctgctgagcggcagcaccttcaactggccctacggcagcggccagtag

SEQ ID NO: 154222 - protein, 1308 aa, Artificial Sequence
  derived and/or modified sequence
MKPATGLWVWVSLLVAAGTVQPSDSQSVCAGTENKLSSLSDLEQQYRALRKYYENCEVVMGNLEITSIEHNRDLSFLRSVREVTGYVLVALNQFRYLPLENLRIIRGTKLYEDRYALAIFLNYRKDGNFGLQELGLKNLTEILNGGVYVDQNKFLCYADTIHWQDIVRNPWPSNLTLVSTNGSSGCGRCHKSCTGRCWGPTENHCQTLTRTVCAEQCDGRCYGPYVSDCCHRECAGGCSGPKDTDCFACMNFNDSGACVTQCPQTFVYNPTTFQLEHNFNAKYTYGAFCVKKCPHNFVVDSSSCVRACPSSKMEVEENGIKMCKPCTDICPKACDGIGTGSLMSAQTVDSSNIDKFINCTKINGNLIFLVTGIHGDPYNAIEAIDPEKLNVFRTVREITGFLNIQSWPPNMTDFSVFSNLVTIGGRVLYSGLSLLILKQQGITSLQFQSLKEISAGNIYITDNSNLCYYHTINWTTLFSTINQRIVIRDNRKAENCTAEGMVCNHLCSSDGCWGPGPDQCLSCRRFSRGRICIESCNLYDGEFREFENGSICVECDPQCEKMEDGLLTCHGPGPDNCTKCSHFKDGPNCVEKCPDGLQGANSFIFKYADPDRECHPCHPNCTQGCNGPTSHDCIYYPWTGHSTLPQHARTPLIAAGVIGGLFILVIVGLTFAVYVRRKSIKKKRALRRFLETELVEPLTPSGTAPNQAQLRILKETELKRVKVLGSGAFGTVYKGIWVPEGETVKIPVAIKILNETTGPKANVEFMDEALIMASMDHPHLVRLLGVCLSPTIQLVTQLMPHGCLLEYVHEHKDNIGSQLLLNWCVQIAKGMMYLEERRLVHRDLAARNVLVKSPNHVKITDFGLARLLEGDEKEYNADGGKMPIKWMALECIHYRKFTHQSDVWSYGVTIWELMTFGGKPYDGIPTREIPDLLEKGERLPQPPICTIDVYMVMVKCWMIDADSRPKFKELAAEFSRMARDPQRYLVIQGDDRMKLPSPNDSKFFQNLLDEEDLEDMMDAEEYLVPQAFNIPPPIYTSRARIDSNRSEIGHSPPPAYTPMSGNQFVYRDGGFAAEQGVSVPYRAPTSTIPEAPVAQGATAEIFDDSCCNGTLRKPVAPHVQEDSSTQRYSADPTVFAPERSPRGELDEEGYMTPMRDKPKQEYLNPVEENPFVSRRKNGDLQALDNPEYHNASNGPPKAEDEYVNEPLYLNTFANTLGKAEYLKNNILSMPEKAKKAFDNPDYWNHSLPPRSTLQHPDYLQEYSTKYFYKQNGRIRPIVAENPEYLSEFSLKPGTVLPPPPYRHRNTVV

SEQ ID NO: 154223 - DNA, 11941 bp, Artificial Sequence
  derived and/or modified sequence
cacgcgcgcccggctgggggatctcctccgcgtgcccgaaagggggatatgccatttggacatgtaattgtcagcacgggatctgagacttccaaaaaatgaagccggcgacaggactttgggtctgggtgagccttctcgtggcggcggggaccgtccagcccagcgattctcagtcagtgtgtgcaggaacggagaataaactgagctctctctctgacctggaacagcagtaccgagccttgcgcaagtactatgaaaactgtgaggttgtcatgggcaacctggagataaccagcattgagcacaaccgggacctctccttcctgcggtctgttcgagaagtcacaggctacgtgttagtggctcttaatcagtttcgttacctgcctctggagaatttacgcattattcgtgggacaaaactttatgaggatcgatatgccttggcaatatttttaaactacagaaaagatggaaactttggacttcaagaacttggattaaagaacttgacagaaatcctaaatggtggagtctatgtagaccagaacaaattcctttgttatgcagacaccattcattggcaagatattgttcggaacccatggccttccaacttgactcttgtgtcaacaaatggtagttcaggatgtggacgttgccataagtcctgtactggccgttgctggggacccacagaaaatcattgccagactttgacaaggacggtgtgtgcagaacaatgtgacggcagatgctacggaccttacgtcagtgactgctgccatcgagaatgtgctggaggctgctcaggacctaaggacacagactgctttgcctgcatgaatttcaatgacagtggagcatgtgttactcagtgtccccaaacctttgtctacaatccaaccacctttcaactggagcacaatttcaatgcaaagtacacatatggagcattctgtgtcaagaaatgtccacataactttgtggtagattccagttcttgtgtgcgtgcctgccctagttccaagatggaagtagaagaaaatgggattaaaatgtgtaaaccttgcactgacatttgcccaaaagcttgtgatggcattggcacaggatcattgatgtcagctcagactgtggattccagtaacattgacaaattcataaactgtaccaagatcaatgggaatttgatctttctagtcactggtattcatggggacccttacaatgcaattgaagccatagacccagagaaactgaacgtctttcggacagtcagagagataacaggtttcctgaacatacagtcatggccaccaaacatgactgacttcagtgttttttctaacctggtgaccattggtggaagagtactctatagtggcctgtccttgcttatcctcaagcaacagggcatcacctctctacagttccagtccctgaaggaaatcagcgcaggaaacatctatattactgacaacagcaacctgtgttattatcataccattaactggacaacactcttcagcacaatcaaccagagaatagtaatccgggacaacagaaaagctgaaaattgtactgctgaaggaatggtgtgcaaccatctgtgttccagtgatggctgttggggacctgggccagaccaatgtctgtcgtgtcgccgcttcagtagaggaaggatctgcatagagtcttgtaacctctatgatggtgaatttcgggagtttgagaatggctccatctgtgtggagtgtgacccccagtgtgagaagatggaagatggcctcctcacatgccatggaccgggtcctgacaactgtacaaagtgctctcattttaaagatggcccaaactgtgtggaaaaatgtccagatggcttacagggggcaaacagtttcattttcaagtatgctgatccagatcgggagtgccacccatgccatccaaactgcacccaagggtgtaacggtcccactagtcatgactgcatttactacccatggacgggccattccactttaccacaacatgctagaactcccctgattgcagctggagtaattggtgggctcttcattctggtcattgtgggtctgacatttgctgtttatgttagaaggaagagcatcaaaaagaaaagagccttgagaagattcttggaaacagagttggtggaaccattaactcccagtggcacagcacccaatcaagctcaacttcgtattttgaaagaaactgagctgaagagggtaaaagtccttggctcaggtgcttttggaacggtttataaaggtatttgggtacctgaaggagaaactgtgaagattcctgtggctattaagattcttaatgagacaactggtcccaaggcaaatgtggagttcatggatgaagctctgatcatggcaagtatggatcatccacacctagtccggttgctgggtgtgtgtctgagcccaaccatccagctggttactcaacttatgccccatggctgcctgttggagtatgtccacgagcacaaggataacattggatcacaactgctgcttaactggtgtgtccagatagctaagggaatgatgtacctggaagaaagacgactcgttcatcgggatttggcagcccgtaatgtcttagtgaaatctccaaaccatgtgaaaatcacagattttgggctagccagactcttggaaggagatgaaaaagagtacaatgctgatggaggaaagatgccaattaaatggatggctctggagtgtatacattacaggaaattcacccatcagagtgacgtttggagctatggagttactatatgggaactgatgacctttggaggaaaaccctatgatggaattccaacgcgagaaatccctgatttattagagaaaggagaacgtttgcctcagcctcccatctgcactattgacgtttacatggtcatggtcaaatgttggatgattgatgctgacagtagacctaaatttaaggaactggctgctgagttttcaaggatggctcgagaccctcaaagatacctagttattcagggtgatgatcgtatgaagcttcccagtccaaatgacagcaagttctttcagaatctcttggatgaagaggatttggaagatatgatggatgctgaggagtacttggtccctcaggctttcaacatcccacctcccatctatacttccagagcaagaattgactcgaataggagtgaaattggacacagccctcctcctgcctacacccccatgtcaggaaaccagtttgtataccgagatggaggttttgctgctgaacaaggagtgtctgtgccctacagagccccaactagcacaattccagaagctcctgtggcacagggtgctactgctgagatttttgatgactcctgctgtaatggcaccctacgcaagccagtggcaccccatgtccaagaggacagtagcacccagaggtacagtgctgaccccaccgtgtttgccccagaacggagcccacgaggagagctggatgaggaaggttacatgactcctatgcgagacaaacccaaacaagaatacctgaatccagtggaggagaacccttttgtttctcggagaaaaaatggagaccttcaagcattggataatcccgaatatcacaatgcatccaatggtccacccaaggccgaggatgagtatgtgaatgagccactgtacctcaacacctttgccaacaccttgggaaaagctgagtacctgaagaacaacatactgtcaatgccagagaaggccaagaaagcgtttgacaaccctgactactggaaccacagcctgccacctcggagcacccttcagcacccagactacctgcaggagtacagcacaaaatatttttataaacagaatgggcggatccggcctattgtggcagagaatcctgaatacctctctgagttctccctgaagccaggcactgtgctgccgcctccaccttacagacaccggaatactgtggtgtaagctcagttgtggttttttaggtggagagacacacctgctccaatttccccacccccctctctttctctggtggtcttccttctaccccaaggccagtagttttgacacttcccagtggaagatacagagatgcaatgatagttatgtgcttacctaacttgaacattagagggaaagactgaaagagaaagataggaggaaccacaatgtttcttcatttctctgcatgggttggtcaggagaatgaaacagctagagaaggaccagaaaatgtaaggcaatgctgcctactatcaaactagctgtcactttttttctttttctttttctttctttgtttctttcttcctcttcttttttttttttttttttaaagcagatggttgaaacacccatgctatctgttcctatctgcaggaactgatgtgtgcatatttagcatccctggaaatcataataaagtttccattagaacaaaagaataacattttctataacatatgatggtgtctgaaattgagaatccagtttctttccccagcagtttctgtcctagcaagtaagaatggccaactcaactttcataatttaaaaatctccattaaagttataactagtaattatgttttcaacactttttggtttttttcattttgttttgctctgaccgattcctttatatttgctcccctatttttggctttaatttctaattgcaaagatgtttacatcaaagcttcttcacagaatttaagcaagaaatattttaatatagtgaaatggccactactttaagtatacaatctttaaaataagaaagggaggctaatatttttcatgctatcaaattatcttcaccctcatcctttacatttttcaacatttttttttctccataaatgacactacttgataggccgttggttgtctgaagagtagaagggaaactaagagacagttctctgtggttcaggaaaactactgatactttcaggggtggcccaatgagggaatccattgaactggaagaaacacactggattgggtatgtctacctggcagatactcagaaatgtagtttgcacttaagctgtaattttatttgttctttttctgaactccattttggattttgaatcaagcaatatggaagcaaccagcaaattaactaatttaagtacatttttaaaaaaagagctaagataaagactgtggaaatgccaaaccaagcaaattaggaaccttgcaacggtatccagggactatgatgagaggccagcacattatcttcatatgtcacctttgctacgcaaggaaatttgttcagttcgtatacttcgtaagaaggaatgcgagtaaggattggcttgaattccatggaatttctagtatgagactatttatatgaagtagaaggtaactctttgcacataaattggtataataaaaagaaaaacacaaacattcaaagcttagggataggtccttgggtcaaaagttgtaaataaatgtgaaacatcttctcatgcaattattttattatccaacacactaatcttttgatactttatataattccctttcttcatatactgcatccagtactagaaccatcattattatgtatcattttgaaagaatacctgatgagatgaaggatgagaacaaatgacagagatgagtctccaagtaaagggggcctcacatcaataattaggaaacttagatataagtcgcccttttctgaaaattctaccccaagtcatttagatttttaaaaaatatttctaatgttaaaatattgggaccaaattagaatcaatagtataagattaattaattagagtaaaaatatctattaaggcagagaaagtttagagaaaaaaatccaaagaaatttgtgtttcttcctattctgaacaagtaaatccatccatccatccatccaaacctcctttatctaactgtgtctactaaaagcaccatgttttgtggggaacactcagataaatggaatatcatcctcaacttcaaaattctatgatctaggagatttaattaaaatgacattttaatttttctatgcgttccaacaatcagattgcatagtctcttttgtgaatagctgtcatataatcagttgtactgtaagatatctcctttaaactcatttgggatataagttaaacatccttcaaattgttgatgttgacaaacaggataatttcaataatattattcaaacataaactggtctaggagaatattgcatcactgactaattagcctatctagagtctaacttcaccattaaaccaaaagcagatggtggtccttggccaagaatattggagacattggagttggtttttttctaagctataagaagtgaggcgagctgaaaaagtatggtagagcaggagaagggtttgtgagattccttctagtgaagttcaccctcaaacttttcaggggtaaagacacagagtgattcaggggccacaatctaatagctcagggctctcctatccattcagagaagtctctaggaaaagggatctcatatcagtacttatgaaaaattgaatataagcctccctttctaaataaatctgcatcgagtcatcacagccctctttttggatactataccttgattttttttttctgatttacaatatgcatatggtttctactgggctatagaaagcagaatcactcattttggagaaggaaaaaatgaatagttaaaacaaacttttaactgttaaggtaacagaaatgtatttagtgaatgtctctttcctcctaagaacacaagacttctacatgttgggtaatacctagagatgcatgtaggaataatccaaaatgacccaaatgctttataatagcaccactttataattcttttgaatgatttctgtagtatataattgacttcagttgtttgagtgttttttgttttatttttgtcccccctgggaaaacatatttcagcatgtataagagggagaaaaaaagtttcattccttccagagaataacttatttagtccagtagggtagaattttaaaatgtcagttaaagtcttcaaagtgcttggggggatatcagattccagaggccaattgtagcaattgaaatttgcagaatcaattatgtaaatctgagacaaattagtattaaaattacacggagtatattttttaaatcacccaactttgtagattatacctattttgggcaggtatggaaaaattttgcagttaaatgattgcctaaagaaagtggtaaacaggtgaggaaagatggcctctgatctaggatagatccagaaccacaaagcatctgcaccacaaaaggtgttagactaccaagcagctcctggttttctgcatagtattagtagcacagcttaggatgagaatcctttctccagtaacattcttaaaatagcatgaaaaacaacgcaaaactcaaatttctattaaaacacacaaactaaaatcaagtgattcttttttgtagattagggagaaggactgaatatctaatttaagagaaggaatagtgtttaagtgttatagtgtgtgagctaataccttctaaaggaaagacatggcatgaagattgtgcatacttacaatgctaaggaaaaatcaagaaaaggactgtgtgaggctctgctactagatgaagttggaaggactattaatgtgcttcttgaagtatcaaaaatgaaaagaaaattaaaattgtttaagcctgacagggaaggatgtaaatacaagtttttctagagctctctaacctttatttcaaaactggaattattcatccatctgtaattgttgataatttaactagtatatgtagttcataaggtaatagaaaaggtgatcatgaaagcatgtatataactggacagaaccacgataatgctataagatgtagatttagttaggttatcagatgttaaatgattttaatattattaaataaatcaaactagaaaactaaccacaagtataatgtaacaaagttaaatgcaggatataaaaatgtaggatggattttgcatagtaaaaagataagtttgccatttaaaattgttgtttgttgggtttagctgaaagtaggcatatatggttccacttgggaaaacttgctttaaagcattacaatgaacaattttttctcattctcttattcctttatcactttttaaatgtaaagaaaattgtatttatttatttttttaaataaacaccaccttgcagaatttaataggcaaacatgttacatatgactaagtaagggtcttcaagatgaagtaaagaaaatgtaaatgttctattaccttatgcagagacaaaaaaaaaaaggagtggtgtcatttagctagcaaacaaacaaaatacagttaattggtgatatgtcctttcttttctcactatgccctcttgcctccaaaaatgacaacaaagaatcacaatttttctgataaataaatgctaaaccaagcgtttcaaactattgcattgccattcttttggactttagttattagaatgatgattgttatagggcaaatgagaaatccatgtgcatcagcttctagttgttaaaaaaaccagataaattaacttctactgtatactgtgggcagaggatcctagagctgatcctacaacatcagcttctagttgttaaaaaaaaaaaaagaaacagataaattaacttctactgtatatactgtgggcagaggatcttactgtgcctctgtttgtgtacatggacttcggtgtgtatcagtttgaaggacagccttgccccatgtaaacatataaatgcagattggtatcgcctggttgctatttgcttaagaacaaatattatacagatgagatcaggcataattttaaaagatcattatcagtggagacctcattattactgatattacaatggggccagtttttatacttctgggtagaattaataaaatttttctgatcccagagatctgagttctctctgcagttggaaacaagaagctgttgtgggcattgtgtcgggccaggggcccttgtgtttgtgtgggcaaatatcttttagcagtgtgagctgcttttttcttttcattaaaagtctctctaaaataatagaaatttcagatactcggttcaagtctcactgattttgtagaggtccaaaaatgtaggatctgtcacttttgcaggcccctgcctcacctaattcctggccaggtgacattttgggcagaagtaaatgcttctatagtcacaagctaaaatgactctaagccccaatttcacggggggtattcacatgcttcctctggaaaatactctttgacagtcagctttgcaagtaagtgattaccttgttaggaatcaaagaaaaatgtatttctctctgacctttagaggaaaatagaatccttcccttttttgcccattgacacaactggcactgctctcttccctttctaccaccctggttcaaagtagtcccccgatgctgtcctgttcctttcttaagccatagtggatctctgagatcctacaccccactttgtgaaacactgacttcatctttgccctcgaatgcctgattttttcataagagattctagcaatttggacactgtttaagtgaactatcaaactaccgcatagagaatatttaagctattaaaattatggtttcccatgaagatcaattctctgtgtccttccctataggaatttgagacgagttagccctgtgatgaatcttgaaactcacatatgtccacatacacttggtagaacttcgatttaatctttacataaaagctgtacatataaccaagaagttatttttgccagtaaattaacttatttgctttattcatcttatttggttcctaatcgtaaatattttgtagctgctgtaaatttttttctcccaaatgaggagtcttattatcataaaggtaaaggctattcagctttgataaccacctgcaattcttttttggatcattcatccatctaacaaatacataatgaggacagttcatgttaatgaaaatccatgttgtttaatagaatgccatcctttacctacttttgctctttatggacgtttttcttttcatgctctagtgagctttccctatatcatgagaagtggttatatttgtgcaaatatacaaatataggaaaacaaagattcatacctgtaggcaatagtctaacttgtccaaaccactttgcctttactgctatttttatccccaatgcgtagatatttcccccaggcctatagcctttgtgaaggaaagcaaatcatacctcctgtatattgacacgaatctggttttcaaatgtcatttccagattttttagttaattgggggttgtccttttcccttaatgtgagagtcattttcctgtatatttctggatctctcaggggctgggaggggggagtgaggggactacaaccatagcactccaagaacccttttgggattactccagtaatcaactacgaaagttattttctaaatgtagatatgtaaggtgttcttttaaagtaaggtactttgaaatatgtagcataaactggtactgctgttaaatgggtcgattattaaacggagcagctgtgtgagggcagctaactttgaatgcctgtctccctggctggtgtgtctccttctcatgttgagagcaccagggattgcgtggctgcatgctgaaaccgcattttcccatggtgtatgactagttcatctctttcttgagcaccattacaagaagatcaaatgaaaatgagatcaatgtggaagacaattcatagcacaaaaaaagtcatcttaaatctactctcaaacattcatcttatacatgcatcaaagtaatttactgacatcagtttgggtgagagagggagtcactttactgaaaaggcagaggcttaaggtgtatacatttgtactcacttccttattttcttaacttgtaagcagaaaacaagccctctctcttgtgaagtatcttcaaaggattggggtgcaaaaataccttgctggtaagccatcaatgttttatttaaatccctgcattcaaagttagctgcctttttgaaataaacaaacaaaaaatactactgtatgtttgaaaatgtgaatagtatttttatagcttgttaaagacatggctagttgcatttgtaaataagtataatgttgctttgattttcttttgtggacatctttatttggaacataattgtctttagggttgatttgtatataagtaattggcctgtgattgtttcttttttggttggaagttatcattttgacattacttgtgattctgtgttcagcactattgtgatgtgttcaacctctgcactcgcttacacaataggatatgccaattgtgtgtggtgtaatgttattttgatttttttccatgttattgatgaaggatcatgcacctaacacatactaacttttttaatgttaggcatatttttagtatactttctcttattctttcttctcctccaaccttttacccatcctccttcctttccctcattcctgttgttatttgagaatgagggagaaacagtattttacatttatgtaattaggcttttccgttagttctcaaggatcctcttttggctcttgggaaagaattgtacctgtacaaggcaattatagaatgcgaactgctttgcctcattccatactgatcatcccagctgaacaatttgaaaactgttctgcctttttgttacatgaatctgtcagaaatatatttttaatttaatataaatgaaattcaataaaatatgaaacaaacgttaaaaaaaaaaaaaaaaaa

SEQ ID NO: 154224 - DNA, 3927 bp, Artificial Sequence
  derived and/or modified sequence
atgaagcccgccaccggcctgtgggtgtgggtgagcctgctggtggccgccggcaccgtgcagcccagcgacagccagagcgtgtgcgccggcaccgagaacaagctgagcagcctgagcgacctggagcagcagtacagagccctgagaaagtactacgagaactgcgaggtggtgatgggcaacctggagatcaccagcatcgagcacaacagagacctgagcttcctgagaagcgtgagagaggtgaccggctacgtgctggtggccctgaaccagttcagatacctgcccctggagaacctgagaatcatcagaggcaccaagctgtacgaggacagatacgccctggccatcttcctgaactacagaaaggacggcaacttcggcctgcaggagctgggcctgaagaacctgaccgagatcctgaacggcggcgtgtacgtggaccagaacaagttcctgtgctacgccgacaccatccactggcaggacatcgtgagaaacccctggcccagcaacctgaccctggtgagcaccaacggcagcagcggctgcggcagatgccacaagagctgcaccggcagatgctggggccccaccgagaaccactgccagaccctgaccagaaccgtgtgcgccgagcagtgcgacggcagatgctacggcccctacgtgagcgactgctgccacagagagtgcgccggcggctgcagcggccccaaggacaccgactgcttcgcctgcatgaacttcaacgacagcggcgcctgcgtgacccagtgcccccagaccttcgtgtacaaccccaccaccttccagctggagcacaacttcaacgccaagtacacctacggcgccttctgcgtgaagaagtgcccccacaacttcgtggtggacagcagcagctgcgtgagagcctgccccagcagcaagatggaggtggaggagaacggcatcaagatgtgcaagccctgcaccgacatctgccccaaggcctgcgacggcatcggcaccggcagcctgatgagcgcccagaccgtggacagcagcaacatcgacaagttcatcaactgcaccaagatcaacggcaacctgatcttcctggtgaccggcatccacggcgacccctacaacgccatcgaggccatcgaccccgagaagctgaacgtgttcagaaccgtgagagagatcaccggcttcctgaacatccagagctggccccccaacatgaccgacttcagcgtgttcagcaacctggtgaccatcggcggcagagtgctgtacagcggcctgagcctgctgatcctgaagcagcagggcatcaccagcctgcagttccagagcctgaaggagatcagcgccggcaacatctacatcaccgacaacagcaacctgtgctactaccacaccatcaactggaccaccctgttcagcaccatcaaccagagaatcgtgatcagagacaacagaaaggccgagaactgcaccgccgagggcatggtgtgcaaccacctgtgcagcagcgacggctgctggggccccggccccgaccagtgcctgagctgcagaagattcagcagaggcagaatctgcatcgagagctgcaacctgtacgacggcgagttcagagagttcgagaacggcagcatctgcgtggagtgcgacccccagtgcgagaagatggaggacggcctgctgacctgccacggccccggccccgacaactgcaccaagtgcagccacttcaaggacggccccaactgcgtggagaagtgccccgacggcctgcagggcgccaacagcttcatcttcaagtacgccgaccccgacagagagtgccacccctgccaccccaactgcacccagggctgcaacggccccaccagccacgactgcatctactacccctggaccggccacagcaccctgccccagcacgccagaacccccctgatcgccgccggcgtgatcggcggcctgttcatcctggtgatcgtgggcctgaccttcgccgtgtacgtgagaagaaagagcatcaagaagaagagagccctgagaagattcctggagaccgagctggtggagcccctgacccccagcggcaccgcccccaaccaggcccagctgagaatcctgaaggagaccgagctgaagagagtgaaggtgctgggcagcggcgccttcggcaccgtgtacaagggcatctgggtgcccgagggcgagaccgtgaagatccccgtggccatcaagatcctgaacgagaccaccggccccaaggccaacgtggagttcatggacgaggccctgatcatggccagcatggaccacccccacctggtgagactgctgggcgtgtgcctgagccccaccatccagctggtgacccagctgatgccccacggctgcctgctggagtacgtgcacgagcacaaggacaacatcggcagccagctgctgctgaactggtgcgtgcagatcgccaagggcatgatgtacctggaggagagaagactggtgcacagagacctggccgccagaaacgtgctggtgaagagccccaaccacgtgaagatcaccgacttcggcctggccagactgctggagggcgacgagaaggagtacaacgccgacggcggcaagatgcccatcaagtggatggccctggagtgcatccactacagaaagttcacccaccagagcgacgtgtggagctacggcgtgaccatctgggagctgatgaccttcggcggcaagccctacgacggcatccccaccagagagatccccgacctgctggagaagggcgagagactgccccagccccccatctgcaccatcgacgtgtacatggtgatggtgaagtgctggatgatcgacgccgacagcagacccaagttcaaggagctggccgccgagttcagcagaatggccagagacccccagagatacctggtgatccagggcgacgacagaatgaagctgcccagccccaacgacagcaagttcttccagaacctgctggacgaggaggacctggaggacatgatggacgccgaggagtacctggtgccccaggccttcaacatccccccccccatctacaccagcagagccagaatcgacagcaacagaagcgagatcggccacagccccccccccgcctacacccccatgagcggcaaccagttcgtgtacagagacggcggcttcgccgccgagcagggcgtgagcgtgccctacagagcccccaccagcaccatccccgaggcccccgtggcccagggcgccaccgccgagatcttcgacgacagctgctgcaacggcaccctgagaaagcccgtggccccccacgtgcaggaggacagcagcacccagagatacagcgccgaccccaccgtgttcgcccccgagagaagccccagaggcgagctggacgaggagggctacatgacccccatgagagacaagcccaagcaggagtacctgaaccccgtggaggagaaccccttcgtgagcagaagaaagaacggcgacctgcaggccctggacaaccccgagtaccacaacgccagcaacggcccccccaaggccgaggacgagtacgtgaacgagcccctgtacctgaacaccttcgccaacaccctgggcaaggccgagtacctgaagaacaacatcctgagcatgcccgagaaggccaagaaggccttcgacaaccccgactactggaaccacagcctgccccccagaagcaccctgcagcaccccgactacctgcaggagtacagcaccaagtacttctacaagcagaacggcagaatcagacccatcgtggccgagaaccccgagtacctgagcgagttcagcctgaagcccggcaccgtgctgcccccccccccctacagacacagaaacaccgtggtgtag

SEQ ID NO: 154225 - DNA, 3927 bp, Artificial Sequence
  derived and/or modified sequence
atgaagcccgccaccggtctgtgggtgtgggttagcttactggttgctgctggcaccgtccagccatctgacagccagagcgtgtgcgccggcacagaaaataagctttcgagcctgtccgaccttgaacaacagtatcgtgcactccgaaagtattatgaaaattgcgaggttgtaatggggaatctcgaaattacgtccattgagcataatagggatctttccttcctgcgtagcgtgcgggaagtaacgggttatgtgctggtcgccttgaaccagtttcgttacctacccctggagaatttgcggatcatcagaggaaccaagttatacgaggacagatatgcattggcgatcttcctgaactatcgcaaggacggaaacttcgggctgcaagagttgggtctcaaaaatctgactgaaatcttaaatggtggcgtttatgttgaccaaaataagttcttatgctatgccgataccattcattggcaggatatagttaggaacccctggccttccaatctgaccctggtctccaccaacggaagttctgggtgcggacgctgtcacaagtcatgtaccggaaggtgctgggggcctaccgaaaatcattgccaaaccctcacgcgaaccgtttgtgctgagcagtgtgacggtcgttgttacgggccatatgtctcagactgttgtcatagagagtgcgctggcggatgctcaggccccaaggatacagactgtttcgcctgcatgaatttcaatgactctggggcttgcgtcactcagtgtccccaaactttcgtgtataacccaacgacctttcagctcgagcacaatttcaacgccaagtacacgtacggagctttctgcgtcaagaaatgccctcacaatttcgtcgtggacagctccagctgcgtgcgtgcctgtccctcctcaaagatggaggtggaggagaatggaatcaaaatgtgtaaaccatgtactgatatctgtcctaaggcctgcgatggaatcgggaccggctctctcatgtcagcacagactgtcgacagcagcaatatcgataaattcattaattgtacgaaaattaatggaaatttaattttcctggtgaccggtatccacggagacccatacaatgccatagaggctattgacccagagaagctgaatgtgttccgcactgtgagggagatcacagggtttctgaacatccagtcgtggcccccaaatatgacagatttctcagtgttctccaatctggtaacaatcggaggtagggtactctacagcggcctcagcctgttgattctgaaacagcagggcatcacctctcttcaatttcaatcactaaaagagatcagtgcagggaatatttatatcactgacaacagcaacctatgctactatcatactatcaactggaccactctgttctccacaatcaatcagcgtatcgtaattcgagataaccgcaaagcagagaactgcacagccgagggcatggtctgcaatcacctgtgctcatcggacggctgctgggggcccggcccggatcaatgcttgagctgtcgcaggttttcaaggggcagaatctgtatcgagtcttgcaatctgtacgatggagagttcagagagttcgagaatgggtcaatttgtgtcgagtgcgacccccagtgcgagaagatggaggacggtctgctgacatgtcacggccccggccctgacaattgtactaaatgtagccactttaaagacggacccaattgtgtggagaagtgtcccgacggattgcaaggcgcgaatagctttatctttaaatacgccgacccggatagggagtgtcacccttgtcatccgaactgtacccaaggctgtaacggtcccacctcgcatgactgcatttattacccctggacaggacactcaacccttccccagcacgcccgaacaccactcatcgcggctggcgtcatcggagggctgttcatcctggtcatcgtgggactgacctttgccgtctacgtccggcgaaaatctatcaaaaaaaaacgcgccctgcgacgcttcctagaaaccgaactagtggagcccctgaccccctcaggcacagccccgaaccaggctcagctcagaattctgaaagaaaccgaactgaagagagtcaaggtcctggggtccggcgcttttgggacagtgtacaaaggaatctgggtccctgaaggcgaaactgtaaaaatcccagtcgctatcaagatcctgaacgagacaaccggccctaaggcaaatgtggagtttatggatgaggcgctgatcatggcttcaatggaccacccgcacctcgtcagattgttgggcgtttgcttatcccccaccatccaactcgtcacacagctcatgccccacggctgcctgctggaatacgtccacgaacataaagacaatataggatcccagctacttttaaattggtgcgtgcaaattgccaagggcatgatgtatctggaagagcgcagactggtccacagggacttagccgcccgtaatgtgcttgtgaaaagcccgaaccatgtgaaaataaccgattttggcttggccagactcctggagggagacgagaaagaatacaatgctgacggcgggaagatgcctatcaaatggatggcgctcgaatgcatccattacagaaagtttactcatcagtcagacgtgtggagttacggcgtcaccatatgggagctcatgacctttgggggaaagccgtatgacgggatcccaacccgcgagattcctgacctgctggagaaaggtgagcgcttaccacaacctcctatctgtacgatcgatgtgtacatggtgatggtaaaatgttggatgattgatgccgattctagaccaaagttcaaggaacttgccgccgagtttagtcggatggccagagacccacagcggtacctagttattcagggtgatgaccggatgaagcttccatcacctaatgactctaagttttttcagaatctgctggatgaagaggacctggaggacatgatggacgccgaggaatacttggttccccaggcctttaacatccctccccccatctataccagtagggctaggatcgacagcaatcgttccgaaatcgggcactctcctcctccagcctatacacctatgtccgggaatcagttcgtttaccgtgacggcggatttgccgcggaacagggcgtgagtgtcccttatagggcacctacaagcacgattcccgaggcacccgtggcgcagggagctaccgctgagatctttgatgattcatgctgcaatggaaccctgagaaagccagtggctccccacgttcaggaagattcatcaacacagcggtacagtgccgatcccacggtattcgccccagagcggtctccacggggcgagctggatgaggaagggtacatgacccccatgcgtgataagccaaagcaggaatatctgaaccccgtcgaagagaacccattcgtgtcaagacggaagaatggcgacctccaggcgctcgataaccccgaatatcacaatgcgagtaacggcccaccaaaggccgaagacgaatacgtgaacgagccactgtatttgaataccttcgcaaatactctaggtaaggccgagtacttaaagaataacatcctgagcatgcccgaaaaggctaaaaaggcttttgataatcctgattattggaaccattcgttgcccccacggtccactctacagcatcctgattatctccaggaatacagcacaaaatacttctataagcagaacggccgcatccgacctatcgtggctgaaaaccccgagtatttgtccgaattctctttaaagcctggtacagtccttcctccaccgccttatagacacagaaataccgtggtgtag

SEQ ID NO: 154226 - DNA, 3927 bp, Artificial Sequence
  derived and/or modified sequence
atgaagccagccaccggcctgtgggtgtgggtgtccctgctggtggccgccggcaccgtgcagcccagcgacagccagagcgtgtgtgccggcacagagaacaagctgagcagcctgagtgacctggagcagcagtaccgggccctgaggaagtactatgagaactgtgaggtggtgatgggcaacctggagatcaccagcattgagcacaacagagacctgtccttcctgcggtctgtgcgggaggtgacaggctacgtgctggtggccctgaaccagttccgctacctgcccctggagaacctgcgcatcatccggggcaccaagctgtatgaggacagatatgccctggccatcttcctgaactacaggaaggatggcaactttggcctgcaggagctgggcctgaagaacctgacagagatcctgaatggaggagtgtatgtggaccagaacaagttcctgtgctacgccgacaccatccactggcaggacatcgtgaggaacccctggcccagcaacctgaccctggtgtccaccaacggcagcagcggctgcggccgctgccacaagagctgcaccggccgctgctggggccccacagagaaccactgccagaccctgaccaggacagtgtgtgccgagcagtgtgatggccgctgctacggcccctacgtgtctgactgctgccacagagaatgtgccggcggctgcagcggccccaaggacacagactgctttgcctgcatgaacttcaatgattctggggcctgtgtgacccagtgcccccagacctttgtgtacaaccccaccaccttccagctggagcacaacttcaatgccaagtacacctatggagccttctgtgtgaagaagtgcccccacaactttgtggtggacagcagcagctgtgtgcgggcctgccccagcagcaagatggaggtggaggagaatggcatcaagatgtgcaagccctgcacagacatctgccccaaggcctgtgatggcattggaacaggcagcctgatgtctgcccagacagtggacagcagcaacatcgacaagttcatcaactgcaccaagatcaatggaaacctgatcttcctggtgacaggcatccacggggacccctacaatgccatcgaggccatcgaccctgagaagctgaatgtgttcagaacagtgcgggagatcaccggcttcctgaacatccagagctggccacccaacatgacagacttctctgtgttcagcaacctggtgaccatcggcggccgggtgctgtacagcggcctgagcctgctgatcctgaagcagcagggcatcaccagcctgcagttccagagcctgaaggagatctctgctggcaacatctacatcacagacaacagcaacctgtgctactaccacaccatcaactggaccaccctcttcagcaccatcaaccagagaattgtcatccgggacaacaggaaggccgagaactgcacagctgagggcatggtgtgcaaccacctgtgcagcagtgatggctgctggggccctggccctgaccagtgcctgagctgccgccgcttcagccggggccgcatctgcatcgagagctgcaacctgtatgatggagagttccgggagtttgaaaatggcagcatctgtgtggagtgtgacccccagtgtgagaagatggaggatggcctgctgacctgccacggccctggccctgacaactgcaccaagtgcagccacttcaaggatggccccaactgtgtggagaagtgcccagatggcctgcagggcgccaacagcttcatcttcaagtatgctgaccctgaccgggagtgccacccctgccaccccaactgcacccagggctgcaatggccccaccagccatgactgcatctactacccctggacaggccacagcaccctgccccagcacgcccggacccccctgattgctgctggggtcatcggcggcctcttcatcctggtgattgtgggcctgacctttgctgtgtatgtgcggaggaagagcatcaagaagaagagggccctgcggcgcttcctggagacagagctggtggagcccctgaccccatctggaacagcccccaaccaggcccagctgcgcatcctgaaggagacagagctgaagagggtgaaggtgctgggcagcggggcctttggaacagtgtacaagggcatctgggtgcctgagggggagaccgtgaagatccctgtggccatcaagatcctgaatgagaccaccggccccaaggccaacgtggagttcatggatgaggccctgatcatggcctccatggaccacccccacctggtgcggctgctgggcgtgtgcctgagccccaccatccagctggtgacccagctgatgcctcatggctgcctgctggagtatgtgcatgagcacaaggacaacatcggcagccagctgctgctgaactggtgtgtgcagatcgccaagggcatgatgtacctggaggagcggcggctggtgcaccgggacctggccgccagaaatgtgctggtgaagagccccaaccacgtgaagatcacagactttggcctggcccggctgctggagggagatgagaaggagtacaatgctgatggcggcaagatgcccatcaagtggatggccctggagtgcatccactacaggaagttcacccaccagagtgatgtgtggagctatggagtgaccatctgggagctgatgaccttcggcggcaagccctatgatggcatccccacccgggagatcccagacctgctggagaagggggagcggctgccccagccccccatctgcaccattgatgtgtacatggtgatggtgaagtgctggatgattgatgctgacagccggcccaagttcaaggagctggccgctgagttcagcaggatggcccgggacccccagcgctacctggtgatccagggagatgacaggatgaagctgcccagccccaatgacagcaagttcttccagaacctgctggatgaggaggacctggaggacatgatggatgctgaggagtacctggtgccccaggccttcaacatccccccacccatctacaccagccgggccagaattgacagcaacagaagtgagatcggccacagccccccaccagcctacacccccatgagcggcaaccagtttgtgtacagagatggcggctttgctgctgagcagggcgtgtctgtgccctaccgggcccccaccagcaccatccctgaggcccctgtggcccagggcgccacagctgagatctttgatgacagctgctgcaatggcaccctgaggaagcctgtggccccccacgtgcaggaggacagcagcacccagcgctacagcgctgaccccaccgtgtttgcccctgagaggagccccagaggagagctggatgaggagggctacatgacccccatgagggacaagcccaagcaggagtacctgaaccctgtggaggagaacccctttgtgtccaggaggaagaatggagacctgcaggccctggacaaccctgagtaccacaatgccagcaatggaccacccaaggcagaagatgaatatgtgaatgagcccctgtacctgaacacctttgccaacaccctgggcaaggccgagtacctgaagaacaacatcctgtccatgcctgagaaggccaagaaggcctttgacaacccagactactggaaccacagcctgccccccaggagcaccctgcagcacccagactacctgcaggagtacagcaccaagtacttctacaagcagaatggccgcatccggcccatcgtggccgagaaccctgagtacctgtctgagttcagcctgaagccaggcaccgtgctgcccccaccaccctaccgccacaggaacacagtggtgtag

SEQ ID NO: 154227 - DNA, 3927 bp, Artificial Sequence
  derived and/or modified sequence
atgaagcccgccaccggcctgtgggtgtgggtgagcctgctggtggccgcagggacagtgcagccgtctgactcccagtctgtgtgtgctgggacagaaaacaagctatcctcactgagtgacctggaacagcagtacagagctctgcgcaagtactacgaaaattgtgaggttgtcatgggtaacctcgagatcacaagcattgaacacaacagagatctaagcttcctcagatcagtacgggaggtcactgggtacgtgctggtcgccttgaaccaattcaggtatttgccactagagaacctgcggattattcgcggcaccaagttatatgaagaccgctatgccctggccatctttcttaactacaggaaggatggaaacttcggcctgcaggagctgggtttgaagaacctgacagagatccttaacggcggggtctacgtggatcagaataaatttctgtgttacgccgatactattcactggcaggacattgtgcggaatccgtggcctagtaacctcaccctcgtgtcaactaacgggtcttctggatgcggacgttgccataagtcctgtaccggaagatgctggggaccaactgagaaccattgtcaaacactgacccgtaccgtatgcgccgaacagtgcgacggtagatgctatggcccctacgtgagcgattgttgccaccgtgagtgcgctgggggctgcagcggcccgaaggacaccgactgcttcgcctgcatgaacttcaatgactctggagcctgtgtcacacagtgtccacagacattcgtatacaaccctaccacctttcagctcgaacataactttaacgccaaatacacctatggagcattttgcgtgaagaaatgcccacacaacttcgtcgtcgatagcagcagttgcgtccgagcatgccctagttcaaagatggaagtagaggaaaatggcatcaaaatgtgcaagccctgcactgacatctgccccaaggcttgcgatggcatcggtacagggtctctgatgtcagcccagacggtggacagtagcaacattgataaatttattaattgcaccaaaataaacggtaacctgatcttcttagttacagggattcacggagatccctataacgccattgaagccattgaccccgagaaactcaatgtatttcgcactgtgagagagatcacgggattcttgaacattcaatcttggcccccgaatatgactgacttcagtgtcttctctaatttagtgaccataggtggcagagtgctctatagtggactgtcactgctgatcctgaaacagcaaggcattactagtctccagttccagagcctcaaggagatttctgcaggcaacatctacatcacagataattccaacctgtgttactaccatacaatcaactggaccacactattctcaactattaatcagcggatcgtgatccgcgacaatcgcaaagccgaaaactgcaccgccgaaggaatggtgtgtaatcacttatgtagctccgatggttgttggggtccaggacccgaccagtgcctctcatgtaggcggttttcgaggggccgaatttgtatcgaatcttgtaacttatatgatggcgaatttcgagaattcgaaaacggctccatttgcgtggagtgcgatccccagtgtgagaagatggaggacgggctgcttacttgccacggacctggccccgataactgtaccaagtgcagccatttcaaggatggacctaattgtgtggaaaagtgtcccgatggtctacagggcgccaacagcttcattttcaagtacgctgaccccgatcgggagtgtcacccttgtcatcctaactgcacacaggggtgtaacggcccaacgtctcatgattgcatctactatccttggaccggtcactccaccctgcctcagcatgccaggacacctttgatcgccgccggggtgataggggggttgttcattctggtaatcgttggtctcaccttcgctgtgtatgtacgccggaagtcaatcaagaaaaagagggccttgaggagattcctggagactgagttagtggaaccccttactcccagtggtacagccccaaatcaagcccagctgcggatcctgaaggagaccgagctgaagcgcgtcaaggtattgggatcaggtgcctttgggactgtctacaaagggatctgggtgcccgaaggggaaactgtaaaaatacctgttgccatcaagattctgaacgagaccacaggccccaaagctaacgtggaattcatggacgaagcactgattatggcaagcatggatcacccccaccttgtgcggttgctgggcgtatgccttagccctacaattcagttggtgacgcagctcatgccacatggctgcctgctggagtatgttcatgaacacaaagacaatattggatctcaattgctgctgaattggtgcgtgcagatcgcaaagggcatgatgtacctggaggagcgaagactggtacatcgtgacctggcagccaggaatgtattggttaagtcccccaatcacgtcaaaattactgattttggcctcgcccgactactggaaggcgatgagaaggagtataatgctgatggagggaagatgcccataaagtggatggcgcttgagtgtattcactataggaaattcacgcatcagtctgacgtttggtcctacggcgtgactatttgggagctcatgacctttggagggaagccatatgatgggattccgactcgcgaaatcccagacttgctcgagaaaggggaacgattaccacagccgcccatctgcacaattgacgtatacatggtgatggtgaaatgttggatgatagacgcagattctcggcctaagtttaaggagctggcagcggagtttagcaggatggcccgggatcctcagaggtacctggtgatacagggtgatgataggatgaaactgccctcacccaacgattcaaagttcttccagaatcttctggacgaagaggacttggaggacatgatggacgccgaggagtacctcgttccccaggcattcaatatccctccgcccatttacactagtcgtgcccgaattgatagcaacagaagcgagatcggacattcaccacctcctgcttacactcctatgtccggcaatcagtttgtttacagagatggtggatttgctgccgagcagggcgtgtctgtgccatacagagctccaacctctacaatccctgaagcgcccgtggcccagggcgccactgcggaaatcttcgacgactcctgctgtaacggtactctccgcaagcccgtcgccccccacgtgcaggaggatagctctactcagagatattccgccgatcctaccgtctttgctcctgagcggagccctagaggcgagctggatgaagaaggttatatgactccaatgcgcgacaaacctaagcaggagtacctgaatcccgtggaggaaaatccttttgtctccagacggaaaaacggagaccttcaagcactggataatcccgagtaccataatgcgagcaatgggccacccaaggccgaagacgaatacgtcaatgagcccctatatctgaacaccttcgccaataccctggggaaggccgaataccttaaaaacaatatcctgtccatgcctgagaaagccaagaaagcatttgacaatcctgactattggaaccattcccttccgcctaggagcacacttcagcatcctgactacctccaggagtatagcacaaagtatttctacaagcaaaacgggagaatacgaccaatcgttgcagagaacccagagtacctgagtgaattcagtctgaagcccggaactgtattgcctccccccccatatcgccatcgcaatactgtggtgtag

SEQ ID NO: 154228 - DNA, 3927 bp, Artificial Sequence
  derived and/or modified sequence
atgaagcctgctactggtctctgggtgtgggtctccctgctcgtcgcagccggaactgttcagccgtcagattctcagtcagtatgtgcaggtaccgagaacaaactctccagcctgtcagacctcgagcagcagtacagggctctgcggaaatattacgaaaattgcgaagtggtaatgggcaatcttgagatcacctctatcgagcataaccgcgatctgtccttcttgcgctctgtgcgggaggttaccggctacgtgctcgtggccttaaatcagtttagatacctgcccttggagaacttacggattatccgcggtaccaaactctacgaagaccgttacgccctggccatcttcttgaactacaggaaggacggaaatttcgggctccaggagttaggcctgaagaatctgacagagattctgaatgggggagtgtatgtggatcagaacaagtttctctgttatgctgacacaatccactggcaggacatcgttcgtaacccatggccctctaacctcacgcttgttagtactaatggaagctccggctgcggtaggtgccataaatcatgtacaggacggtgttgggggcctactgaaaatcattgtcagaccctgacccggaccgtatgtgcagaacaatgtgatggccgatgctacggaccatacgtgtcagactgctgccatagagagtgtgcaggaggctgttccggcccaaaggatacagactgtttcgcctgtatgaatttcaacgactccggggcttgcgtgacacagtgcccacaaacttttgtctataatcccactaccttccagctggagcacaatttcaacgctaaatatacttacggggcattttgcgtgaaaaaatgcccgcataacttcgtggtcgatagcagctcttgtgtccgggcttgtccgagcagtaagatggaggttgaagaaaacgggattaaaatgtgcaaaccctgtactgatatctgtccgaaggcatgcgatggcattggcaccgggtcactgatgagcgcacagacggtggacagctcaaacatcgataaatttatcaactgcacaaaaattaatgggaacttgatttttctggtgaccgggatacatggggacccctataacgccattgaagctatcgatccagaaaaacttaatgtgtttagaacagttcgcgagatcaccgggttcttgaacattcagtcttggcccccaaacatgaccgacttttcagtgttttctaatcttgttaccataggcggacgcgtgctctactctggcctgagcctactgatcctgaaacaacagggcataacatcattacaatttcagtcactgaaagagattagcgctgggaacatttacatcacggacaactctaacttgtgctattatcataccataaactggacaacccttttctccaccattaaccagaggatagtgatccgcgataataggaaagccgaaaattgcactgccgagggtatggtctgcaaccacttgtgtagtagcgacggatgctgggggccaggtccagaccagtgtctctcttgccgaaggttctccagaggcaggatctgcatcgagtcttgcaatctctacgacggtgagtttagggaattcgaaaacggatctatttgtgtggaatgtgatccacaatgcgagaaaatggaggacgggttgcttacttgtcatggccctgggcctgataattgcacaaaatgttcccattttaaggatggacctaattgtgtggaaaaatgccccgatgggttacagggggctaatagtttcatcttcaaatacgccgatccagaccgcgagtgtcatccgtgtcatcccaactgtacccaaggatgtaatggccctaccagtcacgattgtatatattatccttggacaggacattccactctaccgcagcacgctcgaactcccctcatcgctgctggtgtgattggtggcctgttcatcctggtgattgtcggtctgacttttgcagtctatgttcgccgaaagtccattaagaaaaaaagagcactgaggcggtttctggaaactgaattggtggaaccgctcaccccctccgggactgccccaaatcaggcccagctgcgcatccttaaggaaaccgagctgaagcgagtgaaggtcctgggctccggagcgtttggtacagtgtataaaggcatctgggtgccggagggcgagactgtcaaaatcccagtggcaatcaaaattctcaatgagacgacaggtcccaaggcgaacgtggaatttatggatgaagcacttatcatggcttcaatggaccacccacatctggtgagactactgggcgtctgtctgtcccctaccatccaactcgtcacacaactcatgcctcatggctgtctgctggagtacgtccacgaacacaaggacaacattgggagccagttacttctaaattggtgcgttcaaatcgctaagggtatgatgtacctggaagagagaaggctcgtacacagagacctcgccgcacgcaatgtcctagtgaaaagccctaaccacgtgaagattactgactttggtctggccagactactggagggagatgaaaaagagtacaatgccgatggcggaaagatgcctattaagtggatggcactcgaatgcatccactatcgcaaattcacacatcagagtgatgtgtggagctacggagtcacaatttgggaactcatgactttcggcggaaagccttacgatggtataccaactagagaaattccagacttgctagagaaaggcgaaaggctgcctcagccccctatctgtactatagacgtttatatggtgatggtgaagtgttggatgattgatgctgattcccgcccaaaattcaaagaattagccgctgagttcagccgcatggccagagaccctcagagatacctggtaattcagggcgatgataggatgaagctgcctagccccaacgatagtaagttttttcagaatcttctggacgaggaggacttggaggacatgatggatgctgaggagtatttggtcccacaagctttcaatattccccctccaatctacacatcaagggccaggattgacagcaatcgatctgaaattggacactctccccctcccgcttacactccaatgagcggcaatcagttcgtatacagagatgggggattcgccgcagagcaaggcgtgtcagtcccctaccgagccccaacctccacaattcctgaagcacctgtggcacaaggcgcaacggcggagatcttcgatgatagttgctgtaatggtacattgcgtaaacctgtggctccccatgtgcaggaagactcttccacacagcgctattctgccgaccccactgtgtttgcacccgaacggagcccaagaggagagcttgacgaggagggatacatgactcccatgcgcgacaagcccaagcaggagtacctgaatcctgtcgaagaaaatccgttcgtgtctcgtaggaagaacggggacttgcaggcacttgataaccctgaatatcacaacgctagtaatggcccacctaaggctgaagacgaatacgtgaatgagcccctgtacctgaatacattcgctaataccttgggcaaagcagaataccttaagaacaacatcctctcaatgccagagaaagccaaaaaagcctttgataatcccgactactggaatcactctctgccgccacggtcaaccttgcagcatccagattatctccaggagtattccacaaaatacttttacaagcagaacggtcgtatcaggccgatcgttgccgagaacccagaatacctgtccgagtttagtctcaaaccaggtacagttcttcccccacccccttaccggcatcgtaatacggtggtctag

SEQ ID NO: 154229 - DNA, 12132 bp, Artificial Sequence
  derived and/or modified sequence
ggagcgagcaagcgaaggctcacgcggggaaatagctgcacagtccggcccagagcgccaagcgcacacaccgagcacactcccacacgcgcacacacgcgctcacactcgccccctcctcgggccccggccctggacccgcgggcgcggactcggtcgcccgccctgggagtcgccacaccgcgcgcgccgcgcccgcccccctcgcacccccacgcgcgcccggctgggggatctcctccgcgtgcccgaaagggggatatgccatttggacatgtaattgtcagcacgggatctgagacttccaaaaaatgaagccggcgacaggactttgggtctgggtgagccttctcgtggcggcggggaccgtccagcccagcgattctcagtcagtgtgtgcaggaacggagaataaactgagctctctctctgacctggaacagcagtaccgagccttgcgcaagtactatgaaaactgtgaggttgtcatgggcaacctggagataaccagcattgagcacaaccgggacctctccttcctgcggtctgttcgagaagtcacaggctacgtgttagtggctcttaatcagtttcgttacctgcctctggagaatttacgcattattcgtgggacaaaactttatgaggatcgatatgccttggcaatatttttaaactacagaaaagatggaaactttggacttcaagaacttggattaaagaacttgacagaaatcctaaatggtggagtctatgtagaccagaacaaattcctttgttatgcagacaccattcattggcaagatattgttcggaacccatggccttccaacttgactcttgtgtcaacaaatggtagttcaggatgtggacgttgccataagtcctgtactggccgttgctggggacccacagaaaatcattgccagactttgacaaggacggtgtgtgcagaacaatgtgacggcagatgctacggaccttacgtcagtgactgctgccatcgagaatgtgctggaggctgctcaggacctaaggacacagactgctttgcctgcatgaatttcaatgacagtggagcatgtgttactcagtgtccccaaacctttgtctacaatccaaccacctttcaactggagcacaatttcaatgcaaagtacacatatggagcattctgtgtcaagaaatgtccacataactttgtggtagattccagttcttgtgtgcgtgcctgccctagttccaagatggaagtagaagaaaatgggattaaaatgtgtaaaccttgcactgacatttgcccaaaagcttgtgatggcattggcacaggatcattgatgtcagctcagactgtggattccagtaacattgacaaattcataaactgtaccaagatcaatgggaatttgatctttctagtcactggtattcatggggacccttacaatgcaattgaagccatagacccagagaaactgaacgtctttcggacagtcagagagataacaggtttcctgaacatacagtcatggccaccaaacatgactgacttcagtgttttttctaacctggtgaccattggtggaagagtactctatagtggcctgtccttgcttatcctcaagcaacagggcatcacctctctacagttccagtccctgaaggaaatcagcgcaggaaacatctatattactgacaacagcaacctgtgttattatcataccattaactggacaacactcttcagcacaatcaaccagagaatagtaatccgggacaacagaaaagctgaaaattgtactgctgaaggaatggtgtgcaaccatctgtgttccagtgatggctgttggggacctgggccagaccaatgtctgtcgtgtcgccgcttcagtagaggaaggatctgcatagagtcttgtaacctctatgatggtgaatttcgggagtttgagaatggctccatctgtgtggagtgtgacccccagtgtgagaagatggaagatggcctcctcacatgccatggaccgggtcctgacaactgtacaaagtgctctcattttaaagatggcccaaactgtgtggaaaaatgtccagatggcttacagggggcaaacagtttcattttcaagtatgctgatccagatcgggagtgccacccatgccatccaaactgcacccaagggtgtaacggtcccactagtcatgactgcatttactacccatggacgggccattccactttaccacaacatgctagaactcccctgattgcagctggagtaattggtgggctcttcattctggtcattgtgggtctgacatttgctgtttatgttagaaggaagagcatcaaaaagaaaagagccttgagaagattcttggaaacagagttggtggaaccattaactcccagtggcacagcacccaatcaagctcaacttcgtattttgaaagaaactgagctgaagagggtaaaagtccttggctcaggtgcttttggaacggtttataaaggtatttgggtacctgaaggagaaactgtgaagattcctgtggctattaagattcttaatgagacaactggtcccaaggcaaatgtggagttcatggatgaagctctgatcatggcaagtatggatcatccacacctagtccggttgctgggtgtgtgtctgagcccaaccatccagctggttactcaacttatgccccatggctgcctgttggagtatgtccacgagcacaaggataacattggatcacaactgctgcttaactggtgtgtccagatagctaagggaatgatgtacctggaagaaagacgactcgttcatcgggatttggcagcccgtaatgtcttagtgaaatctccaaaccatgtgaaaatcacagattttgggctagccagactcttggaaggagatgaaaaagagtacaatgctgatggaggaaagatgccaattaaatggatggctctggagtgtatacattacaggaaattcacccatcagagtgacgtttggagctatggagttactatatgggaactgatgacctttggaggaaaaccctatgatggaattccaacgcgagaaatccctgatttattagagaaaggagaacgtttgcctcagcctcccatctgcactattgacgtttacatggtcatggtcaaatgttggatgattgatgctgacagtagacctaaatttaaggaactggctgctgagttttcaaggatggctcgagaccctcaaagatacctagttattcagggtgatgatcgtatgaagcttcccagtccaaatgacagcaagttctttcagaatctcttggatgaagaggatttggaagatatgatggatgctgaggagtacttggtccctcaggctttcaacatcccacctcccatctatacttccagagcaagaattgactcgaataggagtgaaattggacacagccctcctcctgcctacacccccatgtcaggaaaccagtttgtataccgagatggaggttttgctgctgaacaaggagtgtctgtgccctacagagccccaactagcacaattccagaagctcctgtggcacagggtgctactgctgagatttttgatgactcctgctgtaatggcaccctacgcaagccagtggcaccccatgtccaagaggacagtagcacccagaggtacagtgctgaccccaccgtgtttgccccagaacggagcccacgaggagagctggatgaggaaggttacatgactcctatgcgagacaaacccaaacaagaatacctgaatccagtggaggagaacccttttgtttctcggagaaaaaatggagaccttcaagcattggataatcccgaatatcacaatgcatccaatggtccacccaaggccgaggatgagtatgtgaatgagccactgtacctcaacacctttgccaacaccttgggaaaagctgagtacctgaagaacaacatactgtcaatgccagagaaggccaagaaagcgtttgacaaccctgactactggaaccacagcctgccacctcggagcacccttcagcacccagactacctgcaggagtacagcacaaaatatttttataaacagaatgggcggatccggcctattgtggcagagaatcctgaatacctctctgagttctccctgaagccaggcactgtgctgccgcctccaccttacagacaccggaatactgtggtgtaagctcagttgtggttttttaggtggagagacacacctgctccaatttccccacccccctctctttctctggtggtcttccttctaccccaaggccagtagttttgacacttcccagtggaagatacagagatgcaatgatagttatgtgcttacctaacttgaacattagagggaaagactgaaagagaaagataggaggaaccacaatgtttcttcatttctctgcatgggttggtcaggagaatgaaacagctagagaaggaccagaaaatgtaaggcaatgctgcctactatcaaactagctgtcactttttttctttttctttttctttctttgtttctttcttcctcttcttttttttttttttttttaaagcagatggttgaaacacccatgctatctgttcctatctgcaggaactgatgtgtgcatatttagcatccctggaaatcataataaagtttccattagaacaaaagaataacattttctataacatatgatggtgtctgaaattgagaatccagtttctttccccagcagtttctgtcctagcaagtaagaatggccaactcaactttcataatttaaaaatctccattaaagttataactagtaattatgttttcaacactttttggtttttttcattttgttttgctctgaccgattcctttatatttgctcccctatttttggctttaatttctaattgcaaagatgtttacatcaaagcttcttcacagaatttaagcaagaaatattttaatatagtgaaatggccactactttaagtatacaatctttaaaataagaaagggaggctaatatttttcatgctatcaaattatcttcaccctcatcctttacatttttcaacatttttttttctccataaatgacactacttgataggccgttggttgtctgaagagtagaagggaaactaagagacagttctctgtggttcaggaaaactactgatactttcaggggtggcccaatgagggaatccattgaactggaagaaacacactggattgggtatgtctacctggcagatactcagaaatgtagtttgcacttaagctgtaattttatttgttctttttctgaactccattttggattttgaatcaagcaatatggaagcaaccagcaaattaactaatttaagtacatttttaaaaaaagagctaagataaagactgtggaaatgccaaaccaagcaaattaggaaccttgcaacggtatccagggactatgatgagaggccagcacattatcttcatatgtcacctttgctacgcaaggaaatttgttcagttcgtatacttcgtaagaaggaatgcgagtaaggattggcttgaattccatggaatttctagtatgagactatttatatgaagtagaaggtaactctttgcacataaattggtataataaaaagaaaaacacaaacattcaaagcttagggataggtccttgggtcaaaagttgtaaataaatgtgaaacatcttctcatgcaattattttattatccaacacactaatcttttgatactttatataattccctttcttcatatactgcatccagtactagaaccatcattattatgtatcattttgaaagaatacctgatgagatgaaggatgagaacaaatgacagagatgagtctccaagtaaagggggcctcacatcaataattaggaaacttagatataagtcgcccttttctgaaaattctaccccaagtcatttagatttttaaaaaatatttctaatgttaaaatattgggaccaaattagaatcaatagtataagattaattaattagagtaaaaatatctattaaggcagagaaagtttagagaaaaaaatccaaagaaatttgtgtttcttcctattctgaacaagtaaatccatccatccatccatccaaacctcctttatctaactgtgtctactaaaagcaccatgttttgtggggaacactcagataaatggaatatcatcctcaacttcaaaattctatgatctaggagatttaattaaaatgacattttaatttttctatgcgttccaacaatcagattgcatagtctcttttgtgaatagctgtcatataatcagttgtactgtaagatatctcctttaaactcatttgggatataagttaaacatccttcaaattgttgatgttgacaaacaggataatttcaataatattattcaaacataaactggtctaggagaatattgcatcactgactaattagcctatctagagtctaacttcaccattaaaccaaaagcagatggtggtccttggccaagaatattggagacattggagttggtttttttctaagctataagaagtgaggcgagctgaaaaagtatggtagagcaggagaagggtttgtgagattccttctagtgaagttcaccctcaaacttttcaggggtaaagacacagagtgattcaggggccacaatctaatagctcagggctctcctatccattcagagaagtctctaggaaaagggatctcatatcagtacttatgaaaaattgaatataagcctccctttctaaataaatctgcatcgagtcatcacagccctctttttggatactataccttgattttttttttctgatttacaatatgcatatggtttctactgggctatagaaagcagaatcactcattttggagaaggaaaaaatgaatagttaaaacaaacttttaactgttaaggtaacagaaatgtatttagtgaatgtctctttcctcctaagaacacaagacttctacatgttgggtaatacctagagatgcatgtaggaataatccaaaatgacccaaatgctttataatagcaccactttataattcttttgaatgatttctgtagtatataattgacttcagttgtttgagtgttttttgttttatttttgtcccccctgggaaaacatatttcagcatgtataagagggagaaaaaaagtttcattccttccagagaataacttatttagtccagtagggtagaattttaaaatgtcagttaaagtcttcaaagtgcttggggggatatcagattccagaggccaattgtagcaattgaaatttgcagaatcaattatgtaaatctgagacaaattagtattaaaattacacggagtatattttttaaatcacccaactttgtagattatacctattttgggcaggtatggaaaaattttgcagttaaatgattgcctaaagaaagtggtaaacaggtgaggaaagatggcctctgatctaggatagatccagaaccacaaagcatctgcaccacaaaaggtgttagactaccaagcagctcctggttttctgcatagtattagtagcacagcttaggatgagaatcctttctccagtaacattcttaaaatagcatgaaaaacaacgcaaaactcaaatttctattaaaacacacaaactaaaatcaagtgattcttttttgtagattagggagaaggactgaatatctaatttaagagaaggaatagtgtttaagtgttatagtgtgtgagctaataccttctaaaggaaagacatggcatgaagattgtgcatacttacaatgctaaggaaaaatcaagaaaaggactgtgtgaggctctgctactagatgaagttggaaggactattaatgtgcttcttgaagtatcaaaaatgaaaagaaaattaaaattgtttaagcctgacagggaaggatgtaaatacaagtttttctagagctctctaacctttatttcaaaactggaattattcatccatctgtaattgttgataatttaactagtatatgtagttcataaggtaatagaaaaggtgatcatgaaagcatgtatataactggacagaaccacgataatgctataagatgtagatttagttaggttatcagatgttaaatgattttaatattattaaataaatcaaactagaaaactaaccacaagtataatgtaacaaagttaaatgcaggatataaaaatgtaggatggattttgcatagtaaaaagataagtttgccatttaaaattgttgtttgttgggtttagctgaaagtaggcatatatggttccacttgggaaaacttgctttaaagcattacaatgaacaattttttctcattctcttattcctttatcactttttaaatgtaaagaaaattgtatttatttatttttttaaataaacaccaccttgcagaatttaataggcaaacatgttacatatgactaagtaagggtcttcaagatgaagtaaagaaaatgtaaatgttctattaccttatgcagagacaaaaaaaaaaaggagtggtgtcatttagctagcaaacaaacaaaatacagttaattggtgatatgtcctttcttttctcactatgccctcttgcctccaaaaatgacaacaaagaatcacaatttttctgataaataaatgctaaaccaagcgtttcaaactattgcattgccattcttttggactttagttattagaatgatgattgttatagggcaaatgagaaatccatgtgcatcagcttctagttgttaaaaaaaccagataaattaacttctactgtatactgtgggcagaggatcctagagctgatcctacaacatcagcttctagttgttaaaaaaaaaaaaagaaacagataaattaacttctactgtatatactgtgggcagaggatcttactgtgcctctgtttgtgtacatggacttcggtgtgtatcagtttgaaggacagccttgccccatgtaaacatataaatgcagattggtatcgcctggttgctatttgcttaagaacaaatattatacagatgagatcaggcataattttaaaagatcattatcagtggagacctcattattactgatattacaatggggccagtttttatacttctgggtagaattaataaaatttttctgatcccagagatctgagttctctctgcagttggaaacaagaagctgttgtgggcattgtgtcgggccaggggcccttgtgtttgtgtgggcaaatatcttttagcagtgtgagctgcttttttcttttcattaaaagtctctctaaaataatagaaatttcagatactcggttcaagtctcactgattttgtagaggtccaaaaatgtaggatctgtcacttttgcaggcccctgcctcacctaattcctggccaggtgacattttgggcagaagtaaatgcttctatagtcacaagctaaaatgactctaagccccaatttcacggggggtattcacatgcttcctctggaaaatactctttgacagtcagctttgcaagtaagtgattaccttgttaggaatcaaagaaaaatgtatttctctctgacctttagaggaaaatagaatccttcccttttttgcccattgacacaactggcactgctctcttccctttctaccaccctggttcaaagtagtcccccgatgctgtcctgttcctttcttaagccatagtggatctctgagatcctacaccccactttgtgaaacactgacttcatctttgccctcgaatgcctgattttttcataagagattctagcaatttggacactgtttaagtgaactatcaaactaccgcatagagaatatttaagctattaaaattatggtttcccatgaagatcaattctctgtgtccttccctataggaatttgagacgagttagccctgtgatgaatcttgaaactcacatatgtccacatacacttggtagaacttcgatttaatctttacataaaagctgtacatataaccaagaagttatttttgccagtaaattaacttatttgctttattcatcttatttggttcctaatcgtaaatattttgtagctgctgtaaatttttttctcccaaatgaggagtcttattatcataaaggtaaaggctattcagctttgataaccacctgcaattcttttttggatcattcatccatctaacaaatacataatgaggacagttcatgttaatgaaaatccatgttgtttaatagaatgccatcctttacctacttttgctctttatggacgtttttcttttcatgctctagtgagctttccctatatcatgagaagtggttatatttgtgcaaatatacaaatataggaaaacaaagattcatacctgtaggcaatagtctaacttgtccaaaccactttgcctttactgctatttttatccccaatgcgtagatatttcccccaggcctatagcctttgtgaaggaaagcaaatcatacctcctgtatattgacacgaatctggttttcaaatgtcatttccagattttttagttaattgggggttgtccttttcccttaatgtgagagtcattttcctgtatatttctggatctctcaggggctgggaggggggagtgaggggactacaaccatagcactccaagaacccttttgggattactccagtaatcaactacgaaagttattttctaaatgtagatatgtaaggtgttcttttaaagtaaggtactttgaaatatgtagcataaactggtactgctgttaaatgggtcgattattaaacggagcagctgtgtgagggcagctaactttgaatgcctgtctccctggctggtgtgtctccttctcatgttgagagcaccagggattgcgtggctgcatgctgaaaccgcattttcccatggtgtatgactagttcatctctttcttgagcaccattacaagaagatcaaatgaaaatgagatcaatgtggaagacaattcatagcacaaaaaaagtcatcttaaatctactctcaaacattcatcttatacatgcatcaaagtaatttactgacatcagtttgggtgagagagggagtcactttactgaaaaggcagaggcttaaggtgtatacatttgtactcacttccttattttcttaacttgtaagcagaaaacaagccctctctcttgtgaagtatcttcaaaggattggggtgcaaaaataccttgctggtaagccatcaatgttttatttaaatccctgcattcaaagttagctgcctttttgaaataaacaaacaaaaaatactactgtatgtttgaaaatgtgaatagtatttttatagcttgttaaagacatggctagttgcatttgtaaataagtataatgttgctttgattttcttttgtggacatctttatttggaacataattgtctttagggttgatttgtatataagtaattggcctgtgattgtttcttttttggttggaagttatcattttgacattacttgtgattctgtgttcagcactattgtgatgtgttcaacctctgcactcgcttacacaataggatatgccaattgtgtgtggtgtaatgttattttgatttttttccatgttattgatgaaggatcatgcacctaacacatactaacttttttaatgttaggcatatttttagtatactttctcttattctttcttctcctccaaccttttacccatcctccttcctttccctcattcctgttgttatttgagaatgagggagaaacagtattttacatttatgtaattaggcttttccgttagttctcaaggatcctcttttggctcttgggaaagaattgtacctgtacaaggcaattatagaatgcgaactgctttgcctcattccatactgatcatcccagctgaacaatttgaaaactgttctgcctttttgttacatgaatctgtcagaaatatatttttaatttaatataaatgaaattcaataaaatatgaaacaaa

SEQ ID NO: 154230 - protein, 916 aa, Artificial Sequence
  derived and/or modified sequence
MESGQPARRIAMAPLLEYERQLVLELLDTDGLVVCARGLGADRLLYHFLQLHCHPACLVLVLNTQPAEEEYFINQLKIEGVEHLPRRVTNEITSNSRYEVYTQGGVIFATSRILVVDFLTDRIPSDLITGILVYRAHRIIESCQEAFILRLFRQKNKRGFIKAFTDNAVAFDTGFCHVERVMRNLFVRKLYLWPRFHVAVNSFLEQHKPEVVEIHVSMTPTMLAIQTAILDILNACLKELKCHNPSLEVEDLSLENAIGKPFDKTIRHYLDPLWHQLGAKTKSLVQDLKILRTLLQYLSQYDCVTFLNLLESLRATEKAFGQNSGWLFLDSSTSMFINARARVYHLPDAKMSKKEKISEKMEIKEGEETKKELVLESNPKWEALTEVLKEIEAENKESEALGGPGQVLICASDDRTCSQLRDYITLGAEAFLLRLYRKTFEKDSKAEEVWMKFRKEDSSKRIRKSHKRPKDPQNKERASTKERTLKKKKRKLTLTQMVGKPEELEEEGDVEEGYRREISSSPESCPEEIKHEEFDVNLSSDAAFGILKEPLTIIHPLLGCSDPYALTRVLHEVEPRYVVLYDAELTFVRQLEIYRASRPGKPLRVYFLIYGGSTEEQRYLTALRKEKEAFEKLIREKASMVVPEEREGRDETNLDLVRGTASADVSTDTRKAGGQEQNGTQQSIVVDMREFRSELPSLIHRRGIDIEPVTLEVGDYILTPEMCVERKSISDLIGSLNNGRLYSQCISMSRYYKRPVLLIEFDPSKPFSLTSRGALFQEISSNDISSKLTLLTLHFPRLRILWCPSPHATAELFEELKQSKPQPDAATALAITADSETLPESEKYNPGPQDFLLKMPGVNAKNCRSLMHHVKNIAELAALSQDELTSILGNAANAKQLYDFIHTSFAEVVSKGKGKK

SEQ ID NO: 154231 - protein, 904 aa, Artificial Sequence
  derived and/or modified sequence
MAPLLEYERQLVLELLDTDGLVVCARGLGADRLLYHFLQLHCHPACLVLVLNTQPAEEEYFINQLKIEGVEHLPRRVTNEITSNSRYEVYTQGGVIFATSRILVVDFLTDRIPSDLITGILVYRAHRIIESCQEAFILRLFRQKNKRGFIKAFTDNAVAFDTGFCHVERVMRNLFVRKLYLWPRFHVAVNSFLEQHKPEVVEIHVSMTPTMLAIQTAILDILNACLKELKCHNPSLEVEDLSLENAIGKPFDKTIRHYLDPLWHQLGAKTKSLVQDLKILRTLLQYLSQYDCVTFLNLLESLRATEKAFGQNSGWLFLDSSTSMFINARARVYHLPDAKMSKKEKISEKMEIKEGEETKKELVLESNPKWEALTEVLKEIEAENKESEALGGPGQVLICASDDRTCSQLRDYITLGAEAFLLRLYRKTFEKDSKAEEVWMKFRKEDSSKRIRKSHKRPKDPQNKERASTKERTLKKKKRKLTLTQMVGKPEELEEEGDVEEGYRREISSSPESCPEEIKHEEFDVNLSSDAAFGILKEPLTIIHPLLGCSDPYALTRVLHEVEPRYVVLYDAELTFVRQLEIYRASRPGKPLRYFLIYGGSTEEQRYLTALRKEKEAFEKLIREKASMVVPEEREGRDETNLDLVRGTASADVSTDTRKAGGQEQNGTQQSIVVDMREFRSELPSLIHRRGIDIEPVTLEVGDYILTPEMCVERKSISDLIGSLNNGRLYSQCISMSRYYKRPVLLIEFDPSKPFSLTSRGALFQEISSNDISSKLTLLTLHFPRLRILWCPSPHATAELFEELKQSKPQPDAATALAITADSETLPESEKYNPGPQDFLLKMPGVNAKNCRSLMHHVKNIAELAALSQDELTSILGNAANAKQLYDFIHTSFAEVVSKGKGKK

SEQ ID NO: 154232 - protein, 356 aa, Artificial Sequence
  derived and/or modified sequence
MAPLLEYERQLVLELLDTDGLVVCARGLGADRLLYHFLQLHCHPACLVLVLNTQPAEEEYFINQLKIEGVEHLPRRVTNEITSNSRYEVYTQGGVIFATSRILVVDFLTDRIPSDLITGILVYRAHRIIESCQEAFILRLFRQKNKRGFIKAFTDNAVAFDTGFCHVERVMRNLFVRKLYLWPRFHVAVNSFLEQHKPEVVEIHVSMTPTMLAIQTAILDILNACLKELKCHNPSLEVEDLSLENAIGKPFDKTIRHYLDPLWHQLGAKTKSLVQDLKILRTLLQYLSQYDCVTFLNLLESLRATEKAFGQNSGWLFLDSSTSMFINARARVYHLPDAKMSKKEKISEKIKKKKKK

SEQ ID NO: 154233 - DNA, 2751 bp, Artificial Sequence
  derived and/or modified sequence
atggagagcggccagcccgccagaagaatcgccatggcccccctgctggagtacgagagacagctggtgctggagctgctggacaccgacggcctggtggtgtgcgccagaggcctgggcgccgacagactgctgtaccacttcctgcagctgcactgccaccccgcctgcctggtgctggtgctgaacacccagcccgccgaggaggagtacttcatcaaccagctgaagatcgagggcgtggagcacctgcccagaagagtgaccaacgagatcaccagcaacagcagatacgaggtgtacacccagggcggcgtgatcttcgccaccagcagaatcctggtggtggacttcctgaccgacagaatccccagcgacctgatcaccggcatcctggtgtacagagcccacagaatcatcgagagctgccaggaggccttcatcctgagactgttcagacagaagaacaagagaggcttcatcaaggccttcaccgacaacgccgtggccttcgacaccggcttctgccacgtggagagagtgatgagaaacctgttcgtgagaaagctgtacctgtggcccagattccacgtggccgtgaacagcttcctggagcagcacaagcccgaggtggtggagatccacgtgagcatgacccccaccatgctggccatccagaccgccatcctggacatcctgaacgcctgcctgaaggagctgaagtgccacaaccccagcctggaggtggaggacctgagcctggagaacgccatcggcaagcccttcgacaagaccatcagacactacctggaccccctgtggcaccagctgggcgccaagaccaagagcctggtgcaggacctgaagatcctgagaaccctgctgcagtacctgagccagtacgactgcgtgaccttcctgaacctgctggagagcctgagagccaccgagaaggccttcggccagaacagcggctggctgttcctggacagcagcaccagcatgttcatcaacgccagagccagagtgtaccacctgcccgacgccaagatgagcaagaaggagaagatcagcgagaagatggagatcaaggagggcgaggagaccaagaaggagctggtgctggagagcaaccccaagtgggaggccctgaccgaggtgctgaaggagatcgaggccgagaacaaggagagcgaggccctgggcggccccggccaggtgctgatctgcgccagcgacgacagaacctgcagccagctgagagactacatcaccctgggcgccgaggccttcctgctgagactgtacagaaagaccttcgagaaggacagcaaggccgaggaggtgtggatgaagttcagaaaggaggacagcagcaagagaatcagaaagagccacaagagacccaaggacccccagaacaaggagagagccagcaccaaggagagaaccctgaagaagaagaagagaaagctgaccctgacccagatggtgggcaagcccgaggagctggaggaggagggcgacgtggaggagggctacagaagagagatcagcagcagccccgagagctgccccgaggagatcaagcacgaggagttcgacgtgaacctgagcagcgacgccgccttcggcatcctgaaggagcccctgaccatcatccaccccctgctgggctgcagcgacccctacgccctgaccagagtgctgcacgaggtggagcccagatacgtggtgctgtacgacgccgagctgaccttcgtgagacagctggagatctacagagccagcagacccggcaagcccctgagagtgtacttcctgatctacggcggcagcaccgaggagcagagatacctgaccgccctgagaaaggagaaggaggccttcgagaagctgatcagagagaaggccagcatggtggtgcccgaggagagagagggcagagacgagaccaacctggacctggtgagaggcaccgccagcgccgacgtgagcaccgacaccagaaaggccggcggccaggagcagaacggcacccagcagagcatcgtggtggacatgagagagttcagaagcgagctgcccagcctgatccacagaagaggcatcgacatcgagcccgtgaccctggaggtgggcgactacatcctgacccccgagatgtgcgtggagagaaagagcatcagcgacctgatcggcagcctgaacaacggcagactgtacagccagtgcatcagcatgagcagatactacaagagacccgtgctgctgatcgagttcgaccccagcaagcccttcagcctgaccagcagaggcgccctgttccaggagatcagcagcaacgacatcagcagcaagctgaccctgctgaccctgcacttccccagactgagaatcctgtggtgccccagcccccacgccaccgccgagctgttcgaggagctgaagcagagcaagccccagcccgacgccgccaccgccctggccatcaccgccgacagcgagaccctgcccgagagcgagaagtacaaccccggcccccaggacttcctgctgaagatgcccggcgtgaacgccaagaactgcagaagcctgatgcaccacgtgaagaacatcgccgagctggccgccctgagccaggacgagctgaccagcatcctgggcaacgccgccaacgccaagcagctgtacgacttcatccacaccagcttcgccgaggtggtgagcaagggcaagggcaagaagtag

SEQ ID NO: 154234 - DNA, 2715 bp, Artificial Sequence
  derived and/or modified sequence
atggcccccctgctggagtacgagagacagctggtgctggagctgctggacaccgacggcctggtggtgtgcgccagaggcctgggcgccgacagactgctgtaccacttcctgcagctgcactgccaccccgcctgcctggtgctggtgctgaacacccagcccgccgaggaggagtacttcatcaaccagctgaagatcgagggcgtggagcacctgcccagaagagtgaccaacgagatcaccagcaacagcagatacgaggtgtacacccagggcggcgtgatcttcgccaccagcagaatcctggtggtggacttcctgaccgacagaatccccagcgacctgatcaccggcatcctggtgtacagagcccacagaatcatcgagagctgccaggaggccttcatcctgagactgttcagacagaagaacaagagaggcttcatcaaggccttcaccgacaacgccgtggccttcgacaccggcttctgccacgtggagagagtgatgagaaacctgttcgtgagaaagctgtacctgtggcccagattccacgtggccgtgaacagcttcctggagcagcacaagcccgaggtggtggagatccacgtgagcatgacccccaccatgctggccatccagaccgccatcctggacatcctgaacgcctgcctgaaggagctgaagtgccacaaccccagcctggaggtggaggacctgagcctggagaacgccatcggcaagcccttcgacaagaccatcagacactacctggaccccctgtggcaccagctgggcgccaagaccaagagcctggtgcaggacctgaagatcctgagaaccctgctgcagtacctgagccagtacgactgcgtgaccttcctgaacctgctggagagcctgagagccaccgagaaggccttcggccagaacagcggctggctgttcctggacagcagcaccagcatgttcatcaacgccagagccagagtgtaccacctgcccgacgccaagatgagcaagaaggagaagatcagcgagaagatggagatcaaggagggcgaggagaccaagaaggagctggtgctggagagcaaccccaagtgggaggccctgaccgaggtgctgaaggagatcgaggccgagaacaaggagagcgaggccctgggcggccccggccaggtgctgatctgcgccagcgacgacagaacctgcagccagctgagagactacatcaccctgggcgccgaggccttcctgctgagactgtacagaaagaccttcgagaaggacagcaaggccgaggaggtgtggatgaagttcagaaaggaggacagcagcaagagaatcagaaagagccacaagagacccaaggacccccagaacaaggagagagccagcaccaaggagagaaccctgaagaagaagaagagaaagctgaccctgacccagatggtgggcaagcccgaggagctggaggaggagggcgacgtggaggagggctacagaagagagatcagcagcagccccgagagctgccccgaggagatcaagcacgaggagttcgacgtgaacctgagcagcgacgccgccttcggcatcctgaaggagcccctgaccatcatccaccccctgctgggctgcagcgacccctacgccctgaccagagtgctgcacgaggtggagcccagatacgtggtgctgtacgacgccgagctgaccttcgtgagacagctggagatctacagagccagcagacccggcaagcccctgagatacttcctgatctacggcggcagcaccgaggagcagagatacctgaccgccctgagaaaggagaaggaggccttcgagaagctgatcagagagaaggccagcatggtggtgcccgaggagagagagggcagagacgagaccaacctggacctggtgagaggcaccgccagcgccgacgtgagcaccgacaccagaaaggccggcggccaggagcagaacggcacccagcagagcatcgtggtggacatgagagagttcagaagcgagctgcccagcctgatccacagaagaggcatcgacatcgagcccgtgaccctggaggtgggcgactacatcctgacccccgagatgtgcgtggagagaaagagcatcagcgacctgatcggcagcctgaacaacggcagactgtacagccagtgcatcagcatgagcagatactacaagagacccgtgctgctgatcgagttcgaccccagcaagcccttcagcctgaccagcagaggcgccctgttccaggagatcagcagcaacgacatcagcagcaagctgaccctgctgaccctgcacttccccagactgagaatcctgtggtgccccagcccccacgccaccgccgagctgttcgaggagctgaagcagagcaagccccagcccgacgccgccaccgccctggccatcaccgccgacagcgagaccctgcccgagagcgagaagtacaaccccggcccccaggacttcctgctgaagatgcccggcgtgaacgccaagaactgcagaagcctgatgcaccacgtgaagaacatcgccgagctggccgccctgagccaggacgagctgaccagcatcctgggcaacgccgccaacgccaagcagctgtacgacttcatccacaccagcttcgccgaggtggtgagcaagggcaagggcaagaagtag

SEQ ID NO: 154235 - DNA, 1071 bp, Artificial Sequence
  derived and/or modified sequence
atggcccccctgctggagtacgagagacagctggtgctggagctgctggacaccgacggcctggtggtgtgcgccagaggcctgggcgccgacagactgctgtaccacttcctgcagctgcactgccaccccgcctgcctggtgctggtgctgaacacccagcccgccgaggaggagtacttcatcaaccagctgaagatcgagggcgtggagcacctgcccagaagagtgaccaacgagatcaccagcaacagcagatacgaggtgtacacccagggcggcgtgatcttcgccaccagcagaatcctggtggtggacttcctgaccgacagaatccccagcgacctgatcaccggcatcctggtgtacagagcccacagaatcatcgagagctgccaggaggccttcatcctgagactgttcagacagaagaacaagagaggcttcatcaaggccttcaccgacaacgccgtggccttcgacaccggcttctgccacgtggagagagtgatgagaaacctgttcgtgagaaagctgtacctgtggcccagattccacgtggccgtgaacagcttcctggagcagcacaagcccgaggtggtggagatccacgtgagcatgacccccaccatgctggccatccagaccgccatcctggacatcctgaacgcctgcctgaaggagctgaagtgccacaaccccagcctggaggtggaggacctgagcctggagaacgccatcggcaagcccttcgacaagaccatcagacactacctggaccccctgtggcaccagctgggcgccaagaccaagagcctggtgcaggacctgaagatcctgagaaccctgctgcagtacctgagccagtacgactgcgtgaccttcctgaacctgctggagagcctgagagccaccgagaaggccttcggccagaacagcggctggctgttcctggacagcagcaccagcatgttcatcaacgccagagccagagtgtaccacctgcccgacgccaagatgagcaagaaggagaagatcagcgagaagatcaagaagaagaagaagaagtag

SEQ ID NO: 154236 - DNA, 2751 bp, Artificial Sequence
  derived and/or modified sequence
atggagtccggacagccggcacgtagaatagctatggctcccctcctggaatacgagcgccagcttgtgctcgagttattagataccgatggtctcgtcgtctgcgccagaggcttgggcgctgaccgcctcttatatcactttttgcagttacattgtcaccccgcttgtctcgtgttagtcctgaacactcagccagcagaggaagagtacttcattaatcagctgaaaatcgaaggagtggagcatctccctaggcgcgtaactaatgaaattactagcaacagccgttacgaggtatatacccagggcggcgtgatttttgctacttcacgaattctggtggtcgatttccttactgatcgcattccctcggatttgatcaccggcatactggtatatcgagcccaccgtattatcgagtcttgccaagaagcctttattttaaggctgtttcggcagaaaaataagcgaggtttcatcaaagccttcacagacaacgctgttgcctttgacacaggattctgccatgtggaaagagtgatgagaaacctcttcgtgcggaagctgtatctctggccgagatttcacgtggctgtgaattcctttctagagcaacacaaaccagaagttgtagaaatccacgtgagtatgaccccaacgatgctggcaatccagactgcaatactggatattctaaacgcttgtcttaaggagcttaaatgccacaatccaagtctggaagtggaggatctaagtctagagaatgctattggcaagccatttgataagaccatccgacactacctagatcctctttggcaccagctaggcgcaaagaccaaatctctggttcaggacctgaaaatcctccgaaccctgttacagtatttgtctcaatacgactgcgttacgttcttgaacctcctggaatcgcttcgggcaaccgagaaagccttcgggcagaattccggctggttgtttctggactcatctaccagcatgtttattaatgctcgagcaagggtataccacttacccgatgctaaaatgagcaagaaagagaaaatctcagaaaagatggaaattaaggagggagaagaaaccaaaaaggagttagtgttagagagtaatcccaaatgggaggctttaactgaggtgctgaaggagatcgaagctgagaataaagagagcgaggcgttagggggccctggccaggtattgatctgtgcttctgacgaccggacatgttcacagctgcgagattatattacgcttggtgccgaggcattcctcctccgactgtaccgcaaaactttcgagaaggatagcaaggcagaggaggtctggatgaaattccggaaggaagactcgtctaagagaatacgcaaatcacataagagacctaaggacccgcagaacaaagagcgcgcctccacgaaggaaaggactttgaagaagaagaaaaggaaactcacattgactcagatggtgggaaagcctgaggagctcgaagaggaaggcgatgtagaagaagggtaccgccgggaaatctcgtcgtcccccgaaagctgtcccgaagagatcaagcacgaggagttcgacgtgaacctttcaagtgacgcagcctttggcatcctcaaagagcctttaacgatcatacaccccctgcttggttgttctgacccctatgctctcacaagagtgctgcatgaggtcgagcctcgctacgttgtgttgtacgacgctgagctgacattcgtaaggcagcttgaaatctaccgagcctcccgcccaggaaaacctctgagagtctactttctgatctacggtgggtcaactgaagagcaaaggtacctgaccgcgctgaggaaagaaaaggaggcctttgaaaaactgatacgtgaaaaagccagtatggttgttcccgaggaacgagaaggcagggacgaaactaacctggacttggtgagaggtactgctagtgcagatgtgagcacagacacccgtaaagcagggggccaggagcagaatggaactcaacagagcattgttgtggatatgagagagttccggtctgagctgccaagccttatccaccgccgcggaatcgatattgagccggtgacattagaagttggagactatattctcacccctgagatgtgcgtcgaaaggaaaagcatcagcgacctgataggatccctcaacaacggccgcctgtattctcagtgtatttctatgtctcgttactataaacgtcctgtcctgctgatcgaatttgacccaagcaagccatttagcctcaccagccgcggagccctatttcaggagatttcatccaatgacatttctagtaaacttacactcctcacactgcactttcctagactgcgtatcttgtggtgcccgtctcctcacgcgaccgccgaattgtttgaggaactgaaacagtcaaagcctcagcctgacgctgccaccgccttagccattaccgccgacagcgagactctgccagaaagtgaaaagtacaaccctggcccgcaggacttcttgctcaagatgcctggcgtgaacgccaagaactgtaggagcttgatgcaccacgtaaagaacatcgcagaactggcagccctctctcaggatgagctcaccagcattctggggaacgcagccaatgctaaacagctttacgactttatacatacttcttttgccgaggtggtatccaaaggcaagggtaagaaatag

SEQ ID NO: 154237 - DNA, 2715 bp, Artificial Sequence
  derived and/or modified sequence
atggctcctctgctcgagtacgagcgtcagctggtactagaactgctggatactgatggactggtcgtgtgtgcaaggggattgggcgcagaccgactactctaccatttcctccagcttcactgtcacccagcttgtctcgtgttggtgcttaacactcagccggccgaagaagagtacttcatcaatcagctgaagatcgagggagttgaacacctacccaggcgggttaccaacgaaatcaccagcaacagcagatacgaggtttacacccaggggggcgttattttcgcaacaagccggatacttgttgtggacttcctgaccgatcgcatcccatccgatctcattactgggattctggtctaccgcgcacaccgtattattgagtcatgccaggaggcattcattttgcgactctttcggcaaaagaataaacgggggtttatcaaggcattcacggataatgcagtggccttcgacactggtttttgccatgtggagagagtgatgcgaaatctgtttgtgagaaaactgtatctttggccccgattccacgtcgcagtgaacagctttctagagcaacacaaacccgaagtggtggagatccacgtgtcaatgacacctaccatgctggccatacagaccgctatcctcgacatcctcaacgcttgcttgaaggagctcaagtgccacaaccccagcctcgaggtcgaggatttgtctctggagaatgcaatcggaaagcccttcgacaaaacgataaggcactacctggacccactgtggcaccagctgggcgccaagacaaagtctctagttcaggatcttaaaattctgcgtaccctcctccagtatctgagccagtacgattgtgtaactttcttgaacctgctcgagtcattacgcgcgactgagaaggcctttggacagaattccggctggctgttcctggattcctctacgagcatgttcatcaacgcacgggcccgggtgtaccatttaccagacgctaagatgagtaaaaaagagaaaatttcagagaaaatggaaataaaagagggggaggagacaaagaaggagctcgtgctcgagtcaaaccctaaatgggaagccctcaccgaagtgctgaaagagatcgaggcagagaacaaagagtcagaggcgcttggaggaccaggccaggtgctgatctgtgcgtctgatgacagaacctgctcccagctcagagactacatcactctcggtgccgaggcctttctgctgagactgtacaggaaaacgtttgaaaaggactcaaaggcagaggaagtctggatgaagttccggaaagaagacagcagcaaaaggatacggaagtcccataaacgtcctaaagacccacagaacaaggagcgggcttctaccaaagaaaggactctcaaaaaaaagaaaaggaagctcacattgacccagatggtcggcaagcctgaagagctcgaggaggaaggagatgtcgaggaaggttaccgccgcgaaataagttcttcacccgagtcatgtccagaagaaatcaagcacgaggagttcgacgtcaacctttctagcgacgccgcgtttgggattttaaaagaaccactgacaatcatccatcccctcctcggatgttcggatccatacgcgctcacccgggttcttcatgaagtggagccccgctacgtggtcctgtatgatgcggagctgacattcgttcgccaactggaaatttatagggcaagtcgacctggaaagcccttgcgatattttctgatttacggaggatctaccgaagagcagagatacctgacggcacttaggaaggaaaaagaggccttcgaaaagcttattagggaaaaggcctccatggtcgtgcctgaggagagggaaggacgagatgaaacaaatttggatctggttaggggaactgcatcagccgacgtctctactgatacaaggaaggctggaggccaggaacagaacggcacccagcagagcatcgtcgtggacatgcgggagttcaggagcgaactgccctccctcatccacaggagaggaattgacattgagccagttacactggaggtgggagactacatactcacccccgagatgtgcgttgagagaaagagtatctctgaccttataggatccttaaataatggccgattgtattcacagtgcatctcaatgtcccggtactataagcgccctgtgctgctgattgaattcgatccctctaaaccattcagcctgacaagtagaggggccctgttccaagaaataagctctaacgatataagctctaagctcacccttttgaccctccacttcccccgactccggatcctgtggtgcccgagtccacacgctaccgccgaactattcgaagaacttaagcagtctaagccacagcctgacgcggctacagctcttgctattaccgcggatagcgaaactctacctgaatctgagaaatataacccaggacctcaggattttctcctcaagatgccaggcgtgaatgcaaagaactgcaggagcctcatgcatcacgtcaaaaatattgccgagctcgccgcactgtcacaggacgagttgacttccatcctgggtaacgctgccaatgccaaacaactgtatgactttatacacaccagcttcgccgaagtggtgagtaaaggaaaaggtaaaaaatag

SEQ ID NO: 154238 - DNA, 1071 bp, Artificial Sequence
  derived and/or modified sequence
atggctcccctcctagagtacgaacggcagctggtgctggaactgcttgacacggatgggttggtggtgtgtgcccgtggcctaggagcggatcggctgctatatcactttctgcaactgcattgccatcctgcgtgtctagttctggtcctcaacactcagccagccgaagaggaatactttattaaccagctcaagatcgaaggagtggagcacttaccgagaagggtcacaaacgagatcacgtcgaattcacggtatgaagtatacacacagggaggtgttatatttgccacttctcggattttagtggtggacttcttgactgaccgtatcccatctgaccttataaccgggattctagtgtaccgcgcccatcggattattgaatcctgccaggaggcatttatcctgcgcctgttccgtcagaagaacaaaagaggatttataaaagctttcacagataacgccgtcgctttcgataccggcttttgtcacgtggagcgtgtaatgcgtaatctgttcgtccgtaaactgtatctctggccccggttccatgtggcagtgaatagtttcctggagcagcacaagcccgaagtcgttgagatccacgtttcgatgacacccaccatgcttgctatccagactgcaatactggatatcctcaatgcctgtctgaaggaactgaaatgccacaatccgtccctcgaagtggaagatctgtccctagaaaacgcaatcggcaagccctttgacaagacaatccgccactatcttgacccattgtggcaccagttgggggccaaaacaaaaagcctcgtgcaagacttgaagatccttcggaccctactgcaatacctgagccagtatgattgcgtgactttcttaaatctcctggagagcttgcgggcgacggagaaggcgttcggccagaattccgggtggttatttttggatagtagcacaagtatgtttattaatgcaagagccagggtatatcacctgccagacgcgaagatgtccaaaaaagagaagatcagtgaaaaaatcaagaaaaaaaaaaaaaagtag

SEQ ID NO: 154239 - DNA, 6761 bp, Artificial Sequence
  derived and/or modified sequence
agagcttccatggagtcagggcagccggctcgacggattgccatggcgccgctgctggagtacgagcgacagctggtgctggaactgctcgacactgacgggctagtagtgtgcgcccgcgggctcggcgcggaccggctcctctaccactttctccagctgcactgccacccagcctgcctggtgctggtgctcaacacgcagccggccgaggaggagtattttatcaatcagctgaagatagaaggagttgaacacctccctcgccgtgtaacaaatgaaatcacaagcaacagtcgctatgaagtttacacacaaggtggtgttatatttgcgacaagtaggatacttgtggttgacttcttgactgatagaataccttcagatttaattactggcatcttggtgtatagagcccacagaataatcgagtcttgtcaagaagcattcatcttgcgcctctttcgccagaaaaacaaacgtggttttattaaagctttcacagacaatgctgttgcctttgatactggtttttgtcatgtggaaagagtgatgagaaatctttttgtgaggaaactgtatctgtggccaaggttccatgtagcagtaaactcatttttagaacagcacaaacctgaagttgtagaaatccatgtttctatgacacctaccatgcttgctatacagactgctatactggacattttaaatgcatgtctaaaggaactaaaatgccataacccatcgcttgaagtggaagatttatctttagaaaatgctattggaaaaccttttgacaagacaatccgccattatctggatcctttgtggcaccagcttggagccaagactaaatccttagttcaggatttgaagatattacgaactttgctgcagtatctctctcagtatgattgtgtcacatttcttaatcttctggaatctctgagagcaacggaaaaagcttttggtcagaattcaggttggctgtttcttgactccagcacctcgatgtttataaatgctcgagcaagggtttatcatcttccagatgccaaaatgagtaaaaaagaaaaaatatctgaaaaaatggaaattaaagaaggggaagaaacaaaaaaggaactggtcctagaaagcaacccaaagtgggaggcactgactgaagtattaaaagaaattgaggcagaaaataaggagagtgaagctcttggtggtccaggtcaagtactgatttgtgcaagtgatgaccgaacatgttcccagctgagagactatatcactcttggagcggaggccttcttattgaggctctacaggaaaacctttgagaaggatagcaaagctgaagaagtctggatgaaatttaggaaggaagacagttcaaagagaattaggaaatctcacaaaagacctaaagacccccaaaacaaagaacgggcttctaccaaagaaagaaccctcaaaaagaaaaaacggaagttgaccttaactcaaatggtaggaaaacctgaagaactggaagaggaaggagatgtcgaggaaggatatcgtcgagaaataagcagtagcccagaaagctgcccggaagaaattaagcatgaagaatttgatgtaaatttgtcatcggatgctgctttcggaatcctgaaagaacccctcactatcatccatccgcttctgggttgcagcgacccctatgctctgacaagggtactacatgaagtggagccaagatacgtggttctttatgacgcagagctaacctttgttcggcagcttgaaatttacagggcgagtaggcctgggaaacctctgagggtttactttcttatatacggaggttcaactgaggaacaacgctatctcactgctttgcggaaagaaaaggaagcttttgaaaaactcataagggaaaaagcaagcatggttgtccctgaagaaagagaaggcagagatgaaacaaacttagacctagtaagaggcacagcatctgcagatgtttccactgacactcggaaagccggtggccaggaacagaatggtacacagcaaagcatagttgtggatatgcgtgaatttcgaagtgagcttccatctctgatccatcgtcggggcattgacattgaacccgtgactttagaggttggagattacatcctcactccagaaatgtgcgtggagcgcaagagtatcagtgatttaatcggctctttaaataacggccgcctctacagccagtgcatctccatgtcccgctactacaagcgtcccgtgcttctgattgagtttgaccctagcaagcctttctctctcacttcccgaggtgccttgtttcaggagatctccagcaatgacattagttccaaactcactcttcttacacttcacttccccagactacggattctctggtgcccctctcctcatgcaacggcggagttgtttgaggagctgaaacaaagcaagccacagcctgatgcggcgacagcactggccattacagcagattctgaaacccttcccgagtcagagaagtataatcctggtccccaagacttcttgttaaaaatgccaggggtgaatgccaaaaactgccgctccttgatgcaccacgttaagaacatcgcagaattagcagccctgtcacaagacgagctcacgagtattctggggaatgctgcaaatgccaaacagctttatgatttcattcacacctcttttgcagaagtcgtatcaaaaggaaaagggaaaaagtgaacagtgatggctgttttcttatcccatgcctgtacttttcagcggctccttgccagacatcataggtcattattaattattggtttgctatttcattcttttccaatgctcttaatgattgtacggtggaccagaagccaggattcctctctgaactctgcagttaggcatcacttgaacttgcctgtgcctgctctttttcctccctgcaccgtctatgccgggcttagcatgtttctttttaaatgaggtttgtcaggatcaggtaaagttcctacaagtgattacagaaggtagaaactttacctgatcctaacagatctcatttagaaaggaatatgctaagcctggcatggacggtgcagggagggaaaagagcaggcacaagaaagctaccatttttaacagtccttgttatctagtgcaacataaataacagtcttaattgcacttatacccatgtcctgtggctctccaaatctggtctttgctgttgtgtctgctggacgcttgaactgatgtttgtgtaggaaatcatgttctgaccctttgtctacaaaggagccttctggaacactgagaagaaacatctctttgccattcctgaccagttctctctaccacattttcttcagctccatacttctgcctgtctgctctaaggaaatttcatggagccttcctactactaattcaagacagtctcctcaaaaactggttgactagtcttctaatgaccctaacatatgtagcatatactataatttcattgttccaaattagtatttttaaagcaaaatgaattacctgtttgcaaaagttaatgatgaaggagctcttagaattctcaatttttgcacatattcagtctcctaatatcagagatccctaagtccagctggctagttacagagttttttcagacttcctcgtttctcagctcttatatcctaagacaccagcatcatatcctctagaaatacaacctaattggcagtgagccgagatcgcaccactgcacccctgcctgggcgacagagtgagactttgtctctattacaaaaagaaaagaaaagaaatacaacctaagctcacctgcctgtgattcctcatttctcaccatcctgtgccagggtggctacttctctctgtgaggactcaaatacaagccaatgagtggcccactaagcttttaagatttgattttcctgccttgagataaaaaggagtgtaggtaaatgaaagatcaatgtatggaatatataaaaatacgaaagaaatatatacgtttaaaaatccataaagaaaaaaatctcattctaaacctgattaagttggctttttacgtaagtgtacaaataggatattcacagcatctttgtgcagtttttaaacttttatatttaaacattattaagttggcttttgttcacatgttgagtaatgggtagtaaattttctacctcaggagctgatatagacatcagttctgctagccatatcacatattttaatgtttcatcaacatcagctgtttttttgtttgctacactatttgaactaatagacagtggatcatgtaacacaaaattgtcttcaactttaacaaaattgtcattgttatttttttttgagacagagtctccctctgttgcccaggctggagtgcagtggcgcaatctcggctcactgcaacctcgcctgctgggttcaagcagttctcccacctcagcctcccaagtagctgggattataggtgtgcaccaccagacccggctaatttttgtatttttagtagagacggggtttcaccatgttggccaggctggtctcaaactactgacctcaggtgatccacccaccttggcctcccaaagtgctgagataacaggcgtgagccaccgcacccacccaacaaaattatttttaactgtcgtttctgaactgaacctctcacattggcatcttgatttattggtacttaacagtatatatggattttgaactctacacaagggtataaccagaatgaattgaggggtatcaagaaccagattggttacagtagaactctgtaagatgatgtggagagtaaggaaaaggagaagaaataaaaattagtttaagatggaataaagatttgggctgctaattttttcccaggattcaaaatatacccgctagaatggaaaacaaaaatttgaatgattacaacattatcgttaacattcaattttgtatttattgttttattgaatatagttcagagtatattaaaatagacctaccacttcaaatgataatgattattataatgtctcttcaccctattctagcacttctgcttgcagtatgtggtttctatttttttcctcttgtataattccacttgcttttaattgttgtttcattatataaaaggaacatcttcccatagcatattctatgaaaggggtttcattccaagttgagttttcaaaaaaaaggtcttcctaaagctaccattttcaaccgtccttgttatctagtacaacataaataacagtcttaaaaattgcactaataccagtgcccccctggctctccaaatctgttctttgctcttgtatctgctggacgcttgaagacaggtgcactgtctcgtatgtatttgaattatgaacagtaatttctaatgaattctaaaatggtcattgtaagtgaaagcctctcgctaccacttcctcttccaactacataaatatatttcaatgtatttccagttttggaaagttttcaatacatacatcaagtgtttacttagatttttataaaaattttttttacaatctaataatctttggtaaaggaactagagatgcatgcagttgcaaaattaatgtatttattttccagcataattttattaacttcactttttttctctctagtaaatatccagtgtacttatgaactcatgtttggctcttttaaaaccttttctaaaagctagatcagcatttttctattttacaagttttttgtataaaaaggtgaacatatgagatattgtgagaaatcattttaagtttcatttaaatcatggtgcctcttttgatactttcttaaaattgtgcaagaagaaatcatttttagtagtggtcataaatattatccttttggcagtaagctattactaattcagcctgaagctcggtagacaatatgtctacatgtgtttgagtacatcctggatacagtttcccagctcatgagggactgaaaatagtcttattcatcaacccactaggatgtgaagggttaagtctagatttggtcgcattgaaaccccacaatatagaattaataaatggccttcagtaggaaaacctacactaaagcaaatccgaagaagtggggcagggggaaagaggcattactggtctttccttttgttttgcaagcataatttgattttcctttggctcagaaaactcatttggggaaattctcttttgtgttcagtttaacctagaaaggtcctcttgaaaaaccaacattttaggaaagttcttttttcaggatggagtatattaaaattaagccaggctttgacgtgaattatcacttttctttattattttgttttctattttggtttatagctatttctggttcagttctgaacttcagcacttaatcatccttatcaaccaggcttttggtagcctaaaccgctatgctgttgtttttttaatttaaagatgtataagccaaaatttggatgggagtgagacataactgatttatatgaattttaacagagttgtatttgtgtgtgtttaataaaatatatatttattcagtactttcctcagtattttatgggcaaagtaaaaataacaatgcatagtgaaagggcatatattaccagcagtaataattcaaaatcctgaaaatgtttcattttttttgtttttgttatgcagaataaacaaggcagaaatgctctttgaaccact

SEQ ID NO: 154240 - DNA, 2865 bp, Artificial Sequence
  derived and/or modified sequence
gctcgacggattgccatggcgccgctgctggagtacgagcgacagctggtgctggaactgctcgacactgacgggctagtagtgtgcgcccgcgggctcggcgcggaccggctcctctaccactttctccagctgcactgccacccagcctgcctggtgctggtgctcaacacgcagccggccgaggaggagtattttatcaatcagctgaagatagaaggagttgaacacctccctcgccgtgtaacaaatgaaatcacaagcaacagtcgctatgaagtttacacacaaggtggtgttatatttgcgacaagtaggatacttgtggttgacttcttgactgatagaataccttcagatttaattactggcatcttggtgtatagagcccacagaataatcgagtcttgtcaagaagcattcatcttgcgcctctttcgccagaaaaacaaacgtggttttattaaagctttcacagacaatgctgttgcctttgatactggtttttgtcatgtggaaagagtgatgagaaatctttttgtgaggaaactgtatctgtggccaaggttccatgtagcagtaaactcatttttagaacagcacaaacctgaagttgtagaaatccatgtttctatgacacctaccatgcttgctatacagactgctatactggacattttaaatgcatgtctaaaggaactaaaatgccataacccatcgcttgaagtggaagatttatctttagaaaatgctattggaaaaccttttgacaagacaatccgccattatctggatcctttgtggcaccagcttggagccaagactaaatccttagttcaggatttgaagatattacgaactttgctgcagtatctctctcagtatgattgtgtcacatttcttaatcttctggaatctctgagagcaacggaaaaagcttttggtcagaattcaggttggctgtttcttgactccagcacctcgatgtttataaatgctcgagcaagggtttatcatcttccagatgccaaaatgagtaaaaaagaaaaaatatctgaaaaaatggaaattaaagaaggggaagaaacaaaaaaggaactggtcctagaaagcaacccaaagtgggaggcactgactgaagtattaaaagaaattgaggcagaaaataaggagagtgaagctcttggtggtccaggtcaagtactgatttgtgcaagtgatgaccgaacatgttcccagctgagagactatatcactcttggagcggaggccttcttattgaggctctacaggaaaacctttgagaaggatagcaaagctgaagaagtctggatgaaatttaggaaggaagacagttcaaagagaattaggaaatctcacaaaagacctaaagacccccaaaacaaagaacgggcttctaccaaagaaagaaccctcaaaaagaaaaaacggaagttgaccttaactcaaatggtaggaaaacctgaagaactggaagaggaaggagatgtcgaggaaggatatcgtcgagaaataagcagtagcccagaaagctgcccggaagaaattaagcatgaagaatttgatgtaaatttgtcatcggatgctgctttcggaatcctgaaagaacccctcactatcatccatccgcttctgggttgcagcgacccctatgctctgacaagggtactacatgaagtggagccaagatacgtggttctttatgacgcagagctaacctttgttcggcagcttgaaatttacagggcgagtaggcctgggaaacctctgaggtactttcttatatacggaggttcaactgaggaacaacgctatctcactgctttgcggaaagaaaaggaagcttttgaaaaactcataagggaaaaagcaagcatggttgtccctgaagaaagagaaggcagagatgaaacaaacttagacctagtaagaggcacagcatctgcagatgtttccactgacactcggaaagccggtggccaggaacagaatggtacacagcaaagcatagttgtggatatgcgtgaatttcgaagtgagcttccatctctgatccatcgtcggggcattgacattgaacccgtgactttagaggttggagattacatcctcactccagaaatgtgcgtggagcgcaagagtatcagtgatttaatcggctctttaaataacggccgcctctacagccagtgcatctccatgtcccgctactacaagcgtcccgtgcttctgattgagtttgaccctagcaagcctttctctctcacttcccgaggtgccttgtttcaggagatctccagcaatgacattagttccaaactcactcttcttacacttcacttccccagactacggattctctggtgcccctctcctcatgcaacggcggagttgtttgaggagctgaaacaaagcaagccacagcctgatgcggcgacagcactggccattacagcagattctgaaacccttcccgagtcagagaagtataatcctggtccccaagacttcttgttaaaaatgccaggggtgaatgccaaaaactgccgctccttgatgcaccacgttaagaacatcgcagaattagcagccctgtcacaagacgagctcacgagtattctggggaatgctgcaaatgccaaacagctttatgatttcattcacacctcttttgcagaagtcgtatcaaaaggaaaagggaaaaagtgaacagtgatggctgttttcttatcccatgcctgtacttttcagcggctccttgccagacatcataggtcattattaattattggtttgctatttcattcttttccaatgctcttaatgattgtacggtggaccaga

SEQ ID NO: 154241 - DNA, 1110 bp, Artificial Sequence
  derived and/or modified sequence
agagcttccatggagtcagggcagccggctcgacggattgccatggcgccgctgctggagtacgagcgacagctggtgctggaactgctcgacactgacgggctagtagtgtgcgcccgcgggctcggcgcggaccggctcctctaccactttctccagctgcactgccacccagcctgcctggtgctggtgctcaacacgcagccggccgaggaggagtattttatcaatcagctgaagatagaaggagttgaacacctccctcgccgtgtaacaaatgaaatcacaagcaacagtcgctatgaagtttacacacaaggtggtgttatatttgcgacaagtaggatacttgtggttgacttcttgactgatagaataccttcagatttaattactggcatcttggtgtatagagcccacagaataatcgagtcttgtcaagaagcattcatcttgcgcctctttcgccagaaaaacaaacgtggttttattaaagctttcacagacaatgctgttgcctttgatactggtttttgtcatgtggaaagagtgatgagaaatctttttgtgaggaaactgtatctgtggccaaggttccatgtagcagtaaactcatttttagaacagcacaaacctgaagttgtagaaatccatgtttctatgacacctaccatgcttgctatacagactgctatactggacattttaaatgcatgtctaaaggaactaaaatgccataacccatcgcttgaagtggaagatttatctttagaaaatgctattggaaaaccttttgacaagacaatccgccattatctggatcctttgtggcaccagcttggagccaagactaaatccttagttcaggatttgaagatattacgaactttgctgcagtatctctctcagtatgattgtgtcacatttcttaatcttctggaatctctgagagcaacggaaaaagcttttggtcagaattcaggttggctgtttcttgactccagcacctcgatgtttataaatgctcgagcaagggtttatcatcttccagatgccaaaatgagtaaaaaagaaaaaatatctgaaaaaataaaaaaaaaaaaaaaaaaa

SEQ ID NO: 154242 - DNA, 2751 bp, Artificial Sequence
  derived and/or modified sequence
atggagagcggccagcctgcccggcgcatcgccatggcccccctgctggagtatgaaaggcagctggtgctggagctgctggacacagatggcctggtggtgtgtgcccggggcctgggcgctgaccggctgctgtaccacttcctgcagctgcactgccacccagcctgcctggtgctggtgctgaacacccagcctgctgaggaggagtacttcatcaaccagctgaagattgagggcgtggagcacctgccccggcgggtgaccaatgagatcaccagcaacagccgctatgaggtgtacacccagggcggcgtcatctttgccaccagccgcatcctggtggtggacttcctgacagaccgcatccccagcgacctgatcaccggcatcctggtgtaccgggcccaccgcatcatcgagagctgccaggaggccttcatcctgcggctcttccggcagaagaacaagaggggcttcatcaaggccttcacagacaatgctgtggcctttgacaccggcttctgccacgtggagcgggtgatgaggaacctgtttgtgaggaagctgtacctgtggccccgcttccacgtggccgtgaacagcttcctggagcagcacaagccagaggtggtggagatccacgtgtccatgacccccaccatgctggccatccagacagccatcctggacatcctgaatgcctgcctgaaggagctgaagtgccacaaccccagcctggaggtggaggacctgagcctggagaatgccatcggcaagccctttgacaagaccatccgccactacctggaccccctgtggcaccagctgggcgccaagaccaagagcctggtgcaggacctgaagatcctgcggaccctgctgcagtacctgagccagtatgactgtgtgaccttcctgaacctgctggagagcctgcgggccacagagaaggccttcggccagaacagcggctggctgttcctggacagcagcacctccatgttcatcaatgcccgggcccgggtgtaccacctgcctgatgccaagatgagcaagaaggagaagatcagcgagaagatggagatcaaggagggggaggagaccaagaaggagctggtgctggagagcaaccccaagtgggaggccctgacagaggtgctgaaggagattgaagctgagaacaaggagagcgaggccctgggcggccctggccaggtgctgatctgtgccagtgatgacaggacctgcagccagctgcgggactacatcaccctgggcgctgaggccttcctgctgcggctgtacaggaagacctttgagaaggacagcaaggccgaggaggtgtggatgaagttcaggaaggaggacagcagcaagaggatcaggaagagccacaagaggcccaaggacccccagaacaaggagcgggccagcaccaaggagaggaccctgaagaagaagaagaggaagctgaccctgacccagatggtgggcaagccagaggagctggaggaggagggagatgtggaggagggctacagaagagagatcagcagcagccctgagagctgcccagaggagatcaagcatgaggagtttgatgtgaacctgagcagtgatgctgccttcggcatcctgaaggagcccctgaccatcatccaccccctgctgggctgcagcgacccctatgccctgaccagggtgctgcacgaggtggagcccaggtatgtggtgctgtatgatgctgagctgacctttgtgcggcagctggagatctaccgggccagcaggcctgggaagcccctgcgggtgtacttcctgatctacggcggcagcacagaggagcagcgctacctgacagccctgaggaaggagaaggaggcctttgagaagctgatccgggagaaggcctccatggtggtgcctgaggagcgggagggcagagatgagaccaacctggacctggtgcggggcacagccagcgcagatgtgtccacagacaccaggaaggccggcggccaggagcagaatggcacccagcagagcatcgtggtggacatgagggagttccgctctgagctgcccagcctcatccacagaagaggcatcgacatcgagcctgtgaccctggaggtgggggactacatcctgaccccagagatgtgtgtggagaggaagagcatcagtgacctgattggcagcctgaacaacggccgcctgtacagccagtgcatctccatgagccgctactacaagaggcctgtgctgctgattgaatttgaccccagcaagcccttcagcctgaccagcagaggagccctcttccaggagatcagcagcaatgacatcagcagcaagctgaccctgctgaccctgcacttcccccggctgcgcatcctgtggtgccccagcccccacgccacagctgagctgtttgaggagctgaagcagagcaagccccagccagatgctgccacagccctggccatcacagctgacagcgagaccctgcctgagagcgagaagtacaaccctggcccccaggacttcctgctgaagatgcctggggtgaatgccaagaactgccgcagcctgatgcaccacgtgaagaacattgctgagctggccgccctgagccaggatgagctgaccagcatcctgggcaatgctgccaatgccaagcagctgtatgacttcatccacaccagctttgctgaggtggtgtccaagggcaagggcaagaagtag

SEQ ID NO: 154243 - DNA, 2715 bp, Artificial Sequence
  derived and/or modified sequence
atggcccccctgctggagtatgagcggcagctggtgctggagctgctggacacagatggcctggtggtgtgtgcccggggcctgggcgctgaccggctgctgtaccacttcctgcagctgcactgccacccagcctgcctggtgctggtgctgaacacccagcctgctgaggaggagtacttcatcaaccagctgaagattgaaggagtggagcacctgcccaggagagtgaccaatgagatcaccagcaacagccgctatgaggtgtacacccagggcggcgtcatctttgccaccagccgcatcctggtggtggacttcctgacagaccgcatccccagcgacctgatcaccggcatcctggtgtaccgggcccaccgcatcatcgagagctgccaggaggccttcatcctgcggctcttccggcagaagaacaagaggggcttcatcaaggccttcacagacaatgctgtggcctttgacaccggcttctgccacgtggagcgggtgatgaggaacctgtttgtgaggaagctgtacctgtggccccgcttccacgtggccgtgaacagcttcctggagcagcacaagccagaggtggtggagatccacgtgtccatgacccccaccatgctggccatccagacagccatcctggacatcctgaatgcctgcctgaaggagctgaagtgccacaaccccagcctggaggtggaggacctgagcctggagaatgccatcggcaagccctttgacaagaccatccgccactacctggaccccctgtggcaccagctgggcgccaagaccaagagcctggtgcaggacctgaagatcctgcggaccctgctgcagtacctgagccagtatgactgtgtgaccttcctgaacctgctggagagcctgcgggccacagagaaggccttcggccagaacagcggctggctgttcctggacagcagcacctccatgttcatcaatgcccgggcccgggtgtaccacctgcctgatgccaagatgagcaagaaggagaagatcagcgagaagatggagatcaaggagggggaggagaccaagaaggagctggtgctggagagcaaccccaagtgggaggccctgacagaggtgctgaaggagattgaagctgagaacaaggagagcgaggccctgggcggccctggccaggtgctgatctgtgccagtgatgacaggacctgcagccagctgcgggactacatcaccctgggcgctgaggccttcctgctgcggctgtacaggaagacctttgagaaggacagcaaggccgaggaggtgtggatgaagttcagaaaagaagacagcagcaagaggatcaggaagagccacaagaggcccaaggacccccagaacaaggagcgggccagcaccaaggagaggaccctgaagaagaagaagaggaagctgaccctgacccagatggtgggcaagccagaggagctggaggaggagggagatgtggaggagggctaccgccgggagatcagcagcagccctgagagctgcccagaggagatcaagcatgaggagtttgatgtgaacctgagcagtgatgctgccttcggcatcctgaaggagcccctgaccatcatccaccccctgctgggctgcagcgacccctatgccctgaccagggtgctgcacgaggtggagccccgctacgtggtgctgtatgatgctgagctgacctttgtgcggcagctggagatctaccgggccagcaggcctgggaagcccctgcgctacttcctgatctacggcggcagcacagaggagcagcgctacctgacagccctgaggaaggagaaggaggcctttgagaagctgatccgggagaaggcctccatggtggtgcctgaggagcgggagggcagagatgagaccaacctggacctggtgcggggcacagccagcgcagatgtgtccacagacaccaggaaggccggcggccaggagcagaatggcacccagcagagcatcgtggtggacatgagggagttccgctctgagctgcccagcctcatccacagaagaggcatcgacatcgagcctgtgaccctggaggtgggggactacatcctgaccccagagatgtgtgtggagaggaagagcatcagtgacctgattggcagcctgaacaacggccgcctgtacagccagtgcatctccatgagccgctactacaagaggcctgtgctgctgattgaatttgaccccagcaagcccttcagcctgaccagcagaggagccctcttccaggagatcagcagcaatgacatcagcagcaagctgaccctgctgaccctgcacttcccccggctgcgcatcctgtggtgccccagcccccacgccacagctgagctgtttgaggagctgaagcagagcaagccccagccagatgctgccacagccctggccatcacagctgacagcgagaccctgcctgagagcgagaagtacaaccctggcccccaggacttcctgctgaagatgcctggggtgaatgccaagaactgccgcagcctgatgcaccacgtgaagaacattgctgagctggccgccctgagccaggatgagctgaccagcatcctgggcaatgctgccaatgccaagcagctgtatgacttcatccacaccagctttgctgaggtggtgtccaagggcaagggcaagaagtag

SEQ ID NO: 154244 - DNA, 1071 bp, Artificial Sequence
  derived and/or modified sequence
atggcccccctgctggagtatgagcggcagctggtgctggagctgctggacacagatggcctggtggtgtgtgcccggggcctgggcgctgaccggctgctgtaccacttcctgcagctgcactgccacccagcctgcctggtgctggtgctgaacacccagcctgctgaggaggagtacttcatcaaccagctgaagattgaaggagtggagcacctgcccaggagagtgaccaatgagatcaccagcaacagccgctatgaggtgtacacccagggcggcgtcatctttgccaccagccgcatcctggtggtggacttcctgacagaccgcatccccagcgacctgatcaccggcatcctggtgtaccgggcccaccgcatcatcgagagctgccaggaggccttcatcctgcggctcttccggcagaagaacaagaggggcttcatcaaggccttcacagacaatgctgtggcctttgacaccggcttctgccacgtggagcgggtgatgaggaacctgtttgtgaggaagctgtacctgtggccccgcttccacgtggccgtgaacagcttcctggagcagcacaagccagaggtggtggagatccacgtgtccatgacccccaccatgctggccatccagacagccatcctggacatcctgaatgcctgcctgaaggagctgaagtgccacaaccccagcctggaggtggaggacctgagcctggagaatgccatcggcaagccctttgacaagaccatccgccactacctggaccccctgtggcaccagctgggcgccaagaccaagagcctggtgcaggacctgaagatcctgcggaccctgctgcagtacctgagccagtatgactgtgtgaccttcctgaacctgctggagagcctgcgggccacagagaaggccttcggccagaacagcggctggctgttcctggacagcagcacctccatgttcatcaatgcccgggcccgggtgtaccacctgcctgatgccaagatgagcaagaaggagaagatcagcgagaagatcaagaagaagaagaagaagtag

SEQ ID NO: 154245 - DNA, 2751 bp, Artificial Sequence
  derived and/or modified sequence
atggagagcggccagcccgcccggcggatcgccatggcccccctgctcgagtatgaacgtcagcttgtgctggagctgttagacacagatggacttgtcgtgtgcgcccgcgggctgggagccgatcgtctgctatatcacttcttgcagttacactgccatcctgcatgcctggtcctggtgctgaacacccagccagctgaagaggaatatttcatcaatcagctgaaaatcgagggcgtggaacatctgcccagaagggttaccaatgagatcacttccaactcaagatacgaggtgtatacccagggaggtgtgatcttcgcgacctcacgaatactggtcgtggatttcctcactgacaggattccatctgacctgatcacaggcattttagtctatcgtgctcaccggatcatagagtcgtgtcaggaagcctttatcctgagacttttccgtcagaaaaataagcggggatttatcaaagccttcacagataacgcagtagcattcgatacaggtttctgccacgtcgaacgggtgatgcggaatctgttcgtgcgcaagctatatctgtggccccggtttcacgtggcagtgaatagtttcctggaacagcacaaaccggaagtagtggagattcacgtgtcgatgacccccacaatgctggctattcagactgccatcctggacattctaaacgcctgcttaaaagagctcaagtgccacaatccctcattggaggtggaggacctctccttagaaaatgccattgggaagcctttcgacaagactatccgccattatctcgaccctttatggcaccagttgggggcaaagacaaaatccctcgtgcaggatctgaagatccttcggactctgttgcaatatctttcacagtatgactgtgtgaccttcctgaacctgctcgagtcacttagagcaaccgagaaggcattcgggcaaaatagtggctggctgtttcttgactcctccacgtccatgtttatcaatgcccgggcccgtgtctatcacttaccggatgcaaaaatgtctaagaaagagaagatttcagagaagatggagatcaaagagggtgaggagactaaaaaggagctcgtgctggaatcgaacccaaagtgggaggcgctgaccgaggtgcttaaggaaatcgaggcagaaaacaaggaatccgaagctctcgggggcccaggtcaggtgctgatatgcgccagtgacgatcggacatgtagccagttgcgcgattatattaccctgggtgcggaggcattcttgctccggttataccgtaagactttcgagaaggattccaaagctgaggaagtgtggatgaaattcaggaaagaggactcttccaaacgaatccgaaagtctcacaagcgccctaaagatccccagaacaaggaaagggcaagcaccaaagagaggacactgaaaaaaaagaagcggaaacttactttaacccagatggtgggaaaacctgaggagctggaggaggagggtgacgtagaagagggttataggcgcgaaatctcctccagtccggagtcctgccctgaagaaatcaaacatgaggagttcgatgtcaatctcagctcggatgcggcatttggaatcctcaaggagcctctgacaataatacatccgctgctcgggtgctcagatccatacgccctcactcgcgttcttcatgaagtagagccgaggtacgtcgtcttatacgatgccgagttgaccttcgtgcggcagctggagatctacagagctagccgcccagggaaacctctcagggtctattttctgatttacggggggtccactgaagaacaacgatacttgaccgcactccgaaaggaaaaagaagccttcgagaaactgatacgggagaaagctagcatggtcgttcctgaggagagggaaggccgggatgaaactaatcttgaccttgtccgcggcacagcttcagctgacgtgagcacagacactcgcaaggcgggtggtcaggagcaaaatggtacccagcagtccattgtggtggacatgcgggagttccgctcagagttgccctctctgatccatcgacgcggcattgatattgagccagttactctggaggttggagattatattctcaccccagaaatgtgtgtggagaggaagtccatttcagacctgatagggtccctcaacaatggacgcttatactcacagtgcatctctatgtctcgctattacaagcgcccggttctgctgatagaatttgacccttccaaaccattttctctcacaagcagaggcgcactctttcaagagatcagttccaatgacatttcgagtaagttgactctgctgaccctgcactttcctaggcttcgcattttgtggtgtccaagtcctcatgccactgcggagctgttcgaagagctgaagcaatcaaagccccagcccgacgctgccacagctctcgccattacagcggattcagagactctgcctgaatccgaaaagtacaaccccggcccccaagacttcctactcaaaatgcccggtgtaaatgctaagaactgccgctctttgatgcatcacgtcaaaaacattgctgagttggccgcactttcccaggatgaactcacatctatcctggggaatgcagctaatgcaaaacaattatatgacttcattcacactagcttcgccgaggtcgtctccaaagggaagggtaaaaaatag

SEQ ID NO: 154246 - DNA, 2715 bp, Artificial Sequence
  derived and/or modified sequence
atggcccccctgctggagtacgagcggcagctggtgctggagctgctggatacggatggactcgttgtctgcgcccgtgggctgggggccgacagactcctataccatttcctacagctccactgccatcccgcatgcctggtcctggtgttgaatacccagccagcagaggaggaatactttatcaaccagcttaagattgagggggtcgagcatttgccaagaagagtcacaaatgagatcacttcaaacagtagatacgaagtctacacccagggaggagttattttcgccacctctcgaatcctcgtagtggacttccttaccgatcgcatcccatcagacctcattactggaattctggtgtatcgcgcacatagaatcattgaatcttgccaagaagccttcattctccgcctgtttaggcaaaagaacaaaaggggtttcattaaagcttttactgataacgccgttgcttttgataccggtttctgccacgtcgagcgagtcatgcgaaatctgttcgtgcgtaaattatacctgtggccacgattccatgtggccgtcaatagtttcctggagcaacacaaaccagaagtggtggaaattcacgtgtccatgacaccaacaatgctcgctatccaaaccgccatcctggatatcttgaatgcatgcttgaaagagctgaagtgtcacaatcccagtcttgaggtggaagatctttctctcgagaatgccatcgggaagcctttcgataagacgataaggcactatctggacccgctgtggcaccagctcggagccaagacaaagtcactggtgcaggacctgaaaatactaagaacgctgctccaatacctgtcacagtacgactgcgtaacgtttttgaatctgctagagtctctgcgagccaccgaaaaagcgtttgggcaaaattcagggtggctgtttctcgactcctctacttctatgttcatcaatgcacgagccagggtctaccacttacctgatgccaagatgagcaagaaagagaagatatcggagaaaatggaaatcaaagagggtgaggaaaccaagaaagagctggtactggagagcaacccaaaatgggaagccctgacagaggtcctcaaggaaatagaggctgagaacaaggagagcgaagctctgggaggacccgggcaggtcctgatttgcgcctccgacgatcgaacctgctcccagctccgcgactatataactctgggcgccgaggctttcctattgagactgtataggaagacattcgaaaaggatagcaaggctgaggaggtgtggatgaagttccgaaaagaggattcgtctaaacggatccggaagagtcacaaacgcccaaaagatcctcagaacaaagaacgggcctcaaccaaagagcgtaccctcaaaaagaagaaacgtaagctgacactcacacagatggttggcaaacccgaggagttggaggaagagggggacgttgaagaggggtatcgtcgcgagatctcgtcatctcctgagagctgtcctgaggagatcaaacatgaggaattcgatgtcaacctgagttctgatgccgccttcggtatattaaaggaaccattgacaataattcaccccctgctaggctgctccgacccatacgccctgacaagagtgcttcacgaagtcgagcctagatacgtggtgctctatgacgctgagctgacgtttgtgaggcagctggaaatctacagagccagtcggcctgggaagcctctgcgctacttcctgatatatggaggctcaacagaggaacagcgttacctcactgctctccgcaaagaaaaagaggctttcgaaaagctcatccgagagaaggccagcatggtggtgccagaggagagagaaggacgtgatgaaactaatttagatttagtgagaggcactgcttccgccgacgtttcgactgataccagaaaagctggcggccaggagcagaacggcacccaacagtccatagttgtcgatatgagggagtttagaagcgaactgccttctctcattcaccgtcggggcatcgacatagaaccagtgactctagaggttggagactatatcctgactccagagatgtgcgttgagcgcaaaagcatctctgacctcattggctccctgaataatggtcgactgtatagccagtgcatcagtatgagcagatactataagcggccagttttgctgatcgagttcgacccgagtaagccattctcgctgacaagccgaggcgcgttatttcaggagataagctcaaatgacatcagctccaaactgactctgctgacactgcattttcctcggctgcgcatactgtggtgcccatcaccccacgcaactgctgaacttttcgaagaactaaagcaatctaaacctcagcccgacgcagctaccgccctggccatcacagctgattctgaaacactacctgaatccgagaagtataatcctggtccccaggacttcctactgaagatgcccggcgtgaacgcgaagaactgtcggtctctcatgcatcacgtgaaaaacatcgctgagttggccgccctcagtcaagatgaactaacttccatcttggggaatgcggccaacgctaagcagttatacgatttcatccacacatcattcgcagaggtcgtatctaagggtaaagggaagaaatag

SEQ ID NO: 154247 - DNA, 1071 bp, Artificial Sequence
  derived and/or modified sequence
atggcccccctgctggagtacgagcggcagctggtgctggagctgctcgatactgatgggttggtcgtctgcgcacgcgggctgggtgcagacagactgttgtaccatttcttacagctgcattgtcaccctgcgtgtttggttctggtgctgaatacccagccagcagaggaggagtatttcattaaccaactcaaaatagaaggcgtggagcatctgccccgccgggtcaccaatgagatcacaagcaatagccggtacgaggtgtacacacagggcggtgtcatatttgcgacgtcgagaatcctggtggtggatttcctcacagataggataccatcagacctcataaccggaatcctcgtttatcgcgcgcacagaatcattgagagctgccaggaggcttttatccttcggctatttagacaaaagaataagagaggatttattaaggcttttactgacaatgccgtggcctttgatacagggttttgtcacgtggagcgcgtgatgaggaatctgtttgtgaggaaactgtacctttggcctaggttccatgtggctgttaattcattcctggaacagcataagccggaggtggtagaaatccatgtctcgatgactcctactatgctcgccatccagacagctattttagacatactcaacgcctgccttaaagaactgaagtgtcataacccctccctggaagtagaagacctgtctctcgaaaatgcaattggcaagccttttgacaagacaatcaggcattaccttgacccactttggcaccagttaggggccaagaccaagagtttggtacaggatctaaagatcctgaggaccttactccagtatctctctcaatacgattgtgttacttttctgaatttactggagtctcttagggccactgagaaagcctttgggcagaactctggatggctgttcctcgactcatcaaccagcatgtttattaatgcccgcgcacgcgtctaccatctccctgacgcaaagatgtccaagaaggagaaaatctcagaaaaaattaagaagaagaagaaaaagtag

SEQ ID NO: 154248 - DNA, 2751 bp, Artificial Sequence
  derived and/or modified sequence
atggagtctggacaaccggcacgacgtatcgctatggcaccattactggagtatgaacggcagctcgttctcgagctcttggacacagacggactggtggtctgcgctcgagggctcggagctgaccgccttttataccacttcctgcagctgcactgccaccccgcttgtctggtattggtccttaatacccagccagccgaagaggagtattttatcaatcagctgaaaattgagggtgtggagcatttgcccaggcgggttaccaacgagattacttcaaattctcgatacgaggtgtatacccagggcggagtgatattcgctacctcacgcattttagtggttgatttcctgacagatcgcatcccaagtgatctgatcactggcattctcgtctatagggcccacagaataatcgagagctgtcaagaggccttcattttacgcttgtttcgacagaagaataaaagaggatttatcaaagcatttaccgacaacgctgtagcgttcgatactggattttgccacgtcgagcgtgtcatgaggaatctcttcgtgcggaaattgtacttgtggcctcgattccatgtggctgtcaattctttcctagagcagcacaagcccgaagttgtcgagattcatgtgagcatgaccccgactatgctcgctatacaaacagccatactggatattctgaatgcttgcttaaaagaactcaagtgtcacaacccttccctggaggtagaggatctgtcactagaaaacgctattggaaagccattcgacaagacaatccggcactatcttgaccccctctggcaccagctcggggcaaagaccaagagtctggtgcaggacctgaagatcttgaggacactcttgcaatatctgtcacagtatgattgcgttactttcctcaatctcctggaaagcctacgtgccactgagaaggcgttcggccagaactctgggtggttgttcctcgattccagcacttctatgtttataaacgcacgagcacgggtgtaccacctgccagacgccaaaatgtcaaagaaggagaaaattagcgagaagatggagattaaagagggcgaggagacaaagaaggaattagtgcttgagtcgaacccgaaatgggaggcattgactgaggtgctaaaggaaattgaagccgagaataaggagtccgaggcactggggggacccggtcaggtcctaatctgtgcctccgacgaccggacctgtagccaattgcgagattatatcacactcggagccgaagcatttcttcttagactctatcggaaaactttcgaaaaagattccaaagcagaagaggtgtggatgaaattccggaaagaggattcttccaaaagaatacgaaaaagtcacaagcgaccaaaagacccgcagaacaaggagcgcgcaagtaccaaggagcgcacattgaagaagaaaaaaaggaagctgacactgactcaaatggttggaaagccggaggagttggaagaagagggcgatgtagaagagggctaccggcgtgagataagctcctcccctgagtcttgccctgaagagatcaaacatgaggagtttgatgtgaatctgtcttctgatgctgcgtttggcatactaaaagagcccctcactatcatacaccccctcctgggatgttccgatccttacgccctgacccgcgttctccacgaagttgagcctagatatgtggtcttgtatgacgccgaactaacctttgtcagacaactcgagatctatcgggcttcccggccaggaaagccattgagggtctactttctcatatacgggggtagcacagaggaacagcgatatcttacagcattgcggaaagagaaagaggcatttgagaaattaattcgagagaaagcctccatggtagtgcccgaggagcgggaaggtcgggacgagacaaacctcgacctggtacgcggaacagctagcgccgacgtgagcactgacacccgaaaggctggcggacaggaacagaatgggactcaacaatctatcgttgttgatatgcgggagtttcgaagtgaactgccctccctgatccatcgcagggggatcgacatagaacccgtgaccctggaggtgggagactatattctgacaccagaaatgtgcgtcgaacggaaaagtatctccgacctgattggcagtctgaataatggaagattgtattcacagtgcattagtatgagtcgatattacaaacgccctgtcttgctcatcgaatttgacccctccaagcctttctcactaacatcgcggggagccctgttccaagagatcagtagtaatgacatatctagtaagctcacactgctgacccttcactttccgcgacttaggatcttgtggtgcccctcccctcacgcaacggcggagttatttgaagaactgaaacaatccaagccccaacctgacgccgctactgcccttgccatcacagcagattctgaaaccctgccggaatcggagaaatataatcccggtccacaggactttcttctcaagatgcctggagttaacgcgaagaactgccgctccttgatgcaccacgtaaaaaatatagctgaactcgctgccctttcccaagatgagttgacttccattcttggcaacgcggctaatgcaaaacagctgtacgacttcattcacactagtttcgccgaggtggtctctaagggcaagggaaagaaatag

SEQ ID NO: 154249 - DNA, 2715 bp, Artificial Sequence
  derived and/or modified sequence
atggccccactcctggagtacgagcgccagctcgtacttgagctcctcgatactgatggcttggtggtgtgcgccagagggctgggcgctgaccgcctgctgtaccacttcctgcagctacattgccatcctgcctgtcttgtgctcgtgcttaatacgcagccagccgaggaagaatactttatcaatcagctgaagattgagggtgtcgaacacctacctaggcgtgtaaccaatgaaatcacgagtaactcccgatatgaagtctatacacaggggggtgtgatttttgcgacctccaggattctggtggtcgacttccttaccgacaggatcccaagcgacctgattacagggatcctcgtctaccgcgcacacaggattatcgaaagttgtcaggaagcattcattctccggctgtttagacaaaagaacaagcggggattcattaaggcatttaccgataacgctgttgcattcgataccggattttgccacgtcgaacgagtaatgagaaacctgttcgtccgcaaactgtacttgtggccacgatttcatgtggcagtgaatagtttccttgaacagcacaagccagaggtcgtggagattcatgtgtcaatgacacccactatgctggccattcagacagctatcttggatattctgaatgcttgcctcaaggagctcaagtgccacaacccatccttggaagtcgaggatctgagtctggagaacgccattgggaagccattcgataagaccatcagacattacctggaccctctctggcatcaattgggtgctaagacaaagtccttggtccaggatctgaaaatccttaggacactgctccagtacctctcccaatacgactgcgtcacctttctgaatctcctggagagcctgagggctacagagaaggctttcgggcagaactcagggtggttgttcctagactcatctacatccatgttcataaatgctcgcgcaagggtttaccatctccccgacgccaaaatgtctaagaaagaaaaaataagcgagaagatggaaattaaggagggagaggagactaaaaaggagttggtgctggaatctaacccaaagtgggaggcactgacggaagtacttaaggagattgaagccgaaaacaaagagagtgaggccctgggcggtccaggtcaggtactgatctgtgcatcagacgacagaacatgttcccagctgcgggattacataactttgggcgctgaggctttcctgctgagactgtacaggaagacatttgaaaaggatagcaaagctgaggaggtgtggatgaagtttcgcaaggaagacagcagtaaacggatcaggaaaagtcataagcgcccaaaggacccacaaaacaaagaacgggcaagcaccaaggagagaaccctgaaaaagaaaaaaagaaagctcacactaactcaaatggtgggaaaacccgaagagttagaagaggagggtgatgttgaggaaggatatagacgggaaatctctagcagccccgagagctgtcccgaggagatcaagcacgaggaatttgacgtgaatctgagcagtgacgccgctttcggcattctgaaagaaccactgaccatcatccacccactactgggctgctcggacccctacgcactgacaagggtgttacacgaggtggaacccaggtacgtcgtgctgtatgacgcagaactcaccttcgtcaggcaactcgagatttaccgagcttctcgacccggaaagcccctgcgatactttctgatctacggcggatccactgaggagcaaaggtacttgacagccctccgaaaggaaaaagaagcatttgagaaattgatccgggagaaagcaagcatggttgtgcctgaggagagggaaggcagggacgaaacaaatctcgatctggtaagaggaacagcaagcgcagacgtttcaacagacacgcgaaaagccggaggccaggagcagaacggtacccagcaatctattgtagttgatatgagagaattcagaagcgaacttccttccctcatccatcggcgtggtattgacatagaaccggtgacattggaagtcggggattatatcctgacacccgagatgtgcgttgaacggaagtcaattagtgacctgattggcagcctaaacaatggtcggctctactctcagtgtatcagcatgtcgcgttactacaaacgaccagtgttgcttattgagttcgacccaagcaaacctttcagcttgacaagtcgaggcgctttatttcaggagatttcatctaacgacatttcctctaagctgacactgctgaccctccactttcctagactcagaattctttggtgtccaagcccacatgccacagccgaactgttcgaggaattgaagcagtctaaaccgcagcccgatgcagctactgccctcgctatcacagccgattctgagacgcttcctgagtcagaaaagtacaacccaggccctcaggacttcctgcttaaaatgcccggagtgaatgctaaaaattgtaggtctctcatgcatcatgtcaagaacatcgcagaactggctgcactgtctcaggacgaacttaccagcatcctggggaacgccgcaaacgctaagcagctttatgacttcatccatacctctttcgccgaagtcgttagcaagggcaaaggcaaaaaatag

SEQ ID NO: 154250 - DNA, 1071 bp, Artificial Sequence
  derived and/or modified sequence
atggcgcctctccttgaatatgagcgacagctggtgctggaactccttgatacagacggactggtcgtctgcgcaaggggccttggggcagaccggcttctttatcactttcttcagctccattgtcacccagcttgcctcgtgctcgtgctaaatactcagccagccgaagaagagtattttattaaccagttgaagattgagggtgttgagcacttacctaggcgtgtcaccaacgaaattactagcaacagtaggtatgaggtgtatacccagggaggcgtgatcttcgcaacctcccggattcttgtcgtagacttcttaacggataggattcccagtgatcttattacaggaattctggtgtacagggcacaccgaattatcgagtcctgtcaggaggcctttattttgcgtctgttcagacagaagaataaacggggattcattaaggcattcactgacaacgcggtagcattcgatactggattctgccacgttgaacgggtgatgaggaatctctttgtcagaaaactctacctctggccccgattccacgttgctgtgaacagtttcctggagcagcacaagccagaagtggttgagatacacgtatcaatgacccctaccatgcttgcgatccagactgctatcttggacatcctgaacgcctgcctgaaggaactgaaatgtcataacccatccctagaggtggaggatctttctctcgaaaacgccatcggtaagcccttcgacaagacaatccgtcactatcttgatccactgtggcatcaattgggcgctaagacaaagagccttgtccaggatcttaagattctccgaacactcctgcagtatctcagccagtatgattgcgtgacctttttgaatcttcttgagtcattaagggcgactgagaaagccttcggccaaaactcaggttggctctttctcgactcctctaccagcatgtttatcaacgctcgggcaagggtttatcacctgccagatgccaaaatgtcaaaaaaggaaaaaataagcgagaagattaaaaaaaaaaagaaaaagtag

SEQ ID NO: 154251 - protein, 441 aa, Artificial Sequence
  derived and/or modified sequence
MKAAVDLKPTLTIIKTEKVDLELFPSPDMECADVPLLTPSSKEMMSQALKATFSGFTKEQQRLGIPKDPRQWTETHVRDWVMWAVNEFSLKGVDFQKFCMNGAALCALGKDCFLELAPDFVGDILWEHLEILQKEDVKPYQVNGVNPAYPESRYTSDYFISYGIEHAQCVPPSEFSEPSFITESYQTLHPISSEELLSLKYENDYPSVILRDPLQTDTLQNDYFAIKQEVVTPDNMCMGRTSRGKLGGQDSFESIESYDSCDRLTQSWSSQSSFNSLQRVPSYDSFDSEDYPAALPNHKPKGTFKDYVRDRADLNKDKPVIPAAALAGYTGSGPIQLWQFLLELLTDKSCQSFISWTGDGWEFKLSDPDEVARRWGKRKNKPKMNYEKLSRGLRYYYDKNIIHKTAGKRYVYRFVCDLQSLLGYTPEELHAMLDVKPDADE

SEQ ID NO: 154252 - protein, 272 aa, Artificial Sequence
  derived and/or modified sequence
MKAAVDLKPTLTIIKTEKVDLELFPSPDMECADVPLLTPSSKEMMSQALKATFSGFTKEQQRLGIPKDPRQWTETHVRDWVMWAVNEFSLKGVDFQKFCMNGAALCALGKDCFLELAPDFVGDILWEHLEILQKEDVKPYQVNGVNPAYPESRYTSDYFISYGIEHAQCVPPSEFSEPSFITESYQTLHPISSEELLSLKYENDYPSVILRDPLQTDTLQNDYFAIKQEVVTPDNMCMGRTSRGKLGGQDSFESIESYDSCGQEMGKEEKQT

SEQ ID NO: 154253 - DNA, 5242 bp, Artificial Sequence
  derived and/or modified sequence
gagatcgagagcgaacgaggcagccgccggcggagaggagggagcgggcgagggccgggcaggaggagcgggcgcggcgcgggcgaggctgggacccgagcgcgctcacttcgccgcaaagtgccaacttcccctggagtgccgggcgcgcaccgtccgggcgcgggggaaagaaaggcagcgggaatttgagatttttgggaagaaagtcggatttcccccgtccccttccccctgttactaatcctcattaaaaagaaaaacaacagtaactgcaaacttgctaccatcccgtacgtcccccactcctggcaccatgaaggcggccgtcgatctcaagccgactctcaccatcatcaagacggaaaaagtcgatctggagcttttcccctccccggatatggaatgtgcagatgtcccactattaactccaagcagcaaagaaatgatgtctcaagcattaaaagctactttcagtggtttcactaaagaacagcaacgactggggatcccaaaagacccccggcagtggacagaaacccatgttcgggactgggtgatgtgggctgtgaatgaattcagcctgaaaggtgtagacttccagaagttctgtatgaatggagcagccctctgcgccctgggtaaagactgctttctcgagctggccccagactttgttggggacatcttatgggaacatctagagatcctgcagaaagaggatgtgaaaccatatcaagttaatggagtcaacccagcctatccagaatcccgctatacctcggattacttcattagctatggtattgagcatgcccagtgtgttccaccatcggagttctcagagcccagcttcatcacagagtcctatcagacgctccatcccatcagctcggaagagctcctctccctcaagtatgagaatgactacccctcggtcattctccgagaccctctccagacagacaccttgcagaatgactactttgctatcaaacaagaagtcgtcaccccagacaacatgtgcatggggaggaccagtcgtggtaaactcgggggccaggactcttttgaaagcatagagagctacgatagttgtgatcgcctcacccagtcctggagcagccagtcatctttcaacagcctgcagcgtgttccctcctatgacagcttcgactcagaggactatccggctgccctgcccaaccacaagcccaagggcaccttcaaggactatgtgcgggaccgtgctgacctcaataaggacaagcctgtcattcctgctgctgccctagctggctacacaggcagtggaccaatccagctatggcagtttcttctggaattactcactgataaatcctgtcagtcttttatcagctggacaggagatggctgggaattcaaactttctgacccagatgaggtggccaggagatggggaaagaggaaaaacaaacctaagatgaattatgagaaactgagccgtggcctacgctactattacgacaaaaacatcatccacaagacagcggggaaacgctacgtgtaccgctttgtgtgtgacctgcagagcctgctggggtacacccctgaggagctgcacgccatgctggacgtcaagccagatgccgacgagtgatggcactgaaggggctggggaaaccctgctgagaccttccaaggacagccgtgttggttggactctgaattttgaattgttattctattttttattttccagaactcattttttaccttcaggggtgggagctaagtcagttgcagctgtaatcaattgtgcgcagttgggaaaggaaagccaggacttgtggggtgggtgggaccagaaattcttgagcaaattttcaggagagggagaagggccttctcagaagcttgaaggctctggcttaacagagaaagagactaatgtgtccaatcatttttaaaaatcatccatgaaaaagtgtcttgagttgtggacccattagcaagtgacattgtcacatcagaactcatgaaactgatgtaaggcaattaatttgcttctgtttttaggtctgggagggcaaaaaagaggtgggtgggatgaaacatgttttggggggggatgcactgaaaatctgagaactatttacctatcactctagttttgaagcaaagatggacttcagtggggaggggccaaaaccgttgttgtgttaaaatttattttattaaattttgtgccagtattttttttcttaaaaatcgtcttaagctctaaggtggtctcagtattgcaatatcatgtaagtttgtttttatttgccggctgaggattctgtcacaatgaaagaaaactgtttatatagaccccattggaaaagcaaaacgctctcactgagatcagggatcccaaattcatgggacttatataagaaggacaattaatgctgatttgggtacaggggaattatgtgtgtgaatgtcatctacaattaaaaaaaattagcacatccctttacttacttgttatcagtggattctcggggtttggacttaatgttgagctaagaagcattaagtctttgaactgaatgtattttgcatccctggttttggacgacagtaaacgtaggagcactgttgaagtcctggaagggagatcgaaggaggaagattgacttggttctttcttagtcctatatctgtagcatagatgacttggaataaaagctgtatgcatgggcattacccctcaggtcctaagaaataagtcctgaatgcatgtcgttccaaactaacactctgtaatttttcttttatgtcttattttccaagagtcctccattttttgcaccccctcaccgccaactctgttattcagtagagagaagtgtacggctttctgattggtgagtgaaaaagtaacttgagacacgacctaagttgaagagtttagacttgctgagttttagaagtgatggaaattaagagagcatttcaataaaatgtgacttggctgtctttggaagagaagtgcaaggctttcctttgaagaatttaaattagtccggtaggatgtcaggtgagactgtgtatgcaaaatgaatggcacaggtgatgccagggcctcttgcttgggtctgatgtcttggcacagggtaagtgaaggttaattccagaagagaggaatgacttgaaggcaaaggaaactaaggaaggaggttcagtgaggaaaataaggttgtccatgagatttgaatagatttttagttcccccaaggtttaaatacaaacatagtcaagcaaggtagtcatctttctgctggttgtgagggggaatctgaaaatggagttttagaggaaaagtcaacatctaactagtgaggaaaagtgcctaatacaattagaatctccctcactctatagttgcccagttgaaaggataaggaggaggggtggcttttatggacttccatgagagaaggaaagaaatatttcaggtaagcttctcagggctggccctttttgggatttggatgagaaattggaagtactaactactttctagcatatctttaagaaaattgattgttatttactcccagatcctcttgcagacccagaattatcaggaacatagctctgtgattcatgagtgtccccatactgatgaattggagcatccatatggaaagcaaaggcagaattatcccagctgtattattttgatcttttggatgcaggtgccttaatgaagctctcaaaatattttaggagctgctcagggagtgttgggtggaactgtttggactacattgttttctcttagattatgtgatttttgttgggcactggcaaaaggtgtgtgtgtgaatgtgtgcatgtgtgtgaatgttgtgtgtgtgtgtgtgtgtgtgtgtgtgtgtgtgtgtgtgtgtgtttgcagacatgcaaaactgcagctgaaataataccttagatttctaggtaagtctttccacatttcaataatgggtaagagtagaaccagggccgggtatcaattattgcttgctgtttgcaaccaggcataaaatcactttctcaaatcatccaccgttcctattaaatttatgccggaaactctccttctgtgagtataactcctgcagttcctatagcagataagatataagaaagtgcctcctagtgctcctccgcccgcttgtttgctaaaattccctttctctctaagtccaccattttcaagatttgtagatagtgtattagttaagacagctttgtcgatctggccagatgttttttctcctttgtccaaaggccagagaccatcccaggaagagtggtgggtggtttatacactggaaatgttgcgtttatgctttttaaaaacacacgttaacttcagaggaaggatgggcaaatctggtctagctgggtgaaacccttattttcccagagatgccttaacctttgttggttttggctttagggttcagagtcacttttgttcccttctccattctggagagggacttcccctacatagagccctgatttttgtggctgtggggattggaggtagcattcaaagatcagatgtgcttttcctcactttggagatgaacactctgggttttacagcattaacctgcctaaccttcatggtgagaaatacaccatctctcttctagtcatgctgtgcatgccgcttactctgttggggtctatataaatttgttgaactcttacctacattccaaagaagtttcaaggaaccataaatatatgtatacatatacatatataaaatatatatattaaaataaaattatcaggaatactgcctcagttattgaacttttttttttaagaatactttttttttaagctgagaagtatagggatgaaaaagatgttatattgtgtttgactattttccaacttgtattttcatataatttatattttttaaaagctgaaaatttagaagcaagatgaaaaaaaggaaaagcaggtgctttttaaaaatcagaactgaggtagcttagagatgtagcgatgtaagtgtcgatgtttttttaaaaaaaaatgcaaaaaaattcttatggcggagttttttgtttgtttattttagtagctgatgctggcacatcattttgctggagagttttttatatactgtagcctgatttcatattgtattttaaactgtgtgaaattaaaaacaaagaatttcattcataatgct

SEQ ID NO: 154254 - DNA, 1326 bp, Artificial Sequence
  derived and/or modified sequence
atgaaggccgccgtggacctgaagcccaccctgaccatcatcaagaccgagaaggtggacctggagctgttccccagccccgacatggagtgcgccgacgtgcccctgctgacccccagcagcaaggagatgatgagccaggccctgaaggccaccttcagcggcttcaccaaggagcagcagagactgggcatccccaaggaccccagacagtggaccgagacccacgtgagagactgggtgatgtgggccgtgaacgagttcagcctgaagggcgtggacttccagaagttctgcatgaacggcgccgccctgtgcgccctgggcaaggactgcttcctggagctggcccccgacttcgtgggcgacatcctgtgggagcacctggagatcctgcagaaggaggacgtgaagccctaccaggtgaacggcgtgaaccccgcctaccccgagagcagatacaccagcgactacttcatcagctacggcatcgagcacgcccagtgcgtgccccccagcgagttcagcgagcccagcttcatcaccgagagctaccagaccctgcaccccatcagcagcgaggagctgctgagcctgaagtacgagaacgactaccccagcgtgatcctgagagaccccctgcagaccgacaccctgcagaacgactacttcgccatcaagcaggaggtggtgacccccgacaacatgtgcatgggcagaaccagcagaggcaagctgggcggccaggacagcttcgagagcatcgagagctacgacagctgcgacagactgacccagagctggagcagccagagcagcttcaacagcctgcagagagtgcccagctacgacagcttcgacagcgaggactaccccgccgccctgcccaaccacaagcccaagggcaccttcaaggactacgtgagagacagagccgacctgaacaaggacaagcccgtgatccccgccgccgccctggccggctacaccggcagcggccccatccagctgtggcagttcctgctggagctgctgaccgacaagagctgccagagcttcatcagctggaccggcgacggctgggagttcaagctgagcgaccccgacgaggtggccagaagatggggcaagagaaagaacaagcccaagatgaactacgagaagctgagcagaggcctgagatactactacgacaagaacatcatccacaagaccgccggcaagagatacgtgtacagattcgtgtgcgacctgcagagcctgctgggctacacccccgaggagctgcacgccatgctggacgtgaagcccgacgccgacgagtag

SEQ ID NO: 154255 - DNA, 819 bp, Artificial Sequence
  derived and/or modified sequence
atgaaggccgccgtggacctgaagcccaccctgaccatcatcaagaccgagaaggtggacctggagctgttccccagccccgacatggagtgcgccgacgtgcccctgctgacccccagcagcaaggagatgatgagccaggccctgaaggccaccttcagcggcttcaccaaggagcagcagagactgggcatccccaaggaccccagacagtggaccgagacccacgtgagagactgggtgatgtgggccgtgaacgagttcagcctgaagggcgtggacttccagaagttctgcatgaacggcgccgccctgtgcgccctgggcaaggactgcttcctggagctggcccccgacttcgtgggcgacatcctgtgggagcacctggagatcctgcagaaggaggacgtgaagccctaccaggtgaacggcgtgaaccccgcctaccccgagagcagatacaccagcgactacttcatcagctacggcatcgagcacgcccagtgcgtgccccccagcgagttcagcgagcccagcttcatcaccgagagctaccagaccctgcaccccatcagcagcgaggagctgctgagcctgaagtacgagaacgactaccccagcgtgatcctgagagaccccctgcagaccgacaccctgcagaacgactacttcgccatcaagcaggaggtggtgacccccgacaacatgtgcatgggcagaaccagcagaggcaagctgggcggccaggacagcttcgagagcatcgagagctacgacagctgcggccaggagatgggcaaggaggagaagcagacctag

SEQ ID NO: 154256 - DNA, 1326 bp, Artificial Sequence
  derived and/or modified sequence
atgaaggcagccgtcgatctcaaaccgaccctgactatcatcaagacagaaaaggttgacctggagctctttccctctcccgatatggagtgcgccgatgtgccacttctcacaccgagtagtaaggagatgatgagccaggcactgaaagctaccttttccggctttaccaaagagcagcagaggctaggtataccaaaggaccctcgacagtggactgagacgcacgtgcgggactgggtgatgtgggccgtcaacgagttctcactgaagggcgttgattttcagaaattttgcatgaacggcgcggccctttgtgcccttggtaaggactgtttcctggaactcgcccccgacttcgttggcgacatcctctgggaacatctggagatcttgcagaaagaggacgtgaagccgtatcaagtgaatggtgtgaaccctgcctacccagaatctcgttacacatccgattatttcatcagttacggcatcgagcacgctcaatgtgtcccaccatccgagttctctgaaccttcttttattacagagtcatatcagaccctccatcctatctcctcggaagagctgctaagcctgaagtacgagaacgactacccatctgtcatactccgggatccattgcagaccgacacccttcagaatgactacttcgctatcaaacaggaagtcgtcacccccgacaacatgtgtatggggcgcacgagcagaggcaaacttggtgggcaggattcttttgagagtatcgaatcatatgattcatgtgatcgtctcactcaaagttggtcttctcagagtagctttaactctttgcaacgcgtgcctagttatgactccttcgactccgaagattaccctgctgccctgccgaaccataagcctaaggggactttcaaggactacgtaagggaccgggccgacctgaataaagacaaacctgtgatacccgcggctgccctcgccggatacacaggctcaggcccgatccagctctggcagttcttactagaattgttgacagacaagagctgccaatcgttcatctcatggaccggagatggctgggagttcaagctgagcgatccggacgaggtagcccgtcgctggggtaaaaggaaaaacaaacccaagatgaactatgagaaactctccaggggcttacggtactattacgacaaaaacatcattcacaaaacagcaggtaaacgctatgtgtatcggtttgtgtgcgatctccagtctctgctaggctataccccagaggaattacatgcgatgctggacgtgaagcctgacgcggacgaatag

SEQ ID NO: 154257 - DNA, 819 bp, Artificial Sequence
  derived and/or modified sequence
atgaaggccgccgtggacctcaagcctacattgaccatcattaagactgaaaaggtcgatctggagctctttccttccccagacatggagtgtgccgacgtgccgctcctcaccccatcctccaaagagatgatgagtcaggcgctcaaggcgacgttttccggctttaccaaagaacagcagcgtttgggcatccccaaagacccccgccagtggaccgagactcacgtgcgggattgggtcatgtgggcagtcaacgagttctctcttaaaggagtcgactttcagaagttctgtatgaacggtgctgcattgtgtgcgctgggtaaggattgttttcttgaacttgccccagatttcgtaggtgacatactgtgggagcacctggaaatactccagaaagaggacgtaaagccctaccaagtaaatggggttaatcctgcctatccagagagtcgctacacatctgactattttattagctatggcatcgaacatgctcagtgtgttccccccagtgagttctccgaaccctcatttatcaccgaatcttatcaaaccctccacccgatttcctctgaggaattactctccctgaaatatgaaaacgattaccctagtgtcattctgcgcgaccccttacaaacagacaccctgcagaatgactactttgcaattaaacaagaggttgtaacgcctgacaatatgtgcatggggcgaactagtcgcggcaagttgggaggtcaggacagtttcgaatccatcgaatcatatgattcctgcggccaggagatggggaaagaagagaaacaaacatag

SEQ ID NO: 154258 - DNA, 1326 bp, Artificial Sequence
  derived and/or modified sequence
atgaaggctgctgtggacctgaagcccaccctgaccatcatcaagacagagaaggtggacctggagctgttccccagcccagacatggagtgtgctgatgtgcccctgctgacccccagcagcaaggagatgatgagccaggccctgaaggccaccttcagcggcttcaccaaggagcagcagaggctgggcatccccaaggacccccggcagtggacagagacccacgtgcgggactgggtgatgtgggccgtgaatgagttcagcctgaagggcgtggacttccagaagttctgcatgaatggagctgccctgtgtgccctgggcaaggactgcttcctggagctggccccagactttgtgggggacatcctgtgggagcacctggagatcctgcagaaggaggatgtgaagccctaccaggtgaatggagtgaacccagcctacccagagagccgctacaccagtgactacttcatctcctatggcatcgagcacgcccagtgtgtgcccccatctgagttcagcgagcccagcttcatcacagagagctaccagaccctgcaccccatcagcagcgaggagctgctgagcctgaagtatgaaaatgactaccccagcgtcatcctgcgggaccccctgcagacagacaccctgcagaatgactactttgccatcaagcaggaggtggtgaccccagacaacatgtgcatgggccgcaccagccggggcaagctgggcggccaggacagctttgagagcattgagagctatgacagctgtgaccggctgacccagagctggagcagccagagcagcttcaacagcctgcagagggtgcccagctatgacagctttgacagcgaggactacccagctgccctgcccaaccacaagcccaagggcaccttcaaggactatgtgcgggacagagctgacctgaacaaggacaagcctgtgatcccagctgctgccctggccggctacacaggcagcggccccatccagctgtggcagttcctgctggagctgctgacagacaagagctgccagagcttcatctcctggacaggagatggctgggagttcaagctgagtgaccctgatgaggtggcccggcgctggggcaagaggaagaacaagcccaagatgaactatgagaagctgagccggggcctgcgctactactatgacaagaacatcatccacaagacagctgggaagcgctacgtgtacagatttgtgtgtgacctgcagagcctgctgggctacaccccagaggagctgcacgccatgctggatgtgaagccagatgctgatgaatag

SEQ ID NO: 154259 - DNA, 819 bp, Artificial Sequence
  derived and/or modified sequence
atgaaggctgctgtggacctgaagcccaccctgaccatcatcaagacagagaaggtggacctggagctgttccccagcccagacatggagtgtgctgatgtgcccctgctgacccccagcagcaaggagatgatgagccaggccctgaaggccaccttcagcggcttcaccaaggagcagcagaggctgggcatccccaaggacccccggcagtggacagagacccacgtgcgggactgggtgatgtgggccgtgaatgagttcagcctgaagggcgtggacttccagaagttctgcatgaatggagctgccctgtgtgccctgggcaaggactgcttcctggagctggccccagactttgtgggggacatcctgtgggagcacctggagatcctgcagaaggaggatgtgaagccctaccaggtgaatggagtgaacccagcctacccagagagccgctacaccagtgactacttcatctcctatggcatcgagcacgcccagtgtgtgcccccatctgagttcagcgagcccagcttcatcacagagagctaccagaccctgcaccccatcagcagcgaggagctgctgagcctgaagtatgaaaatgactaccccagcgtcatcctgcgggaccccctgcagacagacaccctgcagaatgactactttgccatcaagcaggaggtggtgaccccagacaacatgtgcatgggccgcaccagccggggcaagctgggcggccaggacagctttgagagcattgagagctatgacagctgtggccaggagatgggcaaggaggagaagcagacctag

SEQ ID NO: 154260 - DNA, 1326 bp, Artificial Sequence
  derived and/or modified sequence
atgaaggccgccgtggacctgaagcccaccctgaccatcatcaagacagagaaagtcgacctggaactgtttccatctccagacatggagtgtgctgatgtgccactcttgaccccctcttcaaaggagatgatgtctcaggccctgaaggctactttttccgggttcaccaaagaacagcagaggctgggaatcccaaaagatccccgccaatggacagagactcatgtccgggattgggtcatgtgggctgtgaatgagttcagcttaaagggcgttgacttccagaagttctgcatgaacggggccgccctgtgtgctttgggaaaggactgctttctagaactggccccagatttcgttggagatattctctgggagcacctggagatcttgcaaaaagaggacgtcaagccctatcaggttaatggtgtgaaccccgcatatcctgagagccgatacacaagcgattattttatttcatatggcattgagcacgctcaatgtgtgccaccaagcgaattttccgagcccagttttataaccgaatcatatcagacgctgcatcctatcagtagtgaagagttgttgtcactgaaatacgagaatgattacccctctgtcatattacgggaccccctgcagaccgacaccctgcagaacgattactttgcaattaagcaggaagtcgtcacacctgataacatgtgcatgggccggacaagtcggggcaaactgggggggcaagacagcttcgagagtattgagtcttacgatagttgcgaccggttgacgcagagctggtcctcgcagagcagcttcaactctctgcagcgggttccatcctacgactcattcgactctgaagactaccccgccgcgctgccaaatcataaacccaagggtacattcaaagattacgtacgggaccgtgccgatctgaataaggacaaacccgtgattcccgcggccgcccttgcaggctatacaggaagcgggccaatccaactttggcaattcttactcgaattactcactgacaaaagctgtcagtcttttatttcctggactggagacggctgggaattcaaactgtctgacccagatgaggtggccaggagatgggggaagcgtaaaaataagcctaaaatgaactacgaaaaattaagtcggggactgcgttactattatgataagaatatcattcacaaaacggcggggaaacggtacgtatacaggtttgtgtgtgacctccagtcactgctcggttacacaccagaagagcttcatgctatgttggatgttaaaccggacgccgatgaatag

SEQ ID NO: 154261 - DNA, 819 bp, Artificial Sequence
  derived and/or modified sequence
atgaaggccgccgtggacctgaagcccaccctgaccatcatcaagaccgagaaggtcgacctggagctcttcccatcaccggacatggagtgtgccgacgtgccactgttgaccccaagctccaaggaaatgatgtctcaagcgcttaaggcaacatttagcgggtttacgaaagagcagcaacggcttggtatccctaaggatccacgtcaatggaccgaaacacatgtgagagactgggtgatgtgggcagtcaacgagtttagccttaagggagtcgatttccagaagttctgcatgaacggggcggccctgtgcgccttgggtaaggactgtttcttggagctggctccggactttgttggggacattctgtgggagcatctggagattctgcagaaagaggatgttaagccatatcaggtaaatggcgtgaacccagcgtacccagagtcacgctacaccagcgattatttcatatcgtatggaatcgagcacgcccagtgcgttccgcccagtgagttcagcgagcccagcttcatcacggaaagttaccagactcttcatccaatttcaagcgaggaactcctgtccctgaaatacgagaatgattacccctccgtaattctgagggaccctcttcagaccgacacactgcagaacgattactttgctataaaacaggaggtggtcactcccgacaacatgtgtatgggacgcaccagcagaggcaagttaggcgggcaggacagttttgaaagtatcgaaagctacgacagctgcgggcaggagatgggcaaagaagagaaacagacatag

SEQ ID NO: 154262 - DNA, 1326 bp, Artificial Sequence
  derived and/or modified sequence
atgaaggccgctgtggatcttaagcctaccttgaccatcattaagaccgagaaggttgacctagagctttttccaagccctgacatggaatgcgctgatgttcctctgttgacgccaagtagcaaagagatgatgtctcaggccctgaaggctaccttcagcggttttaccaaggaacagcagcgactgggcattcccaaagatccaaggcagtggacagaaactcacgtccgggactgggtcatgtgggccgttaacgagttctctcttaagggagtcgacttccagaaattttgtatgaacggggctgccctctgcgctctcgggaaagactgcttcctggagttggctcctgatttcgtgggtgacatcctgtgggagcacttggagattttgcagaaagaagatgtgaaaccctaccaggtgaacggcgtaaaccccgcttaccccgaaagtaggtacaccagcgactactttatttcttacggcattgaacacgcccagtgtgtgcccccaagcgagttcagtgagccatcctttataactgagagttaccagaccttgcatcccatttcctctgaggaattgctgagtctaaaatacgaaaacgactatcccagcgtgatcctgcgcgacccactgcaaacagacactctgcaaaacgactactttgcgatcaaacaggaagttgttactccagacaatatgtgtatgggtcgtacttcaaggggtaaactgggcggacaggattctttcgaatccatcgagtcctatgactcttgtgacagactgacacagagctggtcctcccagagcagttttaattcccttcagcgcgtgcccagttacgattcgtttgattcagaggactatcccgctgccctcccaaaccacaagcccaaggggacgttcaaagattatgttcgggaccgggctgacctcaacaaggacaaaccggtgataccagccgcagcacttgcaggctacactggcagcgggccaattcagctgtggcagttcctgctagaactgttgacggacaaaagctgtcagagctttatcagttggaccggggacgggtgggaattcaagctgagtgaccccgacgaagttgccaggaggtgggggaaacgcaaaaacaaaccaaagatgaactacgagaaattatctcggggacttcgctactactacgataaaaacatcattcataagaccgcgggaaaaaggtatgtgtacaggttcgtgtgtgacctccagagcttacttggctacacccctgaggagttgcatgcaatgttggacgtgaagcccgacgctgacgagtag

SEQ ID NO: 154263 - DNA, 819 bp, Artificial Sequence
  derived and/or modified sequence
atgaaggcagccgtggatctcaagcccaccctgaccatcattaaaaccgagaaagtcgacttggagctgttcccttcgcctgatatggagtgtgcagatgttcccctgctgaccccatcaagtaaggaaatgatgagccaggccttgaaagcgaccttcagcggtttcactaaggaacagcagagattgggaattcctaaggatccaaggcagtggactgagacccatgtgcgcgattgggtgatgtgggccgtgaatgaattttcactgaagggcgtcgacttccagaaattctgtatgaatggagccgcactgtgcgcactgggcaaagactgttttttagaactggcacctgacttcgtgggtgacatactgtgggagcacctggagattctgcagaaggaggatgtgaaaccctatcaggtgaatggtgtgaatccagcgtaccctgaaagccgttatacttccgattactttatttcctacggaatcgagcatgcccagtgtgttccaccttctgaattcagcgagcctagctttatcactgaatcctatcaaaccctccacccgatctcatccgaggagctcctgagcttgaagtacgagaacgattacccgagcgttatactgcgtgaccctctccagaccgatacactccagaatgactacttcgctataaagcaagaggtggtgactcccgacaacatgtgtatgggacgcacaagtcgcggtaagttggggggacaggatagcttcgagagtatcgagtcttacgactcctgtggtcaggagatgggcaaagaagagaaacagacctag

SEQ ID NO: 154264 - DNA, 2147 bp, Artificial Sequence
  derived and/or modified sequence
gagagcgaacgaggcagccgccggcggagaggagggagcgggcgagggccgggcaggaggagcgggcgcggcgcgggcgaggctgggacccgagcgcgctcacttcgccgcaaagtgccaacttcccctggagtgccgggcgcgcaccgtccgggcgcgggggaaagaaaggcagcgggaatttgagatttttgggaagaaagtcggatttcccccgtccccttccccctgttactaatcctcattaaaaagaaaaacaacagtaactgcaaacttgctaccatcccgtacgtcccccactcctggcaccatgaaggcggccgtcgatctcaagccgactctcaccatcatcaagacggaaaaagtcgatctggagcttttcccctccccggatatggaatgtgcagatgtcccactattaactccaagcagcaaagaaatgatgtctcaagcattaaaagctactttcagtggtttcactaaagaacagcaacgactggggatcccaaaagacccccggcagtggacagaaacccatgttcgggactgggtgatgtgggctgtgaatgaattcagcctgaaaggtgtagacttccagaagttctgtatgaatggagcagccctctgcgccctgggtaaagactgctttctcgagctggccccagactttgttggggacatcttatgggaacatctagagatcctgcagaaagaggatgtgaaaccatatcaagttaatggagtcaacccagcctatccagaatcccgctatacctcggattacttcattagctatggtattgagcatgcccagtgtgttccaccatcggagttctcagagcccagcttcatcacagagtcctatcagacgctccatcccatcagctcggaagagctcctctccctcaagtatgagaatgactacccctcggtcattctccgagaccctctccagacagacaccttgcagaatgactactttgctatcaaacaagaagtcgtcaccccagacaacatgtgcatggggaggaccagtcgtggtaaactcgggggccaggactcttttgaaagcatagagagctacgatagttgtgatcgcctcacccagtcctggagcagccagtcatctttcaacagcctgcagcgtgttccctcctatgacagcttcgactcagaggactatccggctgccctgcccaaccacaagcccaagggcaccttcaaggactatgtgcgggaccgtgctgacctcaataaggacaagcctgtcattcctgctgctgccctagctggctacacaggcagtggaccaatccagctatggcagtttcttctggaattactcactgataaatcctgtcagtcttttatcagctggacaggagatggctgggaattcaaactttctgacccagatgaggtggccaggagatggggaaagaggaaaaacaaacctaagatgaattatgagaaactgagccgtggcctacgctactattacgacaaaaacatcatccacaagacagcggggaaacgctacgtgtaccgctttgtgtgtgacctgcagagcctgctggggtacacccctgaggagctgcacgccatgctggacgtcaagccagatgccgacgagtgatggcactgaaggggctggggaaaccctgctgagaccttccaaggacagccgtgttggttggactctgaattttgaattgttattctattttttattttccagaactcattttttaccttcaggggtgggagctaagtcagttgcagctgtaatcaattgtgcgcagttgggaaaggaaagccaggacttgtggggtgggtgggaccagaaattcttgagcaaattttcaggagagggagaagggccttctcagaagcttgaaggctctggcttaacagagaaagagactaatgtgtccaatcatttttaaaaatcatccatgaaaaagtgtcttgagttgtggacccattagcaagtgacattgtcacatcagaactcatgaaactgatgtaaggcaattaatttgcttctgtttttaggtctgggagggcaaaaaagaggtgggtgggatgaaacatgttttggggggggatgcactgaaaatctgagaactatttacctatcactctag

SEQ ID NO: 154265 - DNA, 2134 bp, Artificial Sequence
  derived and/or modified sequence
ggcgagggccgggcaggaggagcgggcgcggcgcgggcgaggctgggacccgagcgcgctcacttcgccgcaaagtgccaacttcccctggagtgccgggcgcgcaccgtccgggcgcgggggaaagaaaggcagcgggaatttgagatttttgggaagaaagtcggatttcccccgtccccttccccctgttactaatcctcattaaaaagaaaaacaacagtaactgcaaacttgctaccatcccgtacgtcccccactcctggcaccatgaaggcggccgtcgatctcaagccgactctcaccatcatcaagacggaaaaagtcgatctggagcttttcccctccccggatatggaatgtgcagatgtcccactattaactccaagcagcaaagaaatgatgtctcaagcattaaaagctactttcagtggtttcactaaagaacagcaacgactggggatcccaaaagacccccggcagtggacagaaacccatgttcgggactgggtgatgtgggctgtgaatgaattcagcctgaaaggtgtagacttccagaagttctgtatgaatggagcagccctctgcgccctgggtaaagactgctttctcgagctggccccagactttgttggggacatcttatgggaacatctagagatcctgcagaaagaggatgtgaaaccatatcaagttaatggagtcaacccagcctatccagaatcccgctatacctcggattacttcattagctatggtattgagcatgcccagtgtgttccaccatcggagttctcagagcccagcttcatcacagagtcctatcagacgctccatcccatcagctcggaagagctcctctccctcaagtatgagaatgactacccctcggtcattctccgagaccctctccagacagacaccttgcagaatgactactttgctatcaaacaagaagtcgtcaccccagacaacatgtgcatggggaggaccagtcgtggtaaactcgggggccaggactcttttgaaagcatagagagctacgatagttgtggccaggagatggggaaagaggaaaaacaaacctaagatgaattatgagaaactgagccgtggcctacgctactattacgacaaaaacatcatccacaagacagcggggaaacgctacgtgtaccgctttgtgtgtgacctgcagagcctgctggggtacacccctgaggagctgcacgccatgctggacgtcaagccagatgccgacgagtgatggcactgaaggggctggggaaaccctgctgagaccttccaaggacagccgtgttggttggactctgaattttgaattgttattctattttttattttccagaactcattttttaccttcaggggtgggagctaagtcagttgcagctgtaatcaattgtgcgcagttgggaaaggaaagccaggacttgtggggtgggtgggaccagaaattcttgagcaaattttcaggagagggagaagggccttctcagaagcttgaaggctctggcttaacagagaaagagactaatgtgtccaatcatttttaaaaatcatccatgaaaaagtgtcttgagttgtggacccattagcaagtgacattgtcacatcagaactcatgaaactgatgtaaggcaattaatttgcttctgtttttaggtctgggagggcaaaaaagaggtgggtgggatgaaacatgttttggggggggatgcactgaaaatctgagaactatttacctatcactctagttttgaagcaaagatggacttcagtggggaggggccaaaaccgttgttgtgttaaaatttattttattaaattttgtgccagtattttttttcttaaaaatcgtcttaagctctaaggtggtctcagtattgcaatatcatgtaagtttgtttttatttgccggctgaggattctgtcacaatgaaagaaaactgtttatatagaccccattggaaaagcaaaacgctctcactgagatcagggatcccaaattcatgggacttatataagaaggacaattaatgctgatttgggtacaggggaattatgtgtgtgaatgtcatctacaattaaaaaaaattagcacatcccttta

SEQ ID NO: 154266 - protein, 143 aa, Artificial Sequence
  derived and/or modified sequence
MKAGCSIVEKPEGGGGYQFPDWAYKTESSPGSRQIQLWHFILELLQKEEFRHVIAWQQGEYGEFVIKDPDEVARLWGRRKCKPQMNYDKLSRALRYYYNKRILHKTKGKRFTYKFNFNKLVMPNYPFINIRSSGKIQTLLVGN

SEQ ID NO: 154267 - DNA, 432 bp, Artificial Sequence
  derived and/or modified sequence
atgaaggccggctgcagtatcgtggagaagccagagggcggcggcgggtatcagtttccagactgggcttataagaccgaatccagtccaggaagccggcaaatacagctttggcattttattctggagctgctacagaaggaagaattccggcacgttatcgcttggcagcagggtgagtacggtgaattcgtgattaaggaccctgacgaggtggccaggttgtggggaaggcgcaaatgcaagccacagatgaactatgataaattgtctagagccctgcggtattactataataaacgtatactgcacaagacaaagggtaaacgctttacatataagttcaatttcaacaagctggttatgccaaactatccgtttattaatatcagaagctcaggaaagatccagactttgctggtcggtaactag

SEQ ID NO: 154268 - DNA, 432 bp, Artificial Sequence
  derived and/or modified sequence
atgaaggccggctgcagcatcgtggagaagccagagggcggcggcggctaccagttcccagactgggcctacaagacagagagcagccctggcagccggcagatccagctgtggcacttcatcctggagctgctgcagaaggaggagttccgccacgtgattgcctggcagcagggcgagtatggagaatttgtgatcaaggaccctgatgaggtggcccggctgtggggccgcaggaagtgcaagccccagatgaactatgacaagctgagccgggccctgcgctactactacaacaagaggatcctgcacaagaccaagggcaagcgcttcacctacaagttcaacttcaacaagctggtgatgcccaactaccccttcatcaacatccgcagcagcggcaagatccagaccctgctggtgggcaactag

SEQ ID NO: 154269 - DNA, 432 bp, Artificial Sequence
  derived and/or modified sequence
atgaaggccggctgcagcatcgtggagaagcccgagggcggcggcggctaccagttcccagactgggcttacaaaactgaaagtagccccgggagtcggcagatacagctctggcatttcattctggagctgctgcaaaaggaggagttcagacatgtgattgcgtggcagcagggcgaatacggcgaatttgtaataaaggaccccgacgaagtggcccggctgtggggccggcgaaagtgcaagccacagatgaattacgacaaactgtctcgggccctgcgatattattacaacaaaaggatccttcacaaaactaagggaaagcgcttcacatacaagtttaattttaataagctggtgatgcccaattacccctttataaacataagatcatcaggaaagatccagaccctgctagtggggaattag

SEQ ID NO: 154270 - DNA, 432 bp, Artificial Sequence
  derived and/or modified sequence
atgaaagcaggttgctctattgtggagaagcccgaggggggaggtgggtaccagttccctgattgggcatataagaccgaatcgagtcccggtagcaggcagattcaattatggcattttatcctggagcttctacagaaagaggagtttaggcatgttatcgcctggcagcagggggaatatggcgagttcgtgatcaaggacccagatgaggtcgcaaggctgtgggggcgacggaagtgcaagcctcagatgaactacgacaagttaagcagagccttaaggtactattataataagcgtatcctccacaagactaagggtaaacgtttcacctataagtttaactttaataagctggtgatgccgaactatccctttataaatatccgcagtagtggcaaaatccagaccctgctagtcggaaactag

SEQ ID NO: 154271 - DNA, 432 bp, Artificial Sequence
  derived and/or modified sequence
atgaaggccggctgcagcatcgtggagaagcccgagggcggcggcggctaccagttccccgactgggcctacaagaccgagagcagccccggcagcagacagatccagctgtggcacttcatcctggagctgctgcagaaggaggagttcagacacgtgatcgcctggcagcagggcgagtacggcgagttcgtgatcaaggaccccgacgaggtggccagactgtggggcagaagaaagtgcaagccccagatgaactacgacaagctgagcagagccctgagatactactacaacaagagaatcctgcacaagaccaagggcaagagattcacctacaagttcaacttcaacaagctggtgatgcccaactaccccttcatcaacatcagaagcagcggcaagatccagaccctgctggtgggcaactag

SEQ ID NO: 154272 - DNA, 1539 bp, Artificial Sequence
  derived and/or modified sequence
gggaaccggcgggagggcgcctcctcctcccccgccctctctgctgaggatggaagtgacgaaagcagccgaggaggtcacttcctgctggggtggatgaggaggagccggagacgccgcggaggagaccggaccgaagacggaccgtgccgggaagagcaggcgggtgaaaatgaaagccggctgtagcatcgtggaaaagccagaaggaggtggagggtatcagtttcctgactgggcctacaaaacagagtcatccccaggctcccggcagatccagctgtggcacttcatcctggagctgctgcagaaggaagagttccgccatgtcatcgcctggcagcagggagagtacggggaatttgtcatcaaggatccagatgaggtggcccgcctctggggccgcaggaaatgcaaaccacagatgaattatgacaagctgagccgggccctcagatactattacaacaagaggatccttcataaaacaaaagggaaaagatttacctataaatttaacttcaacaagctggtgatgcccaactacccattcatcaacattcggtcaagtggtaagatacaaactcttttggtagggaattaattttgaattgaaaagaatttttaaaaatccaaatctaagacatggcatgtttaggaagattttagaaacactaaaataatgtgatcctttggattgcctcaatgttcttactcaagtcatctcacttataaggagagttataggctattcagtatcaagatagatttctttggtttatttggttggttcccttttctgcatattgtttgtaatctcctagatactattacgctatcttgtttgggaatgatgtttcataggtttgtgatgatctttacgttcaggactcagttttaacacccagcccagtggttctttcatagatgggaacctgtttctacaaacacttccgattttctgtgaaactaccaagctctcccttatcaagtgaatatcatcaaaaccacagcatccttgatcagagaagggggaggttcacatgtttgcagtgaaaagcagtgtctttgatctgcaacagcaaatcctcagagaaaaagattctggggttacttgaccttctctcctgttaagtgcagtagggcttcccctcttgactttcctggttatagctttccatcacagctccccacattctctcttgatgttgaaagcagtctctcaaaagactttgttgttgtgtggttttttgtttgtgatttttttccttatgcaaatcatactcctgcccaagaaaatacagtagttccccttatctgagcagtatatgttctaagacccctagtagattcgcaaaccacagatagtaccaaactccattcatatatatgatgttttttcttcccttaaccccactcatatgtatctgtgataacgtttaatttataaattaggcacagtaagagattaatgacaataataaaatagaaaaattataacaatatgctgtaataaacttaatgtggtctttctcaaaa

SEQ ID NO: 154273 - protein, 397 aa, Artificial Sequence
  derived and/or modified sequence
MRSPSAAWLLGAAILLAASLSCSGTIQGTSRSSKGRSLIGKVDGTSHVTGKGVTVETVFSVDEFSASVLTGKLTTVFLPIVYTIVFVVGLPSNGMALWVFLFRTKKKHPAVIYMANLALADLLSVIWFPLKIAYHIHGNNWIYGEALCNVLIGFFYGNMYCSILFMTCLSVQRYWVIVNPMGHSRKKANIAIGISLAIWLLILLVTIPLYVVKQTIFIPALNITTCHDVLPEQLLVGDMFNYFLSLAIGVFLFPAFLTASAYVLMIRMLRSSAMDENSEKKRKRAIKLIVTVLAMYLICFTPSNLLLVVHYFLIKSQGQSHVYALYIVALCLSTLNSCIDPFVYYFVSHDFRDHAKNALLCRSVRTVKQMQVSLTSKKHSRKSSSYSSSSTTVKTSY

SEQ ID NO: 154274 - DNA, 1194 bp, Artificial Sequence
  derived and/or modified sequence
atgaggtctccatcagccgcttggcttttgggcgccgccatattgctggccgccagcttatcttgttccggtaccatccagggtacatcccgctcctccaagggcagatcgctcatcggaaaggtggacggcacatcgcatgtgacaggtaagggggtgaccgttgaaactgtgttctccgttgatgagtttagtgcaagcgtcttaacagggaaactcaccactgtgtttctacccatcgtctacaccatcgtctttgtggtcgggctgccgtcaaacggcatggccctctgggttttcctatttagaacaaagaaaaaacatccagcggtgatctacatggccaaccttgctttggcagacctcctctctgtgatttggttccccctgaaaatcgcttaccatatacacggtaacaactggatttatggcgaggccctctgcaacgtactaatcggctttttctacggtaacatgtattgctccattcttttcatgacttgcttatctgtccagagatactgggtgattgtaaatccaatggggcactcccggaaaaaagcaaacatcgctatcgggattagccttgcgatctggctgctgattctgttagtcactatcccactgtacgtggtcaagcaaactatctttattccagccctgaatataactacatgtcacgatgtcctacccgagcagcttttggtgggggacatgttcaactacttcttatctctcgctatcggggtgttcctatttccggcgttcttgacggcctctgcctacgttctgatgataagaatgctacgctctagtgctatggacgagaactctgaaaagaagagaaaaagggccatcaagttgatcgtcactgtgctcgcaatgtacctcatctgttttactccgtccaaccttctcttggtggtgcattactttttgatcaagtctcagggacagagccacgtgtatgcgctgtatatcgtagctctctgtttgagtaccctgaatagctgtatcgacccatttgtctactacttcgtgtcacatgacttccgcgaccatgcaaaaaacgccctgctctgccggtccgtgcgtaccgttaagcagatgcaggttagccttacatctaagaagcacagccgtaagagctcatcctatagctcatccagcactacggtaaagacatcatactag

SEQ ID NO: 154275 - DNA, 1194 bp, Artificial Sequence
  derived and/or modified sequence
atgaggagccccagcgctgcctggctgctgggcgccgccatcctgctggccgccagcctgagctgcagcggcaccatccagggcaccagccgcagcagcaagggccgcagcctgattggcaaggtggatggcaccagccacgtgactggaaaaggagtgacagtggagaccgtcttctctgtggatgagttcagcgcctctgtgctgaccgggaagctgaccaccgtcttcctgcccatcgtgtacaccatcgtgtttgtggtgggcctgcccagcaatggcatggccctgtgggtgttcctgttccgcaccaagaagaagcaccctgctgtgatctacatggccaacctggccctggccgacctgctgagcgtcatctggttccccctgaagatcgcctaccacatccacggcaacaactggatctatggagaggccctgtgcaatgtgctgattggcttcttctacggcaacatgtactgcagcatcctcttcatgacctgcctgtctgtgcagcgctactgggtgattgtgaaccccatgggccacagcaggaagaaggccaacatcgccatcggcatcagcctggccatctggctgctgatcctgctggtgaccatccccctgtatgtggtgaagcagaccatcttcatcccagccctgaacatcaccacctgccatgatgtgctgcctgagcagctgctggtgggggacatgttcaactacttcctgagcctggccatcggggtcttcctgtttcctgccttcctgacagccagcgcctacgtgctgatgatccgcatgctgcggagcagcgccatggatgagaacagcgagaagaagaggaagagggccatcaagctgattgtgacagtgctggccatgtacctgatctgcttcacccccagcaacctgctgctggtggtgcactacttcctgatcaagagccagggccagagccacgtgtatgccctgtacatcgtggccctgtgcctgagcaccctgaacagctgcatcgacccctttgtgtactactttgtgtcccatgacttccgggaccacgccaagaatgccctgctgtgccgctctgtgaggacagtgaagcagatgcaggtgtccctgaccagcaagaagcacagcaggaagagcagcagctacagcagcagcagcaccaccgtgaagaccagctactag

SEQ ID NO: 154276 - DNA, 1194 bp, Artificial Sequence
  derived and/or modified sequence
atgcggagccccagcgccgcctggctgctgggcgccgccatcctgctcgccgcctctctttcctgttcaggcaccatccagggaacgagccgcagttctaaaggaagatctttaatcggcaaagtggatgggacgtctcacgtcacaggaaaaggcgtcactgttgaaaccgtgttctcagtcgatgagttcagcgcgagcgtgctcaccgggaagcttactacggtgttccttcctatcgtctatactatagttttcgttgtcggactgcctagcaacggtatggctctttgggtgtttctttttaggaccaagaagaagcaccccgctgtgatctatatggcgaacctggcacttgccgacttgctcagtgtgatatggtttcccctcaagatcgcctatcacattcacggtaacaattggatttatggggaggccctatgcaatgttctcattgggtttttttacggtaacatgtactgctcaatactgtttatgacttgcctctctgtccagcgatattgggtgatcgtcaaccctatgggtcacagtcggaagaaagccaatattgcaattgggatttccctggccatctggctccttatcttgctggtcacgatcccactgtatgtggtcaaacagaccatttttattcctgccctcaacatcacaacctgccatgatgtgttgcctgaacagctgctggtgggtgacatgttcaactacttcctcagtctcgcaattggtgtgttcctttttccagcctttctgaccgcctcggcctacgtattgatgattagaatgctgcgctcctctgccatggatgagaatagtgagaaaaagcgcaagcgggcgattaagctgatcgtgacagtgctcgctatgtaccttatttgtttcacaccctcaaatctgcttctggtggtccactatttcctaataaagagccaggggcaaagtcacgtgtacgcattatacattgttgccctttgtctatctaccctgaactcttgtattgatccatttgtgtactattttgtgagccatgacttccgggatcatgcaaaaaatgccctcctctgcaggtctgtgaggactgtgaaacagatgcaggtgtctcttacaagcaagaagcactctaggaagtcatcatcttacagttcctcttctaccacagtgaaaacaagttattag

SEQ ID NO: 154277 - DNA, 1194 bp, Artificial Sequence
  derived and/or modified sequence
atgcgctccccttcagcagcttggctgcttggggctgccatcctgctggctgctagcctgtcatgttctggaaccattcagggtaccagccgcagcagcaaaggcaggtctttaatcggaaaagttgacgggaccagccacgtgacaggtaagggagtaacggttgagacagtctttagcgtggacgaattcagtgccagcgtgttgacagggaagctcaccacggtgtttctccctattgtgtacaccatcgtctttgtggtggggctgcctagcaatggcatggcgctgtgggtctttttatttcgcacaaaaaaaaagcaccccgcagtaatatatatggccaacttggccttagccgatctactgtccgtcatatggttcccgctcaaaatcgcctatcacatacatgggaataattggatctatggcgaggctctatgtaatgtcctgatagggttcttttatggcaacatgtactgttccatcctatttatgacatgtctttctgtccaacggtattgggttatagtaaatcccatggggcactcaagaaaaaaggccaatatcgctataggaataagtctggccatatggctgcttatactattagttacaattcccctgtatgttgttaagcagactatctttattcccgcactgaacatcaccacctgccatgacgtgttgcccgagcagcttctggtgggagatatgttcaactattttttgtccctggctattggggtattcctttttcctgcgtttctgaccgccagcgcctacgtgcttatgatccgcatgctgagatcgagtgctatggatgagaatagtgaaaagaagcggaagagggccattaaacttattgtcacagtcctggctatgtacctaatctgttttaccccatctaacctcctcctggtcgtgcactattttctcatcaaaagtcagggccaatctcacgtgtacgccctttacatcgtggccctgtgtctgtctactcttaacagctgcattgatccatttgtctattatttcgtgtctcatgattttagagatcatgcgaaaaatgcgctgttgtgtcggagcgtgcgcactgtgaagcagatgcaggtcagccttacgtccaagaagcactcacggaaatccagctcctattcctcatccagcaccacagtgaagaccagttactag

SEQ ID NO: 154278 - DNA, 2914 bp, Artificial Sequence
  derived and/or modified sequence
ggtcccggggcgtggcctcccgcaggtgagtacgctgctccttcggtttccctgaaacctaacccgccctggggaggcgcgcagcagaggctccgattcggggcaggtgagaggctgactttctctcggtgcgtccagtggagctctgagtttcgaatcggcggcggcggattccccgcgcgcccggcgtcggggcttccaggaggatgcggagccccagcgcggcgtggctgctgggggccgccatcctgctagcagcctctctctcctgcagtggcaccatccaaggaaccagtagatcctctaaaggaagaagccttattggtaaggttgatggcacatcccacgtcactggaaaaggagttacagttgaaacagtcttttctgtggatgagttttctgcatctgtcctcactggaaaactgaccactgtcttccttccaattgtctacacaattgtgtttgtggtgggtttgccaagtaacggcatggccctgtgggtctttcttttccgaactaagaagaagcaccctgctgtgatttacatggccaatctggccttggctgacctcctctctgtcatctggttccccttgaagattgcctatcacatacatggcaacaactggatttatggggaagctctttgtaatgtgcttattggctttttctatggcaacatgtactgttccattctcttcatgacctgcctcagtgtgcagaggtattgggtcatcgtgaaccccatggggcactccaggaagaaggcaaacattgccattggcatctccctggcaatatggctgctgattctgctggtcaccattcctttgtatgtcgtgaagcagaccatcttcattcctgccctgaacatcacgacctgtcatgatgttttgcctgagcagctcttggtgggagacatgttcaattacttcctctctctggccattggggtctttctgttcccagccttcctcacagcctctgcctatgtgctgatgatcagaatgctgcgatcttctgccatggatgaaaactcagagaagaaaaggaagagggccatcaaactcattgtcactgtcctggccatgtacctgatctgcttcactcctagtaaccttctgcttgtggtgcattattttctgattaagagccagggccagagccatgtctatgccctgtacattgtagccctctgcctctctacccttaacagctgcatcgacccctttgtctattactttgtttcacatgatttcagggatcatgcaaagaacgctctcctttgccgaagtgtccgcactgtaaagcagatgcaagtatccctcacctcaaagaaacactccaggaaatccagctcttactcttcaagttcaaccactgttaagacctcctattgagttttccaggtcctcagatgggaattgcacagtaggatgtggaacctgtttaatgttatgaggacgtgtctgttatttcctaatcaaaaaggtctcaccacataccatgtggatgcagcacctctcaggattgctaggagctcccctgtttgcatgagaaaagtagtcccccaaattaacatcagtgtctgtttcagaatctctctactcagatgaccccagaaactgaaccaacagaagcagacttttcagaagatggtgaagacagaaacccagtaacttgcaaaaagtagacttggtgtgaagactcacttctcagctgaaattatatatatacacatatatatattttacatctgggatcatgatagacttgttagggcttcaaggccctcagagatgatcagtccaactgaacgaccttacaaatgaggaaaccaagataaatgagctgccagaatcaggtttccaatcaacagcagtgagttgggattggacagtagaatttcaatgtccagtgagtgaggttcttgtaccacttcatcaaaatcatggatcttggctgggtgcggtgcctcatgcctgtaatcctagcactttgggaggctgaggcaggcaatcacttgaggtcaggagttcgagaccagcctggccatcatggcgaaacctcatctctactaaaaatacaaaagttaaccaggtgtgtggtgcacgtttgtaatcccagttactcaggaggctgaggcacaagaattgagtatcactttaactcaggaggcagaggttgcagtgagccgagattgcaccactgcactccagcttgggtgataaaataaaataaaatagtcgtgaatcttgttcaaaatgcagattcctcagattcaataatgagagctcagactgggaacagggcccaggaatctgtgtggtacaaacctgcatggtgtttatgcacacagagatttgagaaccattgttctgaatgctgcttccatttgacaaagtgccgtgataatttttgaaaagagaagcaaacaatggtgtctcttttatgttcagcttataatgaaatctgtttgttgacttattaggactttgaattatttctttattaaccctctgagtttttgtatgtattattattaaagaaaaatgcaatcaggattttaaacatgtaaatacaaattttgtataacttttgatgacttcagtgaaattttcaggtagtctgagtaatagattgttttgccacttagaatagcatttgccacttagtattttaaaaaataattgttggagtatttattgtcagttttgttcacttgttatctaatacaaaattataaagccttcagagggtttggaccacatctctttggaaaatagtttgcaacatatttaagagatacttgatgccaaaatgactttatacaacgattgtatttgtgacttttaaaaataattattttattgtgtaattgatttataaataacaaaattttttttacaactta

SEQ ID NO: 154279 - DNA, 1194 bp, Artificial Sequence
  derived and/or modified sequence
atgagaagccccagcgccgcctggctgctgggcgccgccatcctgctggccgccagcctgagctgcagcggcaccatccagggcaccagcagaagcagcaagggcagaagcctgatcggcaaggtggacggcaccagccacgtgaccggcaagggcgtgaccgtggagaccgtgttcagcgtggacgagttcagcgccagcgtgctgaccggcaagctgaccaccgtgttcctgcccatcgtgtacaccatcgtgttcgtggtgggcctgcccagcaacggcatggccctgtgggtgttcctgttcagaaccaagaagaagcaccccgccgtgatctacatggccaacctggccctggccgacctgctgagcgtgatctggttccccctgaagatcgcctaccacatccacggcaacaactggatctacggcgaggccctgtgcaacgtgctgatcggcttcttctacggcaacatgtactgcagcatcctgttcatgacctgcctgagcgtgcagagatactgggtgatcgtgaaccccatgggccacagcagaaagaaggccaacatcgccatcggcatcagcctggccatctggctgctgatcctgctggtgaccatccccctgtacgtggtgaagcagaccatcttcatccccgccctgaacatcaccacctgccacgacgtgctgcccgagcagctgctggtgggcgacatgttcaactacttcctgagcctggccatcggcgtgttcctgttccccgccttcctgaccgccagcgcctacgtgctgatgatcagaatgctgagaagcagcgccatggacgagaacagcgagaagaagagaaagagagccatcaagctgatcgtgaccgtgctggccatgtacctgatctgcttcacccccagcaacctgctgctggtggtgcactacttcctgatcaagagccagggccagagccacgtgtacgccctgtacatcgtggccctgtgcctgagcaccctgaacagctgcatcgaccccttcgtgtactacttcgtgagccacgacttcagagaccacgccaagaacgccctgctgtgcagaagcgtgagaaccgtgaagcagatgcaggtgagcctgaccagcaagaagcacagcagaaagagcagcagctacagcagcagcagcaccaccgtgaagaccagctactag

SEQ ID NO: 154280 - protein, 618 aa, Artificial Sequence
  derived and/or modified sequence
MASTDYSTYSQAAAQQGYSAYTAQPTQGYAQTTQAYGQQSYGTYGQPTDVSYTQAQTTATYGQTAYATSYGQPPTGYTTPTAPQAYSQPVQGYGTGAYDTTTATVTTTQASYAAQSAYGTQPAYPAYGQQPAATAPTRPQDGNKPTETSQPQSSTGGYNQPSLGYGQSNYSYPQVPGSYPMQPVTAPPSYPPTSYSSTQPTSYDQSSYSQQNTYGQPSSYGQQSSYGQQSSYGQQPPTSYPPQTGSYSQAPSQYSQQSSSYGQQSSFRQDHPSSMGVYGQESGGFSGPGENRSMSGPDNRGRGRGGFDRGGMSRDPDEDSDNSAIYVQGLNDSVTLDDLADFFKQCGVVKMNKRTGQPMIHIYLDKETGKPKGDATVSYEDPPTAKAAVEWFDGKDFQGSKLKVSLARKKPPMNSMRGGLPPREGRGMPPPLRGGPGGPGGPGGPMGRMGGRGGDRGGFPPRGPRGSRGNPSGGGNVQHRAGDWQCPNPGCGNQNFAWRTECNQCKAPKPEGFLPPPFPPPGGDRGRGGPGGMRGGRGGLMDRGGPGGMFRGGRGGDRGGFRGGRGMDRGGFGGGRRGGPGGPPGPLMEQMGGRRGGRGGPGKMDKGEHRQERRDRPY

SEQ ID NO: 154281 - protein, 656 aa, Artificial Sequence
  derived and/or modified sequence
MASTDYSTYSQAAAQQGYSAYTAQPTQGYAQTTQAYGQQSYGTYGQPTDVSYTQAQTTATYGQTAYATSYGQPPTGYTTPTAPQAYSQPVQGYGTGAYDTTTATVTTTQASYAAQSAYGTQPAYPAYGQQPAATAPTRPQDGNKPTETSQPQSSTGGYNQPSLGYGQSNYSYPQVPGSYPMQPVTAPPSYPPTSYSSTQPTSYDQSSYSQQNTYGQPSSYGQQSSYGQQSSYGQQPPTSYPPQTGSYSQAPSQYSQQSSSYGQQSSFRQDHPSSMGVYGQESGGFSGPGENRSMSGPDNRGRGRGGFDRGGMSRGGRGGGRGGMGSAGERGGFNKPGGPMDEGPDLDLGPPVDPDEDSDNSAIYVQGLNDSVTLDDLADFFKQCGVVKMNKRTGQPMIHIYLDKETGKPKGDATVSYEDPPTAKAAVEWFDGKDFQGSKLKVSLARKKPPMNSMRGGLPPREGRGMPPPLRGGPGGPGGPGGPMGRMGGRGGDRGGFPPRGPRGSRGNPSGGGNVQHRAGDWQCPNPGCGNQNFAWRTECNQCKAPKPEGFLPPPFPPPGGDRGRGGPGGMRGGRGGLMDRGGPGGMFRGGRGGDRGGFRGGRGMDRGGFGGGRRGGPGGPPGPLMEQMGGRRGGRGGPGKMDKGEHRQERRDRPY

SEQ ID NO: 154282 - protein, 508 aa, Artificial Sequence
  derived and/or modified sequence
MVELVISPSLTVNSDCLDKLKFNRADAAVWTLSDRQGITKSAPLRVSQLFSRSCPRVLPRQPSTAMAAYGQTQYSAGIQQATPYTAYPPPAQAYGIPSYSIKTEDSLNHSPGQSGFLSYGSSFSTSPTGQSPYTYQMHGTTGFYQGGNGLGNAAGFGSVHQDYPSYPGFPQSQYPQYYGSSYNPPYVPASSICPSPLSTSTYVLQEASHNVPNQSSESLAGEYNTHNGPSTPAKEGDTDRPHRASDGKLRGRSKRSSDPSPAGDNEIERVFVWDLDETIIIFHSLLTGTFASRYGKDCDQIHVDDVSSDDNGQDLSTYNFSADGFHSSAPGANLCLGSGVHGGVDWMRKLAFRYRRVKEMYNTYKNNVGGLIGTPKRETWLQLRAELEALTDLWLTHSLKALNLINSRPNCVNVLVTTTQLIPALAKVLLYGLGSVFPIENIYSATKTGKESCFERIMQRFGRKAVYVVIGDGVEEEQGAKKHNMPFWRISCHADLEALRHALELEYL

SEQ ID NO: 154283 - protein, 538 aa, Artificial Sequence
  derived and/or modified sequence
MVELVISPSLTVNSDCLDKLKFNRADAAVWTLSDRQGITKSAPLRVSQLFSRSCPRVLPRQPSTAMAAYGQTQYSAGIQQATPYTAYPPPAQAYGIPSYSIKTEDSLNHSPGQSGFLSYGSSFSTSPTGQSPYTYQMHGTTGFYQGGNGLGNAAGFGSVHQDYPSYPGFPQSQYPQYYGSSYNPPYVPASSICPSPLSTSTYVLQEASHNVPNQSSESLAGEYNTHNGPSTPAKEGDTDRPHRASDGKLRGRSKRSSDPSPAGDNEIERVFVWDLDETIIIFHSLLTGTFASRYGKDTTTSVRIGLMMEEMIFNLADTHLFFNDLEDCDQIHVDDVSSDDNGQDLSTYNFSADGFHSSAPGANLCLGSGVHGGVDWMRKLAFRYRRVKEMYNTYKNNVGGLIGTPKRETWLQLRAELEALTDLWLTHSLKALNLINSRPNCVNVLVTTTQLIPALAKVLLYGLGSVFPIENIYSATKTGKESCFERIMQRFGRKAVYVVIGDGVEEEQGAKKHNMPFWRISCHADLEALRHALELEYL

SEQ ID NO: 154284 - protein, 508 aa, Artificial Sequence
  derived and/or modified sequence
MVELVISPSLTVNSDCLDKLKFNRADAAVWTLSDRQGITKSAPLRVSQLFSRSCPRVLPRQPSTAMAAYGQTQYSAGIQQATPYTAYPPPAQAYGIPSYSIKTEDSLNHSPGQSGFLSYGSSFSTSPTGQSPYTYQMHGTTGFYQGGNGLGNAAGFGSVHQDYPSYPGFPQSQYPQYYGSSYNPPYVPASSICPSPLSTSTYVLQEASHNVPNQSSESLAGEYNTHNGPSTPAKEGDTDRPHRASDGKLRGRSKRSSDPSPAGDNEIERVFVWDLDETIIIFHSLLTGTFASRYGKDCDQIHVDDVSSDDNGQDLSTYNFSADGFHSSAPGANLCLGSGVHGGVDWMRKLAFRYRRVKEMYNTYKNNVGGLIGTPKRETWLQLRAELEALTDLWLTHSLKALNLINSRQNCVNVLVTTTQLIPALAKVLLYGLGSVFPIENIYSATKTGKESCFERIMQRFGRKAVYVVIGDGVEEEQGAKKHNMPFWRISCHADLEALRHALELEYL

SEQ ID NO: 154285 - DNA, 1540 bp, Artificial Sequence
  derived and/or modified sequence
gtacaaggaaatggtagaactagtgatctcacccagcctcactgtaaacagcgattgtctggataaactgaagtttaaccgtgctgacgctgctgtgtggactctgagtgacagacaaggcatcaccaaatcggcccccctgagagtgtcccagctcttctccagatcttgcccacgtgtcctcccccgccagccttccacagccatggcagcctacggccagacgcagtacagtgcggggatccagcaggctaccccctatacagcttacccacctccagcacaagcctatggaatcccttcctacagcatcaagacagaagacagcttgaaccattcccctggccagagtggattcctcagctatggctccagcttcagcacctcacccactggacagagcccatacacctaccagatgcacggcacaacagggttctatcaaggaggaaatggactgggcaacgcagccggtttcgggagtgtgcaccaggactatccttcctaccccggcttcccccagagccagtacccccagtattacggctcatcctacaaccctccctacgtcccggccagcagcatctgcccttcgcccctctccacgtccacctacgtcctccaggaggcatctcacaacgtccccaaccagagttccgagtcacttgctggtgaatacaacacacacaatggaccttccacaccagcgaaagagggagacacagacaggccgcaccgggcctccgacgggaagctccgaggccggtctaagaggagcagtgacccgtccccggcaggggacaatgagattgagcgtgtgttcgtgtgggacttggatgagacaataattatttttcactccttactcacggggacatttgcatccagatacgggaaggattgtgaccagatccacgttgatgacgtctcatcagatgacaatggccaagatttaagcacatacaacttctccgctgacggcttccacagttcggccccaggagccaacctgtgcctgggctctggcgtgcacggcggcgtggactggatgaggaagctggccttccgctaccggcgggtgaaggagatgtacaatacctacaagaacaacgttggtgggttgataggcactcccaaaagggagacctggctacagctccgagctgagctggaagctctcacagacctctggctgacccactccctgaaggcactaaacctcatcaactcccggcccaactgtgtcaatgtgctggtcaccaccactcaactaattcctgccctggccaaagtcctgctatatggcctggggtctgtgtttcctattgagaacatctacagtgcaaccaagacagggaaggagagctgcttcgagaggataatgcagagattcggcagaaaagctgtctacgtggtgatcggtgatggtgtggaagaggagcaaggagcgaaaaagcacaacatgcctttctggcggatatcctgccacgcagacctggaggcactgaggcacgccctggagctggagtatttatagcag

SEQ ID NO: 154286 - DNA, 2702 bp, Artificial Sequence
  derived and/or modified sequence
gcgcgctctgctcggctgcaggctcaggaagcggcgcggcggcacgtgctgggccagagccccgcgccctgcgtccagccgccgggtgtgtgcgcccgcgtagcccagcgtcgcgcctcggcgcccccacgcgcccacgcagcggcgcggggacccgggcgggggcagagggagggcccggcccagggaggagaaggggccggtcctcccggcgcaggcagcagccgcggcagcccaggaggcggaggcagcggcaacggcagagacagcaacgtgcccgccgcagtcagcccggcctcgtcggacccgcaccggcccgcccgcccgcccgcaccgcgtcggggcgccctctccactgcgcgcggtacaaggaaatggtagaactagtgatctcacccagcctcactgtaaacagcgattgtctggataaactgaagtttaaccgtgctgacgctgctgtgtggactctgagtgacagacaaggcatcaccaaatcggcccccctgagagtgtcccagctcttctccagatcttgcccacgtgtcctcccccgccagccttccacagccatggcagcctacggccagacgcagtacagtgcggggatccagcaggctaccccctatacagcttacccacctccagcacaagcctatggaatcccttcctacagcatcaagacagaagacagcttgaaccattcccctggccagagtggattcctcagctatggctccagcttcagcacctcacccactggacagagcccatacacctaccagatgcacggcacaacagggttctatcaaggaggaaatggactgggcaacgcagccggtttcgggagtgtgcaccaggactatccttcctaccccggcttcccccagagccagtacccccagtattacggctcatcctacaaccctccctacgtcccggccagcagcatctgcccttcgcccctctccacgtccacctacgtcctccaggaggcatctcacaacgtccccaaccagagttccgagtcacttgctggtgaatacaacacacacaatggaccttccacaccagcgaaagagggagacacagacaggccgcaccgggcctccgacgggaagctccgaggccggtctaagaggagcagtgacccgtccccggcaggggacaatgagattgagcgtgtgttcgtgtgggacttggatgagacaataattatttttcactccttactcacggggacatttgcatccagatacgggaaggacaccacgacgtccgtgcgcattggccttatgatggaagagatgatcttcaaccttgcagatacacatctgttcttcaatgacctggaggattgtgaccagatccacgttgatgacgtctcatcagatgacaatggccaagatttaagcacatacaacttctccgctgacggcttccacagttcggccccaggagccaacctgtgcctgggctctggcgtgcacggcggcgtggactggatgaggaagctggccttccgctaccggcgggtgaaggagatgtacaatacctacaagaacaacgttggtgggttgataggcactcccaaaagggagacctggctacagctccgagctgagctggaagctctcacagacctctggctgacccactccctgaaggcactaaacctcatcaactcccggcccaactgtgtcaatgtgctggtcaccaccactcaactaattcctgccctggccaaagtcctgctatatggcctggggtctgtgtttcctattgagaacatctacagtgcaaccaagacagggaaggagagctgcttcgagaggataatgcagagattcggcagaaaagctgtctacgtggtgatcggtgatggtgtggaagaggagcaaggagcgaaaaagcacaacatgcctttctggcggatatcctgccacgcagacctggaggcactgaggcacgccctggagctggagtatttatagcaggatcagcagcatctccacctgccatctcaccctcagaccccctcgccttccccacctccccaccgagaactccagagacccagatgttggacaccaggaaggggccccacagccgagacgacgtgtccagtgaccatctcagaagccgtccatcagtccaaatgggggttctgagaaggaaagtacccaacattggcttcggagtatttgactttggggaaaagggctggctcggagtctagactcttctgtaagactcacagaacaaaagcaaggaattgctgatttggggggtgcctggtgatgaggaggggatgggtttgtcttgtcttctttttaatttatggactagtctcattactccggaattatgctcttgtacctgtgtggctgggtttcttagtcgttggtttggtttggttttttgaactggtatgtggggtggttcacagttctaatgtaagcactctattctccaagttgtgctttgtggggacaatcattctttgaacattagagaggaaggcagttcaagctgttgaaaagactattgcttatttttgtttttaaagacctacttgacgtcatgtggacagtgcacgtgccttacgctacatcttgttttctaggaagagggggatgctgggaaggaatgggtgctttgtgatggataaaaggcattaaataaaaccacgtttacattttgaa

SEQ ID NO: 154287 - DNA, 1540 bp, Artificial Sequence
  derived and/or modified sequence
gtacaaggaaatggtagaactagtgatctcacccagcctcactgtaaacagcgattgtctggataaactgaagtttaaccgtgctgacgctgctgtgtggactctgagtgacagacaaggcatcaccaaatcggcccccctgagagtgtcccagctcttctccagatcttgcccacgtgtcctcccccgccagccttccacagccatggcagcctacggccagacgcagtacagtgcggggatccagcaggctaccccctatacagcttacccacctccagcacaagcctatggaatcccttcctacagcatcaagacagaagacagcttgaaccattcccctggccagagtggattcctcagctatggctccagcttcagcacctcacccactggacagagcccatacacctaccagatgcacggcacaacagggttctatcaaggaggaaatggactgggcaacgcagccggtttcgggagtgtgcaccaggactatccttcctaccccggcttcccccagagccagtacccccagtattacggctcatcctacaaccctccctacgtcccggccagcagcatctgcccttcgcccctctccacgtccacctacgtcctccaggaggcatctcacaacgtccccaaccagagttccgagtcacttgctggtgaatacaacacacacaatggaccttccacaccagcgaaagagggagacacagacaggccgcaccgggcctccgacgggaagctccgaggccggtctaagaggagcagtgacccgtccccggcaggggacaatgagattgagcgtgtgttcgtgtgggacttggatgagacaataattatttttcactccttactcacggggacatttgcatccagatacgggaaggattgtgaccagatccacgttgatgacgtctcatcagatgacaatggccaagatttaagcacatacaacttctccgctgacggcttccacagttcggccccaggagccaacctgtgcctgggctctggcgtgcacggcggcgtggactggatgaggaagctggccttccgctaccggcgggtgaaggagatgtacaatacctacaagaacaacgttggtgggttgataggcactcccaaaagggagacctggctacagctccgagctgagctggaagctctcacagacctctggctgacccactccctgaaggcactaaacctcatcaactcccggcaaaactgtgtcaatgtgctggtcaccaccactcaactaattcctgccctggccaaagtcctgctatatggcctggggtctgtgtttcctattgagaacatctacagtgcaaccaagacagggaaggagagctgcttcgagaggataatgcagagattcggcagaaaagctgtctacgtggtgatcggtgatggtgtggaagaggagcaaggagcgaaaaagcacaacatgcctttctggcggatatcctgccacgcagacctggaggcactgaggcacgccctggagctggagtatttatagcag

SEQ ID NO: 154288 - DNA, 1527 bp, Artificial Sequence
  derived and/or modified sequence
atggtcgaactggtaatctccccctcactgaccgtgaactccgattgcctggacaagctgaaattcaatcgcgccgatgcggccgtgtggactctctccgatagacaggggattactaagtctgctccattgagggtgagtcagctgtttagccgatcctgtcccagggtcctcccccgccagccctccaccgcaatggcagcatacgggcagacccagtacagtgccgggattcagcaggccaccccctataccgcttacccacctccggcacaagcctacggtatcccctcgtatagtataaaaaccgaggatagtctgaaccattccccaggtcaaagcggctttctttcctacggctcgagcttctccacatcacctacaggccaatcgccctatacctatcagatgcacggtaccacaggcttttatcagggtggcaacggtctcggaaacgctgctggattcggatccgttcatcaagactacccaagctatcccgggtttcctcagagccagtacccacaatactatggctcttcttataatcccccatatgtccctgcatcttccatctgcccctcccccctgtccacaagcacttatgttttgcaggaggccagtcataacgtgccaaaccagtcttctgagtccctcgctggcgaatacaacacccacaacgggccgagtactcccgcaaaagaaggtgacacagaccggcctcaccgggcctctgacgggaaactgaggggccgctccaagcggtctagcgaccctagccccgccggcgacaatgaaattgaacgcgtcttcgtctgggaccttgacgaaactatcatcatctttcactctctgctgacggggacttttgcctcccgttatggtaaagactgcgaccaaattcatgtggacgacgtgagcagcgatgataatggccaggatttgtctacttataatttcagtgctgatggattccacagttctgcgccaggagcgaatctttgtctggggagcggtgtgcatggaggcgttgactggatgagaaagctcgcattcaggtatcgccgggtcaaggagatgtacaacacctataagaacaatgtgggcggtctgattggaactcctaagcgcgagacctggttacagctccgtgcggagctggaagcactcaccgacctatggcttacccactccctgaaagctctgaatctgatcaattctcgtccaaattgtgtaaacgtcttagttactacaactcagctgatacctgctctcgctaaagtcctgctttacgggctcggttcagtattccctatagaaaatatatatagcgcgaccaaaacagggaaggagagttgtttcgagcggattatgcagcgcttcggaaggaaggccgtgtatgtcgtgatcggtgatggagtggaagaggaacaaggggccaagaagcataacatgcccttctggcggatatcttgccatgcagacctcgaagccctgcgacatgccctggagctggaatatctttag

SEQ ID NO: 154289 - DNA, 1617 bp, Artificial Sequence
  derived and/or modified sequence
atggtggagctggtgatctcacccagccttaccgtgaactcggactgtttggataaactgaaattcaaccgtgcagatgctgccgtgtggacactgtcagatcgacagggcatcacaaagagcgccccattgcgagtctcccaattgttctcccgaagttgccctagagttttaccgcgccaaccatccacagctatggcagcttacggccagacccagtactccgcgggcatccaacaggcgactccctacactgcttatccaccacctgctcaggcatatgggatccctagttacagcattaagaccgaagatagcctgaaccacagccctggccagtcagggttcctgagttatggaagttctttttccacaagcccaactggacagtccccatacacataccagatgcacggtactacaggattctatcagggtggtaacgggctaggcaatgctgctggtttcggatccgttcaccaggactacccttcttatcctgggtttcctcagagccagtatccacagtactacgggtcatcctacaacccaccctacgtgcccgcttctagtatttgtccaagcccactgagtacgagcacgtatgtcctgcaggaagcttcccacaacgttccgaatcagtctagtgagtcacttgcgggggagtacaatacacacaatggacctagcacaccggcgaaggagggggacacggataggccacaccgtgcgtccgatggcaagctacgggggcggtccaagagatcttcagatccatctcccgccggtgataatgaaattgagagggtcttcgtttgggacctggacgagactattatcatttttcacagcctgctgactgggactttcgcatcaaggtatggcaaagacacgacaacaagtgttcggattggtctaatgatggaggagatgatatttaacctcgccgacactcacctgttctttaacgacctcgaggattgtgaccagatccatgtagatgatgtaagctccgacgataacggacaggatctgagcacttacaatttttctgcagatgggttccatagtagcgctccgggggctaatctttgcttggggagcggcgtgcatgggggtgttgattggatgcgtaagttggcattccgctatcgacgcgtaaaagaaatgtacaatacctacaaaaacaatgtggggggtctgattggcaccccaaagagagagacttggctccaactgagagcggagttggaggctctcacagacctgtggctgacacatagtctcaaggctctcaacctgatcaactctcggcccaattgcgtcaacgtccttgtcacaacgacccagttaattcctgctcttgccaaggtactgctatacggactcggtagcgtttttcctattgagaacatatattcagcaaccaagacaggaaaggagagctgtttcgaaaggataatgcagaggtttggtcgaaaggctgtgtacgttgtgattggagacggggttgaagaagaacagggcgccaagaagcacaacatgcccttctggagaatatcctgccacgctgacctcgaagctctcaggcacgccctagagttagaatacctctag

SEQ ID NO: 154290 - DNA, 1527 bp, Artificial Sequence
  derived and/or modified sequence
atggtggaactggtcatcagcccctccctcacagtgaactccgactgcttagacaagttgaaatttaatagggctgatgccgccgtatggacactctccgacaggcaaggaataaccaagtccgccccgctaagagttagccagctgttcagtcgcagttgccctcgagtactgccaaggcagccgagcacagcgatggctgcctacgggcagactcagtactctgctggaatacagcaggcaacaccatacacagcatatccaccccccgcgcaagcctacgggattccctcctattccattaaaacggaagactcactcaatcactcgcccggccagtccggatttctctcatacgggtcatccttcagtactagccctacaggccagagtccatacacctatcagatgcatggcaccacaggattttatcaaggagggaacggcctggggaatgctgccggattcgggagtgttcatcaagattatccatcttaccccggcttcccccagtcacagtatccacagtactacgggagcagttataatcctccatacgtgcctgccagttctatctgtccttcccccctctccacctctacttatgtgctgcaggaggcttcccacaatgttcctaatcagtccagcgagtctctggctggagagtacaacacccataatggaccgtccacacccgccaaagagggagatacagatcgcccgcatagggcctcagacggaaagctgcggggccgcagtaaaaggtcttctgatcccagcccagctggggataatgagatcgagagagtttttgtgtgggatctggatgagacgattataatctttcacagcttgttgaccggcacgttcgcttcgcggtatgggaaagactgtgaccagatccatgttgatgacgttagtagtgatgacaacggccaagatcttagtacttataactttagcgccgacggtttccatagttcggcacccggagccaatctgtgcctggggtctggagtgcacgggggagtcgactggatgagaaagctcgcgtttcggtaccgccgcgtcaaggagatgtacaacacatacaaaaacaacgtgggcggactgataggaacacctaagcgggaaacttggttacagctccgcgccgaattggaagcgctcaccgatctgtggctgacacattccctcaaggccctaaacctgatcaattctcgtcagaattgtgtcaacgtactggttactactactcaactcatccctgccctcgccaaggttctgctgtatggccttgggtcggtgtttccgattgagaacatttactccgccactaagacaggcaaggagagctgcttcgaaaggatcatgcaacgatttggtagaaaagcagtttacgtcgtgattggcgacggtgttgaggaagagcagggagctaaaaagcataatatgcccttttggcggatctcgtgccatgcagacttggaagctctgcgtcacgcactggagttggagtatctgtag

SEQ ID NO: 154291 - DNA, 1527 bp, Artificial Sequence
  derived and/or modified sequence
atggtggagctggtgatcagccccagcctgactgtgaacagcgactgcctggacaagctgaagttcaacagagcagatgctgctgtgtggaccctgagtgaccggcagggcatcaccaagagcgcccccctgcgggtgtcccagctgttcagccgcagctgcccccgggtgctgccccggcagcccagcacagccatggccgcctacggccagacccagtacagcgctggcatccagcaggccaccccctacacagcctacccacctccagcccaggcctacggcatccccagctacagcatcaagacagaggacagcctgaaccacagccctggccagagcggcttcctgtcctatggcagcagcttcagcaccagccccaccggccagagcccctacacctaccagatgcacggcaccaccggcttctaccagggcggcaatggcctgggcaatgctgctggcttcggctctgtgcaccaggactaccccagctacccaggcttcccccagagccagtacccccagtactacggcagcagctacaaccccccctacgtgcctgccagcagcatctgccccagccccctgagcaccagcacctacgtgctgcaggaggccagccacaacgtgcccaaccagagcagcgagagcctggccggggagtacaacacccacaacggccccagcaccccagccaaggagggggacacagaccggccccaccgggccagtgatggcaagctgcggggccgcagcaagaggagcagtgaccccagccctgctggggacaatgaaattgagcgggtgtttgtgtgggacctggatgagaccatcatcatcttccacagcctgctgaccggcacctttgccagccgctatggcaaggactgtgaccagatccacgtggatgatgtgtccagtgatgacaatggccaggacctgagcacctacaacttcagcgcagatggcttccacagcagcgcccctggggccaacctgtgcctgggcagcggcgtgcatggaggagtggactggatgaggaagctggccttccgctacagaagagtgaaggagatgtacaacacctacaagaacaacgtgggcggcctcatcggcacccccaagcgggagacctggctgcagctgcgggcagagctggaggccctgacagacctgtggctgacccacagcctgaaggccctgaacctgatcaacagccggcccaactgtgtgaatgtgctggtgaccaccacccagctgatcccagccctggccaaggtgctgctgtatggcctgggctctgtgttccccatcgagaacatctacagcgccaccaagacaggcaaggagagctgctttgagcgcatcatgcagagatttggaaggaaggctgtgtatgtggtgattggagatggagtggaggaggagcagggcgccaagaagcacaacatgcccttctggaggatcagctgccacgccgacctggaggccctgcggcatgccctggagctggagtacctgtag

SEQ ID NO: 154292 - DNA, 1617 bp, Artificial Sequence
  derived and/or modified sequence
atggtggagctggtgatcagccccagcctgactgtgaacagcgactgcctggacaagctgaagttcaacagagcagatgctgctgtgtggaccctgagtgaccggcagggcatcaccaagagcgcccccctgcgggtgtcccagctgttcagccgcagctgcccccgggtgctgccccggcagcccagcacagccatggccgcctacggccagacccagtacagcgctggcatccagcaggccaccccctacacagcctacccacctccagcccaggcctacggcatccccagctacagcatcaagacagaggacagcctgaaccacagccctggccagagcggcttcctgtcctatggcagcagcttcagcaccagccccaccggccagagcccctacacctaccagatgcacggcaccaccggcttctaccagggcggcaatggcctgggcaatgctgctggcttcggctctgtgcaccaggactaccccagctacccaggcttcccccagagccagtacccccagtactacggcagcagctacaaccccccctacgtgcctgccagcagcatctgccccagccccctgagcaccagcacctacgtgctgcaggaggccagccacaacgtgcccaaccagagcagcgagagcctggccggggagtacaacacccacaacggccccagcaccccagccaaggagggggacacagaccggccccaccgggccagtgatggcaagctgcggggccgcagcaagaggagcagtgaccccagccctgctggggacaatgaaattgagcgggtgtttgtgtgggacctggatgagaccatcatcatcttccacagcctgctgaccggcacctttgccagccgctatggcaaggacaccaccacctctgtgcgcatcggcctgatgatggaggagatgatcttcaacctggccgacacccacctgttcttcaatgacctggaggactgtgaccagatccacgtggatgatgtgtccagtgatgacaatggccaggacctgagcacctacaacttcagcgcagatggcttccacagcagcgcccctggggccaacctgtgcctgggcagcggcgtgcatggaggagtggactggatgaggaagctggccttccgctacagaagagtgaaggagatgtacaacacctacaagaacaacgtgggcggcctcatcggcacccccaagcgggagacctggctgcagctgcgggcagagctggaggccctgacagacctgtggctgacccacagcctgaaggccctgaacctgatcaacagccggcccaactgtgtgaatgtgctggtgaccaccacccagctgatcccagccctggccaaggtgctgctgtatggcctgggctctgtgttccccatcgagaacatctacagcgccaccaagacaggcaaggagagctgctttgagcgcatcatgcagagatttggaaggaaggctgtgtatgtggtgattggagatggagtggaggaggagcagggcgccaagaagcacaacatgcccttctggaggatcagctgccacgccgacctggaggccctgcggcatgccctggagctggagtacctgtag

SEQ ID NO: 154293 - DNA, 1527 bp, Artificial Sequence
  derived and/or modified sequence
atggtggagctggtgatcagccccagcctgactgtgaacagcgactgcctggacaagctgaagttcaacagagcagatgctgctgtgtggaccctgagtgaccggcagggcatcaccaagagcgcccccctgcgggtgtcccagctgttcagccgcagctgcccccgggtgctgccccggcagcccagcacagccatggccgcctacggccagacccagtacagcgctggcatccagcaggccaccccctacacagcctacccacctccagcccaggcctacggcatccccagctacagcatcaagacagaggacagcctgaaccacagccctggccagagcggcttcctgtcctatggcagcagcttcagcaccagccccaccggccagagcccctacacctaccagatgcacggcaccaccggcttctaccagggcggcaatggcctgggcaatgctgctggcttcggctctgtgcaccaggactaccccagctacccaggcttcccccagagccagtacccccagtactacggcagcagctacaaccccccctacgtgcctgccagcagcatctgccccagccccctgagcaccagcacctacgtgctgcaggaggccagccacaacgtgcccaaccagagcagcgagagcctggccggggagtacaacacccacaacggccccagcaccccagccaaggagggggacacagaccggccccaccgggccagtgatggcaagctgcggggccgcagcaagaggagcagtgaccccagccctgctggggacaatgaaattgagcgggtgtttgtgtgggacctggatgagaccatcatcatcttccacagcctgctgaccggcacctttgccagccgctatggcaaggactgtgaccagatccacgtggatgatgtgtccagtgatgacaatggccaggacctgagcacctacaacttcagcgcagatggcttccacagcagcgcccctggggccaacctgtgcctgggcagcggcgtgcatggaggagtggactggatgaggaagctggccttccgctacagaagagtgaaggagatgtacaacacctacaagaacaacgtgggcggcctcatcggcacccccaagcgggagacctggctgcagctgcgggcagagctggaggccctgacagacctgtggctgacccacagcctgaaggccctgaacctgatcaacagccggcagaactgtgtgaatgtgctggtgaccaccacccagctgatcccagccctggccaaggtgctgctgtatggcctgggctctgtgttccccatcgagaacatctacagcgccaccaagacaggcaaggagagctgctttgagcgcatcatgcagagatttggaaggaaggctgtgtatgtggtgattggagatggagtggaggaggagcagggcgccaagaagcacaacatgcccttctggaggatcagctgccacgccgacctggaggccctgcggcatgccctggagctggagtacctgtag

SEQ ID NO: 154294 - DNA, 1527 bp, Artificial Sequence
  derived and/or modified sequence
atggtggagctggtgatcagccccagcctgaccgtgaacagcgactgtttggacaagcttaaatttaaccgagcagatgccgctgtttggactcttagcgataggcaaggaattactaaatctgcccccttgcgagtgagccaactgttttcacgtagttgcccaagggtgctcccacgccaacccagcactgctatggcagcatacggccagacgcagtacagcgccggcatccagcaggccactccatacacagcgtatcctccccccgcccaagcatatggaatcccttcttatagtataaagaccgaagatagcctgaaccactccccaggacaaagcggatttctctcatacggatcttccttttctactagtccaacggggcagtctccgtacacgtatcagatgcatgggacgaccggcttctatcaaggtggcaacggattaggcaacgccgctggcttcggatcagtccaccaggattatccttcttatccgggcttccctcaatcgcagtatcctcaatactatggatctagttacaatcctccctatgtgcccgctagctccatatgtcccagtcctttgagcactagtacttacgtgcttcaggaggcctcacacaacgtacccaatcaatctagtgaaagcctggcgggcgaatataacactcataatggccctagcaccccggcaaaggaaggggacacagaccgtcctcatcgggcctccgatggcaagcttaggggtagaagcaaaagatcgagcgacccctctcccgccggggacaacgagatcgagcgcgtgttcgtgtgggatctggacgagacaattataatcttccatagtcttcttacaggaacgttcgcctcccggtatggaaaagactgcgaccaaatacacgtggatgacgtctcgagtgacgacaatggtcaagacctgagtacttataatttttctgccgacggattccacagctcagcccccggcgctaacctgtgcctcggcagcggggtgcatggaggggtggattggatgagaaagcttgcattcagatatagacgtgttaaagagatgtataacacttacaaaaataacgtgggcggcctcatcggcacacccaagagggaaacatggctgcagctgagagccgagctagaagcccttactgacctatggttgactcacagtttaaaggcgttgaacctgatcaatagtcgcccaaactgtgtgaacgtgttggtaaccacaacgcagctgatccccgcattagccaaggtcctgctgtatggactgggctccgtgttccccatcgaaaatatctactcggcaactaaaacaggcaaggaaagctgcttcgagcgcatcatgcagcgctttggccgtaaagccgtttacgtggtgattggagacggtgtagaggaggaacagggtgccaagaagcataatatgcctttttggcggatttcatgccatgcagatctggaagccctgaggcatgcattggagctggaatacctgtag

SEQ ID NO: 154295 - DNA, 1617 bp, Artificial Sequence
  derived and/or modified sequence
atggtggagctggtgatcagccccagcctgaccgtgaacagcgactgtctcgataagctgaaattcaacagggctgatgccgccgtatggactctcagtgatcgacaggggatcactaagtctgcgcccctgcgggtgtctcagttgttcagtagatcatgtccaagagtcctgccacggcagccatcaactgctatggccgcatacggccagacacaatatagcgcggggatccaacaagccaccccgtacacggcctacccaccaccagcccaggcctatgggatcccctcctacagcatcaaaaccgaggattcactcaaccacagcccaggccagtctggcttcctgagctatggatcttccttcagcacatcgcccaccgggcagtccccttatacctaccaaatgcacggaaccactggcttctatcaggggggcaacgggctaggcaatgccgctggcttcgggagtgtacaccaggattaccctagttacccggggttccctcagtcacagtatccccagtattatgggtcaagttacaaccctccatacgtccctgcctcctcgatctgtccaagtcctctgagcacctccacctacgtgctccaggaggcatcacacaacgtcccaaaccaaagttctgagtccctggctggagagtataatacacacaacggaccatccacgcccgcaaaagagggagataccgataggccccaccgcgctagtgatgggaagctgagaggcaggagcaaaagaagctctgatccctccccagcaggagacaatgagatcgaaagagttttcgtgtgggacctggatgagactatcattatattccatagcctgctgaccggaactttcgcctcccgttacggcaaagatacaaccactagcgtgagaatcggcctgatgatggaagagatgatcttcaatttggcagacacccacctgttctttaatgatcttgaagattgcgatcagatccacgtcgatgacgtaagttcagatgacaacggacaggacctgtctacatacaacttcagcgctgatggattccactctagtgcacctggagccaacctgtgccttggctcaggcgtgcacgggggtgtggattggatgcgcaagctggctttccggtatagacgcgtgaaagaaatgtacaacacttataaaaacaacgtgggaggcctgatcgggaccccaaaaagagaaacatggctacagctccgagcggaattagaggcattgaccgatctgtggctgacacactccttaaaggccctcaaccttatcaattctcggcctaattgcgttaacgtcctcgtgacgaccacgcaactgatccccgcattggctaaagtgctgttatatggcctcggaagcgtgtttccgatcgagaatatatattccgccacgaaaacgggaaaggagtcatgcttcgagcgaattatgcagcggtttggacggaaagctgtttacgttgttatcggcgacggcgtggaggaggagcaaggcgcaaaaaagcataatatgccattctggaggatctcatgccacgctgatctggaggcgctgagacatgccctcgaactggagtatctttag

SEQ ID NO: 154296 - DNA, 1527 bp, Artificial Sequence
  derived and/or modified sequence
atggtggagctggtgatcagccccagcctgaccgtgaacagcgactgcttagataaacttaaattcaacagggctgacgcagccgtatggacactttccgatcgacaaggaatcacaaaaagtgcccctctgcgtgtgtcacaactatttagccgcagttgtccccgggtcctccctaggcagccctccaccgccatggcagcttacgggcagacacagtattccgctggcatccagcaggccactccctatactgcttatccaccccctgcacaggcctatggaatcccttcctacagtataaagacagaggattcgctcaatcacagccctgggcaaagcggattcttgtcctacggtagcagtttttcaacttcaccaactgggcaatccccttacacttaccagatgcacggaaccacagggttctatcagggggggaatgggctcgggaacgctgctgggtttggctccgtgcaccaggactatccttcctatcccggattcccgcagtcccagtacccgcagtactatggtagttcttataacccgccttatgttccggcatccagcatatgtccaagccctttgtccacctcaacgtacgtcctgcaggaagccagccacaacgtcccaaatcagtccagcgaatctctggccggcgagtacaacacccacaacggtccctcaaccccagctaaggagggagataccgataggcctcaccgcgcttcagacggcaaactgcgaggacggagcaagagaagcagcgaccctagccccgccggagataacgagattgagcgcgtctttgtttgggaccttgatgaaactattatcatctttcatagtctgctgacaggaacttttgcatcacgatatggcaaagactgcgaccaaattcacgtggatgatgtgtcctcggacgacaatggccaggatctctcaacctataacttttctgccgacggatttcattcatccgcacccggcgcaaatctctgcctgggctcaggcgtgcacggtggtgtcgattggatgcgtaagctcgcctttcgctaccgccgggttaaagaaatgtacaacacgtataagaacaacgttggaggcttgattggtacaccaaagcgggaaacatggcttcaactgcgcgcggaactagaggctctgacagacctatggttaacccattccttgaaagctcttaatctgattaacagccgacaaaactgcgttaatgtcctggtgactacaacgcagttgattcccgccttagcgaaggtactactctatggccttgggtccgtgttcccaatagaaaatatctactctgctactaagaccgggaaagagtcatgctttgaacgaattatgcagagatttgggagaaaggctgtttatgttgttataggagacggcgtcgaggaggagcagggagccaaaaagcacaatatgcccttttggcgcatttcctgtcatgctgatcttgaagccctaagacatgctctggagttagaatacctctag

SEQ ID NO: 154297 - DNA, 1527 bp, Artificial Sequence
  derived and/or modified sequence
atggttgagctggtcattagcccctctctgacagtgaactctgactgccttgacaagttaaagtttaaccgagcagatgcggctgtgtggacactctctgataggcagggaataacaaaaagcgctcctctgagagttagccagctttttagccgtagttgtcctcgtgttctgcctcggcaacccagtaccgccatggcagcctatgggcagacccaatatagcgccggaatccagcaggccaccccttacaccgcctaccccccacctgcgcaggcctatgggatccctagctactccatcaagactgaagacagcttgaatcactctccaggacagagcggcttcctgagctacggatccagcttctcaactagccctaccgggcaaagtccctacacataccagatgcatggaacaacagggttctatcaaggaggcaacggtctggggaacgcagccggttttggtagtgtccatcaagactacccctcctacccaggattcccgcagagccagtacccccagtactatggctcctcctataatccgccttatgtacccgcttccagcatatgtcctagccccctcagtacatcaacatacgtgcttcaggaggcctctcataatgtcccgaaccagtcctccgagagcctggcaggtgagtacaacacccataacggacctagcactcctgcaaaggagggagacactgaccggccacatagggctagcgatggaaagttgcgcggacggtcaaagcggagctctgacccaagtcctgcaggcgataatgagatcgagcgtgtcttcgtatgggatctcgacgaaaccatcatcattttccatagtcttttgaccggaacgttcgcttcgcggtatgggaaagactgcgatcagattcacgtagatgacgtgtccagcgatgacaatgggcaggacctatctacatataacttcagcgctgacggcttccactcttctgcaccaggtgctaacctgtgtctgggctccggcgtgcatggcggagtggattggatgcgtaaattagccttccgctatcgccgagtcaaggagatgtacaacacttataaaaataatgtcgggggactcatcggcactcctaaacgtgagacttggctgcaactgcgtgccgaacttgaggcccttactgacttgtggctcacacattctctgaaagctttgaacctgataaacagccggccaaactgcgtcaacgtccttgtgaccactacccaactgatccccgctcttgccaaggtcttgctttatggcctgggcagcgtgttccccatagaaaatatctatagtgcgaccaagaccggcaaggagtcttgtttcgagagaattatgcagcgtttcggccgtaaagccgtttacgtggtgataggagatggtgtggaggaagagcagggtgccaaaaaacacaatatgcctttttggcggatctcctgtcatgccgacctggaggccctgcgtcatgcactcgagctagagtacctctag

SEQ ID NO: 154298 - DNA, 1617 bp, Artificial Sequence
  derived and/or modified sequence
atggtcgaactggtcatttcacccagcttgaccgtgaactcagattgccttgataaactgaaattcaaccgagccgacgcagctgtatggacacttagtgaccggcaggggattactaaatccgcccctctccgcgtcagccaacttttcagtcgctcctgccctcgagtcctgccacggcagccctccactgccatggctgcgtatggccaaactcaatatagtgcaggtattcaacaggctaccccttatactgcctaccctccacccgcacaggcgtatgggattcccagctactccatcaaaactgaagacagtctgaatcacagtccaggacagtcgggcttcctgagctatggttctagcttttctacctctcccactgggcaatcaccgtatacctatcagatgcatggaacaaccggcttttaccagggcggaaacgggctgggaaatgcagcagggtttggctctgtacaccaggattacccttcgtaccccggatttccccaatctcagtacccacaatactacgggagtagctacaacccaccctacgtgcctgctagctccatatgtcctagccccctctccacctctacttacgtccttcaggaagctagccataacgtgcctaatcagagctctgaaagcttggctggcgagtataacacccacaacggcccttctacccctgcgaaggagggtgacaccgatagaccacatcgggcatctgacgggaagctccgtggtcgctccaagcggtcgtcagaccccagccctgctggcgacaacgaaatcgaacgcgtatttgtctgggatctcgacgaaaccatcattatattccatagcctattgaccggtacatttgcatccaggtacggaaaagacacgacgacttccgtgcgcatagggctcatgatggaggagatgattttcaacctggccgatacccatctcttcttcaacgacttggaagattgcgaccaaatccacgttgacgacgtgtcatctgacgacaatggacaggacttgtcgacttacaatttctcggctgacggctttcatagttcagcaccaggtgctaacctgtgcctgggcagtggggtccacggtggggtggactggatgagaaaacttgccttccgttaccgtagggttaaagaaatgtataacacatacaaaaacaatgtgggaggccttattggaacaccgaagagagagacatggctccagctgcgagccgaactcgaggctctaacggacctgtggctgacccactccctgaaagcactcaacctgatcaacagcagacctaactgcgttaatgtcctggtgacaaccacccaattgattcctgccttagccaaagtgcttttatacgggctggggagtgttttcccaatcgagaatatatactctgccaccaaaaccggaaaggaatcatgtttcgagaggattatgcagcggtttggtagaaaagcggtatacgttgtgatcggagatggcgtggaggaggaacagggagcgaaaaagcacaatatgccgttttggagaataagctgtcatgcagatcttgaagccctgagacatgcgctggaactggagtatctctag

SEQ ID NO: 154299 - DNA, 1527 bp, Artificial Sequence
  derived and/or modified sequence
atggtggaattagtaattagcccctctctcacagtgaatagtgattgccttgacaaactgaaattcaaccgggctgatgccgctgtatggaccctatctgacaggcaaggcatcacaaaatcggcccctctgcgcgtgtctcagctgttttcacgaagctgtcccagggttctgccacggcagccttctacggcgatggccgcttacgggcaaactcagtattcagcgggtattcaacaggctacaccttacacagcatacccacccccagcccaggcgtacggtatcccttcttactctatcaaaactgaagactccctgaatcatagtcctggtcaatcaggatttcttagctatggtagctcattcagtaccagccctactggccaatctccatacacttaccagatgcatggtaccacagggttctatcaggggggaaatggactggggaacgcggcaggtttcggttcagtgcatcaggactatccttcctatccaggattcccccagtcccagtatcctcagtattacggtagcagctataaccctccctatgtgcctgctagctcaatctgcccaagtcctctgagtacgtctacatatgtgctccaagaggcctctcataatgtgcccaaccaaagctccgaaagtcttgcaggtgagtataacactcataatggcccttcaactcccgctaaggagggtgacaccgatcgacctcatagggcgtctgatggcaagctgcgtgggaggagcaaaagatccagcgatccaagtccggctggtgataacgaaattgagcgggtcttcgtttgggacctagatgagacaatcatcatattccactccttgttgaccgggaccttcgctagtcgatacggaaaggactgtgatcagatccatgtagatgacgtgtcatccgatgacaatggccaggatctgtccacctataatttttccgcggacggatttcactcctcagcgccaggtgccaatctgtgcctcggaagcggtgtgcacgggggtgtggactggatgagaaagttagccttccgttatcgaagggtgaaagagatgtataacacctataagaacaatgtgggaggccttatcggcacacctaaacgcgagacttggctgcagctgcgggcagaacttgaagccctgacagatctgtggttaacccatagcctgaaagccctcaatcttattaactctcggcagaattgtgtcaacgtgttagttactacaacgcagctgattcctgcgcttgctaaagtgttgctgtacgggctggggagcgtctttccgatcgagaatatatatagcgccacaaaaacaggaaaggaatcatgcttcgagcgcattatgcaacggttcggcagaaaggcagtctatgtagtcattggcgatggcgtggaagaggaacagggagccaagaaacacaacatgcccttttggcgaatcagctgccatgcggatcttgaggctttgcgccacgcccttgaactagaatacctgtag

SEQ ID NO: 154300 - DNA, 1527 bp, Artificial Sequence
  derived and/or modified sequence
atggtggagctggtgatcagccccagcctgaccgtgaacagcgactgcctggacaagctgaagttcaacagagccgacgccgccgtgtggaccctgagcgacagacagggcatcaccaagagcgcccccctgagagtgagccagctgttcagcagaagctgccccagagtgctgcccagacagcccagcaccgccatggccgcctacggccagacccagtacagcgccggcatccagcaggccaccccctacaccgcctaccccccccccgcccaggcctacggcatccccagctacagcatcaagaccgaggacagcctgaaccacagccccggccagagcggcttcctgagctacggcagcagcttcagcaccagccccaccggccagagcccctacacctaccagatgcacggcaccaccggcttctaccagggcggcaacggcctgggcaacgccgccggcttcggcagcgtgcaccaggactaccccagctaccccggcttcccccagagccagtacccccagtactacggcagcagctacaaccccccctacgtgcccgccagcagcatctgccccagccccctgagcaccagcacctacgtgctgcaggaggccagccacaacgtgcccaaccagagcagcgagagcctggccggcgagtacaacacccacaacggccccagcacccccgccaaggagggcgacaccgacagaccccacagagccagcgacggcaagctgagaggcagaagcaagagaagcagcgaccccagccccgccggcgacaacgagatcgagagagtgttcgtgtgggacctggacgagaccatcatcatcttccacagcctgctgaccggcaccttcgccagcagatacggcaaggactgcgaccagatccacgtggacgacgtgagcagcgacgacaacggccaggacctgagcacctacaacttcagcgccgacggcttccacagcagcgcccccggcgccaacctgtgcctgggcagcggcgtgcacggcggcgtggactggatgagaaagctggccttcagatacagaagagtgaaggagatgtacaacacctacaagaacaacgtgggcggcctgatcggcacccccaagagagagacctggctgcagctgagagccgagctggaggccctgaccgacctgtggctgacccacagcctgaaggccctgaacctgatcaacagcagacccaactgcgtgaacgtgctggtgaccaccacccagctgatccccgccctggccaaggtgctgctgtacggcctgggcagcgtgttccccatcgagaacatctacagcgccaccaagaccggcaaggagagctgcttcgagagaatcatgcagagattcggcagaaaggccgtgtacgtggtgatcggcgacggcgtggaggaggagcagggcgccaagaagcacaacatgcccttctggagaatcagctgccacgccgacctggaggccctgagacacgccctggagctggagtacctgtag

SEQ ID NO: 154301 - DNA, 1617 bp, Artificial Sequence
  derived and/or modified sequence
atggtggagctggtgatcagccccagcctgaccgtgaacagcgactgcctggacaagctgaagttcaacagagccgacgccgccgtgtggaccctgagcgacagacagggcatcaccaagagcgcccccctgagagtgagccagctgttcagcagaagctgccccagagtgctgcccagacagcccagcaccgccatggccgcctacggccagacccagtacagcgccggcatccagcaggccaccccctacaccgcctaccccccccccgcccaggcctacggcatccccagctacagcatcaagaccgaggacagcctgaaccacagccccggccagagcggcttcctgagctacggcagcagcttcagcaccagccccaccggccagagcccctacacctaccagatgcacggcaccaccggcttctaccagggcggcaacggcctgggcaacgccgccggcttcggcagcgtgcaccaggactaccccagctaccccggcttcccccagagccagtacccccagtactacggcagcagctacaaccccccctacgtgcccgccagcagcatctgccccagccccctgagcaccagcacctacgtgctgcaggaggccagccacaacgtgcccaaccagagcagcgagagcctggccggcgagtacaacacccacaacggccccagcacccccgccaaggagggcgacaccgacagaccccacagagccagcgacggcaagctgagaggcagaagcaagagaagcagcgaccccagccccgccggcgacaacgagatcgagagagtgttcgtgtgggacctggacgagaccatcatcatcttccacagcctgctgaccggcaccttcgccagcagatacggcaaggacaccaccaccagcgtgagaatcggcctgatgatggaggagatgatcttcaacctggccgacacccacctgttcttcaacgacctggaggactgcgaccagatccacgtggacgacgtgagcagcgacgacaacggccaggacctgagcacctacaacttcagcgccgacggcttccacagcagcgcccccggcgccaacctgtgcctgggcagcggcgtgcacggcggcgtggactggatgagaaagctggccttcagatacagaagagtgaaggagatgtacaacacctacaagaacaacgtgggcggcctgatcggcacccccaagagagagacctggctgcagctgagagccgagctggaggccctgaccgacctgtggctgacccacagcctgaaggccctgaacctgatcaacagcagacccaactgcgtgaacgtgctggtgaccaccacccagctgatccccgccctggccaaggtgctgctgtacggcctgggcagcgtgttccccatcgagaacatctacagcgccaccaagaccggcaaggagagctgcttcgagagaatcatgcagagattcggcagaaaggccgtgtacgtggtgatcggcgacggcgtggaggaggagcagggcgccaagaagcacaacatgcccttctggagaatcagctgccacgccgacctggaggccctgagacacgccctggagctggagtacctgtag

SEQ ID NO: 154302 - DNA, 1527 bp, Artificial Sequence
  derived and/or modified sequence
atggtggagctggtgatcagccccagcctgaccgtgaacagcgactgcctggacaagctgaagttcaacagagccgacgccgccgtgtggaccctgagcgacagacagggcatcaccaagagcgcccccctgagagtgagccagctgttcagcagaagctgccccagagtgctgcccagacagcccagcaccgccatggccgcctacggccagacccagtacagcgccggcatccagcaggccaccccctacaccgcctaccccccccccgcccaggcctacggcatccccagctacagcatcaagaccgaggacagcctgaaccacagccccggccagagcggcttcctgagctacggcagcagcttcagcaccagccccaccggccagagcccctacacctaccagatgcacggcaccaccggcttctaccagggcggcaacggcctgggcaacgccgccggcttcggcagcgtgcaccaggactaccccagctaccccggcttcccccagagccagtacccccagtactacggcagcagctacaaccccccctacgtgcccgccagcagcatctgccccagccccctgagcaccagcacctacgtgctgcaggaggccagccacaacgtgcccaaccagagcagcgagagcctggccggcgagtacaacacccacaacggccccagcacccccgccaaggagggcgacaccgacagaccccacagagccagcgacggcaagctgagaggcagaagcaagagaagcagcgaccccagccccgccggcgacaacgagatcgagagagtgttcgtgtgggacctggacgagaccatcatcatcttccacagcctgctgaccggcaccttcgccagcagatacggcaaggactgcgaccagatccacgtggacgacgtgagcagcgacgacaacggccaggacctgagcacctacaacttcagcgccgacggcttccacagcagcgcccccggcgccaacctgtgcctgggcagcggcgtgcacggcggcgtggactggatgagaaagctggccttcagatacagaagagtgaaggagatgtacaacacctacaagaacaacgtgggcggcctgatcggcacccccaagagagagacctggctgcagctgagagccgagctggaggccctgaccgacctgtggctgacccacagcctgaaggccctgaacctgatcaacagcagacagaactgcgtgaacgtgctggtgaccaccacccagctgatccccgccctggccaaggtgctgctgtacggcctgggcagcgtgttccccatcgagaacatctacagcgccaccaagaccggcaaggagagctgcttcgagagaatcatgcagagattcggcagaaaggccgtgtacgtggtgatcggcgacggcgtggaggaggagcagggcgccaagaagcacaacatgcccttctggagaatcagctgccacgccgacctggaggccctgagacacgccctggagctggagtacctgtag

SEQ ID NO: 154303 - protein, 822 aa, Artificial Sequence
  derived and/or modified sequence
MGFGSDLKNSHEAVLKLQDWELRLLETVKKFMALRIKSDKEYASTLQNLCNQVDKESTVQMNYVSNVSKSWLLMIQQTEQLSRIMKTHAEDLNSGPLHRLTMMIKDKQQVKKSYIGVHQQIEAEMIKVTKTELEKLKCSYRQLIKEMNSAKEKYKEALAKGKETEKAKERYDKATMKLHMLHNQYVLALKGAQLHQNQYYDITLPLLLDSLQKMQEEMIKALKGIFDEYSQITSLVTEEIVNVHKEIQMSVEQIDPSTEYNNFIDVHRTTAAKEQEIEFDTSLLEENENLQANEIMWNNLTAESLQVMLKTLAEELMQTQQMLLNKEEAVLELEKRIEESSETCEKKSDIVLLLSQKQALEELKQSVQQLRCTEAKFSAQKELLEQKVQENDGKEPPPVVNYEEDARSVTSMERKERLSKFESIRHSIAGIIRSPKSALGSSALSDMISISEKPLAEQDWYHGAIPRIEAQELLKKQGDFLVRESHGKPGEYVLSVYSDGQRRHFIIQYVDNMYRFEGTGFSNIPQLIDHHYTTKQVITKKSGVVLLNPIPKDKKWILSHEDVILGELLGKGNFGEVYKGTLKDKTSVAVKTCKEDLPQELKIKFLQEAKILKQYDHPNIVKLIGVCTQRQPVYIIMELVSGGDFLTFLRRKKDELKLKQLVKFSLDAAAGMLYLESKNCIHRDLAARNCLVGENNVLKISDFGMSRQEDGGVYSSSGLKQIPIKWTAPEALNYGRYSSESDVWSFGILLWETFSLGVCPYPGMTNQQAREQVERGYRMSAPQHCPEDISKIMMKCWDYKPENRPKFSELQKELTIIKRKLT

SEQ ID NO: 154304 - protein, 647 aa, Artificial Sequence
  derived and/or modified sequence
MKLHMLHNQYVLALKGAQLHQNQYYDITLPLLLDSLQKMQEEMIKALKGIFDEYSQITSLVTEEIVNVHKEIQMSVEQIDPSTEYNNFIDVHRTTAAKEQEIEFDTSLLEENENLQANEIMWNNLTAESLQVMLKTLAEELMQTQQMLLNKEEAVLELEKRIEESSETCEKKSDIVLLLSQKQALEELKQSVQQLRCTEAKFSAQKELLEQKVQENDGKEPPPVVNYEEDARSVTSMERKERLSKFESIRHSIAGIIRSPKSALGSSALSDMISISEKPLAEQDWYHGAIPRIEAQELLKKQGDFLVRESHGKPGEYVLSVYSDGQRRHFIIQYVDNMYRFEGTGFSNIPQLIDHHYTTKQVITKKSGVVLLNPIPKDKKWILSHEDVILGELLGKGNFGEVYKGTLKDKTSVAVKTCKEDLPQELKIKFLQEAKILKQYDHPNIVKLIGVCTQRQPVYIIMELVSGGDFLTFLRRKKDELKLKQLVKFSLDAAAGMLYLESKNCIHRDLAARNCLVGENNVLKISDFGMSRQEDGGVYSSSGLKQIPIKWTAPEALNYGRYSSESDVWSFGILLWETFSLGVCPYPGMTNQQAREQVERGYRMSAPQHCPEDISKIMMKCWDYKPENRPKFSELQKELTIIKRKLT

SEQ ID NO: 154305 - DNA, 12119 bp, Artificial Sequence
  derived and/or modified sequence
gtcacaccctcgaataatgacgcatacctatcctactgttactgatcacctagtaataatcttgtagttcacattactcatttttcaccaaattcttttggtgaaggacgcttcagaaacggccatcactgaagagcagacccgtttgggttctccacgcattctagactcccgaagagctcatgttttttggctagacctatgaccattttcgctagacttcactgcacgttttctcaagtatcttctttgtccctaatgtgtgacacctcatcatggacacgctactttagctaaggcatgaccagcaatgaacagtagtaagatatgtgctgattagaaggctcacttgtgcagtgtggaggataaccagtgccttacaaaatggggtttgggagtgacctgaagaattcacatgaagcagtgttaaaattgcaagactgggaattacggttactggaaacagtaaagaaatttatggccctgagaataaaaagtgataaagaatatgcatctactttacagaacctttgtaatcaagttgataaggaaagtactgtccaaatgaattatgtcagcaacgtatccaagtcttggctacttatgattcagcagacagaacaacttagtaggataatgaagacacatgcagaggacttgaactctggacctttacacaggctcaccatgatgattaaggacaagcagcaggtgaagaaaagttacataggtgttcatcagcagatagaggcagagatgatcaaggttaccaaaacagaattggagaagttaaaatgcagctatagacaattaataaaagaaatgaattctgccaaagagaaatataaagaagctttagctaaagggaaggaaactgaaaaggccaaggaacgatacgacaaagccacaatgaaacttcatatgttgcacaatcagtatgtattggcgttgaaaggggcacagctccatcagaatcagtattatgatatcacacttcccctgcttctggactccttacaaaagatgcaagaagaaatgataaaagcactcaaaggtatatttgatgaatacagccagataaccagtcttgtcacagaggaaatagtgaatgtccataaagagattcaaatgtcggttgaacagatagatcctagtacagaatacaataatttcatagatgttcacagaacaacggctgctaaagaacaagaaatagagtttgatacttccttactggaagaaaatgaaaatcttcaggcaaatgagatcatgtggaataacttaacagcagaaagtttgcaagtaatgttgaaaacgttagcggaagaacttatgcaaacacagcagatgcttttaaacaaggaggaggctgttttggagttagagaagagaattgaagaatcttctgaaacttgtgagaagaagtctgatattgtgcttctgctaagccaaaaacaggcacttgaagaactgaaacagtcagtccagcagctgagatgcactgaagcaaagttttcagcacagaaggaattactagagcaaaaagtgcaagaaaatgatgggaaagagccacctccagtagtaaattatgaagaagatgcacgatcagttacatctatggaaagaaaggagaggctatccaaatttgaatctattcgtcattcaattgctggaataattaggtctccaaaatctgcactgggctcttcagcactttctgatatgatctccatcagtgagaagcctttggcagaacaggactggtaccatggtgcaattcccagaatagaagctcaagaactgttaaaaaaacaaggagactttttggtgcgagagagtcatgggaaacctggtgaatatgtcctttctgtatattctgatggacagaggagacattttatcatacaatatgttgataacatgtatcgattcgagggcactgggttttcaaacattcctcaacttatagatcatcactatacaacaaaacaggtcatcactaagaaatcaggtgtagttctgctgaatcctattcctaaggacaagaaatggattctcagtcatgaagatgtcatattgggagaattactgggcaagggaaattttggtgaagtatataagggcacattaaaggataaaacttctgttgctgttaaaacatgtaaagaagatcttcctcaggaattgaaaataaaatttttacaagaagccaaaattctcaagcaatatgatcatcccaatattgtcaaacttataggagtttgcacacaaagacagcctgtctacatcattatggaactggtttcaggaggtgatttcctcacctttctgagaaggaagaaggatgaactaaaactcaaacagttagtgaaattttcattagacgctgctgctggtatgttgtatctcgagagtaaaaactgtatacacagggaccttgctgcaagaaactgcctggtaggtgaaaataatgttctgaaaatcagtgactttggaatgtctcgtcaagaggatggtggagtgtattcatcttctggcttaaagcagattcccattaaatggacagcaccggaagctcttaattatgggagatacagttcagagagtgacgtgtggagctttggcatccttctctgggagaccttcagcttaggggtttgtccgtaccctggaatgacaaatcagcaagcaagagagcaagtagaaagaggataccggatgtcagctccccagcactgtccagaggatatttccaaaatcatgatgaagtgttgggattataaacctgaaaatcgccctaagttcagtgaacttcagaaagagctcactatcatcaagagaaaactcacatagtgacaggatggcgccaaactcagccttcaggactctgtcctccagcagagtaacattattgttctcattaacaatgaatttataccacattaccttcgacagtcttctaccattattttttattaactgggtgttttaaaagtacgttccacttgtaaaaagtcaaaggcaaatttgttaaagaaataggcagtcctaccaagggctttcttagctaaccatagcaatcctaccatttcaggccattgcaaatagaaaagcacaggcttctaagtgtgtgaaggataaaagatctatcctatccttttcacaccttgtttctacttcaggcacagtttgtaggctgccatcctatgccacagaccctactccgttggtgctataaacagcattggtaatgccatgtttgcaggacatgttccaaccacagctggctttcacctctgccaaagcaggattatatttgtaaacaaacaaacagaattttatattgggaattatttggacctcctgagatttttcttttctttcttgccaggtataagcccaatgtaagaatcatcatgctcctacattatttgtaaggttgtcattttcctcctcctttgtctgggcatcagaaaacaatgcacgtaggtcgggcacggtggctcacgcctgtaatcccaggcatgtaatctcatgcctgggattacaggcgtgagccacagtgcccagccccctccctcctttgggaggctgaggcaggcggatcacctgaggtcaggagttcgagaccagcctggcttgcatggtgaaaccctgtctctaccaaaaaaaaaaaaagaaacacacacacaacgcatgaaacgtcgtcaaagttagagttgaggcagttgcttttcaaggatgtacagagagctgtgaagcaagaaacagatttgaacaggagggtgggctggagaacagagcagctaaagaatgattaacagagtaaagaagaaagtgaaaatataaaaccaccttatcagagttatgcctttctaaacatctaaacaaacaaacattcacatattctattctaaaaacacataataatacatattctattttatggtctgaatttaccagaaaggtcctaagaaaagtttcaggagttcgtagagtcctcgtaatggcaacaaaaattttgagagaaactgcaaagcacaaatccacagaaataacagcatactttcagttaagcattttcaccttagagggggcattccaaaatgtaatttcctttatttgtaccagtttttagagctgtcagaatttcatgattctagttcaccaacacattcacgtgtgtacatgcgcgtgcacacacaccaccaaggtgcaagacagatgtgaatgaagtagacagtctagaagtcaggtgaatattaatgagaaatatgacatagggacagccctcccatttctacttccaccttcattgaccattatactgccccctggacattcttaccattagctgacaggtatgcaagcagagtgctgaagatgtctcatgtgaataaaatgtaactcactcactcagttaaaactaggattctgtatcttaactcttatctagggaacttacttacttaccccatgatctgtatatagttgcctctcaggataaatgcatatatagaagatggtcatgctcagggctaaatatgttctggaagccttttataagttctcaggcctgtgtcctggtaaacattaccttagtgattatttggtctgcattcattggaagagcttagggatagaaaatgcctcctgccctctccagctgtttgctgcctgtaccatcgcacagaactcacaccagtactttagagtatgaaagataatactgaagagaaaagtgacttgtatctaacatttcaatctccttgcagatttcatacatacttaatgattagtacattcagactaaagggaaatttcttttgatggcacgtactatggtaaatcaaagcgcaaactcagaagtgctatggtattgaggcacttaccaaccttcaaaagtaagagtaaaatgggatattcctacccttttttttagtatttctaagtgaatctctgtaatattctttgtctgtttaaagaaaacagcctcccatctcatagtggcttcatgctaagctctcagcaaggagagagaatgatggttttggctttagttttatgaacaagacctaaagcttaatcctgacattctggtgttaagaatgaacacagcattgatatttcacttatccaggctgttagaatttgcagttcacatcattactctgtgcttaaatttaaaaagcttttcaaaacatcgtgacatgtgtagcatttaaattccattttattctttgtcctaaagcaggcagtggtatagttcaggattaataacttattgggagtctctcagtcatatagaatattaaatttaatatagtcacatgcattaagaaaaacttacgcaaacagtttttcactgttaattttgttgtgcttgaagcataatttattcatcccttctgtcactgataattaattattggaattatatactttaggaggctaatccatgcccaggaagcacgaacatactgttcagaatgtgcaagttgatgtagggaaaggaagattcagaaatgtacaaaatcctgtgatttgtttagtaagaaaagagttgtaaccaaaatttcttctggtccggatgtaattagtccagtcacaaatctttgtgttgttaatggattattcaagatatatatatatattcttactactgcatagttcctctcataagtccttaaatttattaaaagggggaggtaaacacaagcagtctgtgtctcactggtcactaaggggcctttatgagacagtttaggttgttcatcatttcacaaggaaagaaatttttcactgttaaattaacatttattaccaacatgtgaaacctaaaattaattttgcattccatgtaatctaaggccaaagccaacatattctttctcttctgggaaaataaaattgacaggttttgtttaaacttcagaaactgaagctttatttcagcctgtcctgccatgaggtctccagtgagaggtctccagtgaaaggtctcatgtaattgtttctcttttatctcccaaatttaatgtgggcaataaaattctcctttcgtaattcactgttttattacaaatacgatattactgaaacatcttattagcagataagtatagaccaggagcctaactgtgttagatattttcagtgcacatttcacagttgtttttcattttaggattattttgagaagaaaaaatgttttgtaattgaaatagttttaatttcctttaaaccataatttggtttttctatctatattatattcagttcagttttcccatataacttttgtgaagattggctagtaccacaaaataactatggcttcacaatactagtgttagattatgtcaagaagaaagtgttttagttacaacatacgccacccactgaggaccttgtagtgggataaacaaaaattaaaatgcaacaatccaaataaattataatgtaacaatacaaatatctgaatcataagtcacagtttttcagggttctttcagtcacaccactttataattaattctggtgagtcatcagatgtaggaatgtacctgaaaaccttacttagtatactgtgtacactgtttaatggccatgcatcttttgaagtttgatattttctgaaaaagcattgtttgcctcagccctcttctttttacgtatactccatttatcattgatattttagatgtttcttatcaacaaaattggctgccctggttagtgctgagtcatcgcaagacttgcttttgcatttaggaagccacaccctcccacaaaacagaacagtgcaaaataagcagcagagagacagacagttggaaaagacatgttttctttaggtattaatatcttaattaaatggaatcagattttgtatggaaatgagtttatattacatttccattatactaagtcagtgtgaaagtttaccatcaaaatagcgttacttcttttatgactaactctgatttgcttatacatatcagaatgatattcattaaatattttaatttcatttatttttctatgttttgattagtttcacatcaagtctgaatactatattttggaagaatccaaaaccacatatgaagatactgattttaaaagtcaggatttcatgtaccaagaatgacctacttgaaggagattttgctacactcttagagtcccaaaaattcccctttaaaaaaaatgctgtcctacagaaggtgtataaactataccttagccataattcaatttaatgaaatactaccccattaaaagccatcctcctgcctcataccgattcagaaattaaattctgaacttttagtgtaggcattaggaatcacttagccacttaataaggactgagattcttgggtggcagaaaaatcctggtgtgctagattcttagtcactttaaactgcatagaagtaatgagcataggcttcagtatatttaataaggtgctgaggcagcagattcaaatgcaaaagagggaggaaccagttattccaaggcaggatgatgcacccccacacagagtgtggaaaaattaaagtgaaacaaagatttggacagtgtcattaggaagcctgaggagaacatgctacaaggccagatcctgtcctatggaaaataaaaaagatcagcagaactaaagcaaaagcagtcatctccagtgtgtgggccttagcaaagagtaaaccaaatacctctccttgtgttaggagcactgttatattcccagctcagagatgattgtgtgctgggaaatgcttatattcattatttcccaactaatgcatttggacatatgtattccagtttttcaaagacactacccaaagcttctttacatttgcattggttatatttaatatttcttaagctaagatcactgattatccacacgttattagaaatctttggttacagtgaggcttaacctgggctaaagtctcctaaatgggactacacttagatccgccctatttcacctttggactaacgttgactaaatggctcctagagttacccacagagggagcttactatgatgagagctactgtggggaaacatagtattcaacagagaaatggaagaatacaagtagcaatgttccttgtcttcaataacatttgagggaaaggaatctagaaatcctaaagcttagtcagggtgcctaaggtaagacacaaaaagaaagagacatccagaaaggaaggttgaaaggaaatgaagggcagtaacaaagcaccaatgtaaaatgacccatagccaacaataaatgcaataacaataaaggaaactaaccctcacaaagggtttgaggagcttcctgctgtgtgtccttaaacagtgcgtgcctcttaagtctctacaacacttttttaaagggcattgaattggacattggtttaatttttacctacgctccctataatctcaggaggtaaccattatttaatcagaattacccttgctctgtttatctgtgaggcctcagacacaacggtggttcagccctctccctaagcagtagcaagctgagtaatggcacacatatgtctaggatagccagcattcaggaaaattgctgtgaacctcctgtttttaattttaatatagaaaaagtctttcaggtttgtgacacgaagacagatttagcttcccacttgtcagcaaatttgtaaaaacctcaaaacaaatgaatatttggaattcactctaagagatacaaatcctgaatttctaactatcttctcaaatattactgaggccagcaagatgcaagtgttctacaaaataatgaactgttctaagtgacagtgttgatgctggaagtggaatgttatgttttcgctcagctgtattcattcagaaagtttttcttgaacatctgccacatgaggtgcagagaatactaccaggtgctagtttttccagtatttgacttctgattactatttccttttctcatctttagtttttcaagattttgctttaccaaaatagtaaagcctttatcatcagcttatattgaataatgttgtaattggtttcaatcaaagtttctcctcaggtacttgggggcccctagccttctaaggaactcccaggcacctacttaacaaggccagctacacactcagtatgtgataagccccatgatggatgcaggttagaattcaaagacctggttggagtcctagatgtggagacaggatgatcaggtcacacttgttagatgactaacactatcagtagaagctcttgagagattttcctaacgcagcaagatttctgtgagtagaggtatcctgggaggtatcctgggaggcagcctattgacttgaccaagtaagctgatcaggtggcctcctctacccactaaagaaatgtgtaaacactagcaataattgctttatcttaaactcctggacatactcagttcttccattccactgttctattgccaataccttttgttgttttcttcacactcctcttggcagcaaatgtctgaaagtatttcaattgtgtaatgttaaggagttttttcatagcttcagaaaagagggcagcaaatatgaagccttaagttcaaaataagtcattctacctagaaatacagaccccagagcacattgcatgaaaatacctgtactctgcagttcctcaaagcagtattcttcctgaaaagccaaacaccacacctattttcctatttgctaagaatcagaataagcacgttgtaaatagtatccaaagcagattctaaaatgacatagtaagaagccagattcaaattgtaaccaaagaagacaatagaaatcccactttaccccactgtcatcagttagaacacccttgcaaaaactgtaaccacttaagcaattcatctgatcccagaagatcataccttcttttgaaagtataggacagatatcagtgggaaacgtcggcgttctgagcaacacaggataaatgtaggagggccttaaaaaataaatctcaattcatacactggagcagcaaaaaactgagcaggaaaggaaacagaatccaaagtcatttttcatatagctgttgtcaaatagtataaccttggtgtcttctttgagttgcctggacagtatttatgaaacaaaaaactaaatgccccccatttggggacggggggaggggttcagacctctaacctggattcagagccttagaggccgagagggaatctggaatctggtattactgagatcctaggtaaaagaaccagcctggcagtctttcccacctcattggtccgtgcttttatttttaaacccaaaagaaagaaagaaacacaccctcttatgtaggaatttcccttttacaaataatttgacctggtagaaataaacttgcctgcctgctcttaaatgccagacagttggaagcaaatgccgagggaaaggtgcccagagccatgcttgataggactttgaatattttctccttaattaaagtacgttgcttgtatttagactataagatgctatggaggtctatcccatgccatgccaatgtgaattgctttgcttcagtaacaatcagaagaccagtccaacagaaaataacttgtcataattccaccttagattctagacctctcatacctgcagtgtacagaatatgtacatgttccaatggaattcactatttttggctttagtgtcaaagagattggttctacaaggttcatctgatttcccataacaagtaaattttataatcctatgattctaaattcaatccccaatatagattctaagcatcaaatcaaaatcacagacaaaggggaactggtcgagaggggtcttagttatttcaaatccatgaccaaagtgtccaaagacatgaaactcttatacctgctgagcatttcactttactatacaaaatgtcagctacccagttgcatcctgtgacatgatcagactgtcaatgtggaccagtggccaggagcatatttatgggccatttctgttcatcattctttacagagcattgaggtttcccactgaaacagcttctttagtcagacgtctatagattttacataaatttacatttaaatgcattaagttagatggcccaattgagcatctgaatgaatatagtgggggttggtggtggtgcaaattctgctggctttatgttatggttttcttcgtgttttttcttggttttgtctggcttcttctggcaagtgccctaaaagactggaacactgtataaagtcatagacatagaaccatatgggaaagcccagatgaaaaaatggaagaataaaatcaagttgtcaaagttccagcaacagccctgacttcttcaggaatccaagcaaattgaaagccaagacaaaatgtacaaatggtgcccatgccattcatttgactgtgggtggccctctagtctagggctctcttagtgaatggttgtggaaatatgatttttctaagttccttccttttccttttgatagatgagtttgagatgatggagtaggagtggggccctcaggcacttctggtaaagacattccacctgcaagcagcattttgagtaaagcactgctgtggtttgccgatttatggtccatttaatgttaggctaaagcacctttaatcatttttgttgttttaagataatgtatttgtgaagtggataaacactggaaatagggtgcttcttctggaaagttcagtgtaaaacacaaacaaggctttggcgggtttatctggctttataaacaagtctgaaaaatggatgaaagctaaatatataaagcagttggttgtctatcttttatcatttttactcagatctgtatttaacacttatttatttgttagtttttacattcaaaagaaatacactttgaactttggctaacattgtaggatattttttaattgtttctacatttttaaagcatgattcatcatttttgtaaacttagatcattttttaattgtcttttcttttccaatagaccagttaccactcatgtgtctgcagaacctctttattgtattcctataataaatgtaaaatatttgtagcaaa

SEQ ID NO: 154306 - DNA, 2922 bp, Artificial Sequence
  derived and/or modified sequence
acatacacagatatgtgctgattagaaggctcacttgtgcagtgtggaggataaccagtgccttacaaaatggggtttgggagtgacctgaagaattcacatgaagcagtgttaaaattgcaagactgggaattacggttactggaaacagtaaagaaatttatggccctgagaataaaaagtgataaagaatatgcatctactttacagaacctttgtaatcaagttgataaggaaagtactgtccaaatgaattatgtcagcaacgtatccaagggaaggaaactgaaaaggccaaggaacgatacgacaaagccacaatgaaacttcatatgttgcacaatcagtatgtattggcgttgaaaggggcacagctccatcagaatcagtattatgatatcacacttcccctgcttctggactccttacaaaagatgcaagaagaaatgataaaagcactcaaaggtatatttgatgaatacagccagataaccagtcttgtcacagaggaaatagtgaatgtccataaagagattcaaatgtcggttgaacagatagatcctagtacagaatacaataatttcatagatgttcacagaacaacggctgctaaagaacaagaaatagagtttgatacttccttactggaagaaaatgaaaatcttcaggcaaatgagatcatgtggaataacttaacagcagaaagtttgcaagtaatgttgaaaacgttagcggaagaacttatgcaaacacagcagatgcttttaaacaaggaggaggctgttttggagttagagaagagaattgaagaatcttctgaaacttgtgagaagaagtctgatattgtgcttctgctaagccaaaaacaggcacttgaagaactgaaacagtcagtccagcagctgagatgcactgaagcaaagttttcagcacagaaggaattactagagcaaaaagtgcaagaaaatgatgggaaagagccacctccagtagtaaattatgaagaagatgcacgatcagttacatctatggaaagaaaggagaggctatccaaatttgaatctattcgtcattcaattgctggaataattaggtctccaaaatctgcactgggctcttcagcactttctgatatgatctccatcagtgagaagcctttggcagaacaggactggtaccatggtgcaattcccagaatagaagctcaagaactgttaaaaaaacaaggagactttttggtgcgagagagtcatgggaaacctggtgaatatgtcctttctgtatattctgatggacagaggagacattttatcatacaatatgttgataacatgtatcgattcgagggcactgggttttcaaacattcctcaacttatagatcatcactatacaacaaaacaggtcatcactaagaaatcaggtgtagttctgctgaatcctattcctaaggacaagaaatggattctcagtcatgaagatgtcatattgggagaattactgggcaagggaaattttggtgaagtatataagggcacattaaaggataaaacttctgttgctgttaaaacatgtaaagaagatcttcctcaggaattgaaaataaaatttttacaagaagccaaaattctcaagcaatatgatcatcccaatattgtcaaacttataggagtttgcacacaaagacagcctgtctacatcattatggaactggtttcaggaggtgatttcctcacctttctgagaaggaagaaggatgaactaaaactcaaacagttagtgaaattttcattagacgctgctgctggtatgttgtatctcgagagtaaaaactgtatacacagggaccttgctgcaagaaactgcctggtaggtgaaaataatgttctgaaaatcagtgactttggaatgtctcgtcaagaggatggtggagtgtattcatcttctggcttaaagcagattcccattaaatggacagcaccggaagctcttaattatgggagatacagttcagagagtgacgtgtggagctttggcatccttctctgggagaccttcagcttaggggtttgtccgtaccctggaatgacaaatcagcaagcaagagagcaagtagaaagaggataccggatgtcagctccccagcactgtccagaggatatttccaaaatcatgatgaagtgttgggattataaacctgaaaatcgccctaagttcagtgaacttcagaaagagctcactatcatcaagagaaaactcacatagtgacaggatggcgccaaactcagccttcaggactctgtcctccagcagagtaacattattgttctcattaacaatgaatttataccacattaccttcgacagtcttctaccattattttttattaactgggtgttttaaaagtacgttccacttgtaaaaagtcaaaggcaaatttgttaaagaaataggcagtcctaccaagggctttcttagctaaccatagcaatcctaccatttcaggccattgcaaatagaaaagcacaggcttctaagtgtgtgaaggataaaagatctatcctatccttttcacaccttgtttctacttcaggcacagtttgtaggctgccatcctatgccacagaccctactccgttggtgctataaacagcattggtaatgccatgtttgcaggacatgttccaaccacagctggctttcacctctgccaaagcaggattatatttgtaaacaaacaaacagaattttatattgggaattatttggacctcctgagatttttcttttctttcttgccaggtataagcccaatgtaagaatcatcatgctcctacattatttgtaaggttgtcattttcctcctcctttgtctgggcatcagaaaacaatgcacgtaggtcgggcacggtggctcacgcc

SEQ ID NO: 154307 - DNA, 2469 bp, Artificial Sequence
  derived and/or modified sequence
atgggctttggatcagacctcaaaaattcccacgaggcagttctgaaacttcaggactgggaactgcgcctgctggagactgtgaagaaattcatggcactccggataaagagcgacaaagaatacgcatcgactctgcaaaacttatgcaatcaggtcgataaggagagtacagttcagatgaactacgtgagtaatgtctcaaagtcatggctgttgatgatacagcagaccgagcagcttagtcgcatcatgaaaacccacgcagaagatctcaactctggaccgttgcacagacttactatgatgatcaaagataagcagcaggtgaagaagtcgtacataggtgtgcaccaacagatagaggctgagatgattaaggttacaaaaactgagctagaaaagctgaagtgcagttacaggcagctgattaaggaaatgaactcagctaaggaaaagtacaaggaggccctggcaaaggggaaagagacggaaaaggccaaggaaaggtacgataaagccactatgaagttgcacatgctgcacaatcagtacgtcctggctctgaagggtgctcaactccaccaaaaccagtactatgacatcactttgcccctcttgctggactctcttcaaaagatgcaggaggagatgataaaagctctcaaagggatcttcgacgagtattcacagatcacatccctcgttacggaggaaatcgtgaacgtgcataaggaaatccagatgtcagtggagcagattgatccatcaactgagtataacaacttcatagatgtccaccggactacggcggctaaagaacaggaaatcgagttcgatacctctcttttagaagagaatgagaacctgcaggccaatgagataatgtggaacaacctgaccgccgagtcactccaagttatgctgaagactctggcggaagagctgatgcagacacagcaaatgctgctgaacaaagaggaggctgttcttgagctcgagaagcgcattgaggagagtagcgagacttgtgaaaaaaagtccgatatagtgcttctgctgtcacagaagcaggccctagaggaactgaaacagtccgtgcagcagcttaggtgtacagaagcaaagttttcagcacagaaggaactgttggagcagaaggtgcaggaaaacgatggaaaagaacccccccccgttgttaattatgaagaggacgcccgatcggtcaccagcatggagcggaaagaacgacttagcaaattcgaaagtatcaggcactcaattgcgggcatcattaggagccccaaaagtgccctcggctcttccgcattgtcagacatgatttccatttctgaaaaaccactggcggagcaggactggtatcacggagccattcccaggatcgaggcgcaagagttacttaagaagcagggggactttctcgtgcgggagtctcacggcaaacccggggaatatgtcttgagcgtgtacagtgatggacagcgacgacactttatcattcaatacgtggacaatatgtacagatttgaaggtacggggttctcaaatattccccaactcatcgatcaccattacacaacaaaacaggtcatcaccaagaaaagtggcgttgtgctgctcaaccctatccccaaagataaaaaatggatcctgtcacatgaggatgttatcctgggtgagctgttgggaaaagggaatttcggtgaggtgtataaggggacgctcaaggacaagacaagcgtagccgtcaagacatgtaaggaagatcttcctcaagagctgaagattaagtttctacaggaggctaagatccttaagcagtatgatcatcctaacatcgtcaaactaattggcgtatgtactcagcgtcaacctgtatacattattatggagcttgtctctggcggggactttttgacattcttgagacggaagaaagatgaactgaaacttaagcagctggtgaagttcagcctggacgccgcagccggcatgctgtatctggaaagcaagaactgcatacatcgggacttagccgctcgcaactgtctggttggcgagaacaacgtgttaaagatcagtgatttcggcatgtctcgccaggaggacgggggagtttactcttctagcggccttaagcagatccccataaagtggacagcccccgaagcactcaactatggtcgatactcatctgagagtgacgtgtggtcttttggaatccttctctgggaaacgttttcactaggggtatgtccctaccccggcatgaccaaccagcaggctagggagcaagtggaacggggatacaggatgagcgcacctcagcactgtccggaagatatatctaaaatcatgatgaaatgttgggattacaagccagaaaatagacctaagttcagtgaactccagaaggagcttacaatcatcaagcgcaagcttacttag

SEQ ID NO: 154308 - DNA, 2469 bp, Artificial Sequence
  derived and/or modified sequence
atgggctttggaagtgacctgaagaacagccatgaagctgtgctgaagctgcaggactgggagctgcggctgctggagaccgtgaagaagttcatggccctgcgcatcaagagtgacaaggagtatgccagcaccctgcagaacctgtgcaaccaggtggacaaggagagcacagtgcagatgaactacgtgtccaatgtgtccaagtcctggctgctgatgatccagcagacagagcagctgagccgcatcatgaagacccatgctgaggacctgaacagcggccccctgcaccggctgaccatgatgatcaaggacaagcagcaggtgaagaagagctacatcggcgtgcaccagcagattgaagctgagatgatcaaggtgaccaagacagagctggagaagctgaagtgcagctaccggcagctgatcaaggagatgaacagcgccaaggagaagtacaaggaggccctggccaagggcaaggagacagagaaggccaaggagagatatgacaaggccaccatgaagctgcacatgctgcacaaccagtatgtgctggccctgaagggggcccagctgcaccagaaccagtactatgacatcaccctgcccctgctgctggacagcctgcagaagatgcaggaggagatgatcaaggccctgaagggcatctttgatgagtacagccagatcaccagcctggtgacagaggagatcgtgaatgtgcacaaggagatccagatgtctgtggagcagattgaccccagcacagagtacaacaacttcattgatgtgcacaggaccacagctgccaaggagcaggagattgaatttgacaccagcctgctggaggagaatgaaaacctgcaggccaatgagatcatgtggaacaacctgacagctgagagcctgcaggtgatgctgaagaccctggccgaggagctgatgcagacccagcagatgctgctgaacaaggaggaggccgtgctggagctggagaagagaattgaggagagcagcgagacctgtgagaagaagagtgacatcgtgctgctgctgagccagaagcaggccctggaggagctgaagcagagcgtgcagcagctgcgctgcacagaggccaagttcagcgcccagaaggagctgctggagcagaaggtgcaggagaatgatggcaaggagcccccacctgtggtgaactatgaggaggatgcccggtctgtgacctccatggagaggaaggagcggctgagcaagtttgagagcatccgccacagcattgctggcatcatccgcagccccaagagcgccctgggcagcagcgccctgagtgacatgatcagcatcagcgagaagcccctggccgagcaggactggtaccacggggccatcccccgcatcgaggcccaggagctgctgaagaagcagggcgacttcctggtgcgggagagccacggcaagccaggagaatatgtgctgtctgtgtacagtgatggccagaggaggcacttcatcatccagtatgtggacaacatgtacagatttgagggcaccggcttcagcaacatcccccagctgattgaccaccactacaccaccaagcaggtgatcaccaagaagagcggcgtggtgctgctgaaccccatccccaaggacaagaagtggatcctgagccatgaagatgtgatcctgggggagctgctgggcaaaggaaactttggagaggtgtacaagggcaccctgaaggacaagacctctgtggccgtgaagacctgcaaggaggacctgccccaggagctgaagatcaagttcctgcaggaggccaagatcctgaagcagtatgaccaccccaacatcgtgaagctgattggagtgtgcacccagaggcagcctgtgtacatcatcatggagctggtgtctggaggagacttcctgaccttcctgcggaggaagaaggatgagctgaagctgaagcagctggtgaagttcagcctggatgctgctgctggcatgctgtacctggagagcaagaactgcatccaccgggacctggccgccaggaactgcctggtgggggagaacaacgtgctgaagatcagtgactttggcatgagccggcaggaggatggcggcgtgtacagcagcagcggcctgaagcagatccccatcaagtggacagcccctgaggccctgaactacggccgctacagcagcgagagtgatgtgtggagctttggcatcctgctgtgggagaccttcagcctgggcgtgtgcccctacccaggcatgaccaaccagcaggcccgggagcaggtggagcggggctacaggatgtctgccccccagcactgcccagaggacatcagcaagatcatgatgaagtgctgggactacaagccagagaaccggcccaagttcagcgagctgcagaaggagctgaccatcatcaagaggaagctgacctag

SEQ ID NO: 154309 - DNA, 2469 bp, Artificial Sequence
  derived and/or modified sequence
atgggcttcggcagcgacctgaagaacagccacgaggccgtgctgaagctgcaggattgggagctccgtctgctcgaaacagttaaaaagttcatggccctgagaattaagagcgacaaagagtatgcctccacgctacaaaacttgtgcaatcaagtagacaaggaaagtacagtgcagatgaactacgtgtccaatgtgtcgaaaagctggttgctgatgatccaacaaactgagcagctgagccgaattatgaaaacccacgctgaggacctgaattctggaccccttcaccggttgaccatgatgattaaggacaaacagcaggtgaagaaaagctatataggggtccatcagcaaatagaagccgagatgatcaaggttactaaaacagagctggaaaaactgaagtgtagctatcggcaattaattaaagaaatgaactcagctaaggagaaatacaaggaggcacttgccaaggggaaagagacggaaaaagcaaaggagcgatacgataaggccactatgaagcttcatatgctgcataatcagtatgtcctggccttgaaaggggcacaattacaccagaaccaatactacgacattaccctcccactgctgctggacagtctgcaaaaaatgcaggaggaaatgatcaaggcactgaaagggatatttgacgaatattctcagatcaccagtctggttaccgaggagattgtcaatgttcataaggagattcagatgtctgtggagcagatcgaccccagcactgaatacaacaattttatcgatgtccatcgaacaaccgccgccaaggagcaggaaattgaatttgacacctcgcttctggaagagaatgagaacttgcaggcaaacgagatcatgtggaacaatctcaccgccgaaagccttcaggttatgctgaagacgttggccgaagaactaatgcaaacacagcaaatgttgcttaataaggaagaagcggtattagagctggagaagcggatcgaagaaagcagtgagacatgtgagaagaagtctgacattgttctgctgctatctcagaagcaagcactagaggaactgaagcaaagcgtccagcagctcagatgtaccgaagcaaagtttagcgcccaaaaggagttattagaacagaaggttcaggagaatgatggcaaagaacccccacctgtggtcaattatgaggaggacgcgcgttctgttaccagtatggaaaggaaagagcggctatcgaaatttgagagtattaggcactccattgctggaattatcagaagccctaagtccgctcttggatcttctgccctatcggatatgatttccatctcggagaagccactcgctgagcaggactggtatcacggggctataccccgtatcgaggcacaggaactcctcaaaaagcagggggatttccttgtacgcgagtctcatggaaaaccaggagaatacgtccttagtgtttattctgatggccagcgcaggcacttcattattcaatacgttgacaacatgtacagattcgaagggaccggtttctctaatatcccacagctgatcgaccaccactatacaaccaaacaagtgatcactaagaagtcgggcgtggtcctgttgaaccccatcccaaaagacaaaaagtggatcctgtcccacgaagatgtcatcctgggggagcttctcggtaagggcaactttggggaagtgtataaagggaccttgaaagataagacatctgtagcagtgaaaacttgcaaagaagacttgcctcaagagctgaaaatcaaatttctgcaggaggccaagatacttaaacagtacgaccaccccaacatcgtgaagctgattggagtctgtacacagaggcagccagtttacattatcatggaacttgtctcaggcggcgatttcctgacatttctgagacgaaagaaagatgagttgaaactgaaacagttggtgaagttctctctggacgccgctgccggtatgctgtacctggagagcaaaaactgcatccacagagaccttgccgctcgcaattgtctcgttggcgagaacaatgttttaaaaattagtgacttcggaatgagccgtcaggaggacggcggagtttattcctcatctggcctgaaacagatcccgatcaaatggaccgccccggaagcattgaactacggcagatactcaagcgagtctgatgtctggtcctttggcatcctcttatgggaaactttttctctaggcgtctgcccatacccaggcatgacgaaccagcaggccagggagcaggtggaacgagggtaccgcatgtccgcaccccagcactgtcctgaagatatcagcaagatcatgatgaaatgttgggattataagccagaaaatcgtccaaagttctcagagcttcagaaagagcttaccattatcaagcgtaaactgacttag

SEQ ID NO: 154310 - DNA, 2469 bp, Artificial Sequence
  derived and/or modified sequence
atgggctttggctcagatctgaagaattcccatgaagccgtgctcaaactgcaggactgggaacttcgcctgctagagactgttaaaaaattcatggccctgcgcataaaaagtgacaaagagtatgctagtactctgcagaatctgtgtaatcaggtggacaaggaaagcaccgtacagatgaactacgtgtccaacgtaagtaaatcatggctgctgatgattcagcagactgagcagctaagcaggatcatgaaaacccatgcggaggaccttaactccggaccacttcacagactgaccatgatgataaaggataaacaacaggtaaaaaagtcatatatcggggtgcatcagcaaatcgaagccgaaatgatcaaggttaccaaaacagagctggaaaagttgaagtgtagttaccgacagctgattaaggagatgaatagtgccaaggaaaaatataaggaggcacttgccaaaggcaaggagacggaaaaggctaaggaaaggtatgataaagcaacaatgaaactccacatgctgcacaaccagtacgtgttggccctgaaaggggcacagttacaccagaatcaatactacgatatcaccctgcccctgctgttagacagcctccagaagatgcaggaggaaatgatcaaagccctgaaggggatatttgatgagtattcgcagatcacatcactggtcacggaggaaatcgtcaatgtgcacaaggagattcagatgtctgtggaacagatcgacccaagtacagagtacaataatttcattgatgttcatcggacgactgccgctaaagaacaggagattgaatttgatacctcactgctggaggaaaacgagaacctgcaggccaacgagattatgtggaataacctgactgccgagagtctgcaggtgatgctcaagacgctggccgaagaactgatgcagacgcagcaaatgcttctgaacaaagaggaggcagtgctggagctcgagaagagaatagaagaatctagcgaaacatgtgagaagaagtcagacatcgtcttgctgcttagccagaagcaggctctggaagaactgaagcaatccgttcaacagctacggtgcactgaggcaaaattcagtgcccagaaggaacttctggaacagaaggtgcaggagaatgacggaaaggagcccccacctgtagttaattacgaagaggatgcacggtcagtgacatccatggagaggaaggagaggctgtcgaaattcgagtctattagacattctattgctggaatcattcgatcaccaaagagcgctttggggagtagcgctttgtctgacatgatctctatctccgaaaaacctttagctgaacaggactggtatcacggagccatccctcgtatcgaggcacaggaacttctcaagaaacaaggcgacttcctggtgcgtgaatctcatggcaaaccaggagagtacgttctttctgtttattccgatggccagaggcgacattttattattcagtacgtcgataatatgtatagattcgagggcacaggtttcagcaatatcccacagctcatagaccaccattacaccaccaagcaggtgattacaaaaaaatccggggtggtgctactgaatcctattccgaaagacaaaaaatggatattaagtcacgaggacgttatcctgggcgagctgttggggaaagggaacttcggggaggtgtacaagggaactctcaaggacaaaactagcgttgccgtcaagacctgtaaggaagatctcccccaggagctaaaaatcaagttcctgcaggaggccaaaattctcaagcaatacgatcaccccaacattgttaaactgattggtgtgtgcacccaacggcaaccagtctacatcattatggaattggtcagcggcggagacttcctcaccttcctgaggagaaagaaagacgagctgaaactgaaacagctggttaagttcagccttgatgcagctgccggtatgttgtacctcgaatccaaaaattgcatccatcgcgatctcgcggctagaaattgtctcgtgggagagaacaatgtgcttaagatctctgattttgggatgtctcgccaagaagatggcggtgtctattcttcaagcggccttaaacagattccaataaagtggacagcccctgaagcactgaattatgggaggtatagcagtgaaagtgacgtgtggagttttgggatcctgctctgggaaaccttctctctcggtgtctgcccatatccaggtatgactaaccagcaggctagagagcaggtcgagcggggataccgtatgagcgccccacagcactgtccggaagacattagcaaaatcatgatgaaatgctgggattacaagcccgaaaataggccaaaatttagcgagctccagaaggagctcaccataatcaagcgcaaacttacctag

SEQ ID NO: 154311 - DNA, 2469 bp, Artificial Sequence
  derived and/or modified sequence
atgggcttcggcagcgacctgaagaacagccacgaggccgtgctgaagctgcaggactgggagctgagactgctggagaccgtgaagaagttcatggccctgagaatcaagagcgacaaggagtacgccagcaccctgcagaacctgtgcaaccaggtggacaaggagagcaccgtgcagatgaactacgtgagcaacgtgagcaagagctggctgctgatgatccagcagaccgagcagctgagcagaatcatgaagacccacgccgaggacctgaacagcggccccctgcacagactgaccatgatgatcaaggacaagcagcaggtgaagaagagctacatcggcgtgcaccagcagatcgaggccgagatgatcaaggtgaccaagaccgagctggagaagctgaagtgcagctacagacagctgatcaaggagatgaacagcgccaaggagaagtacaaggaggccctggccaagggcaaggagaccgagaaggccaaggagagatacgacaaggccaccatgaagctgcacatgctgcacaaccagtacgtgctggccctgaagggcgcccagctgcaccagaaccagtactacgacatcaccctgcccctgctgctggacagcctgcagaagatgcaggaggagatgatcaaggccctgaagggcatcttcgacgagtacagccagatcaccagcctggtgaccgaggagatcgtgaacgtgcacaaggagatccagatgagcgtggagcagatcgaccccagcaccgagtacaacaacttcatcgacgtgcacagaaccaccgccgccaaggagcaggagatcgagttcgacaccagcctgctggaggagaacgagaacctgcaggccaacgagatcatgtggaacaacctgaccgccgagagcctgcaggtgatgctgaagaccctggccgaggagctgatgcagacccagcagatgctgctgaacaaggaggaggccgtgctggagctggagaagagaatcgaggagagcagcgagacctgcgagaagaagagcgacatcgtgctgctgctgagccagaagcaggccctggaggagctgaagcagagcgtgcagcagctgagatgcaccgaggccaagttcagcgcccagaaggagctgctggagcagaaggtgcaggagaacgacggcaaggagcccccccccgtggtgaactacgaggaggacgccagaagcgtgaccagcatggagagaaaggagagactgagcaagttcgagagcatcagacacagcatcgccggcatcatcagaagccccaagagcgccctgggcagcagcgccctgagcgacatgatcagcatcagcgagaagcccctggccgagcaggactggtaccacggcgccatccccagaatcgaggcccaggagctgctgaagaagcagggcgacttcctggtgagagagagccacggcaagcccggcgagtacgtgctgagcgtgtacagcgacggccagagaagacacttcatcatccagtacgtggacaacatgtacagattcgagggcaccggcttcagcaacatcccccagctgatcgaccaccactacaccaccaagcaggtgatcaccaagaagagcggcgtggtgctgctgaaccccatccccaaggacaagaagtggatcctgagccacgaggacgtgatcctgggcgagctgctgggcaagggcaacttcggcgaggtgtacaagggcaccctgaaggacaagaccagcgtggccgtgaagacctgcaaggaggacctgccccaggagctgaagatcaagttcctgcaggaggccaagatcctgaagcagtacgaccaccccaacatcgtgaagctgatcggcgtgtgcacccagagacagcccgtgtacatcatcatggagctggtgagcggcggcgacttcctgaccttcctgagaagaaagaaggacgagctgaagctgaagcagctggtgaagttcagcctggacgccgccgccggcatgctgtacctggagagcaagaactgcatccacagagacctggccgccagaaactgcctggtgggcgagaacaacgtgctgaagatcagcgacttcggcatgagcagacaggaggacggcggcgtgtacagcagcagcggcctgaagcagatccccatcaagtggaccgcccccgaggccctgaactacggcagatacagcagcgagagcgacgtgtggagcttcggcatcctgctgtgggagaccttcagcctgggcgtgtgcccctaccccggcatgaccaaccagcaggccagagagcaggtggagagaggctacagaatgagcgccccccagcactgccccgaggacatcagcaagatcatgatgaagtgctgggactacaagcccgagaacagacccaagttcagcgagctgcagaaggagctgaccatcatcaagagaaagctgacctag

SEQ ID NO: 154312 - protein, 239 aa, Artificial Sequence
  derived and/or modified sequence
MGLIWLLLLSLLEPGWPAAGPGARLRRDAGGRGGVYEHLGGAPRRRKLYCATKYHLQLHPSGRVNGSLENSAYSILEITAVEVGIVAIRGLFSGRYLAMNKRGRLYASEHYSAECEFVERIHELGYNTYASRLYRTVSSTPGARRQPSAERLWYVSVNGKGRPRRGFKTRRTQKSSLFLPRVLDHRDHEMVRQLQSGLPRPPGKGVQPRRRRQKQSPDNLEPSHVQASRLGSQLEASAH

SEQ ID NO: 154313 - DNA, 720 bp, Artificial Sequence
  derived and/or modified sequence
atgggcctgatctggctgctgctgctgagcctgctggagcccggctggcccgccgccggccccggcgccagactgagaagagacgccggcggcagaggcggcgtgtacgagcacctgggcggcgcccccagaagaagaaagctgtactgcgccaccaagtaccacctgcagctgcaccccagcggcagagtgaacggcagcctggagaacagcgcctacagcatcctggagatcaccgccgtggaggtgggcatcgtggccatcagaggcctgttcagcggcagatacctggccatgaacaagagaggcagactgtacgccagcgagcactacagcgccgagtgcgagttcgtggagagaatccacgagctgggctacaacacctacgccagcagactgtacagaaccgtgagcagcacccccggcgccagaagacagcccagcgccgagagactgtggtacgtgagcgtgaacggcaagggcagacccagaagaggcttcaagaccagaagaacccagaagagcagcctgttcctgcccagagtgctggaccacagagaccacgagatggtgagacagctgcagagcggcctgcccagaccccccggcaagggcgtgcagcccagaagaagaagacagaagcagagccccgacaacctggagcccagccacgtgcaggccagcagactgggcagccagctggaggccagcgcccactag

SEQ ID NO: 154314 - DNA, 720 bp, Artificial Sequence
  derived and/or modified sequence
atgggcctcatctggctgctgcttttatccctgcttgagcctgggtggcctgctgccggccccggagcccggcttagacgcgatgccgggggtcgcggcggggtgtacgagcatctgggaggagcccctcgtaggcgaaagctgtattgtgcaacgaagtatcacttacaactgcatcccagcggcagagttaatggaagcctcgaaaactccgcttattccattctggagataacggcggtcgaggttggcatcgtggccatccgtggccttttttccggccgatacttagcaatgaacaaacgtggtcgcctgtatgcatccgagcactactcggccgaatgcgaatttgtggagagaattcatgaattaggatacaatacttatgcctccaggctgtataggactgtgtcctcaactcccggcgccagaaggcagccctcagctgaaagactgtggtatgttagcgtgaacgggaagggtcggccacgccgcggattcaaaacacggcgcactcagaagagttccctgttcctaccccgggtcctggatcatagggatcatgagatggtgcgtcagctccaatctggcctgcccaggccacccggcaaaggggtgcagcccagaagaagacgccaaaagcagagtcccgacaacctcgaaccttctcatgtgcaagcctcccgacttgggagccagctggaagcctcagcccactag

SEQ ID NO: 154315 - DNA, 720 bp, Artificial Sequence
  derived and/or modified sequence
atgggcctcatctggctgctgctgctgagcctgctggagcccggctggccagctgctggccctggggcccggctgcggagagatgctgggggccggggcggcgtgtatgagcacctgggcggggcccccaggaggaggaagctgtactgtgccaccaagtaccacctgcagctgcaccccagcggccgggtgaatggcagcctggagaacagcgcctacagcatcctggagatcacagctgtggaggtgggcatcgtggccatccggggcctcttcagcggccgctacctggccatgaacaagaggggccgcctgtatgccagcgagcactacagcgcagaatgtgaatttgtggagcgcatccacgagctgggctacaacacctacgccagccggctgtacagaacagtgagcagcacccctggggcccggcggcagcccagcgctgagcggctgtggtacgtgtctgtgaatggcaagggccggccccggcggggcttcaagaccaggaggacccagaagagcagcctcttcctgccccgggtgctggaccaccgggaccacgagatggtgcggcagctgcagagcggcctgcccaggcctcctgggaagggcgtgcagcccaggagaagacggcagaagcagagcccagacaacctggagcccagccacgtgcaggccagccggctgggcagccagctggaggccagcgcccactag

SEQ ID NO: 154316 - DNA, 720 bp, Artificial Sequence
  derived and/or modified sequence
atgggcctgatctggctgctgctgctgagcctgctggagcccggctggcccgctgccggccccggtgcaagactcaggagagacgccggaggaaggggcggagtatatgaacacctgggtggggcaccccggagacgaaagttgtattgtgccaccaaataccaccttcagttgcacccatctgggcgtgtcaacggcagcctggaaaatagcgcctacagtatcctggaaatcacggccgtggaggtgggcatcgttgctattcgtggcctcttctctggcagatatctggcaatgaataagcgcggtaggctatatgccagcgagcactatagcgctgaatgcgaatttgtagaaaggatccacgagctgggttacaacacctatgcctcacggctgtataggactgtgagctccactcctggggcccgcagacagccatccgcagagaggctctggtacgtatccgtcaatggcaaggggaggccccggcggggatttaagactcgccgtactcagaaatctagcctcttcctcccgagggtactggaccaccgggaccatgaaatggtgaggcaactgcagagcggattgccccgcccacccggcaaaggagttcagccccgtcgccgccggcaaaagcagtctcccgacaacctggagccgtcccacgtacaggctagcagactcggttcacagctcgaagctagcgcccattag

SEQ ID NO: 154317 - DNA, 720 bp, Artificial Sequence
  derived and/or modified sequence
atgggactgatatggctgttgctgctcagtctgcttgagccaggctggccagctgcaggacccggagctagattacgacgagatgcaggcggacgaggcggagtctatgagcacctgggcggagccccaagacggaggaaactgtattgtgcaacgaaatatcacttgcagttgcacccatctggtcgggtcaacggttctttagaaaattcagcttacagcatcctggagattaccgcagtggaggtagggatcgtggctatacgcggactgtttagtggtaggtatctcgccatgaataaacggggtagactttacgcctcagagcactatagcgccgaatgcgaattcgtcgaaaggatccatgagctggggtataatacttacgcttccagattgtacagaacagtctcttcaacacctggggctcgacggcagccttccgcagaaaggctgtggtacgtgtcagttaacggcaaggggagaccacgacgagggttcaagacccgcaggactcagaaatcctcactcttcctacctagagtgctggatcaccgggatcatgagatggtgcggcaattacaatccggcctgcctcggccacccggaaagggcgtgcagcctcgcaggagacgtcagaaacaatcaccagataatctggaacccagccacgtgcaggcttcacgcctgggctcacagttggaggcttctgcgcattag

SEQ ID NO: 154318 - DNA, 892 bp, Artificial Sequence
  derived and/or modified sequence
gagcacctcgcagctgtccggctgccgccccttccatgggcgccgcgctcgcctgcagccgccgccgccgcggggcgggcgcgatgccacgatgggcctaatctggctgctactgctcagcctgctggagcccggctggcccgcagcgggccctggggcgcggttgcggcgcgatgcgggcggccgtggcggcgtctacgagcaccttggcggggcgccccggcgccgcaagctctactgcgccacgaagtaccacctccagctgcacccgagcggccgcgtcaacggcagcctggagaacagcgcctacagtattttggagataacggcagtggaggtgggcattgtggccatcaggggtctcttctccgggcggtacctggccatgaacaagaggggacgactctatgcttcggagcactacagcgccgagtgcgagtttgtggagcggatccacgagctgggctataatacgtatgcctcccggctgtaccggacggtgtctagtacgcctggggcccgccggcagcccagcgccgagagactgtggtacgtgtctgtgaacggcaagggccggccccgcaggggcttcaagacccgccgcacacagaagtcctccctgttcctgccccgcgtgctggaccacagggaccacgagatggtgcggcagctacagagtgggctgcccagaccccctggtaagggggtccagccccgacggcggcggcagaagcagagcccggataacctggagccctctcacgttcaggcttcgagactgggctcccagctggaggccagtgcgcactagctgggcctggtggccaccgccagagctcctggcgacatcttggcgtggcagcctcttgactctgactctcctccttgagcc

SEQ ID NO: 154319 - DNA, 1548 bp, Artificial Sequence
  derived and/or modified sequence
gacctttcagagccaggagggctttcgggggcgtggggcgcgctgcggagcggagccgcggctcgacggcggtgcgctggcggcgagtgtatgcagacggcgcccggcccgaaccccgagccccgcggggctccccacccgccggcctcccgcccctcccgcgcctccgcctggggaccacgtcggccttttgttggcgaaccgtcctttctttcagcgctttgcgcagcaacggaaatttcattgctcctgggtggaaattaaagggactcgcgttccctctctccctctccctctcccactctccctctctttctctctctcgcccacccttcccccttcttcccccacctttcccgcgaagccggagtcagcatctccaggcgcgggatcccgctccgagcacctcgcagctgtccggctgccgccccttccatgggcgccgcgctcgcctgcagccgccgccgccgcggggcgggcgcgatgccacgatgggcctaatctggctgctactgctcagcctgctggagcccggctggcccgcagcgggccctggggcgcggttgcggcgcgatgcgggcggccgtggcggcgtctacgagcaccttggcggggcgccccggcgccgcaagctctactgcgccacgaagtaccacctccagctgcacccgagcggccgcgtcaacggcagcctggagaacagcgcctacagtattttggagataacggcagtggaggtgggcattgtggccatcaggggtctcttctccgggcggtacctggccatgaacaagaggggacgactctatgcttcggagcactacagcgccgagtgcgagtttgtggagcggatccacgagctgggctataatacgtatgcctcccggctgtaccggacggtgtctagtacgcctggggcccgccggcagcccagcgccgagagactgtggtacgtgtctgtgaacggcaagggccggccccgcaggggcttcaagacccgccgcacacagaagtcctccctgttcctgccccgcgtgctggaccacagggaccacgagatggtgcggcagctacagagtgggctgcccagaccccctggtaagggggtccagccccgacggcggcggcagaagcagagcccggataacctggagccctctcacgttcaggcttcgagactgggctcccagctggaggccagtgcgcactagctgggcctggtggccaccgccagagctcctggcgacatcttggcgtggcagcctcttgactctgactctcctccttgagcccttgcccctgcgtcccgcgtctgggttctcagctatttccagagccagctcaaatcagggtccagtgggaactgaagagggcccaagtcggagctcggagggggctgcctgcaatgcagggcatttgtgggtctgtgtggcaggaagccggcagggaagggcctgagtgccagccctggcagactgaggagcctcccaggagcagcggggcagtgtggggctttgtgtcatcacaacattaaagtattttattcta

SEQ ID NO: 154320 - protein, 489 aa, Artificial Sequence [sequence omitted]

SEQ ID NO: 154321 - DNA, 2600 bp, Artificial Sequence
  derived and/or modified sequence
aggggtggttgctgcttttgctacatgacttgccagcgcccgagcctgcggtccaactgcgctgctgccggagcgctcagtgccgccgctgccgcccgcgccccccgcgccccgttcggcacccaccggtcgccgccgcccgccgcgccgctgtcccgctcccgcgccgccgccgccgtttccccccgacgactgggtgatgctggacatgggagataggaaagaggtgaaaatgatccccaagtcctcgttcagcatcaacagcctggtgcccgaggcggtccagaacgacaaccaccacgcgagccacggccaccacaacagccaccacccccagcaccaccaccaccaccaccaccatcaccaccacccgccgccgcccgccccgcaaccgccgccgccgccgcagcagcagcagccgccgccgccgccgcccccggcaccgcagcccccccagacgcggggcgccccggccgccgacgacgacaagggcccccagcagctgctgctcccgccgccgccaccgccaccaccggccgccgccctggacggggctaaagcggacgggctgggcggcaagggcgagccgggcggcgggccgggggagctggcgcccgtcgggccggacgagaaggagaagggcgccggcgccgggggggaggagaagaagggggcgggcgagggcggcaaggacggggaggggggcaaggagggcgagaagaagaacggcaagtacgagaagccgccgttcagctacaacgcgctcatcatgatggccatccggcagagccccgagaagcggctcacgctcaacggcatctacgagttcatcatgaagaacttcccttactaccgcgagaacaagcagggctggcagaactccatccgccacaatctgtccctcaacaagtgcttcgtgaaggtgccgcgccactacgacgacccgggcaagggcaactactggatgctggacccgtcgagcgacgacgtgttcatcggcggcaccacgggcaagctgcggcgccgctccaccacctcgcgggccaagctggccttcaagcgcggtgcgcgcctcacctccaccggcctcaccttcatggaccgcgccggctccctctactggcccatgtcgcccttcctgtccctgcaccacccccgcgccagcagcactttgagttacaacggcaccacgtcggcctaccccagccaccccatgccctacagctccgtgttgactcagaactcgctgggcaacaaccactccttctccaccgccaacggcctgagcgtggaccggctggtcaacggggagatcccgtacgccacgcaccacctcacggccgccgcgctagccgcctcggtgccctgcggcctgtcggtgccctgctctgggacctactccctcaacccctgctccgtcaacctgctcgcgggccagaccagttactttttcccccacgtcccgcacccgtcaatgacttcgcagagcagcacgtccatgagcgccagggccgcgtcctcctccacgtcgccgcaggccccctcgaccctgccctgtgagtctttaagaccctctttgccaagttttacgacgggactgtctgggggactgtctgattatttcacacatcaaaatcaggggtcttcttccaaccctttaatacattaacatccctgggaccagactgtaagtgaacgttttacacacatttgcattgtaaatgataattaaaaaaataagtccaggtattttttattaagcccccccctcccatttctgtacgtttgttcagtctctagggttgtttattattctaacaaggtgtggagtgtcagcgaggtgcaatgtggggagaatacattgtagaatataaggtttggaagtcaaattatagtagaatgtgtatctaaatagtgactgctttgccatttcattcaaacctgacaagtctatctctaagagccgccagatttccatgtgtgcagtattataagttatcatggaactatatggtggacgcagaccttgagaacaacctaaattatggggagaattttaaaatgttaaactgtaatttgtatttaaaaagcattcgtagtaaaggtgcccaagaaattattttggccatttattgttttgtccttttctttaaagaactgtttttttttcttttgtttacttttagaccaaagattgggttctagaaaatgcacttggtatactaagtattaaaacaaacaaaaaggaaagttgtttcagttggcaacactgcccattcaattgaatcagaaggggacaaaattaacgattgccttcagtttgtgttgtgtatattttgatgtatgtggtcactaacaggtcacttttattttttctaaatgtagtgaaatgttaatacctattgtacttataggtaaaccttgcaaatatgtaacctgtgttgcgcaaatgccgcataaatttgagtgattgttaatgttgtcttaaaatttcttgattgtgatactgtggtcatatgcccgtgtttgtcacttacaaaaatgtttactatgaacacacagaaataaaaaataggctaaattcaaaaaaaaaaaaaaaa

SEQ ID NO: 154322 - DNA, 2584 bp, Artificial Sequence
  derived and/or modified sequence
aggggtggttgctgcttttgctacatgacttgccagcgcccgagcctgcggtccaactgcgctgctgccggagcgctcagtgccgccgctgccgcccgcgccccccgcgccccgttcggcacccaccggtcgccgccgcccgccgcgccgctgtcccgctcccgcgccgccgccgccgtttccccccgacgactgggtgatgctggacatgggagataggaaagaggtgaaaatgatccccaagtcctcgttcagcatcaacagcctggtgcccgaggcggtccagaacgacaaccaccacgcgagccacggccaccacaacagccaccacccccagcaccaccaccaccaccaccaccatcaccaccacccgccgccgcccgccccgcaaccgccgccgccgccgcagcagcagcagccgccgccgccgccgcccccggcaccgcagcccccccagacgcggggcgccccggccgccgacgacgacaagggcccccagcagctgctgctcccgccgccgccaccgccaccaccggccgccgccctggacggggctaaagcggacgggctgggcggcaagggcgagccgggcggcgggccgggggagctggcgcccgtcgggccggacgagaaggagaagggcgccggcgccgggggggaggagaagaagggggcgggcgagggcggcaaggacggggaggggggcaaggagggcgagaagaagaacggcaagtacgagaagccgccgttcagctacaacgcgctcatcatgatggccatccggcagagccccgagaagcggctcacgctcaacggcatctacgagttcatcatgaagaacttcccttactaccgcgagaacaagcagggctggcagaactccatccgccacaatctgtccctcaacaagtgcttcgtgaaggtgccgcgccactacgacgacccgggcaagggcaactactggatgctggacccgtcgagcgacgacgtgttcatcggcggcaccacgggcaagctgcggcgccgctccaccacctcgcgggccaagctggccttcaagcgcggtgcgcgcctcacctccaccggcctcaccttcatggaccgcgccggctccctctactggcccatgtcgcccttcctgtccctgcaccacccccgcgccagcagcactttgagttacaacggcaccacgtcggcctaccccagccaccccatgccctacagctccgtgttgactcagaactcgctgggcaacaaccactccttctccaccgccaacggcctgagcgtggaccggctggtcaacggggagatcccgtacgccacgcaccacctcacggccgccgcgctagccgcctcggtgccctgcggcctgtcggtgccctgctctgggacctactccctcaacccctgctccgtcaacctgctcgcgggccagaccagttactttttcccccacgtcccgcacccgtcaatgacttcgcagagcagcacgtccatgagcgccagggccgcgtcctcctccacgtcgccgcaggccccctcgaccctgccctgtgagtctttaagaccctctttgccaagttttacgacgggactgtctgggggactgtctgattatttcacacatcaaaatcaggggtcttcttccaaccctttaatacattaacatccctgggaccagactgtaagtgaacgttttacacacatttgcattgtaaatgataattaaaaaaataagtccaggtattttttattaagcccccccctcccatttctgtacgtttgttcagtctctagggttgtttattattctaacaaggtgtggagtgtcagcgaggtgcaatgtggggagaatacattgtagaatataaggtttggaagtcaaattatagtagaatgtgtatctaaatagtgactgctttgccatttcattcaaacctgacaagtctatctctaagagccgccagatttccatgtgtgcagtattataagttatcatggaactatatggtggacgcagaccttgagaacaacctaaattatggggagaattttaaaatgttaaactgtaatttgtatttaaaaagcattcgtagtaaaggtgcccaagaaattattttggccatttattgttttgtccttttctttaaagaactgtttttttttcttttgtttacttttagaccaaagattgggttctagaaaatgcacttggtatactaagtattaaaacaaacaaaaaggaaagttgtttcagttggcaacactgcccattcaattgaatcagaaggggacaaaattaacgattgccttcagtttgtgttgtgtatattttgatgtatgtggtcactaacaggtcacttttattttttctaaatgtagtgaaatgttaatacctattgtacttataggtaaaccttgcaaatatgtaacctgtgttgcgcaaatgccgcataaatttgagtgattgttaatgttgtcttaaaatttcttgattgtgatactgtggtcatatgcccgtgtttgtcacttacaaaaatgtttactatgaacacacagaaataaaaaataggctaaattc

SEQ ID NO: 154323 - DNA, 2754 bp, Artificial Sequence
  derived and/or modified sequence
gagattgtttggtactgttttctctctgggcacctctcatttcggaaggccatcagaggcgcccactactgagcggccccggccgccgcagcagcacccggagccccagtcccggtttccccgcggtgccggagcccggagctcgccgccgcccaggcctcaggaatcgaaggggtggttgctgcttttgctacatgacttgccagcgcccgagcctgcggtccaactgcgctgctgccggagcgctcagtgccgccgctgccgcccgcgccccccgcgccccgttcggcacccaccggtcgccgccgcccgccgcgccgctgtcccgctcccgcgccgccgccgccgtttccccccgacgactgggtgatgctggacatgggagataggaaagaggtgaaaatgatccccaagtcctcgttcagcatcaacagcctggtgcccgaggcggtccagaacgacaaccaccacgcgagccacggccaccacaacagccaccacccccagcaccaccaccaccaccaccaccatcaccaccacccgccgccgcccgccccgcaaccgccgccgccgccgcagcagcagcagccgccgccgccgccgcccccggcaccgcagcccccccagacgcggggcgccccggccgccgacgacgacaagggcccccagcagctgctgctcccgccgccgccaccgccaccaccggccgccgccctggacggggctaaagcggacgggctgggcggcaagggcgagccgggcggcgggccgggggagctggcgcccgtcgggccggacgagaaggagaagggcgccggcgccgggggggaggagaagaagggggcgggcgagggcggcaaggacggggaggggggcaaggagggcgagaagaagaacggcaagtacgagaagccgccgttcagctacaacgcgctcatcatgatggccatccggcagagccccgagaagcggctcacgctcaacggcatctacgagttcatcatgaagaacttcccttactaccgcgagaacaagcagggctggcagaactccatccgccacaatctgtccctcaacaagtgcttcgtgaaggtgccgcgccactacgacgacccgggcaagggcaactactggatgctggacccgtcgagcgacgacgtgttcatcggcggcaccacgggcaagctgcggcgccgctccaccacctcgcgggccaagctggccttcaagcgcggtgcgcgcctcacctccaccggcctcaccttcatggaccgcgccggctccctctactggcccatgtcgcccttcctgtccctgcaccacccccgcgccagcagcactttgagttacaacggcaccacgtcggcctaccccagccaccccatgccctacagctccgtgttgactcagaactcgctgggcaacaaccactccttctccaccgccaacggcctgagcgtggaccggctggtcaacggggagatcccgtacgccacgcaccacctcacggccgccgcgctagccgcctcggtgccctgcggcctgtcggtgccctgctctgggacctactccctcaacccctgctccgtcaacctgctcgcgggccagaccagttactttttcccccacgtcccgcacccgtcaatgacttcgcagagcagcacgtccatgagcgccagggccgcgtcctcctccacgtcgccgcaggccccctcgaccctgccctgtgagtctttaagaccctctttgccaagttttacgacgggactgtctgggggactgtctgattatttcacacatcaaaatcaggggtcttcttccaaccctttaatacattaacatccctgggaccagactgtaagtgaacgttttacacacatttgcattgtaaatgataattaaaaaaataagtccaggtattttttattaagcccccccctcccatttctgtacgtttgttcagtctctagggttgtttattattctaacaaggtgtggagtgtcagcgaggtgcaatgtggggagaatacattgtagaatataaggtttggaagtcaaattatagtagaatgtgtatctaaatagtgactgctttgccatttcattcaaacctgacaagtctatctctaagagccgccagatttccatgtgtgcagtattataagttatcatggaactatatggtggacgcagaccttgagaacaacctaaattatggggagaattttaaaatgttaaactgtaatttgtatttaaaaagcattcgtagtaaaggtgcccaagaaattattttggccatttattgttttgtccttttctttaaagaactgtttttttttcttttgtttacttttagaccaaagattgggttctagaaaatgcacttggtatactaagtattaaaacaaacaaaaaggaaagttgtttcagttggcaacactgcccattcaattgaatcagaaggggacaaaattaacgattgccttcagtttgtgttgtgtatattttgatgtatgtggtcactaacaggtcacttttattttttctaaatgtagtgaaatgttaatacctattgtacttataggtaaaccttgcaaatatgtaacctgtgttgcgcaaatgccgcataaatttgagtgattgttaatgttgtcttaaaatttcttgattgtgatactgtggtcatatgcccgtgtttgtcacttacaaaaatgtttactatgaacacacagaaataaaaaataggctaaattc

SEQ ID NO: 154324 - DNA, 1470 bp, Artificial Sequence
  derived and/or modified sequence
atgctggatatgggagatagaaaagaagttaaaatgattcctaagtcatctttcagtatcaatagtctggtgcccgaggccgttcaaaatgacaatcatcacgcgagccacggccaccacaatagccaccacccacagcaccatcaccatcatcaccatcaccaccatcaccctccaccccctgccccccagccccctcccccaccacaacagcagcagccgccccctcctcctccccccgctccccagccgccccaaacacgtggagccccggcagcagatgacgataaggggccccagcagttgttattgccaccaccccccccgccaccacctgctgcagccttggatggggccaaagccgacgggttgggcggcaaaggagagccgggcgggggcccaggcgagctcgctcccgtcggcccagatgaaaaggagaagggcgcgggcgctggcggcgaagagaaaaaaggtgctggggagggtggtaaggatggggaagggggtaaggaaggagagaagaagaatggtaagtacgagaagccacccttctcttacaatgcccttatcatgatggccatccggcaatcacccgaaaagcggctcacgctaaatggcatctacgagttcattatgaaaaatttcccctattatagagaaaataagcaggggtggcagaatagcatcagacacaatttgtccctcaataaatgctttgtgaaagtcccccgccattatgatgatccaggaaaagggaactactggatgctggatccctccagcgatgatgtgttcattggcgggacgactggcaagctgcgcagaaggtccactacaagtagagcaaagttggcattcaaacgaggggcacgtttaacctcaacaggtttgacgttcatggacagagctgggtcgctgtattggcccatgtcccctttcctgtcactacaccaccctagagccagttccactttgagctataacggcaccacaagtgcttacccctcccatccaatgccctatagttctgttctgacccagaattccctgggcaacaatcactcctttagcaccgcaaatggtctctccgtcgatcgtctggtgaacggtgagatcccatatgcaacacaccatcttacagcggccgctctggccgcgagcgtgccgtgcggtctcagtgtaccgtgctctggcacctattccctcaacccctgttccgttaatcttctcgcagggcagacatcatatttcttcccccatgttccccacccctctatgacttcccagtcaagcaccagtatgtccgcacgagcggcgagtagttccacgagcccccaggcacctagcactctgccttgtgaatcactgcgccctagtctgcccagctttacaaccgggttatcaggcggtttatcagattactttacacaccaaaaccaggggtctagttccaacccactaattcattag

SEQ ID NO: 154325 - DNA, 1470 bp, Artificial Sequence
  derived and/or modified sequence
atgcttgacatgggtgatcggaaagaagtgaagatgatccccaagtcatccttcagcattaacagcctcgtgccggaggctgtgcaaaacgacaatcatcatgcttcccatggccatcataacagccatcacccacaacatcatcaccaccaccaccaccaccatcatcaccctcctccccccgcaccgcagccccctcccccgcctcagcagcagcagccacctccgccgccaccaccagctccgcagccgcctcaaacacgtggagcgccagcagcggatgacgacaagggcccacagcagcttctgcttccccctcctcctcccccaccacccgcagccgcattagacggggctaaagcagatgggttgggcggcaagggtgagccaggaggcggaccgggagaacttgctcctgtcggcccggatgaaaaagagaagggcgcgggagccgggggcgaggagaagaaaggggcgggtgaggggggtaaggatggggaaggaggaaaagagggagagaaaaagaatggtaaatatgagaaacctcccttttcatataacgccttgataatgatggctattcgtcagagcccagaaaaacgattgaccttgaatgggatttacgaatttattatgaagaattttccctactatcgagaaaacaagcagggatggcagaactctatccggcacaacctgagtcttaacaagtgctttgtgaaggtgccccgtcactacgacgacccaggcaagggcaattattggatgctggacccctccagcgacgacgtgtttatcggggggacaacaggaaagttgcgccgacggagcactactagccgcgccaaacttgcgtttaagaggggagcccggctgacaagtacaggcctcaccttcatggatagagccggtagcctttactggccaatgagtcccttcctatcattgcatcaccctagagcctcatccacccttagctataacggcaccacttcagcatacccttctcatcctatgccctacagcagtgttctgacacagaatagcctgggcaataaccactctttctccacagcaaacggattgtccgtcgatcggttggtgaacggggagataccatatgctacccatcatctgaccgccgccgccttagctgccagtgttccatgcgggctgagtgtgccatgctctgggacatattcactgaacccttgttccgtgaacctactcgccggacagacctcctatttttttcctcacgtcccacatccctctatgacttctcagagctccacctccatgtccgcccgggcagcaagttccagcactagccctcaggctcctagcacactcccatgtgaatccctgcgcccatcgctccccagcttcacaacaggattgagtggcggtctgagtgattactttacacaccaaaaccaggggagctctagcaaccctctgatacactag

SEQ ID NO: 154326 - DNA, 1470 bp, Artificial Sequence
  derived and/or modified sequence
atgctggacatgggagacaggaaggaggtgaagatgatccccaagagcagcttcagcatcaacagcctggtgcctgaggccgtgcagaatgacaaccaccacgccagccacggccaccacaacagccaccacccccagcaccaccaccaccaccaccaccaccaccaccaccccccacctccagccccccagcccccacctccaccccagcagcagcagcccccacctcctcctcctccagccccccagcccccccagaccaggggggccccagctgctgatgatgacaagggcccccagcagctgctgctgcccccacctcctcctcctcctcctgctgctgccctggatggagccaaggcagatggcctgggcggcaaaggagagcccggcggcggccctggagagctggcccctgtgggcccagatgagaaggagaagggagctggagctggaggagaggagaagaagggagctggggagggcggcaaggatggagagggcggcaaggagggggagaagaagaatggcaagtatgagaagccacccttctcctacaatgccctgatcatgatggccatccggcagagccctgagaagaggctgaccctgaatggcatctatgagttcatcatgaagaacttcccctactaccgggagaacaagcagggctggcagaacagcatccgccacaacctgagcctgaacaagtgctttgtgaaggtgcccaggcactatgatgatcctggaaaaggaaactactggatgctggaccccagcagtgatgatgtgttcatcggcggcaccaccgggaagctgcggcggcgcagcaccaccagccgggccaagctggccttcaagagaggagcccggctgaccagcacaggcctgaccttcatggacagagctggcagcctgtactggcccatgagccccttcctgagcctgcaccacccccgggccagcagcaccctgagctacaacggcaccaccagcgcctaccccagccaccccatgccctacagctctgtgctgacccagaacagcctgggcaacaaccacagcttcagcacagccaacggcctgtctgtggaccggctggtgaatggagagatcccctatgccacccaccacctgacagctgctgccctggccgcctctgtgccctgtggcctgtctgtgccctgcagcggcacctacagcctgaacccctgcagcgtgaacctgctggccggccagaccagctacttcttcccccacgtgccccaccccagcatgaccagccagagcagcacctccatgtctgcccgggccgccagcagcagcaccagcccccaggcccccagcaccctgccctgtgagagcctgcggcccagcctgcccagcttcaccaccggcctgagcggcggcctgagtgactacttcacccaccagaaccagggcagcagcagcaaccccctcatccactag

SEQ ID NO: 154327 - DNA, 1470 bp, Artificial Sequence
  derived and/or modified sequence
atgctggacatgggcgaccggaaggaggtgaagatgatccccaagagttctttttccatcaacagtctggtgcctgaggccgtccagaatgataaccaccacgctagccatggccatcataatagtcaccacccccaacaccaccaccaccatcaccaccaccatcaccacccccctcccccagcaccacagcctccacctccaccacaacagcagcagccccccccacctccgccccccgccccccagcccccgcaaacccgcggggctcccgccgccgacgatgataagggtccacagcagctgctgctccccccaccaccccctcccccgcccgcagctgccctggacggagcaaaagcagacggactgggaggcaagggggagccagggggcggtcctggggaactggcgcctgtcggaccggatgagaaggagaaaggcgccggcgctggtggggaggagaaaaagggcgcaggagagggtggaaaagacggcgaaggtggtaaggaaggggaaaagaagaacggtaagtatgagaaaccaccgttttcttacaacgccctcatcatgatggcgatccgacaatcccctgagaaacgccttaccctgaacggcatttacgaatttatcatgaagaatttcccgtactacagagagaacaaacagggatggcagaattccatcagacacaatctgagtttgaacaagtgctttgtcaaagtcccccggcactacgacgaccctgggaagggtaactactggatgttggacccatctagcgacgatgtgttcatcggcgggacaactggaaagctgcgcaggcgctcaacaacctctcgggcgaaactcgctttcaagagaggcgcaagattgacgtcaaccggccttacctttatggatcgagccgggtccctatattggcctatgagcccattcctcagcctacatcaccctcgtgcatccagcacattgtcatataatggtactacaagcgcttacccaagccaccctatgccgtattcttcagtgctcacacagaactctctaggaaataatcattccttttctacagccaacggattatccgtcgatcggcttgtgaatggcgagattccctatgcaacccatcacctgacggcggctgccttggcggcgtcagtcccttgcggcctctctgtgccttgcagtggtacctactcgctgaatccatgttccgttaatctccttgcagggcagacctcttatttcttcccacacgtaccccatccttccatgacctctcagtcaagtacctcaatgtcagctcgcgccgcatcatcctctacaagcccccaggccccatcaactttgccatgtgaatcactgaggccgagtctgccgagttttactactggactttccggaggattgagtgattactttacacatcagaatcagggctctagttcgaaccccttgatacattag

SEQ ID NO: 154328 - DNA, 1470 bp, Artificial Sequence
  derived and/or modified sequence
atgctggacatgggcgaccggaaggaggtgaagatgatccccaagtcctctttttcaatcaactccctcgtgccagaagctgttcagaacgacaaccaccatgcgtcccacgggcatcacaactcccaccatccccagcaccaccaccaccaccatcaccatcaccaccacccccctccgcctgccccgcagcccccgcctcccccccagcagcagcagccacccccaccccctcctcctgcgccacagccaccccagacaaggggcgcacctgcagccgacgacgataaaggaccccagcagctgttgctgccccccccccctccacccccccccgccgcagccctcgacggagcgaaggcagacgggctggggggtaagggcgagcccggtggaggccctggtgaactcgcccctgtcggccccgatgagaaagagaaaggagctggagctggaggtgaggaaaaaaagggggcaggagagggaggcaaagatggggagggaggaaaggaaggagagaaaaagaacgggaagtacgagaaaccaccattcagttacaatgcgctcatcatgatggcaatccggcaaagtcctgaaaaacggcttacccttaacggcatttatgaatttatcatgaaaaattttccttactaccgggaaaataaacaggggtggcagaatagcattaggcacaacttgagcctgaacaaatgcttcgtcaaggtccctaggcattacgacgatcccggcaagggaaactactggatgttagaccccagttctgacgacgtgtttatcggtgggactacggggaagctgcgtcggaggtcaactacctcaagagcaaaactggccttcaaacgaggggcgcggctcacctcaactggtctgacgtttatggacagggctggttccctctattggccaatgtcacctttcctgtcactgcatcatcctagagcttccagcacgctgagttacaacggcacgacttccgcctatccctctcaccctatgccctactcgagcgtgctgacacagaactccctgggcaataaccatagcttttccacagccaatggtctatctgtggaccgactggtgaatggcgagatcccctatgctactcatcacctcaccgctgcagccctggccgcctccgtcccttgcggcctcagcgtaccgtgctctgggacttatagcctaaatccatgctcggtcaacctgttggcagggcaaacttcctacttctttcctcatgtgcctcaccccagtatgacgtcccagagtagcacaagtatgtcagcccgcgccgctagctcttctacaagcccccaggccccttccactttaccttgcgagtccctgagaccaagtctgccatcattcaccacaggactctccggagggctaagcgattattttactcatcagaatcagggctcgagctctaacccactgattcactag

SEQ ID NO: 154329 - DNA, 1470 bp, Artificial Sequence
  derived and/or modified sequence
atgttggatatgggggataggaaggaagtgaagatgatccccaagtcctccttctccatcaacagtcttgttccggaagccgtgcagaatgacaaccaccacgcttctcacggacatcacaacagtcaccacccccagcaccaccaccaccaccaccaccaccaccatcatcctccacctcctgcaccacagccccctccgccaccccagcagcagcagccacccccacccccacctcccgcaccccagccaccccaaacgcggggagcaccagcagccgacgatgataaaggaccccaacagctgttgctgcccccacccccacctcctccacccgctgcagccctggatggtgccaaggcagacggcctcgggggtaagggcgaacctggcggaggaccaggcgaactcgcgcctgttggacctgacgaaaaagaaaagggggcaggcgcaggaggggaggaaaagaagggggctggggagggcggaaaggatggcgaaggcggaaaagagggtgagaagaagaatggtaagtatgagaagcctccctttagctataacgcacttatcatgatggccatccgtcagtcgccagagaagcggctgaccctaaatggcatctatgagtttattatgaaaaattttccttattatagagagaacaagcagggctggcagaactcaatcagacataatttaagccttaacaagtgctttgtgaaggtgcctagacactacgacgaccccggaaagggcaattattggatgctggacccatcaagtgatgatgttttcataggtggaaccacgggcaagctgagacggagatccaccacgagccgggctaaactagcatttaaacggggagccagacttacatccactggccttacgtttatggaccgcgcaggctccctgtactggccaatgagccccttcctgtccctccatcaccccagggcgagttctacactaagttataatggaaccacctccgcttaccctagtcacccaatgccctacagctctgttctcacccaaaactccctcggcaacaatcattctttttccacagctaacggcctctctgtggacaggctggtgaatggggagattccttatgccacacaccatctcaccgctgctgcattggcggcaagcgtcccctgtgggctcagcgtgccttgttctggcacctactctctaaacccctgcagcgttaacctgttagctggtcaaacgtcctactttttcccgcacgtgccccacccgagtatgaccagtcagagttcgacatccatgagtgccagagctgcgagcagctctacctccccacaggcgcctagcaccctgccctgtgagagcttacgcccatcattaccctccttcaccactggcctgtccggcggacttagtgactactttacccaccagaaccaggggagttccagcaatcctctaattcactag

SEQ ID NO: 154330 - DNA, 1470 bp, Artificial Sequence
  derived and/or modified sequence
atgctagacatgggggatcggaaagaggttaagatgatcccaaagtcgtccttctccatcaacagcctggtgccggaagccgtgcagaacgacaatcaccacgcctcacacggccaccataacagtcaccacccccagcaccaccaccaccatcaccatcatcaccatcaccccccacctccggcaccacagccccctccccctccccagcaacagcagcctccacccccaccacctcctgccccacagccaccccagacacggggtgctcccgctgctgatgatgataaaggcccacagcagttattgctgcccccaccgccaccaccacctccagcagctgctctcgacggggcaaaggccgatggattgggaggaaaaggagagcccggtgggggtccaggggagttggccccagttggcccagatgagaaagagaagggcgctggggctgggggagaggagaagaagggggcaggagaaggagggaaagacggtgagggtgggaaggagggagaaaagaagaatgggaaatacgaaaaaccgcctttcagctataacgctctcatcatgatggcaatcaggcagtcccctgaaaagcgactcacactaaatggtatctatgagttcatcatgaagaacttcccgtattatagagaaaataagcagggctggcagaattccattagacacaacctgagccttaataagtgcttcgtcaaggtcccccgacactacgacgatccgggaaaagggaattactggatgctagacccatcttcggatgacgtatttatcggcggaacaactggtaagcttcgacgtagatcaaccacctccagggcaaagcttgcctttaagcggggagctcgtctgacaagtacagggctgacgtttatggatcgggctggatctctttactggcctatgagccccttcctgtccctgcaccatccacgggcaagttctacactgtcctacaacggtactacctccgcatacccatctcatcctatgccttacagctcggtgcttacccagaactcactgggtaataaccatagcttctccactgccaatggattgagtgttgatagactggtgaatggtgagatcccatatgccacccaccaccttacagccgcagctctggcggcaagcgtgccatgtggcctaagtgtgccttgtagtggcacctactcgctgaatccttgctcggtgaatctactggcaggccagacctcctatttttttccacatgtgcctcacccatccatgacatctcagagcagcaccagcatgagcgctagagcagcatcttcaagtactagcccccaagccccaagcacgctgccctgtgaatccctcagaccatctctccctagcttcacaacaggactgtccggaggccttagcgattacttcacacaccagaaccagggaagttcttccaacccgctgatacactag

SEQ ID NO: 154331 - DNA, 1470 bp, Artificial Sequence
  derived and/or modified sequence
atgctggacatgggcgacagaaaggaggtgaagatgatccccaagagcagcttcagcatcaacagcctggtgcccgaggccgtgcagaacgacaaccaccacgccagccacggccaccacaacagccaccacccccagcaccaccaccaccaccaccaccaccaccaccacccccccccccccgccccccagccccccccccccccccagcagcagcagcccccccccccccccccccccgccccccagcccccccagaccagaggcgcccccgccgccgacgacgacaagggcccccagcagctgctgctgccccccccccccccccccccccccgccgccgccctggacggcgccaaggccgacggcctgggcggcaagggcgagcccggcggcggccccggcgagctggcccccgtgggccccgacgagaaggagaagggcgccggcgccggcggcgaggagaagaagggcgccggcgagggcggcaaggacggcgagggcggcaaggagggcgagaagaagaacggcaagtacgagaagccccccttcagctacaacgccctgatcatgatggccatcagacagagccccgagaagagactgaccctgaacggcatctacgagttcatcatgaagaacttcccctactacagagagaacaagcagggctggcagaacagcatcagacacaacctgagcctgaacaagtgcttcgtgaaggtgcccagacactacgacgaccccggcaagggcaactactggatgctggaccccagcagcgacgacgtgttcatcggcggcaccaccggcaagctgagaagaagaagcaccaccagcagagccaagctggccttcaagagaggcgccagactgaccagcaccggcctgaccttcatggacagagccggcagcctgtactggcccatgagccccttcctgagcctgcaccaccccagagccagcagcaccctgagctacaacggcaccaccagcgcctaccccagccaccccatgccctacagcagcgtgctgacccagaacagcctgggcaacaaccacagcttcagcaccgccaacggcctgagcgtggacagactggtgaacggcgagatcccctacgccacccaccacctgaccgccgccgccctggccgccagcgtgccctgcggcctgagcgtgccctgcagcggcacctacagcctgaacccctgcagcgtgaacctgctggccggccagaccagctacttcttcccccacgtgccccaccccagcatgaccagccagagcagcaccagcatgagcgccagagccgccagcagcagcaccagcccccaggcccccagcaccctgccctgcgagagcctgagacccagcctgcccagcttcaccaccggcctgagcggcggcctgagcgactacttcacccaccagaaccagggcagcagcagcaaccccctgatccactag

SEQ ID NO: 154332 - protein, 345 aa, Artificial Sequence
  derived and/or modified sequence
MSHLFDPRLPALAASPMLYLYGPERPGLPLAFAPAAALAASGRAETPQKPPYSYIALIAMAIQDAPEQRVTLNGIYQFIMDRFPFYHDNRQGWQNSIRHNLSLNDCFVKVPREKGRPGKGSYWTLDPRCLDMFENGNYRRRKRKPKPGPGAPEAKRPRAETHQRSAEAQPEAGSGAGGSGPAISRLQAAPAGPSPLLDGPSPPAPLHWPGTASPNEDAGDAAQGAAAVAVGQAARTGDGPGSPLRPASRSSPKSSDKSKSFSIDSILAGKQGQKPPSGDELLGGAKPGPGGRLGASLLAASSSLRPPFNASLMLDPHVQGGFYQLGIPFLSYFPLQVPDTVLHFQ

SEQ ID NO: 154333 - DNA, 3207 bp, Artificial Sequence
  derived and/or modified sequence
gctaagtcaacatataacagcaaacttacaacaattatttaacatttttaaagccatgaagaagggacagagcacggagcggccggggagagcggcagagccagaggcagaggcacggctggctccccgggagggcccttgcggcgcggggcgcagtgcctaggccgcccgggtctcctgcgttgcggggagcgcagcgcaggctctcgcttgccatgagtcacctcttcgatccccggctgcctgccctggccgcctcgcccatgctgtatctgtacggtcccgagagacccggcctccctctggccttcgcccccgcggctgctctagctgcctcgggccgggccgagaccccgcagaagcctccctacagctacatcgcgctcatcgccatggcgatccaggacgcgcccgagcagagggtcacgctcaacggcatctaccagttcatcatggaccgcttccccttctaccacgacaaccggcagggctggcagaacagcatccgccacaacctctcgctcaacgactgcttcgtcaaggtgccccgcgagaaagggcggccgggcaagggcagctactggacgctggacccccgctgcctggacatgtttgagaacggcaactaccggcgccggaagaggaagcccaagccgggccccggggccccggaggccaagaggccccgcgccgagacgcaccagcgcagcgcggaggcgcagccggaggcggggagcggggcagggggctcgggccccgcaatctcccgcctgcaggcagcgcccgcgggcccctcgcccctcctggacggcccctctccgccggcgcccctccactggccggggaccgcgtccccgaacgaggacgctggtgacgctgcccagggcgcagcggccgtggcggtcggccaggcagcgcgcacaggggacggcccggggtcccctctgcgccccgcctcccgcagctctccgaagagctccgacaagtccaagagcttcagcatagacagcatcctggcgggaaagcagggccagaagccgccttcaggggacgaactcctagggggtgccaagcctgggcccggcggccgtctgggtgcctcgctcctggccgcctcctccagcctccgtccgcctttcaacgcttccctgatgctcgacccgcatgtccagggcggcttttaccagctcgggatccccttcctctcttatttccccctgcaggttcccgacacggtactccacttccagtaaagcaaacaatggcacggttcttctcccggcccagcctgagcctccgctgagcgaaaggccacagctcccaccggcggaggattttaaaatgatctttgcctgggtcggcctgtgggttcagggaagtgttaccaaccattgcgcgcaggtgggcgcgctcgcctgccttctccgaagcaaacttttcccagcaactgggagcagctacggagacttaaaagatccccgcggggtcgtgggcaccgcacgtgggccctgcagggacctccaccgcgggagattccttgacgtttgacctgtctaatggagtgtggtcttcagccgcccaccgcaggtcctgcgagtcccgggcatgcaagggcccgcagaccacccaaggcaggccttacaggtgcagttgaggtcctttcgaccggggacccccgtatgaccgtcgcctgcttcgctgttgccgtgtggctcaggccttggttttgagcccatctgggtggtgggtggtcacagctgggtttgttcctgacttgaagttgtggaggtgccgggggtgaccccgggttttcaggttttctgagagatgtagggcccgatgaggatttatgaccaatgttcagctatagaagctgataaccacccagagcaataacacttttattttaaacagagactttttctcttaatttctttctgggtagtaaaaagaacatgtttcattctttgcataaatacttgactctaagcattgacctttgaaaacgcttgtattaacaatttttattaagaaagtgcactctatataacatcttcttgcattacgatagctcattagccaatacacatgcagctatgtaagccacaacagcagacgtcctatccttttgcttttgtttttaagggatcaaaatatttcaagggataccatgaggaagggtgtgaggggaaggggatatgccttggacaatgtcagagttttgatttccatgttttttcaagatccaggcttggtggtcgctatatttttcagaaacagataatgaaagactacatttaatttaaaaagttgggtgaaacaaccaaaagcagatgcagagagagagagggatgaatgcgggggaagaataaggggacgtgctggtgtccgctggaaggggcctctctgggccccagaggacctgaggtttgatggcaggaatctcccagacactcctggcccccgcaccccctgcagccgcccgctcttccctcccagccctgccaggcaggcctggaggctgatactaaatcaaaaccttaaagaggtgactggcagtctggggaggggagaagaggtctgcaacgaaaatctaattaagaacattgagatgttcacaaccaagttcagcttgcagcttccggggaaatgcaaccgacctctatgccatctctagctgggtaatcttcgaggccctgaaatgcaattttctgaacctctaagtcacttttattttatgtcatgtgataaagacacaagtagtcacgcactattggaaataggttgggagggaggtctttaagatcgcttttaaaatagtttccaggacttgtctaaaaatgatgacaaactttgaatccagagggcctgttggtcaatgtgttggaaaggacatttcaggccggcagagtaattggataattcacaggcatagaggtgacttttggaaaattcattctcctatccatgctgaaccaggcttccacgactgggttctacccaggccagtgggaagactctgggaaacttcaggccagccttgattggaagaacttccaggaggagccattgctgagatccaggctcactgtgattcactgaaaatgtagcgaaagggctgtcactggatattttgctatcccaaactctcagcctctgtgaataaagttgttttttcattaacctctcaaaaaaaaaaaaaaaaaa

SEQ ID NO: 154334 - DNA, 506 bp, Artificial Sequence
  derived and/or modified sequence
tttcgggcgccatggggcgccgagcgcggcctggcccctcgggctcctctgcggggagggcaggccgcaggctggagcggggtgcggaggctggcggggagcggcccccggaggctttcctggtagaagttgatgcgaggaagggcggcggggaccagtaaactgaagataacaccaacttggcagcgggagtttgtgtcttctgtatgaaatctccctgcctctgcacctggttgagttgctgtcattattttaggggacggtattcagaattcgagcgcaggagctccgcttctccacctgctcccggggagctattgggatccagagaatcacccgctgatggtttttgcccaggcctgaaacaaccagagagctacgggaaaggaagggcttggcttgccagaggaattttccaagtgctcaaacgccaggcttacggcgcctgtgatccgtccaggaggacaaagtgggatttgaagatccactccacttctgctcatggc

SEQ ID NO: 154335 - DNA, 3189 bp, Artificial Sequence
  derived and/or modified sequence
gctaagtcaacatataacagcaaacttacaacaattatttaacatttttaaagccatgaagaagggacagagcacggagcggccggggagagcggcagagccagaggcagaggcacggctggctccccgggagggcccttgcggcgcggggcgcagtgcctaggccgcccgggtctcctgcgttgcggggagcgcagcgcaggctctcgcttgccatgagtcacctcttcgatccccggctgcctgccctggccgcctcgcccatgctgtatctgtacggtcccgagagacccggcctccctctggccttcgcccccgcggctgctctagctgcctcgggccgggccgagaccccgcagaagcctccctacagctacatcgcgctcatcgccatggcgatccaggacgcgcccgagcagagggtcacgctcaacggcatctaccagttcatcatggaccgcttccccttctaccacgacaaccggcagggctggcagaacagcatccgccacaacctctcgctcaacgactgcttcgtcaaggtgccccgcgagaaagggcggccgggcaagggcagctactggacgctggacccccgctgcctggacatgtttgagaacggcaactaccggcgccggaagaggaagcccaagccgggccccggggccccggaggccaagaggccccgcgccgagacgcaccagcgcagcgcggaggcgcagccggaggcggggagcggggcagggggctcgggccccgcaatctcccgcctgcaggcagcgcccgcgggcccctcgcccctcctggacggcccctctccgccggcgcccctccactggccggggaccgcgtccccgaacgaggacgctggtgacgctgcccagggcgcagcggccgtggcggtcggccaggcagcgcgcacaggggacggcccggggtcccctctgcgccccgcctcccgcagctctccgaagagctccgacaagtccaagagcttcagcatagacagcatcctggcgggaaagcagggccagaagccgccttcaggggacgaactcctagggggtgccaagcctgggcccggcggccgtctgggtgcctcgctcctggccgcctcctccagcctccgtccgcctttcaacgcttccctgatgctcgacccgcatgtccagggcggcttttaccagctcgggatccccttcctctcttatttccccctgcaggttcccgacacggtactccacttccagtaaagcaaacaatggcacggttcttctcccggcccagcctgagcctccgctgagcgaaaggccacagctcccaccggcggaggattttaaaatgatctttgcctgggtcggcctgtgggttcagggaagtgttaccaaccattgcgcgcaggtgggcgcgctcgcctgccttctccgaagcaaacttttcccagcaactgggagcagctacggagacttaaaagatccccgcggggtcgtgggcaccgcacgtgggccctgcagggacctccaccgcgggagattccttgacgtttgacctgtctaatggagtgtggtcttcagccgcccaccgcaggtcctgcgagtcccgggcatgcaagggcccgcagaccacccaaggcaggccttacaggtgcagttgaggtcctttcgaccggggacccccgtatgaccgtcgcctgcttcgctgttgccgtgtggctcaggccttggttttgagcccatctgggtggtgggtggtcacagctgggtttgttcctgacttgaagttgtggaggtgccgggggtgaccccgggttttcaggttttctgagagatgtagggcccgatgaggatttatgaccaatgttcagctatagaagctgataaccacccagagcaataacacttttattttaaacagagactttttctcttaatttctttctgggtagtaaaaagaacatgtttcattctttgcataaatacttgactctaagcattgacctttgaaaacgcttgtattaacaatttttattaagaaagtgcactctatataacatcttcttgcattacgatagctcattagccaatacacatgcagctatgtaagccacaacagcagacgtcctatccttttgcttttgtttttaagggatcaaaatatttcaagggataccatgaggaagggtgtgaggggaaggggatatgccttggacaatgtcagagttttgatttccatgttttttcaagatccaggcttggtggtcgctatatttttcagaaacagataatgaaagactacatttaatttaaaaagttgggtgaaacaaccaaaagcagatgcagagagagagagggatgaatgcgggggaagaataaggggacgtgctggtgtccgctggaaggggcctctctgggccccagaggacctgaggtttgatggcaggaatctcccagacactcctggcccccgcaccccctgcagccgcccgctcttccctcccagccctgccaggcaggcctggaggctgatactaaatcaaaaccttaaagaggtgactggcagtctggggaggggagaagaggtctgcaacgaaaatctaattaagaacattgagatgttcacaaccaagttcagcttgcagcttccggggaaatgcaaccgacctctatgccatctctagctgggtaatcttcgaggccctgaaatgcaattttctgaacctctaagtcacttttattttatgtcatgtgataaagacacaagtagtcacgcactattggaaataggttgggagggaggtctttaagatcgcttttaaaatagtttccaggacttgtctaaaaatgatgacaaactttgaatccagagggcctgttggtcaatgtgttggaaaggacatttcaggccggcagagtaattggataattcacaggcatagaggtgacttttggaaaattcattctcctatccatgctgaaccaggcttccacgactgggttctacccaggccagtgggaagactctgggaaacttcaggccagccttgattggaagaacttccaggaggagccattgctgagatccaggctcactgtgattcactgaaaatgtagcgaaagggctgtcactggatattttgctatcccaaactctcagcctctgtgaataaagttgttttttcattaacctctc

SEQ ID NO: 154336 - DNA, 1038 bp, Artificial Sequence
  derived and/or modified sequence
atgtcccatctgttcgatccaaggctacccgctctagcggcgtcacctatgctgtatctgtacgggcctgaacgccctggcctacccctcgccttcgccccggccgccgcccttgctgcttccggccgcgccgagactccacagaaaccgccatatagctatatcgccctaatagctatggccatccaggacgcgcctgaacagagggtgacattgaatggcatataccagttcataatggaccgatttcccttctatcacgacaaccgacaaggatggcagaatagcatccggcacaatctctctttgaacgattgcttcgtcaaggtgcctcgagaaaagggaagacctgggaaaggctcgtattggactcttgaccctagatgcctggacatgtttgaaaacgggaactatcgccggcgcaagcgcaaacctaaacctggcccgggagcgcctgaggctaagcggccgagagcagagacgcaccagaggtctgctgaggcacagcctgaggccggcagcggtgccggaggcagcggacccgcaataagtaggttgcaggccgctcccgctggaccttcacccttgctggacggccctagcccgccggctcctctgcattggccaggaacagcaagtccaaacgaggacgccggggacgccgcacagggcgcggccgcggtggccgttggccaagccgctcggacaggagacggacccgggagcccccttcgaccagccagcagatccagcccaaaaagcagcgacaagagcaagtcctttagcatagattctattctcgccggaaaacaaggtcagaagcctccatcaggcgacgagcttctcgggggcgctaagccgggcccaggcggccggctgggcgccagccttttagccgcaagtagtagcctccgtcctccattcaatgcgtcactgatgctcgatccacatgttcagggcggcttctatcagctgggcattccattcctatcctatttccccctccaggtccccgacacagttctgcactttcaatag

SEQ ID NO: 154337 - DNA, 1038 bp, Artificial Sequence
  derived and/or modified sequence
atgagccacctgtttgacccccggctgcctgccctggccgccagccccatgctgtacctgtatggccctgagcggcccggcctgcccctggcctttgccccagctgctgccctggccgccagcggccgggcagagaccccccagaagccaccctacagctacatcgccctgattgccatggccatccaggatgcccctgagcagagggtgaccctgaatggcatctaccagttcatcatggaccgcttccccttctaccatgacaaccggcagggctggcagaacagcatccgccacaacctgagcctgaatgactgctttgtgaaggtgccccgggagaagggccggcctgggaagggcagctactggaccctggacccccgctgcctggacatgtttgaaaatggaaactacagaagaaggaagaggaagcccaagccaggccctggggcccctgaggccaagaggcccagggctgagacccaccagaggtctgctgaggcccagcctgaggccggcagcggggccggcggcagcggccctgccatcagccggctgcaggccgccccagctggccccagccccctgctggatggccccagccccccagcccccctgcactggccaggcacagccagccccaatgaagatgctggagatgctgcccagggcgctgctgctgtggccgtgggccaggccgccaggactggagatggccctggcagccccctgcggcctgccagccgcagcagccccaagagcagtgacaagagcaagagcttcagcattgacagcatcctggccggcaagcagggccagaagcccccatctggagatgagctgctgggcggggccaagccaggccctgggggccgcctgggcgccagcctgctggccgccagcagcagcctgcggccccccttcaatgccagcctgatgctggacccccacgtgcagggcggcttctaccagctgggcatccccttcctgagctacttccccctgcaggtgcctgacacagtgctgcacttccagtag

SEQ ID NO: 154338 - DNA, 1038 bp, Artificial Sequence
  derived and/or modified sequence
atgagccacctgttcgacccccggctgcccgccctggccgccagccccatgctctacttgtacggtcccgagagacctgggctgcctctggcattcgccccagcagctgcacttgctgccagcggacgggctgagacaccgcaaaaacctccatactcttacatcgccctcattgctatggctattcaggatgctcctgagcaaagggttacccttaatggcatttaccagttcataatggaccgcttccccttttatcatgacaaccgacagggctggcagaatagcataagacacaacctttccctgaacgactgctttgtcaaagtgcccagagagaaaggccgacccgggaaaggcagctattggactctggacccaagatgcctggatatgtttgagaacggcaattatagaaggagaaagagaaagcctaaaccagggccgggtgccccggaagcaaagcgccctcgggccgaaacacaccagaggagtgcagaggctcagccagaggccggatcgggcgccgggggatctggtccagcgatctcacggctacaggccgcgcctgcaggacccagcccactcctggacgggcccagtccacccgccccgctgcattggcccggtacagcatcacctaacgaagacgcgggagacgcagctcagggcgccgccgctgtcgcagttggacaggctgccaggaccggcgacggtccaggttctccactaagacctgcttccaggagctctccaaagtcaagtgataagagtaaaagctttagtatcgacagcattctcgccggcaagcaaggacaaaagcctcctagtggagacgagcttctgggtggagctaagccagggcccggaggccgcctgggggcctcactattggctgcttcaagctccctgagaccaccattcaacgcatccttgatgctcgatcctcatgtgcaggggggattttaccagctgggcattcccttcctgagctactttccactgcaggtaccagacactgtactgcacttccagtag

SEQ ID NO: 154339 - DNA, 1038 bp, Artificial Sequence
  derived and/or modified sequence
atgtctcacctgtttgacccaaggttgcctgccttggcggctagtcctatgctttacctgtatggcccagagcgccctggccttcctttggcctttgccccagccgcagctttagccgcttccggcagggcagagacaccgcaaaagcctccatatagctacattgcactgatcgctatggcgatccaagacgccccagaacagagggtcactcttaacgggatctatcaattcatcatggataggttccctttttaccacgataaccgccagggttggcaaaattctatcaggcacaacctgtctctaaatgattgcttcgtgaaggtccctagggaaaagggtagacctggcaaaggtagctactggactctggacccaaggtgcctagacatgttcgagaatggcaattacaggaggagaaagcgcaagccgaaacctggcccaggagcgccagaagccaaacggccacgcgcagaaactcatcagcggtcagcggaggctcagcccgaggctggctctggtgcaggaggaagcggtcccgcaatcagcagactgcaagcggctccggcaggtccttcccctctcttggatggaccatctccccctgccccactgcattggcccggtacagccagcccgaatgaagacgctggagatgcagcccagggggctgccgctgtggcagtaggccaggcagccagaaccggcgacggacccggaagccctctccggccagcatctaggtcctcccccaaatccagcgataagtccaagagcttttccattgattctatcttagccggtaagcagggacaaaaacctccctccggggacgagcttctgggcggagctaagccaggtccaggcggtcggctcggcgcaagtctgcttgcagcttcttcttcgttgcggccaccatttaacgcatctcttatgctcgatccccacgtgcaaggaggcttttatcaattaggaatcccttttttaagctactttcctttgcaggtacccgataccgtgcttcatttccagtag

SEQ ID NO: 154340 - DNA, 1038 bp, Artificial Sequence
  derived and/or modified sequence
atgagccacctgttcgaccccagactgcccgccctggccgccagccccatgctgtacctgtacggccccgagagacccggcctgcccctggccttcgcccccgccgccgccctggccgccagcggcagagccgagaccccccagaagcccccctacagctacatcgccctgatcgccatggccatccaggacgcccccgagcagagagtgaccctgaacggcatctaccagttcatcatggacagattccccttctaccacgacaacagacagggctggcagaacagcatcagacacaacctgagcctgaacgactgcttcgtgaaggtgcccagagagaagggcagacccggcaagggcagctactggaccctggaccccagatgcctggacatgttcgagaacggcaactacagaagaagaaagagaaagcccaagcccggccccggcgcccccgaggccaagagacccagagccgagacccaccagagaagcgccgaggcccagcccgaggccggcagcggcgccggcggcagcggccccgccatcagcagactgcaggccgcccccgccggccccagccccctgctggacggccccagcccccccgcccccctgcactggcccggcaccgccagccccaacgaggacgccggcgacgccgcccagggcgccgccgccgtggccgtgggccaggccgccagaaccggcgacggccccggcagccccctgagacccgccagcagaagcagccccaagagcagcgacaagagcaagagcttcagcatcgacagcatcctggccggcaagcagggccagaagccccccagcggcgacgagctgctgggcggcgccaagcccggccccggcggcagactgggcgccagcctgctggccgccagcagcagcctgagaccccccttcaacgccagcctgatgctggacccccacgtgcagggcggcttctaccagctgggcatccccttcctgagctacttccccctgcaggtgcccgacaccgtgctgcacttccagtag

SEQ ID NO: 154341 - protein, 501 aa, Artificial Sequence
  derived and/or modified sequence
MQARYSVSDPNALGVVPYLSEQNYYRAAGSYGGMASPMGVYSGHPEQYSAGMGRSYAPYHHHQPAAPKDLVKPPYSYIALITMAIQNAPEKKITLNGIYQFIMDRFPFYRENKQGWQNSIRHNLSLNECFVKVPRDDKKPGKGSYWTLDPDSYNMFENGSFLRRRRRFKKKDVSKEKEERAHLKEPPPAASKGAPATPHLADAPKEAEKKVVIKSEAASPALPVITKVETLSPESALQGSPRSAASTPAGSPDGSLPEHHAAAPNGLPGFSVENIMTLRTSPPGGELSPGAGRAGLVVPPLALPYAAAPPAAYGQPCAQGLEAGAAGGYQCSMRAMSLYTGAERPAHMCVPPALDEALSDHPSGPTSPLSALNLAAGQEGALAATGHHHQHHGHHHPQAPPPPPAPQPQPTPQPGAAAAQAASWYLNHSGDLNHLPGHTFAAQQQTFPNVREMFNSHRLGIENSTLGESQVSGNASCQLPYRSTPPLYRHAAPYSYDCTKY

SEQ ID NO: 154342 - DNA, 1506 bp, Artificial Sequence
  derived and/or modified sequence
atgcaggccagatacagcgtgagcgaccccaacgccctgggcgtggtgccctacctgagcgagcagaactactacagagccgccggcagctacggcggcatggccagccccatgggcgtgtacagcggccaccccgagcagtacagcgccggcatgggcagaagctacgccccctaccaccaccaccagcccgccgcccccaaggacctggtgaagcccccctacagctacatcgccctgatcaccatggccatccagaacgcccccgagaagaagatcaccctgaacggcatctaccagttcatcatggacagattccccttctacagagagaacaagcagggctggcagaacagcatcagacacaacctgagcctgaacgagtgcttcgtgaaggtgcccagagacgacaagaagcccggcaagggcagctactggaccctggaccccgacagctacaacatgttcgagaacggcagcttcctgagaagaagaagaagattcaagaagaaggacgtgagcaaggagaaggaggagagagcccacctgaaggagcccccccccgccgccagcaagggcgcccccgccaccccccacctggccgacgcccccaaggaggccgagaagaaggtggtgatcaagagcgaggccgccagccccgccctgcccgtgatcaccaaggtggagaccctgagccccgagagcgccctgcagggcagccccagaagcgccgccagcacccccgccggcagccccgacggcagcctgcccgagcaccacgccgccgcccccaacggcctgcccggcttcagcgtggagaacatcatgaccctgagaaccagcccccccggcggcgagctgagccccggcgccggcagagccggcctggtggtgccccccctggccctgccctacgccgccgccccccccgccgcctacggccagccctgcgcccagggcctggaggccggcgccgccggcggctaccagtgcagcatgagagccatgagcctgtacaccggcgccgagagacccgcccacatgtgcgtgccccccgccctggacgaggccctgagcgaccaccccagcggccccaccagccccctgagcgccctgaacctggccgccggccaggagggcgccctggccgccaccggccaccaccaccagcaccacggccaccaccacccccaggcccccccccccccccccgccccccagccccagcccaccccccagcccggcgccgccgccgcccaggccgccagctggtacctgaaccacagcggcgacctgaaccacctgcccggccacaccttcgccgcccagcagcagaccttccccaacgtgagagagatgttcaacagccacagactgggcatcgagaacagcaccctgggcgagagccaggtgagcggcaacgccagctgccagctgccctacagaagcaccccccccctgtacagacacgccgccccctacagctacgactgcaccaagtactag

SEQ ID NO: 154343 - DNA, 1506 bp, Artificial Sequence
  derived and/or modified sequence
atgcaggcccgatactctgtgtccgaccctaacgccctgggcgttgtgccttacttgagcgaacagaattactatcgggcggcagggtcttatggtgggatggccagtcctatgggcgtgtactctggccaccctgaacaatattccgctgggatggggcgctcttatgctccatatcatcaccatcagcctgcagccccaaaggatctagtgaagcccccttactcctacatcgccctcataaccatggcaatccagaatgccccggagaagaaaattacactgaacggcatctaccagtttattatggaccgtttcccattttatcgtgaaaacaagcagggctggcagaactccatccggcacaacttgagcctgaatgagtgtttcgtaaaggtgcctagagatgataaaaagccaggtaaaggctcttactggacacttgatccagacagttacaatatgtttgagaacggaagctttttgcggcgaagaagaaggttcaagaagaaagatgtctccaaggagaaagaggagcgcgcgcatttgaaggagccaccccctgccgcatcaaagggcgcacccgccaccccacatttggctgacgctccaaaggaagcggagaagaaagtcgtgatcaaatcagaggctgccagtcccgccctgcctgttatcactaaagtggaaacactctccccagagtcagccctccaagggtcccctaggagcgccgcttccacaccagcgggaagcccagacggctccctgccagagcatcacgctgcagcacctaatggcctgcctgggtttagtgttgaaaacattatgaccctgcggaccagtcctccggggggcgagctaagccctggagccggcagggcgggtctggttgtgcccccgctagcactaccttacgcagcggccccaccagcagcttacggccagccttgcgcccagggcctggaagctggtgccgcaggaggctatcaatgtagcatgagggccatgagtctctacacaggcgcggaaaggcctgctcacatgtgtgtgcctccagcactcgatgaggcgttgtctgaccacccttccgggccaacttccccactcagtgcactcaatcttgccgctggccaggaaggtgctctcgccgccaccggacaccaccatcagcaccacggccaccaccacccccaagctcccccacccccacctgctccacaacctcagcctacaccgcagcccggtgcagccgctgcacaggccgctagttggtatctcaaccactccggggacctgaaccacttgcccggacacacgttcgctgcccaacaacaaacctttcctaatgtgcgcgaaatgtttaattcccacagactaggcatcgagaactctactctcggcgaaagccaggtaagcggtaatgcgagctgccagctcccgtatcgcagtacccctcctttatacagacacgctgcaccatacagttatgactgtaccaagtattag

SEQ ID NO: 154344 - DNA, 1683 bp, Artificial Sequence
  derived and/or modified sequence
cgcgctctctcgctctcagggcccccctcgctcccccggccgcagtccgtgcgcgagggcgccggcgagccgtctcggaagcagcatgcaggcgcgctactccgtgtccgaccccaacgccctgggagtggtgccctacctgagcgagcagaattactaccgggctgcgggcagctacggcggcatggccagccccatgggcgtctattccggccacccggagcagtacagcgcggggatgggccgctcctacgcgccctaccaccaccaccagcccgcggcgcctaaggacctggtgaagccgccctacagctacatcgcgctcatcaccatggccatccagaacgcgcccgagaagaagatcaccttgaacggcatctaccagttcatcatggaccgcttccccttctaccgggagaacaagcagggctggcagaacagcatccgccacaacctctcgctcaacgagtgcttcgtcaaggtgccccgcgacgacaagaagcccggcaagggcagttactggaccctggacccggactcctacaacatgttcgagaacggcagcttcctgcggcgccggcggcgcttcaaaaagaaggacgtgtccaaggagaaggaggagcgggcccacctcaaggagccgcccccggcggcgtccaagggcgccccggccaccccccacctagcggacgcccccaaggaggccgagaagaaggtggtgatcaagagcgaggcggcgtccccggcgctgccggtcatcaccaaggtggagacgctgagccccgagagcgcgctgcagggcagcccgcgcagcgcggcctccacgcccgccggctcccccgacggctcgctgccggagcaccacgccgcggcgcccaacgggctgcctggcttcagcgtggagaacatcatgaccctgcgaacgtcgccgccgggcggagagctgagcccgggggccggacgcgcgggcctggtggtgccgccgctggcgctgccctacgccgccgcgccgcccgccgcctacggccagccgtgcgctcagggcctggaggccggggccgccgggggctaccagtgcagcatgcgagcgatgagcctgtacaccggggccgagcggccggcgcacatgtgcgtcccgcccgccctggacgaggccctctcggaccacccgagcggccccacgtcgcccctgagcgctctcaacctcgccgccggccaggagggcgcgctcgccgccacgggccaccaccaccagcaccacggccaccaccacccgcaggcgccgccgcccccgccggctccccagccccagccgacgccgcagcccggggccgccgcggcgcaggcggcctcctggtatctcaaccacagcggggacctgaaccacctccccggccacacgttcgcggcccagcagcaaactttccccaacgtgcgggagatgttcaactcccaccggctggggattgagaactcgaccctcggggagtcccaggtgagtggcaatgccagctgccagctgccctacagatccacgccgcctctctatcgccacgcagccccctactcctacgactgcacgaaatactgacgtgtcccgggacctcccctccccggcccgctccggcttcgcttcccagccccgacccaaccagacaattaaggggctgcagagacgcaaaa

SEQ ID NO: 154345 - DNA, 1506 bp, Artificial Sequence
  derived and/or modified sequence
atgcaggcccgctacagcgtgtctgaccccaatgccctgggcgtggtgccctacctgtctgagcagaactactacagagctgctggcagctatggaggcatggccagccccatgggcgtgtacagcggccaccctgagcagtacagcgctggcatgggccgctcctatgccccctaccaccaccaccagcctgctgcccccaaggacctggtgaagccaccctacagctacatcgccctgatcaccatggccatccagaatgcccctgagaagaagatcaccctgaatggcatctaccagttcatcatggaccgcttccccttctaccgggagaacaagcagggctggcagaacagcatccgccacaacctgagcctgaatgaatgttttgtgaaggtgcccagagatgacaagaagccaggcaagggcagctactggaccctggaccctgacagctacaacatgtttgaaaatggcagcttcctgcggaggagaagacgcttcaagaagaaggatgtgtccaaggagaaggaggagcgggcccacctgaaggagcccccacctgctgccagcaagggggccccagccaccccccacctggctgatgcccccaaggaggccgagaagaaggtggtgatcaagtctgaggccgccagccctgccctgcctgtgatcaccaaggtggagaccctgagccctgagagcgccctgcagggcagccccaggtctgctgccagcaccccagctggcagcccagatggcagcctgcctgagcaccacgccgccgccccaaatggcctgcccggcttctctgtggagaacatcatgaccctgcggaccagccccccaggaggagagctgagccctggagctggccgggccggcctggtggtgccccccctggccctgccctatgctgctgcccctcctgctgcctacggccagccctgtgcccagggcctggaggccggggccgccggcggctaccagtgcagcatgagggccatgagcctgtacaccggggctgagaggcctgcccacatgtgtgtgcccccagccctggatgaggccctgagtgaccaccccagcggccccaccagccccctgagcgccctgaacctggccgccggccaggagggcgccctggccgccaccggccaccaccaccagcaccacggccaccaccacccccaggcccctcctcctcctccagccccccagccccagcccaccccccagcccggggctgctgctgcccaggccgcctcctggtacctgaaccacagcggggacctgaaccacctgcccggccacacctttgctgcccagcagcagaccttccccaacgtgcgggagatgttcaacagccaccggctgggcatcgagaacagcaccctgggggagagccaggtgtctggaaatgccagctgccagctgccctaccgcagcaccccacccctgtacagacatgctgccccctacagctatgactgcaccaagtactag

SEQ ID NO: 154346 - DNA, 1506 bp, Artificial Sequence
  derived and/or modified sequence
atgcaggcccggtacagcgtgagcgaccccaacgccctgggcgtggtcccctacctttcagagcaaaattactatagagctgcagggtcttatgggggaatggcctcccccatgggagtctactcaggtcaccctgaacaatacagtgcaggtatgggccggagctacgctccataccatcaccaccagcccgccgctcccaaagacctggtgaaaccaccatactcctatattgcactgattactatggccattcagaacgcccccgaaaaaaaaattacgcttaatggtatttatcaatttatcatggaccgcttcccgttctaccgcgagaacaagcaggggtggcaaaacagtatacgccataatttgtctctgaacgaatgtttcgtgaaagttcccagagatgacaagaagcctggaaaaggaagttattggactctggatcctgactcctacaacatgtttgagaacggcagctttcttcgtcgccggaggcgatttaagaagaaggatgtgtcaaaagagaaggaggagagagcacacctgaaggagcccccaccagcagcctctaaaggggcaccagcaaccccacacctggctgacgcccccaaagaagctgagaagaaggtggttatcaagagtgaagctgcttcacccgcactacccgtgatcacaaaagtcgaaacgctatcccctgaatctgccctccaaggctctcctagatccgcagcgtcaacccctgcaggcagcccagacggctcattacctgaacatcatgctgccgcccccaacggccttcctggattttccgtggagaacatcatgaccctgagaacgagcccacccggaggcgaattgtcaccgggcgctgggcgggccgggctggtagtgccacctctagcgctgccatacgcagcagccccaccggcggcatacggtcagccatgtgcccagggtttggaagccggggccgctggaggctatcagtgctcaatgcgggccatgtcactgtacactggggccgagcgtcccgctcacatgtgcgtgccgccagccctggatgaggcgttgagtgaccacccctcgggtcccactagcccactcagcgcgctcaacctggctgccggacaggaaggtgcgcttgctgcaaccgggcatcaccaccagcaccatgggcaccaccatccacaggcgcctcctccaccacctgcaccccagccccagccgactccccagccaggcgcagcggcggcgcaggctgccagctggtacctgaatcatagcggcgacttgaatcatctgcccgggcataccttcgctgcccagcagcaaacttttccgaatgtgcgtgagatgtttaactcccacaggctgggaattgagaacagcaccctgggtgagtcgcaagtcagtgggaacgctagctgtcagctcccttatagatccaccccccccctctatcggcacgccgcgccctattcctacgactgtaccaaatactag

SEQ ID NO: 154347 - DNA, 1506 bp, Artificial Sequence
  derived and/or modified sequence
atgcaggctcgatattccgtcagcgatccgaatgctcttggcgtcgtgccctatttaagtgagcaaaattattacagagccgctgggtcctatggaggtatggcttcccccatgggcgtctacagtggacatcctgaacagtattccgctggcatgggacgtagctatgccccatatcatcaccatcagcctgctgctccgaaggatctcgtgaaacctccttacagttacattgccctgataaccatggctatccagaacgctcccgagaagaaaatcacccttaacggtatttatcagtttatcatggacaggtttccattctatagagagaacaaacaaggctggcagaattccatccgccataacctttcccttaacgaatgcttcgtgaaagtaccccgagatgacaagaaacccggtaaaggaagttattggaccctggatcccgacagctacaacatgttcgagaacggctccttcctccgtagacggcgaaggtttaagaagaaagacgtgtcaaaggaaaaggaagaaagagcccacctcaaagaaccacccccagccgcaagcaaaggcgctcccgcaacgcctcaccttgctgatgctcccaaggaggcggaaaaaaaggtcgtgataaaaagcgaggctgcgagccccgcactgccagtgattaccaaggtcgagactctgtctcccgagtccgcccttcagggttctcccaggagcgccgcaagcacccctgcagggagccccgatggcagcctgcccgaacaccatgcggcagcccctaacggccttcccggtttttccgttgaaaatatcatgaccttgcgcacttctcccccagggggtgagctcagtcccggtgccggtcgcgctggcttagtagtaccccctctggctctaccatacgccgctgcacctccggctgcgtacggacagccttgtgcacaagggcttgaggcaggtgctgccggtggctatcagtgttcaatgagagccatgagcctgtacaccggcgcagagaggcctgctcacatgtgtgtaccacctgcactggacgaagctctgtctgaccaccccagtggccctacctctccactcagcgcactgaacttggccgcaggccaagagggggctttggccgctaccggtcatcaccatcagcaccacggtcatcaccacccgcaggcgcctcccccacctcccgcaccacagcctcagccgacaccacagcccggtgccgcagctgcccaggcagccagttggtacctcaatcatagtggcgacctgaatcacttaccaggccacactttcgcagcacagcagcaaacattcccaaatgtcagagaaatgttcaactcccacaggttaggcattgagaacagcaccctgggagaatcccaggtctcgggaaacgcctcttgccaattgccttatagatctacaccacccctctatagacatgcagctccctactcgtatgactgcaccaagtactag

SEQ ID NO: 154348 - protein, 380 aa, Artificial Sequence
  derived and/or modified sequence
MMFSGFNADYEASSSRCSSASPAGDSLSYYHSPADSFSSMGSPVNAQDFCTDLAVSSANFIPTVTAISTSPDLQWLVQPALVSSVAPSQTRAPHPFGVPAPSAGAYSRAGVVKTMTGGRAQSIGRRGKVEQLSPEEEEKRRIRRERNKMAAAKCRNRRRELTDTLQAETDQLEDEKSALQTEIANLLKEKEKLEFILAAHRPACKIPDDLGFPEEMSVASLDLTGGLPEVATPESEEAFTLPLLNDPEPKPSVEPVKSISSMELKTEPFDDFLFPASSRPSGSETARSVPDMDLSGSFYAADWEPLHSGSLGMGPMATELEPLCTPVVTCTPSCTAYTSSFVFTYPEADSFPSCAAAHRKGSSSNEPSSDSLSSPTLLAL

SEQ ID NO: 154349 - DNA, 2158 bp, Artificial Sequence
  derived and/or modified sequence
attcataaaacgcttgttataaaagcagtggctgcggcgcctcgtactccaaccgcatctgcagcgagcatctgagaagccaagactgagccggcggccgcggcgcagcgaacgagcagtgaccgtgctcctacccagctctgctccacagcgcccacctgtctccgcccctcggcccctcgcccggctttgcctaaccgccacgatgatgttctcgggcttcaacgcagactacgaggcgtcatcctcccgctgcagcagcgcgtccccggccggggatagcctctcttactaccactcacccgcagactccttctccagcatgggctcgcctgtcaacgcgcaggacttctgcacggacctggccgtctccagtgccaacttcattcccacggtcactgccatctcgaccagtccggacctgcagtggctggtgcagcccgccctcgtctcctccgtggccccatcgcagaccagagcccctcaccctttcggagtccccgccccctccgctggggcttactccagggctggcgttgtgaagaccatgacaggaggccgagcgcagagcattggcaggaggggcaaggtggaacagttatctccagaagaagaagagaaaaggagaatccgaagggaaaggaataagatggctgcagccaaatgccgcaaccggaggagggagctgactgatacactccaagcggagacagaccaactagaagatgagaagtctgctttgcagaccgagattgccaacctgctgaaggagaaggaaaaactagagttcatcctggcagctcaccgacctgcctgcaagatccctgatgacctgggcttcccagaagagatgtctgtggcttcccttgatctgactgggggcctgccagaggttgccaccccggagtctgaggaggccttcaccctgcctctcctcaatgaccctgagcccaagccctcagtggaacctgtcaagagcatcagcagcatggagctgaagaccgagccctttgatgacttcctgttcccagcatcatccaggcccagtggctctgagacagcccgctccgtgccagacatggacctatctgggtccttctatgcagcagactgggagcctctgcacagtggctccctggggatggggcccatggccacagagctggagcccctgtgcactccggtggtcacctgtactcccagctgcactgcttacacgtcttccttcgtcttcacctaccccgaggctgactccttccccagctgtgcagctgcccaccgcaagggcagcagcagcaatgagccttcctctgactcgctcagctcacccacgctgctggccctgtgagggggcagggaaggggaggcagccggcacccacaagtgccactgcccgagctggtgcattacagagaggagaaacacatcttccctagagggttcctgtagacctagggaggaccttatctgtgcgtgaaacacaccaggctgtgggcctcaaggacttgaaagcatccatgtgtggactcaagtccttacctcttccggagatgtagcaaaacgcatggagtgtgtattgttcccagtgacacttcagagagctggtagttagtagcatgttgagccaggcctgggtctgtgtctcttttctctttctccttagtcttctcatagcattaactaatctattgggttcattattggaattaacctggtgctggatattttcaaattgtatctagtgcagctgattttaacaataactactgtgttcctggcaatagtgtgttctgattagaaatgaccaatattatactaagaaaagatacgactttattttctggtagatagaaataaatagctatatccatgtactgtagtttttcttcaacatcaatgttcattgtaatgttactgatcatgcattgttgaggtggtctgaatgttctgacattaacagttttccatgaaaacgttttattgtgtttttaatttatttattaagatggattctcagatatttatatttttattttatttttttctaccttgaggtcttttgacatgtggaaagtgaatttgaatgaaaaatttaagcattgtttgcttattgttccaagacattgtcaataaaagcatttaagttgaatgcgaccaa

SEQ ID NO: 154350 - DNA, 1143 bp, Artificial Sequence
  derived and/or modified sequence
atgatgttcagcggcttcaacgccgactacgaggccagcagcagcagatgcagcagcgccagccccgccggcgacagcctgagctactaccacagccccgccgacagcttcagcagcatgggcagccccgtgaacgcccaggacttctgcaccgacctggccgtgagcagcgccaacttcatccccaccgtgaccgccatcagcaccagccccgacctgcagtggctggtgcagcccgccctggtgagcagcgtggcccccagccagaccagagccccccaccccttcggcgtgcccgcccccagcgccggcgcctacagcagagccggcgtggtgaagaccatgaccggcggcagagcccagagcatcggcagaagaggcaaggtggagcagctgagccccgaggaggaggagaagagaagaatcagaagagagagaaacaagatggccgccgccaagtgcagaaacagaagaagagagctgaccgacaccctgcaggccgagaccgaccagctggaggacgagaagagcgccctgcagaccgagatcgccaacctgctgaaggagaaggagaagctggagttcatcctggccgcccacagacccgcctgcaagatccccgacgacctgggcttccccgaggagatgagcgtggccagcctggacctgaccggcggcctgcccgaggtggccacccccgagagcgaggaggccttcaccctgcccctgctgaacgaccccgagcccaagcccagcgtggagcccgtgaagagcatcagcagcatggagctgaagaccgagcccttcgacgacttcctgttccccgccagcagcagacccagcggcagcgagaccgccagaagcgtgcccgacatggacctgagcggcagcttctacgccgccgactgggagcccctgcacagcggcagcctgggcatgggccccatggccaccgagctggagcccctgtgcacccccgtggtgacctgcacccccagctgcaccgcctacaccagcagcttcgtgttcacctaccccgaggccgacagcttccccagctgcgccgccgcccacagaaagggcagcagcagcaacgagcccagcagcgacagcctgagcagccccaccctgctggccctgtag

SEQ ID NO: 154351 - DNA, 1143 bp, Artificial Sequence
  derived and/or modified sequence
atgatgttctccggattcaacgcagattatgaagcttccagttcaagatgttccagcgcctcccctgccggcgatagtcttagctactatcacagtcccgcagattctttttcatcaatggggtcaccggtgaatgcccaggatttttgtacagacctggcagtttcatctgctaattttatccccaccgtgacggccattagcacctcacctgacctacagtggttggtgcaacccgccttggtcagcagcgtcgccccctcccaaactagggccccccacccttttggcgtcccagccccttctgcaggggcctactcaagagcgggagtcgtgaaaacaatgaccgggggtagggcccaatctatcgggagacgggggaaggtggagcagctcagccccgaagaggaggaaaagcgccgcatccgtagggagaggaacaagatggccgctgcgaagtgcagaaacaggcgtcgcgaactgacagataccctgcaggctgaaactgatcagctggaggacgaaaagtctgctctgcaaactgaaattgccaacttactaaaggagaaggagaaactcgaatttattctcgccgcccatagacctgcatgcaagatccccgatgatctaggctttccagaggaaatgtctgttgcctccctggacctcacaggaggcctgcctgaggtagcgacccctgaaagcgaagaagcgtttacattgcctctccttaatgatccagagccaaaaccttcagtcgagccagtcaaatccatatcctctatggagctcaagacagagccttttgatgattttctatttcctgcatccagtcggccttctggctccgagaccgcccgctccgtgcccgatatggacttgagcggcagtttctacgcggcagactgggagcctcttcattctggtagcctggggatgggtcctatggctaccgaattggagcccctgtgtactccagtggttacttgtacaccaagctgtaccgcctacacgagcagctttgtgttcacatatccagaggctgattccttcccatcctgtgctgccgcgcatagaaaagggtcctctagcaacgagccctcttccgactccctgagtagccccactttgcttgctttatag

SEQ ID NO: 154352 - DNA, 2158 bp, Artificial Sequence
  derived and/or modified sequence
actcattcataaaacgcttgttataaaagcagtggctgcggcgcctcgtactccaaccgcatctgcagcgagcatctgagaagccaagactgagccggcggccgcggcgcagcgaacgagcagtgaccgtgctcctacccagctctgctccacagcgcccacctgtctccgcccctcggcccctcgcccggctttgcctaaccgccacgatgatgttctcgggcttcaacgcagactacgaggcgtcatcctcccgctgcagcagcgcgtccccggccggggatagcctctcttactaccactcacccgcagactccttctccagcatgggctcgcctgtcaacgcgcaggacttctgcacggacctggccgtctccagtgccaacttcattcccacggtcactgccatctcgaccagtccggacctgcagtggctggtgcagcccgccctcgtctcctccgtggccccatcgcagaccagagcccctcaccctttcggagtccccgccccctccgctggggcttactccagggctggcgttgtgaagaccatgacaggaggccgagcgcagagcattggcaggaggggcaaggtggaacagttatctccagaagaagaagagaaaaggagaatccgaagggaaaggaataagatggctgcagccaaatgccgcaaccggaggagggagctgactgatacactccaagcggagacagaccaactagaagatgagaagtctgctttgcagaccgagattgccaacctgctgaaggagaaggaaaaactagagttcatcctggcagctcaccgacctgcctgcaagatccctgatgacctgggcttcccagaagagatgtctgtggcttcccttgatctgactgggggcctgccagaggttgccaccccggagtctgaggaggccttcaccctgcctctcctcaatgaccctgagcccaagccctcagtggaacctgtcaagagcatcagcagcatggagctgaagaccgagccctttgatgacttcctgttcccagcatcatccaggcccagtggctctgagacagcccgctccgtgccagacatggacctatctgggtccttctatgcagcagactgggagcctctgcacagtggctccctggggatggggcccatggccacagagctggagcccctgtgcactccggtggtcacctgtactcccagctgcactgcttacacgtcttccttcgtcttcacctaccccgaggctgactccttccccagctgtgcagctgcccaccgcaagggcagcagcagcaatgagccttcctctgactcgctcagctcacccacgctgctggccctgtgagggggcagggaaggggaggcagccggcacccacaagtgccactgcccgagctggtgcattacagagaggagaaacacatcttccctagagggttcctgtagacctagggaggaccttatctgtgcgtgaaacacaccaggctgtgggcctcaaggacttgaaagcatccatgtgtggactcaagtccttacctcttccggagatgtagcaaaacgcatggagtgtgtattgttcccagtgacacttcagagagctggtagttagtagcatgttgagccaggcctgggtctgtgtctcttttctctttctccttagtcttctcatagcattaactaatctattgggttcattattggaattaacctggtgctggatattttcaaattgtatctagtgcagctgattttaacaataactactgtgttcctggcaatagtgtgttctgattagaaatgaccaatattatactaagaaaagatacgactttattttctggtagatagaaataaatagctatatccatgtactgtagtttttcttcaacatcaatgttcattgtaatgttactgatcatgcattgttgaggtggtctgaatgttctgacattaacagttttccatgaaaacgttttattgtgtttttaatttatttattaagatggattctcagatatttatatttttattttatttttttctaccttgaggtcttttgacatgtggaaagtgaatttgaatgaaaaatttaagcattgtttgcttattgttccaagacattgtcaataaaagcatttaagttgaatgcga

SEQ ID NO: 154353 - DNA, 1143 bp, Artificial Sequence
  derived and/or modified sequence
atgatgttcagcggcttcaatgctgactatgaggccagcagcagccgctgcagcagcgccagccctgctggggacagcctgagctactaccacagccctgctgacagcttcagctccatgggcagccctgtgaatgcccaggacttctgcacagacctggccgtgtcctctgccaacttcatccccaccgtgacagccatcagcaccagcccagacctgcagtggctggtgcagcctgccctggtgtcctctgtggcccccagccagacccgggccccccaccccttcggcgtgcctgcccccagcgctggggcctacagcagagctggggtggtgaagaccatgactggaggccgggcccagagcattggaagaagaggcaaggtggagcagctgagccctgaggaggaggagaagaggcgcatcagaagagagaggaacaagatggctgctgccaagtgcaggaacagaagaagagagctgacagacaccctgcaggccgagacagaccagctggaggatgagaagagcgccctgcagacagaaattgccaacctgctgaaggagaaggagaagctggagttcatcctggccgcccacaggcctgcctgcaagatcccagatgacctgggcttccctgaggagatgtctgtggccagcctggacctgaccggcggcctgcctgaggtggccaccccagagagcgaggaggccttcaccctgcccctgctgaatgaccctgagcccaagcccagcgtggagcctgtgaagagcatcagctccatggagctgaagacagagccctttgatgacttcctgtttcctgccagcagccggcccagcggcagcgagacagcccggtctgtgcctgacatggacctgagcggcagcttctacgccgctgactgggagcccctgcacagcggcagcctgggcatgggccccatggccacagagctggagcccctgtgcacccctgtggtgacctgcacccccagctgcacagcctacaccagcagctttgtgttcacctacccagaggccgacagcttccccagctgtgccgccgcccacaggaagggcagcagcagcaatgagcccagcagtgacagcctgagcagccccaccctgctggccctgtag

SEQ ID NO: 154354 - DNA, 1143 bp, Artificial Sequence
  derived and/or modified sequence
atgatgttcagcggcttcaacgccgactacgaggccagcagcagcagatgctcttcagccagccctgcaggagatagcctctcctattatcatagcccagccgacagtttctccagcatggggtctcccgtaaacgcacaggacttctgcactgatctggccgtgtcctccgctaattttattcctaccgtcactgcgatctcgacctcgccagacctgcaatggctcgtacagcctgctctggtgagctctgttgcacctagtcagacaagagcacctcatccctttggagtgccagccccatccgcgggcgcttattcccgcgccggcgtggtgaaaactatgacgggcggacgggcccagtcaatcggacgacggggcaaagtagagcagctgtctcccgaggaggaagaaaagcgacgaattcggagggaacgcaataagatggccgctgcaaaatgtcgaaatagacggagggagcttaccgatacactccaggctgaaacagaccagttagaggatgagaagtccgccctgcagacagagattgccaatctgcttaaagagaaagaaaagctggagtttattctggccgcccaccgaccagcctgcaaaatcccagacgatctggggtttccggaggaaatgtcggtggcatccctggatctaacaggcggtttaccggaggttgccactcctgagagtgaggaggccttcacactgcccttgcttaacgatccagagcctaaaccctccgtcgagcccgtcaagtccatcagttctatggagctcaaaactgagccttttgatgactttctgttcccagctagtagccgaccaagtggctcggagacagctcggtctgtgccagacatggacctttccggctccttctacgcggcggattgggagcccttgcattctgggagcctgggcatgggcccgatggcaactgagttagagcctctgtgcacaccagtggtgacttgcaccccttcttgtaccgcttacacgtccagttttgtcttcacataccctgaagccgactccttcccatcttgcgccgctgcccaccgaaaaggatcttcatctaacgagccctccagcgactcactgagttcgcctaccttgttggcgttgtag

SEQ ID NO: 154355 - DNA, 1143 bp, Artificial Sequence
  derived and/or modified sequence
atgatgttcagcgggtttaatgcagactatgaggcctcttctagcaggtgtagctccgctagtcccgcaggtgatagtctgagctattaccattctcccgctgattcattttcctccatgggtagtcctgttaatgcccaggacttctgtaccgacctggcagtgagctcggcaaattttatccctacagtgacagctatttcgacttcaccggaccttcaatggctggtgcagcccgcactcgtgtcgtcagtcgccccttctcagactcgcgctccccatccatttggcgtgccggcaccatccgccggagcctattcccgcgcaggtgtagtgaaaacaatgactgggggaagagctcaaagcatcggcagacgcggtaaagtcgagcagctttccccggaagaagaggagaagcgaagaatccgcagagagagaaacaaaatggcggcagcaaaatgtaggaacagacggcgagaactgaccgatacccttcaagccgaaaccgaccagctggaagacgagaagtccgcgctgcagacagagattgcaaatttgttgaaggaaaaggaaaagctggagtttatcctggcagcccaccgacctgcgtgtaagattcccgacgatctagggttccctgaggaaatgtctgtcgccagtcttgacttgaccgggggtctgccagaagtcgccacccccgagtccgaagaggcctttacactcccactgttaaacgacccagagcccaagccgtctgtcgagcctgtgaaatcaatttcaagcatggagctgaaaacggaaccatttgacgattttctctttccagcctcttccaggccttcaggatcggagacggcccgtagcgtacctgacatggatctgtccggtagtttctatgccgctgactgggaacctctccacagtgggtcgttaggcatgggtccaatggcaacagagttggaaccattatgtacccctgtcgtgacctgtaccccgtcttgtactgcctatacctccagttttgttttcacgtaccctgaggccgacagcttcccgtcctgtgctgcggcacatagaaaaggatcctcatctaatgagccctcctctgactcactctcaagcccaaccctactggccctgtag

SEQ ID NO: 154356 - protein, 326 aa, Artificial Sequence
  derived and/or modified sequence
MYQDYPGNFDTSSRGSSGSPAHAESYSSGGGGQQKFRVDMPGSGSAFIPTINAITTSQDLQWMVQPTVITSMSNPYPRSHPYSPLPGLASVPGHMALPRPGVIKTIGTTVGRRRRDEQLSPEEEEKRRIRRERNKLAAAKCRNRRRELTEKLQAETEELEEEKSGLQKEIAELQKEKEKLEFMLVAHGPVCKISPEERRSPPAPGLQPMRSGGGSVGAVVVKQEPLEEDSPSSSSAGLDKAQRSVIKPISIAGGFYGEEPLHTPIVVTSTPAVTPGTSNLVFTYPSVLEQESPASPSESCSKAHRRSSSSGDQSSDSLNSPTLLAL

SEQ ID NO: 154357 - protein, 287 aa, Artificial Sequence
  derived and/or modified sequence
MPGSGSAFIPTINAITTSQDLQWMVQPTVITSMSNPYPRSHPYSPLPGLASVPGHMALPRPGVIKTIGTTVGRRRRDEQLSPEEEEKRRIRRERNKLAAAKCRNRRRELTEKLQAETEELEEEKSGLQKEIAELQKEKEKLEFMLVAHGPVCKISPEERRSPPAPGLQPMRSGGGSVGAVVVKQEPLEEDSPSSSSAGLDKAQRSVIKPISIAGGFYGEEPLHTPIVVTSTPAVTPGTSNLVFTYPSVLEQESPASPSESCSKAHRRSSSSGDQSSDSLNSPTLLAL

SEQ ID NO: 154358 - DNA, 4015 bp, Artificial Sequence
  derived and/or modified sequence
cgaacgagcggcgctcggcggggacagaaagagggagagagagagagagagagagggagaggcgcggccgggcgaggcgggcccgtccgggagcgggctccggggaaggggtgcgggtctgggcgccggagcggggagcggggccgcgtccctctcagcgccagctctacttgagccccacgagccgctgtccccctggcgcgctcggggccgcgggacgggcgcacgccgccttctcctagtcaagtatccgagccgccccgaaactcgggcggcgagtcggccacgggaagtttattctccggctccttttctaaaaggaagaaacagaagtttctcccagcggacagcttttctttccgcctttttggccctgtctgaaatcgggggtccccagggctggcaggccaggctcgctgggctcctaatcttttttttaatttccaatttttgattgggccgtgggtccccgctgagctccggctgcgcgcgggggcgggagggcgcgcgcaggggagggaccgagagacgcgccgactttttagagggagggatcgggtggacaactggtcccgcggcgctcgcagagccggaaagaagtgctgtaagggacgctcgggggacgctgttcctgaggtgtcgccgcctccctgtcctcgccctccgcggtgggggagaaacccaggagcgaagcccagagcccgcggcgcggccggcggacgaacgagcgcgcagcagccggtgcgcggccgcggcgagggcgggggaagaaaaacaccctgtttcctctccggcccccaccgcggatcatgtaccaggattatcccgggaactttgacacctcgtcccggggcagcagcggctctcctgcgcacgccgagtcctactccagcggcggcggcggccagcagaaattccgggtagatatgcctggctcaggcagtgcattcatccccaccatcaacgccatcacgaccagccaggacctgcagtggatggtgcagcccacagtgatcacctccatgtccaacccataccctcgctcgcacccctacagccccctgccgggcctggcctctgtccctggacacatggccctcccaagacctggcgtgatcaagaccattggcaccaccgtgggccgcaggaggagagatgagcagctgtctcctgaagaggaggagaagcgtcgcatccggcgggagaggaacaagctggctgcagccaagtgccggaaccgacgccgggagctgacagagaagctgcaggcggagacagaggagctggaggaggagaagtcaggcctgcagaaggagattgctgagctgcagaaggagaaggagaagctggagttcatgttggtggctcacggcccagtgtgcaagattagccccgaggagcgccgatcgcccccagcccctgggctgcagcccatgcgcagtgggggtggctcggtgggcgctgtagtggtgaaacaggagcccctggaagaggacagcccctcgtcctcgtcggcggggctggacaaggcccagcgctctgtcatcaagcccatcagcattgctgggggcttctacggtgaggagcccctgcacacccccatcgtggtgacctccacacctgctgtcactccgggcacctcgaacctcgtcttcacctatcctagcgtcctggagcaggagtcacccgcatctccctccgaatcctgctccaaggctcaccgcagaagcagtagcagcggggaccaatcatcagactccttgaactcccccactctgctggctctgtaacccagtgcacctccctccccagctccggagggggtcctcctcgctcctccttcccagggaccagcaccttcaagcgctccagggccgtgagggcaagagggggacctgccaccagggagcttcctggctctgggggacccaggtgggacttagcagtgagtattggaagacttgggttgatctcttagaagccatgggacctcctccctcattcatcttgcaagcaaatcccatttcttgaaaagccttggagaactcggtttggtagacttggacatctctctggcttctgaagagcctgaagctggcctggaccattcctgtccctttgttaccatactgtctctggagtgatggtgtccttccctgccccaccacgcatgctcagtgccttttggtttcaccttccctcgacttgaccctttcctcccccagcgtcagtttcactccctcttggtttttatcaaatttgccatgacatttcatctgggtggtctgaatattaaagctcttcatttctggagatggggcagcaggtggctcttctgctggggctgacttgtccagaaggggacaaagtgcaatacagagccttccctaccctgacgcctcccagtcatcatctccagaactcccagcggggctccctgagctctcaaggagatgctgccatcactgggaggctcagaggacccttcctgcccaccttcggagacggcttctggaggaacggcttggccagaagacagggtgtgagtgagacagtggggcacaggttgggtttgccaaacgcctaattaccaggccaggaagcatgccaacaaagccacacgggtgtcctagccagcttcccttcacctggtgtcttgagtagggcgtctcctgtaattactgccttgccattctgcccctggacccttctctccggaccagggaggcgtccctccctaggagccacacattatactccaagtccctgccgggctccgcctttcccccaccctggctctcagggtgacgccacccacagagatttaatgagcgtgggcctggaccttccccagatgctgccaggcagcccctccccaagcctcaaagaagcatttgctgaggatggagaggcaggggagggaggcgggaggccgtcactggagtggcgtctgcagcagctgctgccccagcacccgctcagcctgtcctggctgctcacctccccgcagggcaccgggcctttcctgccctctgtggtcatctgccacctgctggatcaagtgctttctcttttacactcccctgtccccaccccagtgcactcttctggcccaggcagcaagcaagctgtgaacagctggcctgagctgtcgctgtggcttgtggctcatgcgccattcctggttgtctgttgaatctttctggctgctggaattggagataggatgttttgcttcccactgcaggagagctgccccctttcacggggttggggaagggtccccctggcctccagcaggagcacagctcagcagggtccctgctgcccacccctctgagccttttctccccagggtatggctcctgctgagtttcttgtccagcagggccttgacaggaatccagggagtagctcctggccagaaccagcctctgcggggcttgtgctctgcaaagactctgctgctggggattcagctctagaggtcacagtatcctcgtttgaaagataattaagatcccccgtggagaaagcagtgacacattcacacagctgttccctcgcatgttatttcatgaacatgacctgttttcgtgcactagacacacagagtggaacagccgtatgcttaaagtacatgggccagtgggactggaagtgacctgtacaagtgatgcagaaaggagggtttcaaagaaaaaggattttgtttaaaatactttaaaaatgttatttcctgcatcccttggctgtgatgcccctctcccgatttcccaggggctctgggagggacccttctaagaagattgggcagttgggtttctggcttgagatgaatccaagcagcagaatgagccaggagtagcaggagatgggcaaagaaaactggggtgcactcagctctcacaggggtaatcatctcaagtggtatttgtagccaagtgggagctattttcttttttgtgcatatagatatttcttaaatgaaaaaaaaaaaaaaaaaaaaaaaaaa

SEQ ID NO: 154359 - DNA, 6708 bp, Artificial Sequence
  derived and/or modified sequence
gtagtgactcatctcgggcagagcgctagggctccgagcgaaccagcgagcgagcgaacgagcggcgctcggcggggacagaaagagggagagagagagagagagagagggagaggcgcggccgggcgaggcgggcccgtccgggagcgggctccggggaaggggtgcgggtctgggcgccggagcggggagcggggccgcgtccctctcagcgccagctctacttgagccccacgagccgctgtccccctggcgcgctcggggccgcgggacgggcgcacgccgccttctcctagtcaagtatccgagccgccccgaaactcgggcggcgagtcggccacgggaagtttattctccggctccttttctaaaaggaagaaacagaagtttctcccagcggacagcttttctttccgcctttttggccctgtctgaaatcgggggtccccagggctggcaggccaggctcgctgggctcctaatcttttttttaatttccaatttttgattgggccgtgggtccccgctgagctccggctgcgcgcgggggcgggagggcgcgcgcaggggagggaccgagagacgcgccgactttttagagggagggatcgggtggacaactggtcccgcggcgctcgcagagccggaaagaagtgctgtaagggacgctcgggggacgctgttcctgaggtgtcgccgcctccctgtcctcgccctccgcggtgggggagaaacccaggagcgaagcccagagcccgcggcgcggccggcggacgaacgagcgcgcagcagccggtgcgcggccgcggcgagggcgggggaagaaaaacaccctgtttcctctccggcccccaccgcggatcatgtaccaggattatcccgggaactttgacacctcgtcccggggcagcagcggctctcctgcgcacgccgagtcctactccagcggcggcggcggccagcagaaattccgggtagatatgcctggctcaggcagtgcattcatccccaccatcaacgccatcacgaccagccaggacctgcagtggatggtgcagcccacagtgatcacctccatgtccaacccataccctcgctcgcacccctacagccccctgccgggcctggcctctgtccctggacacatggccctcccaagacctggcgtgatcaagaccattggcaccaccgtgggccgcaggaggagagatgagcagctgtctcctgaagaggaggagaagcgtcgcatccggcgggagaggaacaagctggctgcagccaagtgccggaaccgacgccgggagctgacagagaagctgcaggcggagacagaggagctggaggaggagaagtcaggcctgcagaaggagattgctgagctgcagaaggagaaggagaagctggagttcatgttggtggctcacggcccagtgtgcaagattagccccgaggagcgccgatcgcccccagcccctgggctgcagcccatgcgcagtgggggtggctcggtgggcgctgtagtggtgaaacaggagcccctggaagaggacagcccctcgtcctcgtcggcggggctggacaaggcccagcgctctgtcatcaagcccatcagcattgctgggggcttctacggtgaggagcccctgcacacccccatcgtggtgacctccacacctgctgtcactccgggcacctcgaacctcgtcttcacctatcctagcgtcctggagcaggagtcacccgcatctccctccgaatcctgctccaaggctcaccgcagaagcagtagcagcggggaccaatcatcagactccttgaactcccccactctgctggctctgtaacccagtgcacctccctccccagctccggagggggtcctcctcgctcctccttcccagggaccagcaccttcaagcgctccagggccgtgagggcaagagggggacctgccaccagggagcttcctggctctgggggacccaggtgggacttagcagtgagtattggaagacttgggttgatctcttagaagccatgggacctcctccctcattcatcttgcaagcaaatcccatttcttgaaaagccttggagaactcggtttggtagacttggacatctctctggcttctgaagagcctgaagctggcctggaccattcctgtccctttgttaccatactgtctctggagtgatggtgtccttccctgccccaccacgcatgctcagtgccttttggtttcaccttccctcgacttgaccctttcctcccccagcgtcagtttcactccctcttggtttttatcaaatttgccatgacatttcatctgggtggtctgaatattaaagctcttcatttctggagatggggcagcaggtggctcttctgctggggctgacttgtccagaaggggacaaagtgcaatacagagccttccctaccctgacgcctcccagtcatcatctccagaactcccagcggggctccctgagctctcaaggagatgctgccatcactgggaggctcagaggacccttcctgcccaccttcggagacggcttctggaggaacggcttggccagaagacagggtgtgagtgagacagtggggcacaggttgggtttgccaaacgcctaattaccaggccaggaagcatgccaacaaagccacacgggtgtcctagccagcttcccttcacctggtgtcttgagtagggcgtctcctgtaattactgccttgccattctgcccctggacccttctctccggaccagggaggcgtccctccctaggagccacacattatactccaagtccctgccgggctccgcctttcccccaccctggctctcagggtgacgccacccacagagatttaatgagcgtgggcctggaccttccccagatgctgccaggcagcccctccccaagcctcaaagaagcatttgctgaggatggagaggcaggggagggaggcgggaggccgtcactggagtggcgtctgcagcagctgctgccccagcacccgctcagcctgtcctggctgctcacctccccgcagggcaccgggcctttcctgccctctgtggtcatctgccacctgctggatcaagtgctttctcttttacactcccctgtccccaccccagtgcactcttctggcccaggcagcaagcaagctgtgaacagctggcctgagctgtcgctgtggcttgtggctcatgcgccattcctggttgtctgttgaatctttctggctgctggaattggagataggatgttttgcttcccactgcaggagagctgccccctttcacggggttggggaagggtccccctggcctccagcaggagcacagctcagcagggtccctgctgcccacccctctgagccttttctccccagggtatggctcctgctgagtttcttgtccagcagggccttgacaggaatccagggagtagctcctggccagaaccagcctctgcggggcttgtgctctgcaaagactctgctgctggggattcagctctagaggtcacagtatcctcgtttgaaagataattaagatcccccgtggagaaagcagtgacacattcacacagctgttccctcgcatgttatttcatgaacatgacctgttttcgtgcactagacacacagagtggaacagccgtatgcttaaagtacatgggccagtgggactggaagtgacctgtacaagtgatgcagaaaggagggtttcaaagaaaaaggattttgtttaaaatactttaaaaatgttatttcctgcatcccttggctgtgatgcccctctcccgatttcccaggggctctgggagggacccttctaagaagattgggcagttgggtttctggcttgagatgaatccaagcagcagaatgagccaggagtagcaggagatgggcaaagaaaactggggtgcactcagctctcacaggggtaatcatctcaagtggtatttgtagccaagtgggagctattttcttttttgtgcatatagatatttcttaaatgaagctgctttcttgtcttttatttctaaaagcccccttataccccactttgtgcagcaaagatccccgtgcaggtcacagcctgatttgtggccaggctggacaaattcctgaggcacaacttggcttcagttcagatttcaagctgtgttggtgttgggaccagcagaaggcaaacgtccagccaacacacaggactgtaagaggactctgagctacgtgccctgtgaagacccccaggctttgtcataggaggtcgttcagcttccccaaagtcagaggtgatttgatttggggaagactgaatattcacacctaagtcgtgagcatatcctgagttttacttccttatggcttgccctccaagttctctctctcatacacacacacacccttgctccagaatcaccagacacctccatggctccagctatgggaacagctgcattggggctgcctttctgtttggcttaggaacttctgtgcttcttgtggctccactcgcgaggcagctcggaggtgtggactccgattgggctgcaggcagctctgggacggcacagggcgggcgctctgatcagctcgtgtaaaacacaccgtcttcttggcctcctggccagtctttctgcgaatagtcctctccctggccagttgaatgggggaagctgctggcacaggaaggagaggcgatcccggctgaggcttaggaaattgctggagccggctccaagcagataattcactggggaggttttcagagtcaaacatcattctgcctgtgttgggggccaggtgtgtcacacaagcatctcaaagtcaaaagccatctggggctgctgcttctgtttctcaggctctggggaaaggaatctccctctcctctcacttgattccaagtgtggttgaattgtctggagcactgggactttttttctcttttccttgatggaccaacagtgcaaatgcaatctcgccatttaactttcaggtcgatttcctttcctgatcagacatctttgtgccccctttaggaaggaaaagaatacacctacgatgtgccaggcactgtgttaggcgcttttatatagatcctcgttaggatgagactaagggatgaggacatctctttataaaaggcccctaagtaatggataaacagaaacacttagaggtgagaaggtctgtcttcaagatccaaggtaagattgccttcagtctgatgtttgttctcaaggacttatcccctacaatattctcccactccatacttctccttctaccccaccatgtgctcccgtgcactcctcagatggtcagaggggtaacccaagtccttagagaatttggggaccaatagaatatgtgatgtgtgaattttctttaaaaaacttaaggagtctttgctaccttctgcttgttgagttgttttggcattcatattaaaagccagcatctcactatttattgacaggttgggctgtgtgtgtgcgcatgtgtgtatacatttccaggcgtgcctgtgtcctgtagctttttaaaaggaaacccagtcatcccactatgaatctggcatcttcttatgcttctagtgttttggccatacatcaaccaaggggtttaatttatccaatgcttgacgacatgttcaggaggggctggatcaaattttgagagggttatgggaaagggagggggagaagaaattgacatttattttattatttattttaaatgtttacatcttctttatgttgtatcaagcctgaatagaaactgatagcattaaaatactccgttcctctctctcttctcgcttcctttttttttttttttttaaatttaggataacacatttttgtttctaaagtgatttgtgatttgtgctgtataaactgtataaaaggttctgtttttaaaggtggattttcattcctctggggacagtggtcgccaagacatctacattgtaagagaacacagtggaagatcctgtcctgattctcaaaaattattttctctgtatgattaaaagtttattccatttattttagtttgtgtttacttgattttgaggaagaaaatatttgactttgtgtaaagagtagggtatcagggtgtcttttctgccgtgggagatgtgtatatatatagtattttggtgtatagtagaaaataagctttgtgcatctgtatttgagatatgttaatgacgtggagtaaagtcagctgtaagactctggaggcaaacaagttgtatatggttcatatggctctatggggaatttaattacctttctgggcactttttttttttttttttttttaagtaatggtgaaatggtcccattggagagtctcctaaatagaccttccaggcagaaccgcaagctcaaaatctttgtatagttttgaaaattgaggagtagctttgtttggaagcctttctggtggtggtttttgttgttgttgttgttttgttgttttactatatgtaatacaagcctacagtatttgcactaaagaaagcttgttagaaaaagcttgctgctatggaagaaagaacatattaaaacttctttcccttgcgatttttttgggggaggggggttagcatttccactttcagttgagtagcattttgtagaataaaatgaattaagattgaa

SEQ ID NO: 154360 - DNA, 983 bp, Artificial Sequence
  derived and/or modified sequence
atagacgcctgcccattcggcccggcagtgtgtgaggcgcctttcaaaccggagggattggcaagaaattccgggtagatatgcctggctcaggcagtgcattcatccccaccatcaacgccatcacgaccagccaggacctgcagtggatggtgcagcccacagtgatcacctccatgtccaacccataccctcgctcgcacccctacagccccctgccgggcctggcctctgtccctggacacatggccctcccaagacctggcgtgatcaagaccattggcaccaccgtgggccgcaggaggagagatgagcagctgtctcctgaagaggaggagaagcgtcgcatccggcgggagaggaacaagctggctgcagccaagtgccggaaccgacgccgggagctgacagagaagctgcaggcggagacagaggagctggaggaggagaagtcaggcctgcagaaggagattgctgagctgcagaaggagaaggagaagctggagttcatgttggtggctcacggcccagtgtgcaagattagccccgaggagcgccgatcgcccccagcccctgggctgcagcccatgcgcagtgggggtggctcggtgggcgctgtagtggtgaaacaggagcccctggaagaggacagcccctcgtcctcgtcggcggggctggacaaggcccagcgctctgtcatcaagcccatcagcattgctgggggcttctacggtgaggagcccctgcacacccccatcgtggtgacctccacacctgctgtcactccgggcacctcgaacctcgtcttcacctatcctagcgtcctggagcaggagtcacccgcatctccctccgaatcctgctccaaggctcaccgcagaagcagtagcagcggggaccaatcatcagactccttgaactcccccactctgctggctctgtaacccagtgcacctccctccccagctccggagggggtcctc

SEQ ID NO: 154361 - DNA, 981 bp, Artificial Sequence
  derived and/or modified sequence
atgtatcaggactacccgggtaactttgacaccagctcccgaggttcttcagggagccccgcccatgccgaatcttattcatcgggggggggtggccaacagaaattcagagtcgatatgccaggaagcggaagcgcatttatcccgacaatcaacgctatcactacatcacaagatctgcaatggatggtgcagcccactgtcatcacatccatgagtaatccctatccccgatctcatccgtacagtcctcttcccgggctggcttctgttcctggccacatggccctgccccgtcctggcgtaataaaaaccatagggacaacggtcggtcgaaggagacgagatgaacagctcagccctgaggaggaggagaagcgcaggatacggagggaacgcaacaaactagcagcagccaagtgtaggaatcgccggagagagctaactgagaaactgcaggccgaaaccgaggagttagaggaagagaagtccggcttgcagaaggagatcgctgaactccaaaaagaaaaggagaagctcgagtttatgctcgtagcccacggcccggtttgtaagatcagtccagaagaacgccgatcaccaccagcccctgggctccaaccaatgcggtccggcggcggaagcgtgggggctgtggttgtgaaacaagagccattagaagaggatagcccatcatcctcaagtgcaggactcgacaaagcccagaggtccgtgatcaagcctatatccattgctggagggttttatggcgaggagcctttacatacgcctatcgtagtgacgtctactccagcagtgactcccgggacttcaaatctcgtgtttacctacccaagcgtcctcgaacaggagtctccagcgtcccccagtgagtcatgttcaaaggcccacaggcgcagctcctcctcgggagaccagagttccgattctctgaactcacctaccctgctggcgttatag

SEQ ID NO: 154362 - DNA, 864 bp, Artificial Sequence
  derived and/or modified sequence
atgccgggaagcgggagtgcatttatccccacgattaatgcaattacaacaagtcaggacctgcaatggatggtgcagccgaccgtaataaccagtatgtcaaacccgtatccaaggtcccatccctactcccctcttcccgggctggcaagcgtaccaggacatatggctctgccacggccgggagtgattaaaacaatcgggactacagtagggcggcgccgccgcgacgagcaattatcacctgaggaagaggagaaaaggcggatacgccgtgagcgcaataaattagcagctgcaaagtgcagaaacagaagaagagagttaacggagaagctacaggcagaaaccgaggagctcgaggaagaaaagagtggccttcaaaaggagatagccgagctgcaaaaagagaaggaaaagctcgagtttatgctcgtcgcccatggacctgtgtgcaaaattagcccagaggagaggcgctcgcccccggccccaggcctccagcccatgagaagtggcggcggctctgttggggctgtggtggtcaagcaggagcctctggaagaggactctcccagcagctcttctgctggcctggataaagcgcagaggtcagtgatcaaacctatttcgattgctggaggtttttatggcgaggagcccttgcacaccccaatcgtggtcacctctactccagctgtcacacccggaactagcaacctggttttcacatatccatctgtcctcgagcaggaatcccccgcttctccttcagagtcttgctccaaagcccacaggcggtcctcctcaagtggcgaccagagcagcgattctctcaatagccctacacttcttgcgctatag

SEQ ID NO: 154363 - DNA, 981 bp, Artificial Sequence
  derived and/or modified sequence
atgtaccaggactacccaggcaactttgacaccagcagccggggcagcagcggcagccctgcccatgctgagagctacagcagcggcggcggcggccagcagaagttccgggtggacatgcctggcagcggcagcgccttcatccccaccatcaatgccatcaccaccagccaggacctgcagtggatggtgcagcccaccgtcatcacctccatgagcaacccctaccccaggagccacccctacagccccctgcccggcctggcctctgtgcccggccacatggccctgcccaggcctggggtcatcaagaccatcggcaccaccgtgggcagaagaagaagagatgagcagctgagccctgaggaggaggagaagaggcgcatccggcgggagaggaacaagctggccgccgccaagtgcaggaacagaagaagagagctgacagagaagctgcaggccgagacagaggagctggaggaggagaagagcggcctgcagaaggagattgctgagctgcagaaggagaaggagaagctggagttcatgctggtggcccacggccctgtgtgcaagatcagccctgaggagcggcgcagccccccagcccctggcctgcagcccatgaggtctgggggcggctctgtgggcgctgtggtggtgaagcaggagcccctggaggaggacagccccagcagcagcagcgctggcctggacaaggcccagaggagcgtcatcaagcccatcagcattgctgggggcttctacggggaggagcccctgcacacccccatcgtggtgaccagcaccccagctgtgaccccaggcaccagcaacctggtgttcacctaccccagcgtgctggagcaggagagccctgccagccccagcgagagctgcagcaaggcccacagaagaagcagcagcagcggggaccagagcagtgacagcctgaacagccccaccctgctggccctgtag

SEQ ID NO: 154364 - DNA, 864 bp, Artificial Sequence
  derived and/or modified sequence
atgcctggcagcggcagcgccttcatccccaccatcaatgccatcaccaccagccaggacctgcagtggatggtgcagcccaccgtcatcacctccatgagcaacccctaccccaggagccacccctacagccccctgcccggcctggcctctgtgcccggccacatggccctgcccaggcctggggtcatcaagaccatcggcaccaccgtgggcagaagaagaagagatgagcagctgagccctgaggaggaggagaagaggcgcatcagaagagagaggaacaagctggccgccgccaagtgcaggaacagaagaagagagctgacagagaagctgcaggccgagacagaggagctggaggaggagaagagcggcctgcagaaggagattgctgagctgcagaaggagaaggagaagctggagttcatgctggtggcccacggccctgtgtgcaagatcagccctgaggagaggaggagccccccagcccctggcctgcagcccatgaggtctgggggcggctctgtgggcgctgtggtggtgaagcaggagcccctggaggaggacagccccagcagcagcagcgctggcctggacaaggcccagaggagcgtcatcaagcccatcagcattgctgggggcttctatggagaggagcccctgcacacccccatcgtggtgaccagcaccccagctgtgaccccaggcaccagcaacctggtgttcacctaccccagcgtgctggagcaggagagccctgccagccccagcgagagctgcagcaaggcccaccggcgcagcagcagcagcggggaccagagcagtgacagcctgaacagccccaccctgctggccctgtag

SEQ ID NO: 154365 - DNA, 981 bp, Artificial Sequence
  derived and/or modified sequence
atgtaccaggactaccccggcaacttcgacaccagcagccggggcagttctggctctcccgcccatgctgaatcttatagtagcgggggcggcggccagcaaaagttcagagtggacatgcccgggtcaggaagcgccttcattcccaccatcaatgccataaccaccagccaagacctacaatggatggtccagcctacggtcatcacatcgatgagcaatccttacccacggagccatccctacagcccactccccggccttgcttctgtcccggggcatatggccctgccccgcccaggtgtgatcaagaccatcggcactacagtgggacgtcgcaggagggacgaacagctttctcctgaagaagaagagaagagacgaatacgaagggagaggaacaagctcgccgctgctaaatgcaggaatcggcggcgagagctaaccgagaagcttcaagctgaaacagaggagctggaggaggagaagtcgggactgcagaaagaaatcgccgagctgcaaaaagagaaagaaaagctggagttcatgctggtcgcgcatggcccagtctgtaagattagtccagaggagcggagaagcccaccagctcctggtctgcagcccatgcgttcaggtggaggctcggttggtgcagtggtggtaaaacaggagcccctggaagaggacagccccagttcatcctccgctggcctcgataaagcccaaagatccgtgataaaaccgatctctattgccggcgggttttatggagaagaacctctacacacacctatagtggtgacttccacacctgcagtaacccccggaacttccaatcttgtctttacataccccagcgtgctggaacaggaatcaccagctagcccttccgaatcttgctctaaagcacatagacgctcatccagcagcggcgaccagtcgtcagattccctgaacagcccaactctgttggccttatag

SEQ ID NO: 154366 - DNA, 864 bp, Artificial Sequence
  derived and/or modified sequence
atgcccggcagcggcagcgccttcatccccaccatcaacgccatcaccactagccaagatttgcagtggatggtgcagcccacggtcattaccagtatgagcaacccttatcctcgcagtcatccctactctcctctgccaggtctcgcaagtgttccaggccacatggctctcccacgaccgggagtgatcaaaactattggcaccactgtgggacgtcgccgacgtgatgagcaactttctccagaggaggaggagaaacggcggattcgacgggaacggaataagctcgccgccgccaagtgcagaaatcgtagacgagagctgaccgaaaagttgcaagccgagacagaagagctggaagaggaaaaaagcggactgcagaaggaaatcgcagaattacaaaaggagaaagaaaagctggaattcatgttggttgctcacggccccgtatgtaagatctcccctgaggagcgccgaagtcccccagctcccggactgcagcctatgcgctctggggggggttctgtcggcgcggtggtcgtgaaacaggagcccctggaagaagacagtcctagctcttcctcggcgggtctcgacaaagctcagaggtctgttatcaaaccaatctctattgccggaggcttctacggagaagagcccctgcacaccccgattgtagtgacctctacacccgctgtgacaccaggcaccagtaacttagtttttacgtatccatcagtcctggagcaagagtcccccgctagccccagtgagtcttgcagcaaggcccaccgccgatccagctcttctggtgaccagagctcggattctctgaacagcccgaccttgttggccctttag

SEQ ID NO: 154367 - DNA, 981 bp, Artificial Sequence
  derived and/or modified sequence
atgtaccaggactaccctggaaatttcgatacttcatctcgaggctcatccggctccccagcccacgctgaatcctacagctctggcggaggtggccaacagaaatttagggttgatatgcccggatctggatctgcattcatccctacaataaatgctattacgacatctcaggatctacaatggatggtacagcccaccgtaatcacatctatgagcaacccttatccaagatcgcatccttatagtcccctgcctgggttagcaagcgttcctggccacatggcgctgccacgtcctggcgtgataaaaacaataggcaccaccgtcgggaggcgacgtcgagatgaacagttgagccctgaggaagaagagaaacgcaggattagacgcgagcggaacaagctggcagccgcaaaatgtaggaatcggcgacgggagctcactgagaaacttcaggccgaaaccgaggagctggaggaagaaaaaagcggtttgcaaaaagagatagccgaattacagaaggagaaggaaaaactcgagtttatgttagtggcacatggcccagtgtgtaaaattagccctgaagaacgccgttccccaccagccccaggtctgcagccgatgaggagtggaggagggtcagtgggcgcagtagtcgtcaagcaagagcctctcgaagaagacagtccatctagctcatcagcaggcctggacaaagcccagagatcagtgataaagccaatcagcattgccggaggcttctacggcgaggagccactgcacacgcctatcgtggtgacctctaccccagctgtgactccaggaaccagtaatctggtgttcacctacccatctgtgctggagcaggagagccccgcttctcctagtgagtcatgctcaaaagcccaccggaggagctcgtcatctggggatcagtcatccgacagtctcaattcaccaacgctgctggctctatag

SEQ ID NO: 154368 - DNA, 864 bp, Artificial Sequence
  derived and/or modified sequence
atgccaggatcaggctcagctttcataccgaccattaacgctattaccacaagtcaggatctccaatggatggtgcagccgaccgttatcacgtcgatgtcaaacccttacccgcgaagtcacccttactcccccttgccaggacttgcttctgtaccgggacacatggctctgccacgacctggtgttatcaaaaccatcggcactaccgtggggagaaggcggcgagatgaacagcttagcccagaagaggaggaaaaaaggcgcatccggcgtgagcgtaacaaactggcagccgctaagtgtagaaatcggcgaagggaactcaccgaaaaacttcaggccgaaaccgaagagctggaggaggaaaaaagcggcctgcaaaaagagatcgcggaactgcagaaggaaaaagagaaattagagtttatgcttgtagcccatgggccagtttgtaagatctctcctgaggagcggaggtctcctccagcccctggtctgcaaccgatgcggtcaggaggcggttctgtcggtgccgtggtcgtgaagcaagaaccactggaagaagattcccccagctcctcgagtgctgggctggacaaagctcaacggtccgtgattaagcccatcagcatcgccggagggttttacggtgaagaacctttgcatactcccattgttgtgacttctacccccgctgtcactccaggcaccagcaacctcgtctttacttacccatccgtgctggagcaggagagcccagctagcccatccgagtcatgttctaaagcacaccggaggagttccagcagcggagaccagagctctgactccctgaactctcccacactcttggccctgtag

SEQ ID NO: 154369 - DNA, 981 bp, Artificial Sequence
  derived and/or modified sequence
atgtaccaggactaccccggcaacttcgacaccagcagcagaggcagcagcggcagccccgcccacgccgagagctacagcagcggcggcggcggccagcagaagttcagagtggacatgcccggcagcggcagcgccttcatccccaccatcaacgccatcaccaccagccaggacctgcagtggatggtgcagcccaccgtgatcaccagcatgagcaacccctaccccagaagccacccctacagccccctgcccggcctggccagcgtgcccggccacatggccctgcccagacccggcgtgatcaagaccatcggcaccaccgtgggcagaagaagaagagacgagcagctgagccccgaggaggaggagaagagaagaatcagaagagagagaaacaagctggccgccgccaagtgcagaaacagaagaagagagctgaccgagaagctgcaggccgagaccgaggagctggaggaggagaagagcggcctgcagaaggagatcgccgagctgcagaaggagaaggagaagctggagttcatgctggtggcccacggccccgtgtgcaagatcagccccgaggagagaagaagcccccccgcccccggcctgcagcccatgagaagcggcggcggcagcgtgggcgccgtggtggtgaagcaggagcccctggaggaggacagccccagcagcagcagcgccggcctggacaaggcccagagaagcgtgatcaagcccatcagcatcgccggcggcttctacggcgaggagcccctgcacacccccatcgtggtgaccagcacccccgccgtgacccccggcaccagcaacctggtgttcacctaccccagcgtgctggagcaggagagccccgccagccccagcgagagctgcagcaaggcccacagaagaagcagcagcagcggcgaccagagcagcgacagcctgaacagccccaccctgctggccctgtag

SEQ ID NO: 154370 - DNA, 864 bp, Artificial Sequence
  derived and/or modified sequence
atgcccggcagcggcagcgccttcatccccaccatcaacgccatcaccaccagccaggacctgcagtggatggtgcagcccaccgtgatcaccagcatgagcaacccctaccccagaagccacccctacagccccctgcccggcctggccagcgtgcccggccacatggccctgcccagacccggcgtgatcaagaccatcggcaccaccgtgggcagaagaagaagagacgagcagctgagccccgaggaggaggagaagagaagaatcagaagagagagaaacaagctggccgccgccaagtgcagaaacagaagaagagagctgaccgagaagctgcaggccgagaccgaggagctggaggaggagaagagcggcctgcagaaggagatcgccgagctgcagaaggagaaggagaagctggagttcatgctggtggcccacggccccgtgtgcaagatcagccccgaggagagaagaagcccccccgcccccggcctgcagcccatgagaagcggcggcggcagcgtgggcgccgtggtggtgaagcaggagcccctggaggaggacagccccagcagcagcagcgccggcctggacaaggcccagagaagcgtgatcaagcccatcagcatcgccggcggcttctacggcgaggagcccctgcacacccccatcgtggtgaccagcacccccgccgtgacccccggcaccagcaacctggtgttcacctaccccagcgtgctggagcaggagagccccgccagccccagcgagagctgcagcaaggcccacagaagaagcagcagcagcggcgaccagagcagcgacagcctgaacagccccaccctgctggccctgtag

SEQ ID NO: 154371 - protein, 1311 aa, Artificial Sequence
  derived and/or modified sequence
MSLLQSALDFLAGPGSLGGASGRDQSDFVGQTVELGELRLRVRRVLAEGGFAFVYEAQDVGSGREYALKRLLSNEEEKNRAIIQEVCFMKKLSGHPNIVQFCSAASIGKEESDTGQAEFLLLTELCKGQLVEFLKKMESRGPLSCDTVLKIFYQTCRAVQHMHRQKPPIIHRDLKVENLLLSNQGTIKLCDFGSATTISHYPDYSWSAQRRALVEEEITRNTTPMYRTPEIIDLYSNFPIGEKQDIWALGCILYLLCFRQHPFEDGAKLRIVNGKYSIPPHDTQYTVFHSLIRAMLQVNPEERLSIAEVVHQLQEIAAARNVNPKSPITELLEQNGGYGSATLSRGPPPPVGPAGSGYSGGLALAEYDQPYGGFLDILRGGTERLFTNLKDTSSKVIQSVANYAKGDLDISYITSRIAVMSFPAEGVESALKNNIEDVRLFLDSKHPGHYAVYNLSPRTYRPSRFHNRVSECGWAARRAPHLHTLYNICRNMHAWLRQDHKNVCVVHCMDGRAASAVAVCSFLCFCRLFSTAEAAVYMFSMKRCPPGIWPSHKRYIEYMCDMVAEEPITPHSKPILVRAVVMTPVPLFSKQRSGCRPFCEVYVGDERVASTSQEYDKMRDFKIEDGKAVIPLGVTVQGDVLIVIYHARSTLGGRLQAKMASMKMFQIQFHTGFVPRNATTVKFAKYDLDACDIQEKYPDLFQVNLEVEVEPRDRPSREAPPWENSSMRGLNPKILFSSREEQQDILSKFGKPELPRQPGSTAQYDAGAGSPEAEPTDSDSPPSSSADASRFLHTLDWQEEKEAETGAENASSKESESALMEDRDESEVSDEGGSPISSEGQEPRADPEPPGLAAGLVQQDLVFEVETPAVLPEPVPQEDGVDLLGLHSEVGAGPAVPPQACKAPSSNTDLLSCLLGPPEAASQGPPEDLLSEDPLLLASPAPPLSVQSTPRGGPPAAADPFGPLLPSSGNNSQPCSNPDLFGEFLNSDSVTVPPSFPSAHSAPPPSCSADFLHLGDLPGEPSKMTASSSNPDLLGGWAAWTETAASAVAPTPATEGPLFSPGGQPAPCGSQASWTKSQNPDPFADLGDLSSGLQGSPAGFPPGGFIPKTATTPKGSSSWQTSRPPAQGASWPPQAKPPPKACTQPRPNYASNFSVIGAREERGVRAPSFAQKPKVSENDFEDLLSNQGFSSRSDKKGPKTIAEMRKQDLAKDTDPLKLKLLDWIEGKERNIRALLSTLHTVLWDGESRWTPVGMADLVAPEQVKKHYRRAVLAVHPDKAAGQPYEQHAKMIFMELNDAWSEFENQGSRPLF

SEQ ID NO: 154372 - protein, 587 aa, Artificial Sequence
  derived and/or modified sequence
MSLLQSALDFLAGPGSLGGASGRDQSDFVGQTVELGELRLRVRRVLAEGGFAFVYEAQDVGSGREYALKRLLSNEEEKNRAIIQEVCFMKKLSGHPNIVQFCSAASIGKEESDTGQAEFLLLTEPPGLAAGLVQQDLVFEVETPAVLPEPVPQEDGVDLLGLHSEVGAGPAVPPQACKAPSSNTDLLSCLLGPPEAASQGPPEDLLSEDPLLLASPAPPLSVQSTPRGGPPAAADPFGPLLPSSGNNSQPCSNPDLFGEFLNSDSVTVPPSFPSAHSAPPPSCSADFLHLGDLPGEPSKMTASSSNPDLLGGWAAWTETAASAVAPTPATEGPLFSPGGQPAPCGSQASWTKSQNPDPFADLGDLSSGLQGSPAGFPPGGFIPKTATTPKGSSSWQTSRPPAQGASWPPQAKPPPKACTQPRPNYASNFSVIGAREERGVRAPSFAQKPKVSENDFEDLLSNQGFSSRSDKKGPKTIAEMRKQDLAKDTDPLKLKLLDWIEGKERNIRALLSTLHTVLWDGESRWTPVGMADLVAPEQVKKHYRRAVLAVHPDKAAGQPYEQHAKMIFMELNDAWSEFENQGSRPLF

SEQ ID NO: 154373 - DNA, 3936 bp, Artificial Sequence
  derived and/or modified sequence
atgtctttactccagtctgccttggatttcctggcgggtccgggcagcttggggggggcctctggccgggaccagtctgacttcgttgggcagaccgtcgaactgggtgagcttcgcttacgcgtgcgccgcgtactggcagaagggggcttcgcatttgtctatgaggcccaggacgttgggagcggacgggagtacgcactaaagaggctcttgtccaacgaggaggaaaagaaccgtgctatcatacaggaggtttgctttatgaaaaagctttccgggcaccccaatatagtccagttttgttcagcggcctctatcgggaaagaggagtcagacacaggccaggccgaattccttttgctgaccgaactgtgcaagggacagctcgtggagtttctgaagaagatggagagccgaggccccctgagctgcgacacagttttgaaaatcttctatcagacctgcagagctgtgcagcacatgcatcgtcagaaaccgcctatcatccatagagaccttaaggtcgaaaatctcctactgtctaatcagggaaccatcaagctctgcgacttcggatctgcaacaacaatatcacattacccagactacagctggagtgctcagagacgggctctagtggaggaggagattacacggaacactacccctatgtaccggaccccagaaatcattgacctgtatagcaactttccaattggtgaaaagcaggacatatgggccctcggttgcatcttgtacctcctctgctttagacagcacccgtttgaggatggagctaagctgcgcatcgttaacggcaagtacagtattccacctcacgatactcagtataccgtatttcactccctgattagagccatgttgcaggtaaaccctgaagagagactatcaatcgcggaagtcgtgcaccaactgcaggagatcgccgcggctcgcaacgtcaatccaaaaagcccaatcacggaactgctggagcagaatggtggttatggatccgcaaccctttctcgagggccaccgccccctgtgggcccagctgggagtggctatagcggtggactggccctagcggagtatgaccaaccttatggcggctttttggatatactgagagggggaacagagaggttgttcaccaatttaaaagacacgagttccaaggttattcagtcagtcgccaattatgctaaaggtgaccttgacatcagctatatcaccagtcgcattgctgtcatgtcttttcccgcggagggcgttgagtctgccctcaagaacaatatagaggacgtacgcctgtttcttgattcaaaacatcccgggcactatgcggtttacaacctttcaccacgaacctacaggcccagccgctttcacaaccgggttagcgagtgcgggtgggctgcgcggcgcgccccacatctgcataccctgtacaatatttgccgtaacatgcacgcctggctaaggcaagaccacaagaacgtgtgtgtcgtgcactgtatggatggcagggccgccagtgccgtggccgtgtgttcttttttgtgtttttgccgcctttttagcaccgccgaggctgctgtatacatgttctccatgaaacggtgtccacccggaatctggccatcccacaagcgctacatcgagtacatgtgcgatatggtggccgaagaacccataacaccacactctaagccaatcttggtccgggccgtggttatgaccccagtaccacttttttctaaacagcggtctggatgtagacccttttgcgaggtctatgtgggtgacgagagggttgcatcaacttcacaggaatatgataaaatgcgcgatttcaagatcgaggacggcaaggctgttatccccttaggcgtcactgtccagggagacgtgctcatcgtcatataccatgctcgcagcacattaggcggccggttgcaggcaaaaatggcttcaatgaaaatgttccagatccaattccataccggattcgtgcctcgcaacgccacaaccgtgaagttcgctaagtacgacctcgacgcctgtgacattcaggagaagtacccagatctcttccaagtaaacctggaggtagaggtggaaccaagagaccggcctagccgcgaagcacctccctgggaaaactctagtatgagaggactgaatccaaaaattctcttctctagccgtgaggagcaacaggacatactctcaaaattcggaaagcccgagctgccacgacagcccggctctaccgcccaatatgatgccggggctggttctcctgaggcagaaccaactgattccgacagccctccctcctcttcagcagacgcgtccagattcctccacactcttgattggcaggaggaaaaagaggccgagacaggcgctgaaaatgcaagcagcaaggagtcggaatccgcactgatggaagaccgcgatgagtccgaagtgagcgacgagggcggaagcccgatttccagtgagggacaggagcctagggccgacccagaacctcccggactcgcagccggcctggtgcaacaggacctcgtatttgaggtagaaacacccgctgtgctaccagagccagtgccgcaggaggacggagttgatctgcttggtctccactccgaggtaggggccggtcctgccgtgcctccccaagcttgtaaggcccccagcagcaataccgatctcctgagctgcctacttggaccccccgaagcagcttcacaaggaccccccgaagatctgctgtccgaggacccattactgctggcatcccccgccccccctctcagtgtccagtccacaccccgtggcggccctccggccgccgccgaccctttcggaccgctcttgccgtcctctggtaacaattcacagccttgctcgaatcccgacctttttggcgagtttctgaactccgattccgtgaccgtcccaccatctttcccttctgcccactctgctcctcctccctcatgttctgccgattttctgcacctgggcgatctgccgggagagcccagcaaaatgaccgcttcttcatctaaccccgaccttttgggaggctgggccgcatggaccgaaactgcagcatcagctgtagcacccacccctgcaactgagggccccttgtttagtccagggggacagccagccccctgcggcagtcaggccagctggacaaaatcccagaatccagatccttttgccgacctcggtgatctgtctagcggcctgcagggatcccccgcgggctttcctcctggcgggtttatacccaaaacagcaaccactccaaagggatcctcatcgtggcaaacctcccggccccctgcacagggcgcttcatggccccctcaggccaaaccccctcctaaggcctgcacccagcctcggccaaattatgcgtctaatttcagtgtgatcggtgccagagaagagcggggcgtcagggcgcccagttttgctcagaagcctaaggtttctgaaaatgattttgaagaccttctgtccaatcaggggttcagcagtcgaagtgacaaaaaaggccccaaaaccatagccgagatgcgaaaacaggaccttgcaaaagatacagacccactaaagctcaaacttctagattggattgaagggaaagagcgaaatatccgagctctgctgagcacgttacacacagttctatgggatggcgagtcccggtggactcctgtggggatggccgaccttgtggctcccgagcaggtcaagaaacactaccgccgggcggtgctagcggttcaccccgacaaagccgccggccagccatatgagcagcacgccaagatgatatttatggaactgaatgatgcctggtctgagttcgagaatcagggtagtaggccattgttttag

SEQ ID NO: 154374 - DNA, 3936 bp, Artificial Sequence
  derived and/or modified sequence
atgagcctgctgcagagcgccctggacttcctggccggccctggcagcctgggcggggccagcggccgggaccagagcgactttgtgggccagacagtggagctgggggagctgcggctgcgggtgagaagagtgctggccgagggcggctttgcctttgtgtatgaggcccaggatgtgggcagcggccgggagtatgccctgaagaggctgctgagcaatgaggaggagaagaacagagccatcatccaggaggtgtgcttcatgaagaagctgagcggccaccccaacatcgtgcagttctgcagcgctgccagcatcggcaaggaggagagtgacaccggccaggccgagttcctgctgctgacagagctgtgcaagggccagctggtggagttcctgaagaagatggagagccggggccccctgagctgtgacacagtgctgaagatcttctaccagacctgcagagctgtgcagcacatgcaccggcagaagccacccatcatccaccgggacctgaaggtggagaacctgctgctgagcaaccagggcaccatcaagctgtgtgactttggcagcgccaccaccatcagccactacccagactacagctggagcgcccagaggcgggccctggtggaggaggagatcaccaggaacaccacccccatgtaccgcaccccagagatcatcgacctgtacagcaacttccccatcggggagaagcaggacatctgggccctgggctgcatcctgtacctgctgtgcttccggcagcacccctttgaagatggagccaagctgagaattgtgaatggcaagtacagcatcccccctcatgacacccagtacaccgtcttccacagcctcatccgggccatgctgcaggtgaaccctgaggagcggctgagcattgctgaggtggtgcaccagctgcaggagattgctgctgccagaaatgtgaaccccaagagccccatcacagagctgctggagcagaatggaggctacggcagcgccaccctgagccggggccccccacctcctgtgggccctgctggcagcggctacagcggcggcctggccctggccgagtatgaccagccctatggaggcttcctggacatcctgcggggcggcacagagcggctcttcaccaacctgaaggacaccagcagcaaggtgatccagagcgtggccaactatgccaagggggacctggacatctcctacatcaccagcagaattgctgtgatgtccttccctgctgagggcgtggagagcgccctgaagaacaacattgaagatgtgcggctcttcctggacagcaagcaccctggccactatgctgtgtacaacctgagccccaggacctaccggcccagccgcttccacaacagagtgtctgaatgtggctgggccgcccggcgggccccccacctgcacaccctgtacaacatctgcaggaacatgcacgcctggctgcggcaggaccacaagaatgtgtgtgtggtgcactgcatggatggccgggccgccagcgctgtggccgtgtgcagcttcctgtgcttctgccgcctcttcagcacagctgaggccgctgtgtacatgttctccatgaagcgctgccccccaggcatctggcccagccacaagcgctacatcgagtacatgtgtgacatggtggccgaggagcccatcaccccccacagcaagcccatcctggtgcgggctgtggtgatgacccctgtgcccctcttcagcaagcagaggagcggctgccggcccttctgtgaggtgtatgtgggagatgagcgggtggccagcaccagccaggagtatgacaagatgagggacttcaagattgaagatggcaaggccgtcatccccctgggcgtgacagtgcagggagatgtgctgattgtcatctaccacgcccggagcaccctgggcggccgcctgcaggccaagatggcctccatgaagatgttccagatccagttccacactggatttgtgcccagaaatgccaccaccgtgaagtttgccaagtatgacctggatgcctgtgacatccaggagaagtacccagacctcttccaggtgaacctggaggtggaggtggagccccgggaccggcccagccgggaggccccaccctgggagaacagctccatgaggggcctgaaccccaagatcctcttcagcagccgggaggagcagcaggacatcctgagcaagtttgggaagccagagctgccccggcagcccggcagcacagcccagtatgatgctggggccggcagccctgaggccgagcccacagacagcgacagcccccccagcagcagcgcagatgccagccgcttcctgcacaccctggactggcaggaggagaaggaggccgagactggagcagaaaatgccagcagcaaggagagcgagagcgccctgatggaggacagagatgagagcgaggtgtctgatgagggcggcagccccatcagcagcgagggccaggagcccagggctgaccctgagcccccaggcctggccgccggcctggtgcagcaggacctggtgtttgaggtggagaccccagctgtgctgcctgagcctgtgccccaggaggatggagtggacctgctgggcctgcacagcgaggtgggcgccggccctgctgtgcccccccaggcctgcaaggcccccagcagcaacacagacctgctgagctgcctgctgggccccccagaggccgccagccagggccccccagaggacctgctgtctgaggaccccctgctgctggccagccctgccccacccctgtctgtgcagagcaccccccggggcggccccccagctgctgctgaccccttcggccccctgctgcccagcagcggcaacaacagccagccctgcagcaacccagacctgtttggagagttcctgaacagcgacagcgtgacagtgcccccatccttccccagcgcccacagcgcccccccacccagctgcagcgctgacttcctgcacctgggggacctgcccggggagcccagcaagatgacagccagcagcagcaacccagacctgctgggcggctgggccgcctggacagaaacagctgccagcgctgtggcccccaccccagccacagagggccccctcttcagccctgggggccagcctgccccctgtggcagccaggcctcctggaccaagagccagaacccagacccctttgctgacctgggggacctgagcagcggcctgcagggcagccctgctggcttccccccaggcggcttcatccccaagacagccaccacccccaagggcagcagctcctggcagaccagccggcccccagcccagggcgcctcctggccaccccaggccaagcccccacccaaggcctgcacccagccccggcccaactatgccagcaacttcagcgtcatcggggcccgggaggagcggggcgtgcgggcccccagctttgcccagaagcccaaggtgtctgaaaatgactttgaggacctgctgagcaaccagggcttcagcagcagaagtgacaagaagggccccaagaccatcgccgagatgaggaagcaggacctggccaaggacacagaccccctgaagctgaagctgctggactggattgagggcaaggagaggaacatccgggccctgctgagcaccctgcacacagtgctgtgggatggagagagccgctggacccctgtgggcatggctgacctggtggcccctgagcaggtgaagaagcactaccgccgggctgtgctggccgtgcacccagacaaggccgccggccagccctatgagcagcacgccaagatgatcttcatggagctgaatgatgcctggagcgagtttgagaaccagggcagccggcccctcttctag

SEQ ID NO: 154375 - DNA, 3936 bp, Artificial Sequence
  derived and/or modified sequence
atgagcctgctgcagagcgccctggacttcctggccggccccggctcattgggaggagcttccggccgggaccagtctgactttgtgggccagaccgtggaacttggtgagctgaggctgcgtgtgcggagagtcttggccgaaggcggttttgcttttgtgtacgaagcccaagatgtgggttcagggcgagaatacgctctgaaacggctgctgtctaatgaggaagagaaaaacagggccatcatccaggaagtgtgttttatgaaaaaactgtcagggcatcctaacatagtgcaattctgcagcgccgcgtctatcgggaaagaagaatccgacacaggtcaggcagaattcctgctacttaccgagctctgcaaaggccagctagtagaattcctcaagaagatggaatctagggggccgctttcctgtgatacagtactgaagatattttatcagacttgccgagcggtccagcatatgcacaggcagaagccgccaataatccacagagacctgaaggtcgagaacctgttgttaagtaatcaaggaacaatcaagctgtgcgactttggcagcgccaccaccatcagtcactatccagattactcttggtccgcccaacgacgggccttagtggaggaagagataacaaggaacaccactcccatgtacaggaccccagagataatcgacctatacagtaatttccccatcggcgagaaacaggatatctgggccctcggttgcatattgtacttgctttgcttccgtcaacacccgtttgaggacggtgcaaaattacgtatcgtcaacggtaaatatagcattccgcctcacgacacacaatacaccgtgtttcactcgttgataagagcgatgctgcaggtgaaccctgaagaacgactgagtatcgccgaagttgttcaccaattacaggaaatcgccgctgcccggaacgtgaatcccaagtctccaattacagagctgctggagcaaaatggaggttatggttctgcaaccctgagtaggggcccacctccaccggttggcccggccggcagtggctattctggcggactcgcgttggctgaatacgatcagccatacggaggatttttggacatactgcgcggcgggactgagcgcctgtttactaacctcaaggataccagctccaaagtaattcagtccgttgctaactacgctaaaggtgatctggatatcagttacatcacttctagaatcgcggtgatgtccttccccgccgagggtgtagaaagcgctctgaaaaataacatcgaagatgtgagattatttctggatagcaagcatcccggacactacgccgtttataatctgagtccaagaacataccggcccagtcggttccacaacagagtttccgaatgtggctgggcagctcggcgcgccccccatctgcacaccctttacaatatctgtcgaaacatgcatgcatggctgcgccaggaccacaaaaacgtgtgcgtggtgcattgcatggacggcagggcggcaagcgccgtggccgtgtgttcctttctgtgtttctgtaggttgttttcaaccgctgaagctgccgtgtacatgttttccatgaaaaggtgtccaccaggcatctggccatctcataagcgttacatagagtatatgtgcgacatggtggcagaagaacccatcacccctcattcaaagcccatcctggtcagagcagtggttatgacccccgtgccactgttttctaagcagcgtagcgggtgtcggccattttgcgaggtgtacgtaggtgatgagcgggtagcctctacctcacaggaatacgataagatgagagactttaagatagaggatggaaaggccgtgatccccctgggagtgaccgtgcagggcgatgtgctgatcgttatctaccatgcccgttccacactgggcgggcgactgcaggccaaaatggcttcaatgaaaatgttccagatccagtttcataccggattcgtgccaagaaacgccaccaccgttaaattcgcgaaatacgacctagacgcctgcgacatccaggaaaaatatcctgacctgtttcaggtaaatctcgaagtggaagttgaaccccgggataggccatctcgggaggctcctccgtgggagaactcctctatgcgtggccttaaccctaaaattcttttctcttcccgagaggaacagcaggatattctaagcaaatttgggaagccggaattgccccgccagcccgggtctacggctcagtacgatgcaggcgccggttccccggaagccgagcccaccgattctgacagtccaccttcttcttctgcagatgccagccgatttttgcatactctggattggcaggaagagaaggaggccgaaactggcgccgagaacgctagcagtaaagagtcggaatcagcccttatggaagacagggacgaatctgaagtgtctgatgagggtggttcgcccatcagttcagaaggacaggagccaagggctgaccccgaaccccctggtctcgcagccggcttggtccagcaggatctggtgttcgaagtcgaaacaccagctgtgctcccggaacccgtcccacaagaggacggggttgacctgctgggtttacactctgaggtgggggctggacctgccgtgccacctcaggcttgcaaggcgcctagcagtaatacagatctgctgtcttgcctcctgggccctcccgaagccgcctcacagggaccccctgaagatctgcttagcgaggacccgctgcttttggccagtcccgccccccccttatccgtccagagtaccccccgggggggaccacctgccgcggccgaccccttcggacccctactgcccagtagcggaaataacagtcagccttgcagcaatcccgacctcttcggggaatttttgaactctgattccgtgacagtgcctccctcctttccgtctgcgcatagcgctccccctccctcctgtagtgcagacttcttgcacctcggcgacctgcccggggaacccagcaaaatgacggcatctagcagcaacccagacctgctaggcggttgggcagcttggaccgaaactgccgcatccgccgtcgccccaacccctgcaacggagggccctctattttctcctgggggacaaccagccccttgcggctcacaggcctcatggaccaagtctcagaacccagatccttttgcagatcttggggatctctcctctggcctccagggctctccggccggattcccacctggaggcttcatcccaaaaaccgccactacacctaagggatcctcgagttggcagacttcccggcctccggcccaaggagctagttggcccccccaggccaaaccgcctcccaaggcgtgcactcaacctcgaccaaactatgcatccaacttttctgtgatcggcgcgcgggaggaacggggcgtgagagctccctccttcgcccagaagccaaaagtctccgagaacgactttgaggacctcctctctaaccagggattctcttccagatctgacaagaagggccccaagacaatcgcggagatgagaaagcaggatttagccaaggacaccgaccctcttaagctcaaactgctggactggattgagggaaaagagcggaacatcagagctctcctgagtacccttcacacagtgttgtgggatggagagtctagatggactccggtgggaatggctgatttggtggctccagagcaggtgaagaagcactaccggagagccgtcctggctgtgcatcccgacaaagccgccggacagccatacgaacagcatgctaagatgatctttatggagctcaacgacgcctggtcagagtttgagaatcaaggcagccgtcctctcttttag

SEQ ID NO: 154376 - DNA, 3936 bp, Artificial Sequence
  derived and/or modified sequence
atgtctctgctgcagagcgcgctagacttcctagcaggaccgggttcccttggcggagcgtctggaagagatcagtccgatttcgtaggccagactgtggagctgggggaactcaggttgagagtccggagggtgctcgccgagggtggcttcgcattcgtctatgaagctcaggacgtgggtagtggaagagagtacgccctgaagcgcctgttaagcaatgaagaggagaagaacagggctataatccaagaggtatgtttcatgaaaaagttatctggacacccaaatattgtgcagttctgttcggccgcttcaattggcaaagaagagagtgatactggccaggcagagttcttactcctcactgagttgtgcaagggccagctggtagagttcctgaagaagatggaatctcgaggtcccctgtcgtgcgacacggtcctcaagatcttttatcagacctgccgggcagtccagcatatgcacagacagaagccccctatcattcaccgtgacctgaaggttgagaatctgttgctctctaatcagggaacgatcaaactgtgcgacttcggttcagcaactacaatatcccattatcccgactattcttggagcgcccagcggagagcgcttgtcgaagaagagatcactagaaataccaccccaatgtatcgaacccctgagattattgacctttattccaatttccccataggtgaaaagcaggacatatgggcactggggtgcattttatacttattatgcttccggcagcatcctttcgaagacggtgctaaattgaggatcgtcaacggtaagtattccattcctccgcatgacacccagtacaccgtgtttcactcattaatccgcgctatgctccaggtcaacccggaggagaggctctccatcgctgaagttgtgcatcaactccaggagatcgccgcagcgagaaatgtgaacccaaaatcaccaattacagagctcctggagcaaaacggcggatacggctccgccacactttctcgtggcccaccgcctccggtcggccctgctgggtcaggctacagtggaggactggcattagcagaatatgatcaaccctacggaggattcctggacatactgcggggaggaacagaacggctcttcaccaacctcaaagatacgagctctaaagttatccagagcgtagctaattacgccaaaggggatctcgacatctcctacattacttcacgaattgcggtgatgagtttcccggctgaaggagtggaaagtgccctgaagaataatattgaggatgtccgactttttctcgatagcaaacacccaggtcattatgcagtgtacaatctgagccctcggacttatcggccttctaggtttcataaccgcgtttccgagtgcgggtgggcggcacggagagcaccgcacttacacacgctatataacatttgtcggaacatgcacgcctggttgcggcaagaccataagaatgtgtgcgttgtgcactgtatggatggtagggctgcctccgcagtggctgtctgttctttcctctgcttctgtcgtctgttcagtacagctgaggccgctgtgtacatgttttcgatgaagcgctgtccccctggcatctggccgtcccataagaggtatatcgaatacatgtgcgacatggttgcagaagagcctatcacgccccactccaagcccatcttggtgcgtgcggtcgtgatgacgcccgtgcccctcttttccaaacagcggtcgggctgtcgccctttttgcgaagtttacgtgggtgacgagcgggtggccagcacctcacaagaatacgataagatgcgggacttcaaaatagaggatggcaaggcggtgatacccctgggcgtgaccgtccaaggggatgtgctcatagtgatttatcatgccaggagcacattagggggacgactacaggccaagatggctagtatgaagatgtttcagatacagtttcataccggcttcgtccctcgcaacgctaccaccgtgaagtttgcaaagtacgaccttgacgcatgcgatatacaggaaaagtaccctgaccttttccaggtgaacctggaagtggaggtggaacctcgagacagaccaagcagagaggcaccaccatgggagaatagctcaatgcggggacttaaccccaaaatcctgttcagcagccgggaggaacagcaggatatattgagcaaatttggcaagcccgagttacctcgacagcctggctctactgctcaatatgatgctggcgctggctcacctgaagccgagcccacagacagtgactctcccccatcctcgtccgctgacgctagtaggttcctgcatacactggactggcaagaagagaaggaggccgaaacaggcgctgagaatgcctccagtaaagagtctgaaagtgccctcatggaggaccgagacgagagtgaggtgagcgacgaaggtggaagccctatctcaagcgaaggccaagaacccagggcagatcccgagcccccaggattggccgctggcctcgtacagcaagatctggtttttgaggtggagacacccgctgttttgccagaacctgtgccccaggaagatggcgtggatctgttgggtctccactccgaggtcggggctgggccagctgtccctcctcaggcttgtaaagctccatcttcaaacactgatcttctgtcatgtctgctcggccctcccgaggccgcatctcagggacccccagaggatctgctctccgaagatcccctgctgctggcgtcaccagcacccccactgtccgttcagagcacccccaggggagggccaccagccgctgccgaccccttcggccctctgctaccaagcagtggcaataactcccaaccctgctccaatcccgatctgtttggtgaatttctgaatagcgattccgtgaccgtacctccatcattcccttcagcacactctgcacccccaccatcttgtagtgctgattttctgcatcttggggacctgcccggtgagccttcaaagatgacagcaagttccagcaatccagatcttctcggaggatgggctgcttggactgaaaccgctgcttcagcagtagctccaacccccgcaacagagggacctttattctcccccggagggcaacctgctccctgcggctctcaggcctcttggacgaaatctcagaatccagatccttttgcggatctaggagacctcagctccggactccagggatctccagccggatttccgccaggcggattcatacccaagaccgccacaacccctaaggggtcctcatcctggcagacctcacgccctcctgcccagggtgccagttggccacctcaagctaagccacccccaaaggcttgtactcaacctaggccaaactacgcttcaaacttttcggtgatcggagccagagaagaaagaggcgtccgcgctccatcgtttgcacagaaaccaaaggtgtccgaaaacgacttcgaggatctgcttagcaaccaaggtttttcctcaagatccgacaagaaaggccctaaaacaattgcagagatgcgaaaacaggatttggccaaagacactgaccctttaaaactgaagttgctcgactggatagaagggaaggagcgaaatatacgtgcactcctgagcacacttcacactgtactttgggacggagagagccggtggactcctgtcgggatggccgatctggtggccccagagcaggtgaaaaagcattacaggagggcagtactggccgtccatcccgataaggccgctggtcagccctacgagcagcacgcaaagatgatatttatggaattgaacgatgcctggtcagagttcgaaaaccaaggctccaggccgcttttttag

SEQ ID NO: 154377 - DNA, 4442 bp, Artificial Sequence
  derived and/or modified sequence
gaagatggtgcacctccgggccggcggttgctgagctgacccggacggcgagggagcgggagcccgagcccgaccactccggctgccgcggggtgcggcgcagccaccgccatgtcgctgctgcagtcggcgctcgacttcttggcgggtccaggctccctgggcggtgcttccggccgcgaccagagtgacttcgtggggcagacggtggaactgggcgagctgcggctgcgggtgcggcgggtcctggccgaaggagggtttgcatttgtgtatgaagctcaagatgtggggagtggcagagagtatgcattaaagaggctattatccaatgaagaggaaaagaacagagccatcattcaagaagtttgcttcatgaaaaagctttccggccacccgaacattgtccagttttgttctgcagcgtctataggaaaagaggagtcagacacggggcaggctgagttcctcttgctcacagagctctgtaaagggcagctggtggaatttttgaagaaaatggaatctcgaggccccctttcgtgcgacacggttctgaagatcttctaccagacgtgccgcgccgtgcagcacatgcaccggcagaagccgcccatcatccacagggacctcaaggttgagaacttgttgcttagtaaccaagggaccattaagctgtgtgactttggcagtgccacgaccatctcgcactaccctgactacagctggagcgcccagaggcgagccctggtggaggaagagatcacgaggaatacaacaccaatgtatagaacaccagaaatcatagacttgtattccaacttcccgatcggcgagaagcaggatatctgggccctgggctgcatcttgtacctgctgtgcttccggcagcacccttttgaggatggagcgaaacttcgaatagtcaatgggaagtactcgatccccccgcacgacacgcagtacacggtcttccacagcctcatccgcgccatgctgcaggtgaacccggaggagcggctgtccatcgccgaggtggtgcaccagctgcaggagatcgcggccgcccgcaacgtgaaccccaagtctcccatcacagagctcctggagcagaatggaggctacgggagcgccacactgtcccgagggccaccccctcccgtgggccccgctggcagtggctacagtggaggcctggcgctggcggagtacgaccagccgtatggcggcttcctggacattctgcggggtgggacagagcggctcttcaccaacctcaaggacacctcctccaaggtcatccagtccgtcgctaattatgcaaagggtgacctggacatatcttacatcacatccagaattgcagtgatgtcattcccagcagaaggtgtggagtcagcgctcaaaaacaacatcgaagatgtgcggttgttcctggactccaagcacccagggcactatgccgtctacaacctgtccccgaggacctaccggccctccaggttccacaaccgggtctccgagtgtggctgggcagcacggcgggccccacacctgcacaccctgtacaacatctgcaggaacatgcacgcctggctgcggcaggaccacaagaacgtctgcgtcgtgcactgcatggacgggagagccgcgtctgctgtggccgtctgctccttcctgtgcttctgccgtctcttcagcaccgcggaggccgccgtgtacatgttcagcatgaagcgctgcccaccaggcatctggccatcccacaaaaggtacatcgagtacatgtgtgacatggtggcggaggagcccatcacaccccacagcaagcccatcctggtgagggccgtggtcatgacacccgtgccgctgttcagcaagcagaggagcggctgcaggcccttctgcgaggtctacgtgggggacgagcgtgtggccagcacctcccaggagtacgacaagatgcgggactttaagattgaagatggcaaagcggtgattcccctgggcgtcacggtgcaaggagacgtgctcatcgtcatctatcacgcccggtccactctgggcggccggctgcaggccaagatggcatccatgaagatgttccagattcagttccacacggggtttgtgcctcggaacgccaccactgtgaaatttgccaagtatgacctggacgcgtgtgacattcaagaaaaatacccggatttatttcaagtgaacctggaagtggaggtggagcccagggacaggccgagccgggaagccccaccatgggagaactcgagcatgagggggctgaaccccaaaatcctgttttccagccgggaggagcagcaagacattctgtctaagtttgggaagccggagcttccccggcagcctggctccacggctcagtatgatgctggggcagggtccccggaagccgaacccacagactctgactcaccgccaagcagcagcgcggacgccagtcgcttcctgcacacgctggactggcaggaagagaaggaggcagagactggtgcagaaaatgcctcttccaaggagagcgagtctgccctgatggaggacagagacgagagtgaggtgtcagatgaagggggatccccgatctccagcgagggccaggaacccagggccgacccagagccccccggcctggcagcagggctggtgcagcaggacttggtttttgaggtggagacaccggctgtgctgccagagcctgtgccacaggaagacggggtcgacctcctgggcctgcactccgaggtgggcgcagggccagctgtacccccgcaggcctgcaaggccccctccagcaacaccgacctgctcagctgcctccttgggccccctgaggccgcctcccaggggcccccggaggatctgctcagcgaggacccgctgctcctggcaagcccggcccctcccctgagcgtgcagagcaccccaagaggagggccccctgccgctgctgacccctttggcccgcttctgccgtcttcaggcaacaactcccagccctgctccaatcctgatctcttcggcgaatttctcaattcggactctgtgaccgtcccaccatccttcccgtctgcccacagtgctccgcccccatcctgcagcgccgacttcctgcacctgggggatctgccaggagagcccagcaagatgacagcctcgtccagcaacccagacctgctgggaggatgggctgcctggaccgagactgcagcatcggcagtggcccccacgccagccacagaaggccccctcttctctcctggaggtcagccggccccttgtggctctcaggccagctggaccaagtctcagaacccggacccatttgctgaccttggcgacctcagctccggcctccaaggctcaccagctggattccctcctgggggcttcattcccaaaacggccaccacgcccaaaggcagcagctcctggcagacaagtcggccgccagcccagggcgcctcatggccccctcaggccaagccgccccccaaagcctgcacacagccaaggcctaactatgcctcgaacttcagtgtgatcggggcgcgggaggagcggggggtccgcgcacccagctttgctcaaaagccaaaagtctctgagaacgactttgaagatctgttgtccaatcaaggcttctcctccaggtctgacaagaaagggccaaagaccattgcagagatgaggaagcaggacctggctaaagacacggacccactcaagctgaagctcctggactggattgagggcaaggagcggaacatccgggccctgctgtccacgctgcacacagtgctgtgggacggggagagccgctggacgcccgtgggcatggccgacctggtggctccggagcaagtgaagaagcactatcgccgcgcggtgctggctgtgcaccccgacaaggctgcggggcagccgtacgagcagcacgccaagatgatcttcatggagctgaatgacgcctggtcggagtttgagaaccagggctcccggcccctcttctgaggccgcagtggtggtggctgcgcacacagctccacaggttgggagccgtcgtgggacctgggtccccaccgtgaggaccccgtgggcgacagcaggtgtggccagggtggggctccgagccccgggtcaccgcccgcccagcgttccaggcacatgaagagaaagcattccaaagcctctgattgttgtttcctttttctcctcccgaaggaacagctgattcatgctcctcccgcaattgtcacgtctgtgatttatttggtgtttcgggcgtggcctctggagccccggcacgtggtgggccacgctgctggcgctcatgggccctggtgtttgcaccgcactttgtaatcagtcccgtggttgtctgtacagaattaaactattttccgatg

SEQ ID NO: 154378 - DNA, 3936 bp, Artificial Sequence
  derived and/or modified sequence
atgagcctgctgcagagcgccctggacttcctggccggccccggcagcctgggcggcgccagcggcagagaccagagcgacttcgtgggccagaccgtggagctgggcgagctgagactgagagtgagaagagtgctggccgagggcggcttcgccttcgtgtacgaggcccaggacgtgggcagcggcagagagtacgccctgaagagactgctgagcaacgaggaggagaagaacagagccatcatccaggaggtgtgcttcatgaagaagctgagcggccaccccaacatcgtgcagttctgcagcgccgccagcatcggcaaggaggagagcgacaccggccaggccgagttcctgctgctgaccgagctgtgcaagggccagctggtggagttcctgaagaagatggagagcagaggccccctgagctgcgacaccgtgctgaagatcttctaccagacctgcagagccgtgcagcacatgcacagacagaagccccccatcatccacagagacctgaaggtggagaacctgctgctgagcaaccagggcaccatcaagctgtgcgacttcggcagcgccaccaccatcagccactaccccgactacagctggagcgcccagagaagagccctggtggaggaggagatcaccagaaacaccacccccatgtacagaacccccgagatcatcgacctgtacagcaacttccccatcggcgagaagcaggacatctgggccctgggctgcatcctgtacctgctgtgcttcagacagcaccccttcgaggacggcgccaagctgagaatcgtgaacggcaagtacagcatccccccccacgacacccagtacaccgtgttccacagcctgatcagagccatgctgcaggtgaaccccgaggagagactgagcatcgccgaggtggtgcaccagctgcaggagatcgccgccgccagaaacgtgaaccccaagagccccatcaccgagctgctggagcagaacggcggctacggcagcgccaccctgagcagaggcccccccccccccgtgggccccgccggcagcggctacagcggcggcctggccctggccgagtacgaccagccctacggcggcttcctggacatcctgagaggcggcaccgagagactgttcaccaacctgaaggacaccagcagcaaggtgatccagagcgtggccaactacgccaagggcgacctggacatcagctacatcaccagcagaatcgccgtgatgagcttccccgccgagggcgtggagagcgccctgaagaacaacatcgaggacgtgagactgttcctggacagcaagcaccccggccactacgccgtgtacaacctgagccccagaacctacagacccagcagattccacaacagagtgagcgagtgcggctgggccgccagaagagccccccacctgcacaccctgtacaacatctgcagaaacatgcacgcctggctgagacaggaccacaagaacgtgtgcgtggtgcactgcatggacggcagagccgccagcgccgtggccgtgtgcagcttcctgtgcttctgcagactgttcagcaccgccgaggccgccgtgtacatgttcagcatgaagagatgcccccccggcatctggcccagccacaagagatacatcgagtacatgtgcgacatggtggccgaggagcccatcaccccccacagcaagcccatcctggtgagagccgtggtgatgacccccgtgcccctgttcagcaagcagagaagcggctgcagacccttctgcgaggtgtacgtgggcgacgagagagtggccagcaccagccaggagtacgacaagatgagagacttcaagatcgaggacggcaaggccgtgatccccctgggcgtgaccgtgcagggcgacgtgctgatcgtgatctaccacgccagaagcaccctgggcggcagactgcaggccaagatggccagcatgaagatgttccagatccagttccacaccggcttcgtgcccagaaacgccaccaccgtgaagttcgccaagtacgacctggacgcctgcgacatccaggagaagtaccccgacctgttccaggtgaacctggaggtggaggtggagcccagagacagacccagcagagaggcccccccctgggagaacagcagcatgagaggcctgaaccccaagatcctgttcagcagcagagaggagcagcaggacatcctgagcaagttcggcaagcccgagctgcccagacagcccggcagcaccgcccagtacgacgccggcgccggcagccccgaggccgagcccaccgacagcgacagcccccccagcagcagcgccgacgccagcagattcctgcacaccctggactggcaggaggagaaggaggccgagaccggcgccgagaacgccagcagcaaggagagcgagagcgccctgatggaggacagagacgagagcgaggtgagcgacgagggcggcagccccatcagcagcgagggccaggagcccagagccgaccccgagccccccggcctggccgccggcctggtgcagcaggacctggtgttcgaggtggagacccccgccgtgctgcccgagcccgtgccccaggaggacggcgtggacctgctgggcctgcacagcgaggtgggcgccggccccgccgtgcccccccaggcctgcaaggcccccagcagcaacaccgacctgctgagctgcctgctgggcccccccgaggccgccagccagggcccccccgaggacctgctgagcgaggaccccctgctgctggccagccccgccccccccctgagcgtgcagagcacccccagaggcggcccccccgccgccgccgaccccttcggccccctgctgcccagcagcggcaacaacagccagccctgcagcaaccccgacctgttcggcgagttcctgaacagcgacagcgtgaccgtgccccccagcttccccagcgcccacagcgcccccccccccagctgcagcgccgacttcctgcacctgggcgacctgcccggcgagcccagcaagatgaccgccagcagcagcaaccccgacctgctgggcggctgggccgcctggaccgagaccgccgccagcgccgtggcccccacccccgccaccgagggccccctgttcagccccggcggccagcccgccccctgcggcagccaggccagctggaccaagagccagaaccccgaccccttcgccgacctgggcgacctgagcagcggcctgcagggcagccccgccggcttcccccccggcggcttcatccccaagaccgccaccacccccaagggcagcagcagctggcagaccagcagaccccccgcccagggcgccagctggcccccccaggccaagcccccccccaaggcctgcacccagcccagacccaactacgccagcaacttcagcgtgatcggcgccagagaggagagaggcgtgagagcccccagcttcgcccagaagcccaaggtgagcgagaacgacttcgaggacctgctgagcaaccagggcttcagcagcagaagcgacaagaagggccccaagaccatcgccgagatgagaaagcaggacctggccaaggacaccgaccccctgaagctgaagctgctggactggatcgagggcaaggagagaaacatcagagccctgctgagcaccctgcacaccgtgctgtgggacggcgagagcagatggacccccgtgggcatggccgacctggtggcccccgagcaggtgaagaagcactacagaagagccgtgctggccgtgcaccccgacaaggccgccggccagccctacgagcagcacgccaagatgatcttcatggagctgaacgacgcctggagcgagttcgagaaccagggcagcagacccctgttctag

SEQ ID NO: 154379 - protein, 595 aa, Artificial Sequence
  derived and/or modified sequence
MALTDGGWCLPKRFGAAGADASDSRAFPAREPSTPPSPISSSSSSCSRGGERGPGGASNCGTPQLDTEAAAGPPARSLLLSSYASHPFGAPHGPSAPGVAGPGGNLSSWEDLLLFTDLDQAATASKLLWSSRGAKLSPFAPEQPEEMYQTLAALSSQGPAAYDGAPGGFVHSAAAAAAAAAAASSPVYVPTTRVGSMLPGLPYHLQGSGSGPANHAGGAGAHPGWPQASADSPPYGSGGGAAGGGAAGPGGAGSAAAHVSARFPYSPSPPMANGAAREPGGYAAAGSGGAGGVSGGGSSLAAMGGREPQYSSLSAARPLNGTYHHHHHHHHHHPSPYSPYVGAPLTPAWPAGPFETPVLHSLQSRAGAPLPVPRGPSADLLEDLSESRECVNCGSIQTPLWRRDGTGHYLCNACGLYSKMNGLSRPLIKPQKRVPSSRRLGLSCANCHTTTTTLWRRNAEGEPVCNACGLYMKLHGVPRPLAMKKEGIQTRKRKPKNINKSKTCSGNSNNSIPMTPTSTSSNSDDCSKNTSPTTQPTASGAGAPVMTGAGESTNPENSELKYSGQDGLYIGVSLASPAEVTSSVRPDSWCALALA

SEQ ID NO: 154380 - DNA, 3494 bp, Artificial Sequence
  derived and/or modified sequence
ggcacccttcggcgagcgctgtttgtttagggctcggtgagtccaatcaggagcccaggctgcagttttccggcagagcagtaagaggcgcctcctctctcctttttattcaccagcagcgcggcgcagaccccggactcgcgctcgcccgctggcgccctcggcttctctccgcgcctgggagcaccctccgccgcggccgttctccatgcgcagcgcccgcccgaggagctagacgtcagcttggagcggcgccggaccgtggatggccttgactgacggcggctggtgcttgccgaagcgcttcggggccgcgggtgcggacgccagcgactccagagcctttccagcgcgggagccctccacgccgccttcccccatctcttcctcgtcctcctcctgctcccggggcggagagcggggccccggcggcgccagcaactgcgggacgcctcagctcgacacggaggcggcggccggacccccggcccgctcgctgctgctcagttcctacgcttcgcatcccttcggggctccccacggaccttcggcgcctggggtcgcgggccccgggggcaacctgtcgagctgggaggacttgctgctgttcactgacctcgaccaagccgcgaccgccagcaagctgctgtggtccagccgcggcgccaagctgagccccttcgcacccgagcagccggaggagatgtaccagaccctcgccgctctctccagccagggtccggccgcctacgacggcgcgcccggcggcttcgtgcactctgcggccgcggcggcagcagccgcggcggcggccagctccccggtctacgtgcccaccacccgcgtgggttccatgctgcccggcctaccgtaccacctgcaggggtcgggcagtgggccagccaaccacgcgggcggcgcgggcgcgcaccccggctggcctcaggcctcggccgacagccctccatacggcagcggaggcggcgcggctggcggcggggccgcggggcctggcggcgctggctcagccgcggcgcacgtctcggcgcgcttcccctactctcccagcccgcccatggccaacggcgccgcgcgggagccgggaggctacgcggcggcgggcagtgggggcgcgggaggcgtgagcggcggcggcagtagcctggcggccatgggcggccgcgagccccagtacagctcgctgtcggccgcgcggccgctgaacgggacgtaccaccaccaccaccaccaccaccaccaccatccgagcccctactcgccctacgtgggggcgccactgacgcctgcctggcccgccggacccttcgagaccccggtgctgcacagcctgcagagccgcgccggagccccgctcccggtgccccggggtcccagtgcagacctgctggaggacctgtccgagagccgcgagtgcgtgaactgcggctccatccagacgccgctgtggcggcgggacggcaccggccactacctgtgcaacgcctgcgggctctacagcaagatgaacggcctcagccggcccctcatcaagccgcagaagcgcgtgccttcatcacggcggcttggattgtcctgtgccaactgtcacaccacaactaccaccttatggcgcagaaacgccgagggtgaacccgtgtgcaatgcttgtggactctacatgaaactccatggggtgcccagaccacttgctatgaaaaaagagggaattcaaaccaggaaacgaaaacctaagaacataaataaatcaaagacttgctctggtaatagcaataattccattcccatgactccaacttccacctcttctaactcagatgattgcagcaaaaatacttcccccacaacacaacctacagcctcaggggcgggtgccccggtgatgactggtgcgggagagagcaccaatcccgagaacagcgagctcaagtattcgggtcaagatgggctctacataggcgtcagtctcgcctcgccggccgaagtcacgtcctccgtgcgaccggattcctggtgcgccctggccctggcctgagcccacgccgccaggaggcagggagggctccgccgcgggcctcactccactcgtgtctgcttttgtgcagcggtccagacagtggcgactgcgctgacagaacgtgattctcgtgcctttattttgaaagagatgtttttcccaagaggcttgctgaaagagtgagagaagatggaagggaagggccagtgcaactgggcgcttgggccactccagccagcccgcctccggggcggaccctgctccacttccagaagccaggactaggacctgggccttgcctgctatggaatattgagagagattttttaaaaaagattttgcattttgtccaaaatcatgtgcttcttctgatcaattttggttgttccagaatttcttcataccttttccacatccagatttcatgtgcgttcatggagaagatcacttgaggccatttggtacacatctctggaggctgagtcggttcatgaggtctcttatcaaaaatattactcagtttgcaagactgcattgtaactttaacatacactgtgactgacgtttctcaaagttcatattgtgtggctgatctgaagtcagtcggaatttgtaaacagggtagcaaacaagatatttttcttccatgtatacaataatttttttaaaaagtgcaatttgcgttgcagcaatcagtgttaaatcatttgcataagatttaacagcattttttataatgaatgtaaacattttaacttaatggtacttaaaataatttaaaagaaaaatgttaacttagacattcttatgcttcttttacaactacatcccattttatatttccaattgttaaagaaaaatatttcaagaacaaatcttctctcaggaaaattgcctttctctatttgttaagaatttttatacaagaacaccaatataccccctttattttactgtggaatatgtgctggaaaaattgcaacaacactttactacctaacggatagcatttgtaaatactctaggtatctgtaaacactctgatgaagtctgtatagtgtgactaacccacaggcaggttggtttacattaatttttttttttgaatgggatgtcctatggaaacctatttcaccagagttttaaaaataaaaagggtattgttttgtcttctgtacagtgagttccttcccttttcaaagctttctttttatgctgtatgtgactatagatattcatataaaacaagtgcacgtgaagtttgcaaaatgctttaaggccttcctttcaaagcatagtccttttggagccgttttgtaccttttataccttggcttatttgaagttgacacatggggttagttactactctccatgtgcattggggacagtttttataagtgggaaggactcagtattattatatttgagatgataagcattttgtttgggaacaatg

SEQ ID NO: 154381 - DNA, 1788 bp, Artificial Sequence
  derived and/or modified sequence
atggctttgactgatggaggttggtgcctgcctaaaagatttggagctgcaggggccgatgctagtgattcacgcgcgtttccagcgagggaaccgtccactcccccatccccaatttcaagcagcagctcttcttgttcgcgtggaggtgagcgtggcccaggtggcgcatcaaactgcggcacaccacagctcgacacggaagctgctgccggcccccctgccagatccctgctcttgagttcctacgcgagccatcctttcggggctccacacggcccatctgcacccggagtcgccggccctggcggtaacctgagtagctgggaagaccttcttcttttcacagatcttgaccaggccgccactgcgtcaaagctgctatggtcgtcgcggggcgccaaattgtctccattcgctcccgaacagcccgaggaaatgtaccagacactcgctgcactttcctcccaaggacctgccgcttatgacggggcacctgggggcttcgtccactccgccgctgctgctgccgctgccgccgccgctgcgagtagccccgtgtacgtcccaactacaagggtggggagcatgttacctggcctcccctaccacctgcaggggtcgggaagcggccctgctaatcatgccggcggggctggagctcatccaggctggccacaggcctctgctgatagtccaccctacgggtcggggggaggggcagccggtggcggagctgctggcccagggggggcaggctcagctgccgcacacgtgtcagcaagattcccttacagcccttccccccccatggccaacggcgcagccagagagcccggagggtatgcagccgctggctccggtggcgctggcggggtatcaggaggtggcagcagtctcgcagccatgggcggcagagagccacagtattcctcgttaagcgctgcgcggccactcaacggaacatatcaccatcaccaccatcatcaccatcatcatccatccccctactccccatacgtgggcgctccactcacccccgcctggccagctggccccttcgagactcctgtcttgcattcactgcagagtagagctggagcaccgctgccagtcccccggggccctagtgctgacctcctggaagacttgtccgagtcacgggagtgtgtgaactgcggatcgattcagacgccgctgtggcggcgagatgggactggccactacctctgcaacgcatgcgggttgtactcaaagatgaacggcctgtcccgacccctgattaagcctcaaaaacgcgtcccctccagtagacgcctgggtctgtcttgcgcaaattgccacaccacaaccacaactctttggcggcgcaacgccgagggtgaacctgtgtgtaacgcttgcggattgtacatgaaattgcacggagtgccccggcctctggctatgaagaaggagggcatacagacacggaaacgcaagcccaagaacattaataaaagtaagacatgtagcggcaatagtaacaactcaattcctatgactcctacctctaccagcagcaacagtgatgattgctcgaagaataccagtcccactacccagccgaccgcctccggggcaggagccccagttatgactggcgccggggaatccaccaaccctgaaaacagcgagctgaagtattccggtcaggacggcctgtacatcggagtgtccttggcctctccagccgaagtaacgagtagtgtcagacccgatagctggtgtgctctggccctggcgtag

SEQ ID NO: 154382 - DNA, 3770 bp, Artificial Sequence
  derived and/or modified sequence
gacccacagcctggcacccttcggcgagcgctgtttgtttagggctcggtgagtccaatcaggagcccaggctgcagttttccggcagagcagtaagaggcgcctcctctctcctttttattcaccagcagcgcggcgcagaccccggactcgcgctcgcccgctggcgccctcggcttctctccgcgcctgggagcaccctccgccgcggccgttctccatgcgcagcgcccgcccgaggagctagacgtcagcttggagcggcgccggaccgtggatggccttgactgacggcggctggtgcttgccgaagcgcttcggggccgcgggtgcggacgccagcgactccagagcctttccagcgcgggagccctccacgccgccttcccccatctcttcctcgtcctcctcctgctcccggggcggagagcggggccccggcggcgccagcaactgcgggacgcctcagctcgacacggaggcggcggccggacccccggcccgctcgctgctgctcagttcctacgcttcgcatcccttcggggctccccacggaccttcggcgcctggggtcgcgggccccgggggcaacctgtcgagctgggaggacttgctgctgttcactgacctcgaccaagccgcgaccgccagcaagctgctgtggtccagccgcggcgccaagctgagccccttcgcacccgagcagccggaggagatgtaccagaccctcgccgctctctccagccagggtccggccgcctacgacggcgcgcccggcggcttcgtgcactctgcggccgcggcggcagcagccgcggcggcggccagctccccggtctacgtgcccaccacccgcgtgggttccatgctgcccggcctaccgtaccacctgcaggggtcgggcagtgggccagccaaccacgcgggcggcgcgggcgcgcaccccggctggcctcaggcctcggccgacagccctccatacggcagcggaggcggcgcggctggcggcggggccgcggggcctggcggcgctggctcagccgcggcgcacgtctcggcgcgcttcccctactctcccagcccgcccatggccaacggcgccgcgcgggagccgggaggctacgcggcggcgggcagtgggggcgcgggaggcgtgagcggcggcggcagtagcctggcggccatgggcggccgcgagccccagtacagctcgctgtcggccgcgcggccgctgaacgggacgtaccaccaccaccaccaccaccaccaccaccatccgagcccctactcgccctacgtgggggcgccactgacgcctgcctggcccgccggacccttcgagaccccggtgctgcacagcctgcagagccgcgccggagccccgctcccggtgccccggggtcccagtgcagacctgctggaggacctgtccgagagccgcgagtgcgtgaactgcggctccatccagacgccgctgtggcggcgggacggcaccggccactacctgtgcaacgcctgcgggctctacagcaagatgaacggcctcagccggcccctcatcaagccgcagaagcgcgtgccttcatcacggcggcttggattgtcctgtgccaactgtcacaccacaactaccaccttatggcgcagaaacgccgagggtgaacccgtgtgcaatgcttgtggactctacatgaaactccatggggtgcccagaccacttgctatgaaaaaagagggaattcaaaccaggaaacgaaaacctaagaacataaataaatcaaagacttgctctggtaatagcaataattccattcccatgactccaacttccacctcttctaactcagatgattgcagcaaaaatacttcccccacaacacaacctacagcctcaggggcgggtgccccggtgatgactggtgcgggagagagcaccaatcccgagaacagcgagctcaagtattcgggtcaagatgggctctacataggcgtcagtctcgcctcgccggccgaagtcacgtcctccgtgcgaccggattcctggtgcgccctggccctggcctgagcccacgccgccaggaggcagggagggctccgccgcgggcctcactccactcgtgtctgcttttgtgcagcggtccagacagtggcgactgcgctgacagaacgtgattctcgtgcctttattttgaaagagatgtttttcccaagaggcttgctgaaagagtgagagaagatggaagggaagggccagtgcaactgggcgcttgggccactccagccagcccgcctccggggcggaccctgctccacttccagaagccaggactaggacctgggccttgcctgctatggaatattgagagagattttttaaaaaagattttgcattttgtccaaaatcatgtgcttcttctgatcaattttggttgttccagaatttcttcataccttttccacatccagatttcatgtgcgttcatggagaagatcacttgaggccatttggtacacatctctggaggctgagtcggttcatgaggtctcttatcaaaaatattactcagtttgcaagactgcattgtaactttaacatacactgtgactgacgtttctcaaagttcatattgtgtggctgatctgaagtcagtcggaatttgtaaacagggtagcaaacaagatatttttcttccatgtatacaataatttttttaaaaagtgcaatttgcgttgcagcaatcagtgttaaatcatttgcataagatttaacagcattttttataatgaatgtaaacattttaacttaatggtacttaaaataatttaaaagaaaaatgttaacttagacattcttatgcttcttttacaactacatcccattttatatttccaattgttaaagaaaaatatttcaagaacaaatcttctctcaggaaaattgcctttctctatttgttaagaatttttatacaagaacaccaatataccccctttattttactgtggaatatgtgctggaaaaattgcaacaacactttactacctaacggatagcatttgtaaatactctaggtatctgtaaacactctgatgaagtctgtatagtgtgactaacccacaggcaggttggtttacattaatttttttttttgaatgggatgtcctatggaaacctatttcaccagagttttaaaaataaaaagggtattgttttgtcttctgtacagtgagttccttcccttttcaaagctttctttttatgctgtatgtgactatagatattcatataaaacaagtgcacgtgaagtttgcaaaatgctttaaggccttcctttcaaagcatagtccttttggagccgttttgtaccttttataccttggcttatttgaagttgacacatggggttagttactactctccatgtgcattggggacagtttttataagtgggaaggactcagtattattatatttgagatgataagcattttgtttgggaacaatgcttaaaaatattccagaaagttcagattttttttctttgtgaatgaaatatattctggcccacgaacagggcgatttcctttcagttttttccttttgcaacgtgccttgaagtctcaaagctcacctgaggttgcagacgttacccccaacagaagataggtagaaatgattccagtggcctctttgtattttcttcattgttgagtagatttcaggaaatcaggaggtgtttcacaatacagaatgatggcctttaactgtg

SEQ ID NO: 154383 - DNA, 1788 bp, Artificial Sequence
  derived and/or modified sequence
atggccctgacagatggcggctggtgcctgcccaagagatttggagctgctggagcagatgccagtgacagccgggccttccctgcccgggagcccagcaccccacccagccccatcagcagcagcagcagcagctgcagcagaggaggagagcggggccctgggggcgccagcaactgtggcaccccccagctggacacagaagctgctgctggccccccagcccggagcctgctgctgagcagctatgccagccacccctttggagccccccacggccccagcgcccctggggtggccggccctgggggcaacctgagctcctgggaggacctgctgctcttcacagacctggaccaggccgccacagccagcaagctgctgtggagcagcagaggagccaagctgagcccctttgcccctgagcagcctgaggagatgtaccagaccctggccgccctgagcagccagggccctgctgcctatgatggagcccctgggggctttgtgcacagcgctgctgctgctgctgctgctgctgctgctgccagcagccctgtgtatgtgcccaccaccagggtgggctccatgctgcccggcctgccctaccacctgcagggcagcggcagcggccctgccaaccacgccggcggggccggggcccaccctggctggccccaggccagcgctgacagccccccctacggcagcggcggcggggccgccggcggcggcgctgctggccctggaggagctggcagcgctgctgcccacgtgtctgcccgcttcccctacagccccagcccccccatggccaatggagctgcccgggagcccggcggctatgctgctgctggcagcggcggggccggcggcgtgtctgggggcggcagcagcctggccgccatgggcggccgggagccccagtacagcagcctgtctgctgcccggcccctgaatggcacctaccaccaccaccaccaccaccaccaccaccaccccagcccctacagcccctacgtgggcgcccccctgaccccagcctggccagctggcccctttgagacccctgtgctgcacagcctgcagagccgggccggggcccccctgcctgtgccccggggccccagcgctgacctgctggaggacctgtctgagagcagagaatgtgtgaactgtggcagcatccagacccccctgtggaggagagatggcaccggccactacctgtgcaatgcctgtggcctgtacagcaagatgaatggcctgagccggcccctcatcaagccccagaagagggtgcccagcagccggcggctgggcctgagctgtgccaactgccacaccaccaccaccaccctgtggaggagaaatgctgagggggagcctgtgtgcaatgcctgtggcctgtacatgaagctgcatggagtgccccggcccctggccatgaagaaggagggcatccagaccaggaagaggaagcccaagaacatcaacaagagcaagacctgcagcggcaacagcaacaacagcatccccatgacccccaccagcaccagcagcaacagtgatgactgcagcaagaacaccagccccaccacccagcccacagccagcggggccggggcccctgtgatgactggagctggggagagcaccaaccctgagaacagcgagctgaagtacagcggccaggacggcctgtacatcggcgtgtccctggccagccctgctgaggtgaccagctctgtgcggccagacagctggtgtgccctggccctggcctag

SEQ ID NO: 154384 - DNA, 1788 bp, Artificial Sequence
  derived and/or modified sequence
atggccctgaccgacggcggctggtgcctgcccaagcggttcggcgccgcgggtgccgatgcttccgactcccgcgcgttccctgctcgcgagcccagcacgccaccctcaccaatctcatcctcctcttcctcttgctcacgcgggggcgagagggggccaggaggtgcttccaattgcgggaccccacaacttgatacagaagcggcagccggacctcccgccaggagcttactgctgagtagttacgcatcgcaccccttcggcgcgccacatgggccctctgccccgggagttgctggccctggcggaaatctaagttcttgggaagacctgctgttgtttacagatcttgatcaggctgccactgctagtaagcttctgtggagctctaggggcgctaaactgagtccttttgcccccgaacaacctgaagagatgtaccagacactggcagcgctgagcagtcaggggcctgccgcatacgatggagcacctggtggctttgtccatagcgctgcggcagcagccgcggccgcggccgccgctagttctccagtgtatgtaccgacaacacgagtgggaagcatgcttccggggctgccttatcatttgcagggttctggctcaggacccgcaaaccatgctggcggcgctggtgcccatcctggctggccacaggcatctgctgatagcccgccttatggcagtggggggggcgccgctgggggcggagccgcgggcccaggtggcgctggaagcgctgccgcacacgtcagcgcccgcttcccttactctccgagtcccccgatggccaacggagcagctcgagaacccggcggctatgccgctgctggcagcgggggcgcgggcggagtcagcggcgggggatctagcctcgccgcaatgggggggcgggaacctcagtattcatccttgagcgctgctagaccgttgaacggaacttaccaccatcatcaccatcaccatcaccaccaccctagcccttacagcccatacgtgggcgctcccctcactccggcctggcctgccgggcccttcgagactccggtcctgcattctctccagtcgcgcgccggagcccccctgcctgttccaagagggccaagcgccgatctgctggaggacttaagcgagagtagggagtgcgtgaactgcgggagcatacagacacctctttggaggagggacgggaccggccactatctatgtaatgcgtgtgggttatattctaagatgaacgggctctcaagaccactcataaagccccaaaagcgcgttccatcatccagacgacttggcctaagctgcgcgaactgccacactactacaactaccctctggcgaagaaatgcagagggggagccagtgtgtaacgcttgcggcttatacatgaaactccatggtgtgccgcggcctctggcgatgaagaaggagggcatccaaacaaggaagcggaagcccaagaatatcaacaaaagcaaaacctgcagcggcaattcaaacaacagtattcccatgactcctacgagcacatcctctaattcagatgattgctccaaaaacacctccccaaccacacagccaactgctagcggggccggcgccccggttatgaccggtgctggcgaaagcactaatccagaaaactcggagttaaagtactctggtcaggatggactgtatatcggagtatcactcgcctctcccgccgaagttacatccagcgttcggcctgacagctggtgtgcgctggccctcgcttag

SEQ ID NO: 154385 - DNA, 1788 bp, Artificial Sequence
  derived and/or modified sequence
atggcccttacagatgggggttggtgcctccccaaaagatttggcgctgccggagctgatgcttcagactctagggctttccctgctcgggaaccatccacacccccaagcccaatctcctctagctcttcctcgtgttccagaggcggagaacggggtcccggaggggcatccaattgcggaaccccccagctggacactgaagccgctgccggtccgccagcgcgatcacttctgctgagtagctatgcttcccacccgtttggggcaccgcacggccctagtgcacccggtgtggcagggccagggggaaatctgagctcatgggaagatttgcttctttttaccgaccttgatcaggccgctacggcctccaaactcctgtggtcttcgagaggtgcaaaattatccccattcgctcctgagcagcctgaggaaatgtatcagaccctcgctgccctatctagtcaaggaccagcagcttatgatggggctccgggaggatttgtacattctgccgctgcagcagcagccgcagcagccgctgctagtagtccggtgtatgtgcccacgactcgtgtgggaagcatgctgccgggattaccctatcatctgcaaggcagtgggtcaggccctgctaaccacgctggaggcgctggtgctcatcctggctggccacaggcgtctgccgactcgcctccgtatggaagcgggggaggggcagccggaggaggtgccgcagggccaggaggagcaggttccgccgcagctcacgtgagcgctcgctttccgtacagccccagcccccctatggcaaatggagcagccagagaaccaggtggctatgccgctgcaggctcgggaggtgcgggaggcgtcagtggcggaggcagcagtctggcagccatgggcggaagggagccccaatattcttcactttcggccgcaagacccctgaatggaacctatcaccaccatcatcaccatcatcatcatcatccgtccccctactcgccatatgtcggcgcacctcttacccccgcttggcccgcagggcctttcgaaacacctgttcttcattcccttcagagcagagcaggggcacctctaccagtccccaggggaccctcggctgacctgttggaggacctttctgagtctcgcgagtgcgttaactgtggcagtatccagacccccttgtggcgaagagacgggactggtcactatctgtgtaatgcctgcggactgtattccaaaatgaatggactgagtaggcctctaatcaaaccgcagaaacgtgtcccgtcttcccggaggctgggtctgagttgcgcgaattgccataccacaactacgactctatggcggcgaaacgccgaaggtgagccagtctgcaatgcatgcggtttgtacatgaagctccacggagttccacggccactggctatgaaaaaagaaggaattcagacccgaaaacgtaagccaaagaacattaacaaaagtaagacttgttcagggaattcaaataatagcatacccatgacaccgacttctacttctagtaactcggacgattgttctaaaaacacgtcccccactacacagccaaccgcatctggggctggtgctccagtgatgaccggcgcaggagagtctacgaaccccgagaactcagaactcaaatatagtggacaggatgggctgtatatcggcgtatcactggcatctccagcagaagtgacaagctccgtccggccagatagctggtgtgccctggcactcgcgtag

SEQ ID NO: 154386 - DNA, 1788 bp, Artificial Sequence
  derived and/or modified sequence
atggccctgaccgacggcggctggtgcctgcccaagagattcggcgccgccggcgccgacgccagcgacagcagagccttccccgccagagagcccagcaccccccccagccccatcagcagcagcagcagcagctgcagcagaggcggcgagagaggccccggcggcgccagcaactgcggcaccccccagctggacaccgaggccgccgccggcccccccgccagaagcctgctgctgagcagctacgccagccaccccttcggcgccccccacggccccagcgcccccggcgtggccggccccggcggcaacctgagcagctgggaggacctgctgctgttcaccgacctggaccaggccgccaccgccagcaagctgctgtggagcagcagaggcgccaagctgagccccttcgcccccgagcagcccgaggagatgtaccagaccctggccgccctgagcagccagggccccgccgcctacgacggcgcccccggcggcttcgtgcacagcgccgccgccgccgccgccgccgccgccgccgccagcagccccgtgtacgtgcccaccaccagagtgggcagcatgctgcccggcctgccctaccacctgcagggcagcggcagcggccccgccaaccacgccggcggcgccggcgcccaccccggctggccccaggccagcgccgacagccccccctacggcagcggcggcggcgccgccggcggcggcgccgccggccccggcggcgccggcagcgccgccgcccacgtgagcgccagattcccctacagccccagcccccccatggccaacggcgccgccagagagcccggcggctacgccgccgccggcagcggcggcgccggcggcgtgagcggcggcggcagcagcctggccgccatgggcggcagagagccccagtacagcagcctgagcgccgccagacccctgaacggcacctaccaccaccaccaccaccaccaccaccaccaccccagcccctacagcccctacgtgggcgcccccctgacccccgcctggcccgccggccccttcgagacccccgtgctgcacagcctgcagagcagagccggcgcccccctgcccgtgcccagaggccccagcgccgacctgctggaggacctgagcgagagcagagagtgcgtgaactgcggcagcatccagacccccctgtggagaagagacggcaccggccactacctgtgcaacgcctgcggcctgtacagcaagatgaacggcctgagcagacccctgatcaagccccagaagagagtgcccagcagcagaagactgggcctgagctgcgccaactgccacaccaccaccaccaccctgtggagaagaaacgccgagggcgagcccgtgtgcaacgcctgcggcctgtacatgaagctgcacggcgtgcccagacccctggccatgaagaaggagggcatccagaccagaaagagaaagcccaagaacatcaacaagagcaagacctgcagcggcaacagcaacaacagcatccccatgacccccaccagcaccagcagcaacagcgacgactgcagcaagaacaccagccccaccacccagcccaccgccagcggcgccggcgcccccgtgatgaccggcgccggcgagagcaccaaccccgagaacagcgagctgaagtacagcggccaggacggcctgtacatcggcgtgagcctggccagccccgccgaggtgaccagcagcgtgagacccgacagctggtgcgccctggccctggcctag

SEQ ID NO: 154387 - protein, 84 aa, Artificial Sequence
  derived and/or modified sequence
MPYLLISTQIRMEVGPTMVGDEQSDPELMQHLGASKRRALGNNFYEYYVDDPPRIVLDKLERRGFRVLSMTGVGQTLVWCLHKE

SEQ ID NO: 154388 - DNA, 255 bp, Artificial Sequence
  derived and/or modified sequence
atgccatatcttctgatcagtactcagattcgcatggaagtggggcctactatggtaggagatgagcagagcgacccggagctaatgcagcatttgggcgcatccaagaggcgggccctgggcaacaatttctatgagtactacgttgatgacccacctcggatagtgttggacaaactggaacgcagaggattcagggtcctgagcatgacaggagtgggtcagaccttggtctggtgcttgcataaagagtag

SEQ ID NO: 154389 - DNA, 255 bp, Artificial Sequence
  derived and/or modified sequence
atgccctacctgctgatcagcacccagatccgcatggaggtgggccccaccatggtgggagatgagcagagcgaccctgagctgatgcagcacctgggcgccagcaagagaagagccctgggcaacaacttctatgagtactacgtggatgaccccccaagaattgtgctggacaagctggagcggcggggcttccgggtgctgtccatgactggagtgggccagaccctggtgtggtgcctgcacaaggagtag

SEQ ID NO: 154390 - DNA, 255 bp, Artificial Sequence
  derived and/or modified sequence
atgccctacctgctgatcagcacccagatccggatggaggtgggccccaccatggttggagacgagcagtctgatcctgaactgatgcaacatcttggagctagcaagcgacgcgcactgggtaacaatttctacgagtattatgtcgacgacccgccacggatagtactggacaagctggagagaagaggcttccgcgtgctgtcaatgaccggggtcggccagacactggtctggtgcctccataaggagtag

SEQ ID NO: 154391 - DNA, 255 bp, Artificial Sequence
  derived and/or modified sequence
atgccgtatctgctgatcagcactcagattaggatggaggtggggcctactatggtcggggacgagcagtcagatcccgaactaatgcaacatctgggggctagtaagcgcagggcgctgggcaacaacttttatgagtactatgtggacgacccaccaagaattgtacttgataagctggaaaggcgcggatttcgcgtgctatcaatgacgggcgtgggacagaccttagtgtggtgtctgcacaaagaatag

SEQ ID NO: 154392 - DNA, 775 bp, Artificial Sequence
  derived and/or modified sequence
cacggcggtcacgggcaaggtgccccgggattgacgccgcctgtggccagagccggagtaacgggactcccagctgcgcgtcgcagtcccgacgcgagaagggctggagtcggcgtccagcctagagcccccggtgggagccaggccgggacgcgtgcaccatgccctacctgctcatcagcacccagatccgcatggaggtgggccccactatggtgggcgatgaacagtcggatccagagctgatgcagcatctgggggcttcaaagagaagagccttgggaaacaacttttatgaatactacgtcgatgaccctccccgcatagtcctggacaagctggaacgcaggggcttccgtgtgctgagcatgacgggggtgggccagacgctggtgtggtgtctgcacaaggagtgaccttctcatgctgatttgcagacggggcacccctgtggaggggctgctgtgggccctgacctccaagctcctgcctcaccgtctgccttgctcctctcttcccaaatcatcaccgccatgggcccagccccaaagggcagtgaatggccttctctgaaaccctgcgtcaagcagtgggagagggcagtgcccggtgccctggtgctcccagctgccctcctgcttcgggcctgggccgagggccttgtgtaggccatgttcctcgggcagctgccccgggccggagctgggcactccagcggccctggcgcgtggctcctgcatagctagcccaagccaataaagggctgtgatgagtg

SEQ ID NO: 154393 - DNA, 255 bp, Artificial Sequence
  derived and/or modified sequence
atgccctacctgctgatcagcacccagatcagaatggaggtgggccccaccatggtgggcgacgagcagagcgaccccgagctgatgcagcacctgggcgccagcaagagaagagccctgggcaacaacttctacgagtactacgtggacgacccccccagaatcgtgctggacaagctggagagaagaggcttcagagtgctgagcatgaccggcgtgggccagaccctggtgtggtgcctgcacaaggagtag

SEQ ID NO: 154394 - protein, 375 aa, Artificial Sequence
  derived and/or modified sequence
MQKLQLCVYIYLFMLIVAGPVDLNENSEQKENVEKEGLCNACTWRQNTKSSRIEAIKIQILSKLRLETAPNISKDVIRQLLPKAPPLRELIDQYDVQRDDSSDGSLEDDDYHATTETIITMPTESDFLMQVDGKPKCCFFKFSSKIQYNKVVKAQLWIYLRPVETPTTVFVQILRLIKPMKDGTRYTGIRSLKLDMNPGTGIWQSIDVKTVLQNWLKQPESNLGIEIKALDENGHDLAVTFPGPGEDGLNPFLEVKVTDTPKRSRRDFGLDCDEHSTESRCCRYPLTVDFEAFGWDWIIAPKRYKANYCSGECEFVFLQKYPHTHLVHQANPRGSAGPCCTPTKMSPINMLYFNGKEQIIYGKIPAMVVDRCGCS

SEQ ID NO: 154395 - DNA, 1128 bp, Artificial Sequence
  derived and/or modified sequence
atgcagaaactgcaactctgcgtgtacatctatctgttcatgcttatcgtggccggacccgtcgatttgaacgagaatagcgagcaaaaggaaaatgtcgagaaagaagggctctgcaatgcttgtacatggagacagaacacaaaatctagcagaattgaagccatcaaaatccagatattgtccaaactcaggcttgagacagcccctaatattagtaaagatgtcatcaggcagctcttacctaaggctccaccactccgggagctcatcgaccagtacgacgtccagcgcgacgattcatccgatggttcgctggaagacgatgactaccacgccaccaccgaaacaattatcaccatgcctacggagtccgattttcttatgcaggtggacggcaaacctaagtgctgctttttcaaattcagctctaaaattcagtataataaagtagtcaaggctcaactgtggatttatcttcggcctgtggagacgccaaccacagtgttcgtgcaaattcttcggcttattaaacctatgaaggacggcacaagatataccgggatcagatctctgaagctggatatgaaccccgggactgggatctggcagtctatcgacgttaagaccgtgctgcagaattggctcaagcagcctgagagcaaccttggaatagagatcaaggcgctggacgagaacgggcatgacctggctgtgacattccccgggcctggtgaggatggactgaatccgttcctggaggtcaaagtcaccgacaccccaaaacgctcacggcgggatttcggcttggactgcgatgaacacagcaccgagtcgcgctgttgccgttatcccctgaccgtagatttcgaggcatttggctgggactggatcatcgcgccaaaacgttacaaagccaattattgctccggagaatgcgaatttgtgtttctccagaagtatccacatactcatctggtgcaccaggccaacccaagaggatcagcaggcccttgctgtactcccacaaagatgtcacccatcaacatgctttacttcaacgggaaggagcagatcatctatggaaagattcccgctatggtggttgaccgatgcggctgttcctag

SEQ ID NO: 154396 - DNA, 1128 bp, Artificial Sequence
  derived and/or modified sequence
atgcagaagctgcagctgtgtgtgtacatctacctgttcatgctgattgtggccggccctgtggacctgaatgaaaattctgagcagaaggaaaatgtggagaaggagggcctgtgcaatgcctgcacctggaggcagaacaccaagagcagcagaattgaggccatcaagatccagatcctgagcaagctgcggctggagacagcccccaacatcagcaaggatgtgatccggcagctgctgcccaaggccccacccctgcgggagctgattgaccagtatgatgtgcagagagatgacagcagtgatggcagcctggaggatgatgactaccacgccaccacagagaccatcatcaccatgcccacagaaagtgacttcctgatgcaggtggatggcaagcccaagtgctgcttcttcaagttcagcagcaagatccagtacaacaaggtggtgaaggcccagctgtggatctacctgcggcctgtggagacccccaccaccgtgtttgtgcagatcctgcggctcatcaagcccatgaaggatggcacccgctacacaggcatccgcagcctgaagctggacatgaaccctggcaccggcatctggcagagcattgatgtgaagacagtgctgcagaactggctgaagcagcctgagagcaacctgggcatcgagatcaaggccctggatgaaaatggacatgacctggccgtgaccttccctggccctggagaagatggcctgaaccccttcctggaggtgaaggtgacagacacccccaagaggagcagaagagactttggcctggactgtgatgagcacagcacagagagccgctgctgccgctaccccctgactgtggactttgaggccttcggctgggactggatcatcgcccccaagcgctacaaggccaactactgcagcggggagtgtgaatttgtgttcctgcagaagtacccccacacccacctggtgcaccaggccaacccccggggcagcgctggcccctgctgcacccccaccaagatgagccccatcaacatgctgtacttcaacgggaaggagcagatcatctacggcaagatcccagccatggtggtggacagatgtggctgcagctag

SEQ ID NO: 154397 - DNA, 2635 bp, Artificial Sequence
  derived and/or modified sequence
agattcactggtgtggcaagttgtctctcagactgtacatgcattaaaattttgcttggcattactcaaaagcaaaagaaaagtaaaaggaagaaacaagaacaagaaaaaagattatattgattttaaaatcatgcaaaaactgcaactctgtgtttatatttacctgtttatgctgattgttgctggtccagtggatctaaatgagaacagtgagcaaaaagaaaatgtggaaaaagaggggctgtgtaatgcatgtacttggagacaaaacactaaatcttcaagaatagaagccattaagatacaaatcctcagtaaacttcgtctggaaacagctcctaacatcagcaaagatgttataagacaacttttacccaaagctcctccactccgggaactgattgatcagtatgatgtccagagggatgacagcagcgatggctctttggaagatgacgattatcacgctacaacggaaacaatcattaccatgcctacagagtctgattttctaatgcaagtggatggaaaacccaaatgttgcttctttaaatttagctctaaaatacaatacaataaagtagtaaaggcccaactatggatatatttgagacccgtcgagactcctacaacagtgtttgtgcaaatcctgagactcatcaaacctatgaaagacggtacaaggtatactggaatccgatctctgaaacttgacatgaacccaggcactggtatttggcagagcattgatgtgaagacagtgttgcaaaattggctcaaacaacctgaatccaacttaggcattgaaataaaagctttagatgagaatggtcatgatcttgctgtaaccttcccaggaccaggagaagatgggctgaatccgtttttagaggtcaaggtaacagacacaccaaaaagatccagaagggattttggtcttgactgtgatgagcactcaacagaatcacgatgctgtcgttaccctctaactgtggattttgaagcttttggatgggattggattatcgctcctaaaagatataaggccaattactgctctggagagtgtgaatttgtatttttacaaaaatatcctcatactcatctggtacaccaagcaaaccccagaggttcagcaggcccttgctgtactcccacaaagatgtctccaattaatatgctatattttaatggcaaagaacaaataatatatgggaaaattccagcgatggtagtagaccgctgtgggtgctcatgagatttatattaagcgttcataacttcctaaaacatggaaggttttcccctcaacaattttgaagctgtgaaattaagtaccacaggctataggcctagagtatgctacagtcacttaagcataagctacagtatgtaaactaaaagggggaatatatgcaatggttggcatttaaccatccaaacaaatcatacaagaaagttttatgatttccagagtttttgagctagaaggagatcaaattacatttatgttcctatatattacaacatcggcgaggaaatgaaagcgattctccttgagttctgatgaattaaaggagtatgctttaaagtctatttctttaaagttttgtttaatatttacagaaaaatccacatacagtattggtaaaatgcaggattgttatataccatcattcgaatcatccttaaacacttgaatttatattgtatggtagtatacttggtaagataaaattccacaaaaatagggatggtgcagcatatgcaatttccattcctattataattgacacagtacattaacaatccatgccaacggtgctaatacgataggctgaatgtctgaggctaccaggtttatcacataaaaaacattcagtaaaatagtaagtttctcttttcttcaggtgcattttcctacacctccaaatgaggaatggattttctttaatgtaagaagaatcatttttctagaggttggctttcaattctgtagcatacttggagaaactgcattatcttaaaaggcagtcaaatggtgtttgtttttatcaaaatgtcaaaataacatacttggagaagtatgtaattttgtctttggaaaattacaacactgcctttgcaacactgcagtttttatggtaaaataatagaaatgatcgactctatcaatattgtataaaaagactgaaacaatgcatttatataatatgtatacaatattgttttgtaaataagtgtctccttttttatttactttggtatatttttacactaaggacatttcaaattaagtactaaggcacaaagacatgtcatgcatcacagaaaagcaactacttatatttcagagcaaattagcagattaaatagtggtcttaaaactccatatgttaatgattagatggttatattacaatcattttatatttttttacatgattaacattcacttatggattcatgatggctgtataaagtgaatttgaaatttcaatggtttactgtcattgtgtttaaatctcaacgttccattattttaatacttgcaaaaacattactaagtataccaaaataattgactctattatctgaaatgaagaataaactgatgctatctcaacaataa

SEQ ID NO: 154398 - DNA, 1128 bp, Artificial Sequence
  derived and/or modified sequence
atgcagaagctgcagctgtgcgtgtacatctacctgttcatgctgatagtagcaggtcctgtcgaccttaacgaaaactcagaacagaaggagaacgtggagaaggaagggctgtgtaatgcctgtacctggcggcagaataccaagtctagccggattgaggcaatcaaaatacaaatcctgtccaaactgagactcgagacggctccaaatatttctaaggacgtgattcggcagctgctgcccaaagctccaccactgcgggagctgatcgaccaatacgacgtacagagggatgatagctccgacggtagcttagaagacgacgattaccacgcaacaactgagaccatcatcaccatgccaacagagtcagactttctcatgcaggtggacggcaagccaaagtgctgtttctttaaattctccagcaaaatccagtacaataaggttgttaaggctcagctttggatctacctccggcctgtcgagacacccaccaccgtcttcgtccaaatactgcgtcttatcaagccaatgaaggatgggaccagatacactggaatacgcagccttaagctggatatgaaccccggaacgggcatctggcaatccatcgatgtgaagaccgtgctacaaaattggctgaaacagcccgaaagtaatctgggaattgagattaaggcgcttgacgagaatggccacgatctggccgtaacgttcccaggtcccggcgaagatggattgaaccctttcctggaagtgaaagttactgacactcccaaacgttctagacgggactttggtctggattgtgatgagcacagcactgagtcccggtgctgcagataccccttgactgtggatttcgaggcgtttggctgggactggataatcgctcccaaaagatataaagcaaactactgttctggtgagtgtgagtttgtgttcctgcagaaatatcctcatactcatctcgtgcaccaagcgaatccacgcggttcagccgggccctgttgcacacctacgaagatgagccccattaacatgctctactttaacggcaaggagcagataatatacggaaagatccctgctatggtggtcgatcgatgtgggtgttcctag

SEQ ID NO: 154399 - DNA, 1128 bp, Artificial Sequence
  derived and/or modified sequence
atgcagaaacttcaactgtgtgtatatatatatctgttcatgctcatcgtggctggaccagtcgatctgaacgaaaattccgaacagaaggaaaatgtcgaaaaggaggggctttgcaacgcctgcacgtggaggcagaatactaaatccagtaggatcgaggccatcaaaatccaaatactgagcaagcttcgattggagacagctcctaacataagcaaggatgtcattcggcagctcctccccaaggctccacccctgagagagctgatcgatcagtacgacgtgcagcgggacgattcctccgatggctccttggaagatgacgactatcacgcgaccaccgaaactattattacgatgccaaccgaaagtgacttcttaatgcaggtcgatggaaagccgaaatgctgttttttcaaattctcctccaaaattcaatacaataaggtggtcaaggcccagttatggatttatctcaggcctgtggagacccccacaacagtgtttgttcagatcttgcgacttatcaagcctatgaaggacggaactaggtatacagggatcaggtctctcaaactcgacatgaaccccggaaccggcatctggcaatccattgatgtgaaaaccgttctacaaaattggctgaagcagccagagtctaacctgggtattgagataaaagcgctggacgagaacggccatgatctcgctgtgacatttcccggtcctggcgaggatggcctgaacccattcctagaagtgaaagttaccgatactcccaagagatcccgacgcgattttggactggattgtgatgaacactctaccgaatcccgttgctgcagatatcccctgaccgtagattttgaagcatttggctgggattggattatcgccccaaagcggtataaagctaactattgcagtggcgagtgtgagtttgtctttctccagaaatatccccatacccacctcgtacaccaggctaaccctagagggtccgctgggccttgctgtacgcctactaagatgagtcccataaacatgctatatttcaacggcaaagaacagattatttacggcaagatcccagctatggttgtcgatcggtgtggctgcagttag

SEQ ID NO: 154400 - DNA, 1128 bp, Artificial Sequence
  derived and/or modified sequence
atgcagaagctgcagctgtgcgtgtacatctacctgttcatgctgatcgtggccggccccgtggacctgaacgagaacagcgagcagaaggagaacgtggagaaggagggcctgtgcaacgcctgcacctggagacagaacaccaagagcagcagaatcgaggccatcaagatccagatcctgagcaagctgagactggagaccgcccccaacatcagcaaggacgtgatcagacagctgctgcccaaggccccccccctgagagagctgatcgaccagtacgacgtgcagagagacgacagcagcgacggcagcctggaggacgacgactaccacgccaccaccgagaccatcatcaccatgcccaccgagagcgacttcctgatgcaggtggacggcaagcccaagtgctgcttcttcaagttcagcagcaagatccagtacaacaaggtggtgaaggcccagctgtggatctacctgagacccgtggagacccccaccaccgtgttcgtgcagatcctgagactgatcaagcccatgaaggacggcaccagatacaccggcatcagaagcctgaagctggacatgaaccccggcaccggcatctggcagagcatcgacgtgaagaccgtgctgcagaactggctgaagcagcccgagagcaacctgggcatcgagatcaaggccctggacgagaacggccacgacctggccgtgaccttccccggccccggcgaggacggcctgaaccccttcctggaggtgaaggtgaccgacacccccaagagaagcagaagagacttcggcctggactgcgacgagcacagcaccgagagcagatgctgcagataccccctgaccgtggacttcgaggccttcggctgggactggatcatcgcccccaagagatacaaggccaactactgcagcggcgagtgcgagttcgtgttcctgcagaagtacccccacacccacctggtgcaccaggccaaccccagaggcagcgccggcccctgctgcacccccaccaagatgagccccatcaacatgctgtacttcaacggcaaggagcagatcatctacggcaagatccccgccatggtggtggacagatgcggctgcagctag

SEQ ID NO: 154401 - protein, 205 aa, Artificial Sequence
  derived and/or modified sequence
MAAPGERGRFHGGNLFFLPGGARSEMMDDLATDARGRGAGRRDAAASASTPAQAPTSDSPVAEDASRRRPCRACVDFKTWMRTQQKRDTKFREDCPPDREELGRHSWAVLHTLAAYYPDLPTPEQQQDMAQFIHLFSKFYPCEECAEDLRKRLCRNHPDTRTRACFTQWLCHLHNEVNRKLGKPDFDCSKVDERWRDGWKDGSCD

SEQ ID NO: 154402 - protein, 94 aa, Artificial Sequence
  derived and/or modified sequence
MRTQQKRDTKFREDCPPDREELGRHSWAVLHTLAAYYPDLPTPEQQQDMAQFIHLFSKFYPCEECAEDLRKRLCRNHPDTRTRACFTVAVPPAQ

SEQ ID NO: 154403 - DNA, 618 bp, Artificial Sequence
  derived and/or modified sequence
atggctgctcctggggaaaggggccgtttccacggcggtaatttgttcttcctgccaggcggcgcaaggtctgagatgatggatgatctggccactgacgctcggggacgcggtgcaggaagacgtgacgcagccgccagcgcctctactcctgcgcaggctcccacctcagactctcctgtcgccgaggacgcatctcgccgaagaccctgtagagcttgcgtggatttcaagacctggatgaggacacagcagaaacgagacactaagttccgggaggactgtccgcctgacagggaggaattgggtcggcattcatgggctgtgctgcacacactcgcggcctattacccggaccttcctacgcccgagcagcagcaggacatggcgcagtttattcacttgttttcgaaattttacccatgcgaagaatgtgctgaggatctgagaaagcgcctgtgccgaaaccaccccgacacgcgtacccgtgcatgcttcacccaatggctgtgccatcttcacaatgaagtgaatcgaaaacttggcaaacccgattttgactgtagcaaggtagatgaacggtggcgggatggctggaaagatgggtcgtgcgactag

SEQ ID NO: 154404 - DNA, 285 bp, Artificial Sequence
  derived and/or modified sequence
atgcgcacccagcagaagcgagacactaaattcagagaagattgtccccctgatcgcgaagaactgggaaggcattcatgggccgtgctacacacactggccgcatattaccccgacctgcctacgccagagcagcaacaagatatggctcagtttattcacctgttcagcaagttttatccttgtgaagagtgcgcagaggatctgaggaagagactgtgtcggaatcatcctgacacccgcacacgagcttgcttcaccgtggcggtcccccccgcccagtag

SEQ ID NO: 154405 - DNA, 2405 bp, Artificial Sequence
  derived and/or modified sequence
gctggcctggaggctgacctggaggctcatctggaggccgagctgacccggcaggccttgcgcgggcaacatggcggcgcccggcgagcggggccgcttccacggcgggaacctcttcttcctgccggggggcgcgcgctccgagatgatggacgacctggcgaccgacgcgcggggccggggcgcggggcggagagacgcggccgcctcggcctcgacgccagcccaggcgccgacctccgattctcctgtcgccgaggacgcctcccggaggcggccgtgccgggcctgcgtcgacttcaagacgtggatgcggacgcagcagaagcgggacaccaagtttagggaggactgcccgccggatcgcgaggaactgggccgccacagctgggctgtcctccacaccctggccgcctactaccccgacctgcccaccccagaacagcagcaagacatggcccagttcatacatttattttctaagttttacccctgtgaggagtgtgctgaagacctaagaaaaaggctgtgcaggaaccacccagacacccgcacccgggcatgcttcacacagtggctgtgccacctgcacaatgaagtgaaccgcaagctgggcaagcctgacttcgactgctcaaaagtggatgagcgctggcgcgacggctggaaggatggctcctgtgactagagggtggtcagccagagctcatgggacagctagccaggcatggttggataggggcagggcactcattaaagtgcatcacagccagagcctgttgtgtctcagttgggtggtccccaggacactgcctgtggggacctgccctgcccctcttaggtttggagcagaagtggaggtgcccacagcaggtacccactggccccctcctcagtggagaccccaaggagctgcagctgaactgcaggggagggaaggaggagcagcctgggctgccccttgacattcaggatgtagcttcctgcccaccgcataccctggcgcctcactcctcacacgggaagacagcgggcctggctgggcatccctgtgcctgtccctggcggccaggccattgccttcccactatgcagccagggatgcccctgccccccatggctctgtgctgctcactttagggggctcaattctccactctgctcagtccctacagggaaagctcaggtcgggtctttctgagggtccaccagccatcctaccctctccctgcctggcacatgcctgccagcgttgtgtcatgcctgtccacaggggattcgtggggctcacttcatcagagtttgaagcccaaatgaaacgctgaagtgactgagaacctggcttcagtatattttctgctggggcttaataaagcagtagacagggcttgttccatccctctgtgctcagctgcatttcctgctggggtcctggttcctcaggagagagagaccacagggtgagagtgagccaggaacagcaaggacgttgattggttggggcaggggggccagagtagctgatgtaggagtactgggaggccagacggcacgaggtctccaaggccccagcaaagccatggcttctacccctagttcccctgacaggaagttcttggcgggtttggagccaggggatggcatggagtgatgtggctttgaagggtcctctggctgctgagctgggatgaggcaggtaagggtggaacaggaggggtggggaggaagccggggcagtcaccgagtgaccaccaagaggaagacccaccccacggcggggacagatgcggggtacgttaaagggagagccagagaactcatggggtgaggatggagtccgaggagactgctgggagccgccgtgtgggtcagagatggagaaggctgagtgcagcaaggtggggggtgactgggacccagcctttgggcctccccagccagagcagcccagcaacagtgtgtcctgtggtcataaaactccagggacctctatcctccaggagtctcagcctttccctgggcgcaggcccaccttggcatggccgcctcaggcctccatggagggagctgctatgtccccaccagattggccccgtgcggctgctggcttctgtagaggctgcccagaggggccaggtggcacaaataagagaggggagatggggggcagccaggagaggaggtgtcccttcctcgcccagacacagcgcgcttctctctggcctttcccgaggcctgtgagtgcctcaggaagcagctgggccctctgggaaggctgtgttcagcttaggaacataccgcctgtatctgctgtccctcccctgcccccctgccccccccaccgccttccctttttccctgtcttccttaaagtttcactcctgaataaaacttcactttgcctt

SEQ ID NO: 154406 - DNA, 376 bp, Artificial Sequence
  derived and/or modified sequence
atgcggacgcagcagaagcgggacaccaagtttagggaggactgcccgccggatcgcgaggaactgggccgccacagctgggctgtcctccacaccctggccgcctactaccccgacctgcccaccccagaacagcagcaagacatggcccagttcatacatttattttctaagttttacccctgtgaggagtgtgctgaagacctaagaaaaaggctgtgcaggaaccacccagacacccgcacccgggcatgcttcacagtggctgtgccacctgcacaatgaagtgaaccgcaagctgggcaagcctgacttcgactgctcaaaagtggatgagcgctggcgcgacggctggaaggatggctcctgtgactag

SEQ ID NO: 154407 - DNA, 618 bp, Artificial Sequence
  derived and/or modified sequence
atggccgcccctggagagcggggccgcttccatggaggcaacctcttcttcctgcctggaggagcccggtctgagatgatggatgacctggccacagatgcccggggcagaggagctggaagaagagatgctgctgccagcgccagcaccccagcccaggcccccaccagtgacagccctgtggctgaagatgccagcagaagaagaccctgccgggcctgtgtggacttcaagacctggatgaggacccagcagaagagggacaccaagttccgggaggactgccccccagaccgggaggagctgggccgccacagctgggccgtgctgcacaccctggccgcctactacccagacctgcccaccccagagcagcagcaggacatggcccagttcatccacctgttcagcaagttctacccctgtgaggagtgtgccgaggacctgaggaagaggctgtgcaggaaccacccagacaccaggacccgggcctgcttcacccagtggctgtgccacctgcacaatgaggtgaacaggaagctgggcaagccagactttgactgcagcaaggtggatgagcgctggagagatggctggaaggatggcagctgtgactag

SEQ ID NO: 154408 - DNA, 285 bp, Artificial Sequence
  derived and/or modified sequence
atgaggacccagcagaagagggacaccaagttccgggaggactgccccccagaccgggaggagctgggccgccacagctgggccgtgctgcacaccctggccgcctactacccagacctgcccaccccagagcagcagcaggacatggcccagttcatccacctgttcagcaagttctacccctgtgaggagtgtgccgaggacctgaggaagaggctgtgcaggaaccacccagacaccaggacccgggcctgcttcaccgtggccgtgcccccagcccagtag

SEQ ID NO: 154409 - DNA, 618 bp, Artificial Sequence
  derived and/or modified sequence
atggccgcccccggcgagcggggccggttccacggcggcaacctgttttttctcccaggcggtgctcggagcgagatgatggatgacctcgcaaccgacgcccgtggacgaggcgcaggaagacgcgacgctgcggctagtgcttccacacccgctcaagcaccaacaagcgattccccggtcgctgaggacgccagtagacgcaggccttgtagagcttgtgtggatttcaaaacatggatgagaacacagcagaagcgtgatacaaagtttagggaagattgcccccccgacagggaagagctggggagacattcttgggctgtactgcatacgctggccgcctactacccagacctgccaacaccggaacagcagcaggacatggcacaattcatccacctattctccaagttctatccgtgcgaagagtgcgccgaagacttgcggaaaagactgtgtcgcaatcatcccgacacgcggacgcgagcctgcttcactcaatggctgtgccatctgcacaacgaagttaatcggaagctcggcaagcccgatttcgactgtagtaaggtggacgagcgatggcgagacggttggaaagacggcagctgcgactag

SEQ ID NO: 154410 - DNA, 285 bp, Artificial Sequence
  derived and/or modified sequence
atgcggacccagcagaagcgggacaccaagttccgggaggactgccctcctgaccgtgaggagctggggcgacactcctgggctgtcctgcacactctggcagcctattatcccgacctgccaactcctgaacagcagcaggatatggcacaatttatccatctgttcagcaaattttatccatgcgaagagtgcgccgaggacctcaggaaacgtttgtgtagaaatcacccagatacgcgcactagggcctgctttactgtggccgtgccacccgcacagtag

SEQ ID NO: 154411 - DNA, 618 bp, Artificial Sequence
  derived and/or modified sequence
atggcagcacccggagagaggggacggttccacggaggcaatctttttttcctcccaggaggcgcacggtccgagatgatggacgatctagccaccgacgcgagagggaggggtgctggtaggagagacgccgcagcgtccgccagcacccccgctcaggcgccaaccagtgattcgccggtcgcagaagatgcctccaggcgcaggccttgccgcgcttgcgtggattttaagacgtggatgcgtacacagcagaagcgggatactaagttcagggaagattgccctcccgatcgtgaggagctggggaggcattcctgggccgtcctgcataccctcgctgcctactaccccgacttgcctacccccgaacagcagcaggatatggcccagttcatccatcttttctcaaagttctatccatgcgaggaatgcgccgaggacttgagaaaacggctttgtcgcaaccaccccgacacgcggaccagggcttgcttcacccagtggctctgccatcttcacaatgaggtcaatagaaaactggggaagccggacttcgattgttccaaggtagacgagaggtggcgcgacggatggaaggacggtagctgcgattag

SEQ ID NO: 154412 - DNA, 285 bp, Artificial Sequence
  derived and/or modified sequence
atgaggactcaacaaaagcgggatacaaagttccgcgaggattgccccccagatcgggaggaacttggcagacactcttgggcggtccttcacactctggccgcttactatccagatctccccacccctgagcaacagcaggatatggcccaatttatccacctgttctccaagttctatccgtgcgaggaatgcgccgaggacctgcgaaaacgactgtgcagaaatcacccagatacccgaactagagcatgctttacagtcgctgttcctcccgcacaatag

SEQ ID NO: 154413 - DNA, 618 bp, Artificial Sequence
  derived and/or modified sequence
atggccgcccccggcgagagaggcagattccacggcggcaacctgttcttcctgcccggcggcgccagaagcgagatgatggacgacctggccaccgacgccagaggcagaggcgccggcagaagagacgccgccgccagcgccagcacccccgcccaggcccccaccagcgacagccccgtggccgaggacgccagcagaagaagaccctgcagagcctgcgtggacttcaagacctggatgagaacccagcagaagagagacaccaagttcagagaggactgcccccccgacagagaggagctgggcagacacagctgggccgtgctgcacaccctggccgcctactaccccgacctgcccacccccgagcagcagcaggacatggcccagttcatccacctgttcagcaagttctacccctgcgaggagtgcgccgaggacctgagaaagagactgtgcagaaaccaccccgacaccagaaccagagcctgcttcacccagtggctgtgccacctgcacaacgaggtgaacagaaagctgggcaagcccgacttcgactgcagcaaggtggacgagagatggagagacggctggaaggacggcagctgcgactag

SEQ ID NO: 154414 - DNA, 285 bp, Artificial Sequence
  derived and/or modified sequence
atgagaacccagcagaagagagacaccaagttcagagaggactgcccccccgacagagaggagctgggcagacacagctgggccgtgctgcacaccctggccgcctactaccccgacctgcccacccccgagcagcagcaggacatggcccagttcatccacctgttcagcaagttctacccctgcgaggagtgcgccgaggacctgagaaagagactgtgcagaaaccaccccgacaccagaaccagagcctgcttcaccgtggccgtgccccccgcccagtag

SEQ ID NO: 154415 - protein, 1586 aa, Artificial Sequence
  derived and/or modified sequence
METSASATASEKQEAKSGILEAAGFPDPGKKASPLVVAAAAAAAVAAQGVPQHLLPPFHAPLPIDMRHQEGRYHYEPHSVHGVHGPPALSGSPVISDISLIRLSPHPAGPGESPFNAPHPYVNPHMEHYLRSVHSSPTLSMISAARGLSPADVAQEHLKERGLFGLPAPGTTPSDYYHQMTLVAGHPAPYGDLLMQSGGAASAPHLHDYLNPVDVSRFSSPRVTPRLSRKRALSISPLSDASLDLQRMIRTSPNSLVAYINNSRSSSAASGSYGHLSAGALSPAFTFPHPINPVAYQQILSQQRGLGSAFGHTPPLIQPSPTFLAQQPMALTSINATPTQLSSSSNCLSDTNQNKQSSESAVSSTVNPVAIHKRSKVKTEPEGLRPASPLALTQGQVSGHGSCGCALPLSQEQLADLKEDLDRDDCKQEAEVVIYETNCHWEDCTKEYDTQEQLVHHINNEHIHGEKKEFVCRWQACTREQKPFKAQYMLVVHMRRHTGEKPHKCTFEGCSKAYSRLENLKTHLRSHTGEKPYVCEHEGCNKAFSNASDRAKHQNRTHSNEKPYICKIPGCTKRYTDPSSLRKHVKTVHGPDAHVTKKQRNDVHLRTPLLKENGDSEAGTEPGGPESTEASSTSQAVEDCLHVRAIKTESSGLCQSSPGAQSSCSSEPSPLGSAPNNDSGVEMPGTGPGSLGDLTALDDTPPGADTSALAAPSAGGLQLRKHMTTMHRFEQLKKEKLKSLKDSCSWAGPTPHTRNTKLPPLPGSGSILENFSGSGGGGPAGLLPNPRLSELSASEVTMLSQLQERRDSSTSTVSSAYTVSRRSSGISPYFSSRRSSEASPLGAGRPHNASSADSYDPISTDASRRSSEASQCSGGSGLLNLTPAQQYSLRAKYAAATGGPPPTPLPGLERMSLRTRLALLDAPERTLPAGCPRPLGPRRGSDGPTYGHGHAGAAPAFPHEAPGGGARRASDPVRRPDALSLPRVQRFHSTHNVNPGPLPPCADRRGLRLQSHPSTDGGLARGAYSPRPPSISENVAMEAVAAGVDGAGPEADLGLPEDDLVLPDDVVQYIKAHASGALDEGTGQVYPTESTGFSDNPRLPSPGLHGQRRMVAADSNVGPSAPMLGGCQLGFGAPSSLNKNNMPVQWNEVSSGTVDALASQVKPPPFPQGNLAVVQQKPAFGQYPGYSPQGLQASPGGLDSTQPHLQPRSGAPSQGIPRVNYMQQLRQPVAGSQCPGMTTTMSPHACYGQVHPQLSPSTISGALNQFPQSCSNMPAKPGHLGHPQQTEVAPDPTTMGNRHRELGVPDSALAGVPPPHPVQSYPQQSHHLAASMSQEGYHQVPSLLPARQPGFMEPQTGPMGVATAGFGLVQPRPPLEPSPTGRHRGVRAVQQQLAYARATGHAMAAMPSSQETAEAVPKGAMGNMGSVPPQPPPQDAGGAPDHSMLYYYGQIHMYEQDGGLENLGSCQVMRSQPPQPQACQDSIQPQPLPSPGVNQVSSTVDSQLLEAPQIDFDAIMDDGDHSSLFSGALSPSLLHSLSQNSSRLTTPRNSLTLPSIPAGISNMAVGDMSSMLTSLAEESKFLNMMT

SEQ ID NO: 154416 - DNA, 6780 bp, Artificial Sequence
  derived and/or modified sequence
gattgccacccaggacgatgagcggctgagatggagacgtctgcctcagccactgcctccgagaagcaagaagccaaaagtgggatcctggaggccgctggcttccccgacccgggtaaaaaggcctctcctttggtggtggctgcagcggcagcagcagcggtagctgcccaaggagtgccgcagcatctcttgccaccattccatgcgcccctaccgattgacatgcgacaccaggaaggaaggtaccattacgagcctcattctgtccacggtgtgcacgggccccctgccctcagcggcagccctgtcatctctgacatctccttgatccggctttccccgcacccggctggccctggggagtcccccttcaacgccccccacccgtacgtgaacccccacatggagcactacctccgttctgtgcacagcagccccacgctctccatgatctctgcagccaggggcctcagccccgctgatgtggcccaggagcaccttaaggagaggggactgtttggccttcctgctccaggcaccaccccctcagactattaccaccagatgaccctcgtggcaggccaccccgcgccctacggggacctgctgatgcagagcgggggcgctgccagcgcaccccatctccacgactacctcaaccccgtggacgtgtcccgtttctccagcccgcgggtgacgccccgcctgagccgcaagcgggcgctgtccatctccccactctcagacgccagcctggacctgcagcggatgatccgcacctcacccaactcgctagtggcctacatcaacaactcccgaagcagctcggcggccagcggttcctacgggcatctgtcagcgggtgccctcagcccagccttcaccttcccccaccccatcaaccccgtggcctaccagcagattctgagccagcagaggggtctggggtcagcctttggacacacaccacccctgatccagccctcacccaccttcctggcccagcagcccatggccctcacctccatcaatgccacgcccacccagctcagcagcagcagcaactgtctgagtgacaccaaccagaacaagcagagcagtgagtcggccgtcagcagcaccgtcaaccctgtcgccattcacaagcgcagcaaggtcaagaccgagcctgagggcctgcggccggcctcccctctggcgctgacgcagggccaggtgtctggacacggctcatgtgggtgtgcccttcccctctcccaggagcagctggctgacctcaaggaagatctggacagggatgactgtaagcaggaggctgaggtggtcatctatgagaccaactgccactgggaagactgcaccaaggagtacgacacccaggagcagctggtgcatcacatcaacaacgagcacatccacggggagaagaaggagtttgtgtgccgctggcaggcctgcacgcgggagcagaagcccttcaaggcgcagtacatgctggtggtgcacatgcggcgacacacgggcgagaagccccacaagtgcacgttcgagggctgctcgaaggcctactcccgcctggagaacctgaagacacacctgcggtcccacaccggggagaagccatatgtgtgtgagcacgagggctgcaacaaagccttctccaacgcctcggaccgcgccaagcaccagaatcgcacccactccaacgagaaaccctacatctgcaagatcccaggctgcaccaagagatacacagaccccagctctctccggaagcatgtgaaaacggtccacggcccagatgcccacgtcaccaagaagcagcgcaatgacgtgcacctccgcacaccgctgctcaaagagaatggggacagtgaggccggcacggagcctggcggcccagagagcaccgaggccagcagcaccagccaggccgtggaggactgcctgcacgtcagagccatcaagaccgagagctccgggctgtgtcagtccagccccggggcccagtcgtcctgcagcagcgagccctctcctctgggcagtgcccccaacaatgacagtggcgtggagatgccggggacggggcccgggagcctgggagacctgacggcactggatgacacacccccaggggccgacacctcagccctggctgccccctccgctggtggcctccagctgcgcaaacacatgaccaccatgcaccggttcgagcagctcaagaaggagaagctcaagtcactcaaggattcctgctcatgggccgggccgactccacacacgcggaacaccaagctgcctcccctcccgggaagtggctccatcctggaaaacttcagtggcagtgggggcggcgggcccgcggggctgctgccgaacccgcggctgtcggagctgtccgcgagcgaggtgaccatgctgagccagctgcaggagcgccgcgacagctccaccagcacggtcagctcggcctacaccgtgagccgccgctcctccggcatctccccctacttctccagccgccgctccagcgaggcctcgcccctgggcgccggccgcccgcacaacgcgagctccgctgactcctacgaccccatctccacggacgcgtcgcggcgctcgagcgaggccagccagtgcagcggcggctccgggctgctcaacctcacgccggcgcagcagtacagcctgcgggccaagtacgcggcagccactggcggccccccgcccactccgctgccgggcctggagcgcatgagcctgcggaccaggctggcgctgctggacgcgcccgagcgcacgctgcccgccggctgcccacgcccactggggccgcggcgtggcagcgacgggccgacctatggccacggccacgcgggggctgcgcccgccttcccccacgaggctccaggcggcggagccaggcgggccagcgaccctgtgcggcggcccgatgccctgtccctgccgcgggtgcagcgcttccacagcacccacaacgtgaaccccggcccgctgccgccctgtgccgacaggcgaggcctccgcctgcagagccacccgagcaccgacggcggcctggcccgcggcgcctactcgccccggccgcctagcatcagcgagaacgtggcgatggaggccgtggcggcaggagtggacggcgcggggcccgaggccgacctggggctgccggaggacgacctggtgcttccagacgacgtggtgcagtacatcaaggcgcacgccagtggcgctctggacgagggcaccgggcaggtgtatcccacggaaagcactggcttctctgacaaccccagactacccagcccggggctgcacggccagcgcaggatggtggctgcggactccaacgtgggcccctccgcccctatgctgggaggatgccagttaggctttggggcgccctccagcctgaacaaaaataacatgcctgtgcagtggaatgaggtgagctccggcaccgtagacgccctggccagccaggtgaagcctccaccctttcctcagggcaacctggcggtggtgcagcagaagcctgcctttggccagtacccgggctacagtccgcaaggcctacaggctagccctgggggcctggacagcacgcagccacacctgcagccccgcagcggagccccctcccagggcatccccagggtaaactacatgcagcagctgcgacagccagtggcaggcagccagtgtcctggcatgactaccactatgagcccccatgcctgctatggccaagtccacccccagctgagccccagcaccatcagtggggccctcaaccagttcccccaatcctgcagcaacatgccagccaagccagggcatctggggcaccctcagcagacagaagtggcacctgaccccaccacgatgggcaatcgccacagggaacttggggtccccgattcagccctggctggagtgccaccacctcacccagtccagagctacccacagcagagccatcacctggcagcctccatgagccaggagggctaccaccaggtccccagccttctgcctgcccgccagcctggcttcatggagccccaaacaggcccgatgggggtggctacagcaggctttggcctagtgcagccccggcctcccctcgagcccagccccactggccgccaccgtggggtacgtgctgtgcagcagcagctggcctacgccagggccacaggccatgccatggctgccatgccgtccagtcaggaaacagcagaggctgtgcccaagggagcgatgggcaacatggggtcggtgcctccccagccgcctccgcaggacgcaggtggggccccggaccacagcatgctctactactacggccagatccacatgtacgaacaggatggaggcctggagaacctcgggagctgccaggtcatgcggtcccagccaccacagccacaggcctgtcaggacagcatccagccccagcccttgccctcaccaggggtcaaccaggtgtccagcactgtggactcccagctcctggaggccccccagattgacttcgatgccatcatggatgatggcgatcactcgagtttgttctcgggtgctctgagccccagcctcctccacagcctctcccagaactcctcccgcctcaccaccccccgaaactccttgaccctgccctccatccccgcaggcatcagcaacatggctgtcggggacatgagctccatgctcaccagcctcgccgaggagagcaagttcctgaacatgatgacctagaggcccgagcgcctggtgctgagtgcacccggaggggtcatcgctgcccagagcctggggattccagctgtcttgtctttttccaaaaaagtgttaaataggcttgaggggttgttgcgcaatggccgcttcagatgacagatgttgtaagagaaggtttatgggcatcctctctggtcttttggattattcctcagaacaatgaaaaaagtctccataggacaggaaggaatgcaaaactcatttacacagtgctttccagcctttggtgcttacaggaccgcgctgttccggcttcttcacggctgacattcggctaacgagggattactttggccaaaacctttcaaaggatatgcagaaagatggtagggagcatttgggtttgaatctgaatgctatactggatactctgctccggaaagatgagctttttattctactacttggaaggaaaaggaattcctggtccacctgaattcctctatgaagcctaactcttgaggtctctaacataccttgtcatagaggaaaagcacagattatacctggatgattcaggagcacattctgattccaggtttggtagagctggctcttctactccgtaaagccgagtctgggactggcagcccatccaagtgtatatgaatgaataaagcatccaagtatatatgaatgaataaagtatgtaagtatcaccagaaaaaggaaagaaaaaatgtactccttggggcaagcccagaagctgccctggcctctccagaccgtgtttacagtgtttgcatgtagaatgtagcccttcctgaaaagaagacttgtttctaaatacctcggggctgctggagccgctgtgggttagggatggactgaggcctcgaggagtgagggtgcacccggggcccagcctcaggctgccctagggatctctcagtaggaagaggaagttgcgtgtttacccaatcctgtttctccaatgcaacgtccacccactttaccaccaaaaactccagggcctgacggcagcccggtcccccagcactcaccagcagcccagtgttctccaccaagccacagtgtgcatgcctggtatcctccggattcccttccttctgcccgctgagtcactgggcagagaatgatgacatgtgtaggtggtgtggttgggggtggaaaggggaaggggttgatcctcaggactctgagggagcatcgttgaattttcctgttcagtgtgaccaagacccacctggaaatggaatttggaactggcttcaggagacatcattcctgaacacactgtagggtgaattggtgcatcttccccaccatacacacacacacacacacacacacacacacacacacacacacaccccaaaccttttcatggggaatgtgtggcaaccttgccaaacagcaccactcagagtgtgactctgactgtgaccttggccttaatgaggaacttcttaggagagtttgaggacaaggccaacatcgtcatctgggctcgctgcgtcccagcacatcaaactctgtccagagacaaggccaactgcaaatgaaagccagggaacattgctaagggtctgtggctctgtggtggtgttcatcgccttcctgagataggatttcccttgccagtcccaacctgtatatattctgtacagaagacatccctgaatatactgtaggtgagtcgtccagccaaatttatatctccaaaacatttttagctttttctacatgctatgaattgagatgacatgctcaacttgtaaataagtctttttgtacattaaaaaagtaattttttcataatttatcttgtctatctgcttcccccttgacagtagttaatgagaacctgggcagtaaatttggtgcattcgagcagaaattaggctgtattttttcttaacagtgtcaaaattgactatcccgcctttgccaagaaatgtttaatgctgaggcaaaaaaaaaaaa

SEQ ID NO: 154417 - DNA, 4761 bp, Artificial Sequence
  derived and/or modified sequence
atggaaactagtgcgagtgcaacggcatccgaaaaacaggaggctaaatccggtattctggaagccgcaggatttccagaccccggaaagaaggcctctccacttgtggtggccgccgcagcagccgccgctgtagccgcccagggcgtgccacagcatttgttgccaccttttcacgcacctctgccgatcgacatgcgacaccaggaaggtaggtaccactatgagcctcactctgtgcacggcgtgcacggaccacccgccctgtccggctcgcctgtaatatcagacatctccctgatcagactttccccacaccccgccggccccggggaaagcccatttaatgcaccgcatccctatgtcaacccccacatggagcattacctgaggagtgtgcattcatcgccgacactcagtatgattagtgccgcgcgcgggttgtcgcctgccgacgtggctcaggaacacttaaaggaaaggggactctttggattgccagccccgggtaccacaccctctgactactatcaccagatgaccctggtagctggacatccagctccttatggcgacttgttaatgcagtccggaggcgcggctagtgcccctcatctgcatgactatctgaaccccgtggatgtatcaagattctcttcgccgagagtgacaccccgattaagccgtaagcgagcgctgtcaattagcccgctgagcgacgctagcctggacctccagcgcatgatccgtacttccccaaactctctagttgcctatatcaataacagcaggagctcctcagctgcaagtggatcctatgggcacctcagtgctggcgctctgtccccggcgttcaccttcccgcatccaataaaccccgtggcctatcaacaaattctcagtcaacagaggggtctagggtcggcctttgggcataccccccccttgatccaaccatcccctacgttcctggcacagcaacctatggctttaacatctatcaatgctacacctactcagctctcgtcatcatctaattgtctctctgacacaaatcagaacaagcagtcctccgagagcgccgtttcaagcacagtcaatccggtggcaatacataagagaagcaaggtgaaaacggaacccgagggtctgaggcccgctagtccattagctcttactcaaggccaagtgtccggccacggcagttgtggctgcgctctcccactgtctcaggagcagctggcggacttgaaggaagacctagaccgcgacgattgcaaacaagaagcggaggtagtcatctacgaaactaattgccactgggaggattgcacgaaggaatatgatacacaagaacagctggtccaccacatcaacaatgagcatatccacggagaaaaaaaagaattcgtgtgtaggtggcaggcatgtacccgagagcagaaaccctttaaagctcaatacatgcttgtagtacacatgcggcgccacactggagaaaaaccccataagtgtacgttcgaggggtgttctaaggcctactccaggttggagaacctgaagacacatctcagatcccacactggagagaaaccctatgtatgtgagcacgaggggtgcaataaggcattttccaatgcatcggatcgtgctaagcatcagaatcggacacactccaatgagaagccttacatttgcaaaataccgggctgtacaaagcgttataccgacccgtcctcactaaggaaacacgtgaaaacagtgcacggtccagacgcccacgtgacaaaaaaacagagaaacgacgtgcacttacgcacgcccctgctgaaagaaaatggcgattctgaagcaggcactgaacccggggggccggaatccactgaagcgagctcgactagccaagccgtcgaagactgcctgcacgtgcgggcaatcaaaacagagagcagcgggctttgccagtcatctcctggggcccagtcaagctgttcgtcggagccttcccccttgggatccgcacctaataatgacagtggcgtggaaatgccaggaaccgggcctggatcattgggcgatctgactgctctggatgacacgcccccaggtgctgatacctccgcactcgccgcaccttcagccggggggttacaactccggaagcacatgacgactatgcaccgctttgagcagcttaaaaaggagaagctgaaatccttaaaagactcctgtagttgggcaggtcctaccccacacactcggaacaccaagctgccacccctgcctggaagtggtagcatcctcgagaactttagtgggagcgggggcggtggacccgcggggctgctcccaaaccctcgactgtccgagctctcagcgtctgaagtcaccatgctttcccaactgcaagaaagaagagacagttctactagtacagtttcaagtgcctatacagtgtccaggcgttcctcaggcattagcccctattttagtagccgacgaagcagtgaagctagccccttgggggccggcagaccacacaacgccagctccgccgactcatacgatcctatctccacggatgcgtctcggcgatcttcagaggcttcacagtgcagtggcggcagcggcctgctaaacctaacacctgcccagcagtactctctccgggctaagtacgctgctgccacaggcgggcccccccccacaccactgccagggctggagcggatgtctctgagaacacggttagctctgttagacgcacccgagaggaccctgccagcgggctgccctcgccctctaggacccagacgcgggtctgatggaccaacttatggccacgggcacgcaggagccgcgcctgcatttcctcacgaggccccaggggggggagcaagaagggcgagcgatccagtaagacggcctgatgccttatccttaccacgcgtccagaggtttcacagcacacataacgtgaaccccggacctttgcctccttgtgcagaccgccggggactccgcctgcagagccatccctccacggacggcggactggcgcgaggcgcatactcaccacggccgccctcgataagtgagaatgtcgctatggaggccgttgcagccggcgtggatggcgccggccccgaggccgacttgggccttcccgaagacgacctggtgctgcctgatgatgttgtgcagtatataaaagcacatgcatctggcgctctggatgaagggaccggacaggtgtaccccacagaaagcaccggcttctctgacaatccccgactcccatctcccggcctccacggccagcggcgcatggtcgccgcagactcgaatgtggggccttccgcacccatgctgggcggctgtcagctcggctttggtgccccatccagtttaaataagaacaatatgccagtgcagtggaatgaagtgtcatcaggaacagtggatgcactcgcaagccaggtcaagcccccacctttccctcaggggaatctggccgttgtgcagcagaagccggcctttggccagtatcctggttatagcccgcagggtctgcaagcttctcccggtggcctggatagcacccagccacacctacaaccccggtccggggccccctcacagggtattccaagggtgaattatatgcaacagctgagacagcccgtcgctggctctcaatgtccaggcatgaccaccacaatgagtcctcacgcatgttatggacaagtacatccacagctttcccccagcaccatctcgggggctcttaatcagtttcctcaatcgtgtagcaatatgcccgccaagcctggacacctcggacacccccagcagaccgaggtggctcccgatccaaccacaatgggcaatcgccacagagagctcggcgtaccagactccgccctggcgggggtgccccctccacacccagtccagtcttatccccagcaaagtcaccatctcgctgcctcaatgagtcaggaggggtatcatcaggtccctagcctcctgccagctcgacagccagggtttatggaaccccaaaccggtccgatgggcgtcgccaccgccggtttcggcctagttcaaccccgcccccccctggagccatcgccgaccggtcggcacagaggagttagggccgtacagcaacagctggcttacgcgcgggcaacagggcacgctatggctgccatgccttcatcacaggagaccgccgaggccgttcctaagggggcaatgggaaacatgggttccgtcccaccccagcccccccctcaggacgctggtggcgctcctgaccacagtatgctgtactactacggccagatacacatgtacgagcaagatggcgggctggaaaacttgggaagttgtcaggtcatgcgtagccagcccccgcaaccccaggcctgccaagattcgatccagccccagccgctgcccagccccggcgtcaaccaggtcagctcgaccgttgatagccagctgctggaggccccccagatagactttgatgccatcatggatgacggagaccattcctccttatttagcggcgccttgtcacctagtttactgcatagtctttctcagaattcatcgagactcactactcccaggaatagcctgactctgccgtctattccagccggaatctcaaatatggctgtaggcgacatgtcttctatgctgacttctctggctgaggagagcaaattcctgaatatgatgacatag

SEQ ID NO: 154418 - DNA, 4761 bp, Artificial Sequence
  derived and/or modified sequence
atggaaacctctgcaagtgctacggcctcagaaaagcaggaggctaaatctggaatattagaggccgccgggttccctgatcccggaaagaaggcctcaccattggtggtggccgccgccgccgctgccgcagtcgcggcccagggagttccacagcacctgctccctccctttcacgccccactccctatcgacatgcggcaccaagagggaagataccattacgagccccactctgtgcatggtgtacatggcccccctgcactttccggatctcccgttatctctgacataagccttattcgcctctcgccgcatccggcgggtccgggagaatcccctttcaatgcaccacacccttacgtgaatcctcacatggagcactatctgagaagtgtgcactcgtctcctacccttagcatgatctctgccgccagagggttgtctcccgccgacgtggcacaggagcatctcaaggaaaggggattgttcggtctgcctgctcccgggaccactccttctgattattaccaccaaatgacgctagtcgcagggcatcccgcaccttacggggaccttttgatgcagtctggcggagctgcaagtgctccccatctccacgattatctgaatccggtggatgtgtcacgctttagctccccacgagtgactccgaggttgagtcgcaaacgggcactctccatcagccccctgagtgacgcttccttggatctacaacggatgatacggacaagtccgaattcactcgtggcttatataaacaacagcagatcatccagtgcagcaagcggcagctatggccacttgtccgctggggccctgagcccggcctttacgttccctcatcccattaaccccgtggcatatcagcagatcctcagccagcagaggggactaggaagtgccttcggccatactcccccgctgatccagccatcacccacgtttctggcccagcaacccatggccctgaccagcattaatgcaactcctacccagctcagtagctcctccaactgtttgagcgatacgaaccagaataaacagtcctcagaatcagcagtgtcaagcactgtgaatccagtcgcaatccataaaaggtcgaaagtgaagacagagcctgagggcttgcgcccagcatctcccctggccctgacccaagggcaagtgtccgggcatggatcctgcggctgtgcccttcccctctcacaggaacagcttgcagacctgaaagaggatttggacagagatgactgcaaacaggaggcagaggtagtgatttacgagaccaattgccattgggaggattgcaccaaggaatacgacactcaggaacagttggttcaccacatcaacaacgaacatattcacggagaaaagaaggagttcgtatgccggtggcaagcttgcaccagagagcagaagcctttcaaagcacagtatatgctcgtggtccacatgcgacgccacactggagaaaaaccgcataagtgcacatttgaaggctgctctaaagcctactcccggctggagaatctcaaaactcacctgcgaagccataccggcgaaaaaccgtacgtgtgcgaacacgaagggtgtaacaaagctttcagtaatgcttcagatagggccaagcaccaaaatcggacccactcaaacgagaagccttacatttgcaagattcccgggtgtaccaagcggtataccgatccgagcagtttaaggaaacacgtaaagacagtgcacggaccggacgcccacgttacgaaaaaacaacgtaacgacgtacaccttaggactccattgctgaaagagaacggcgacagcgaagctgggacagagccaggaggccccgaaagtacagaagcgtcttccacctcccaggctgtagaagactgcctgcatgtacgggctattaagaccgaaagcagcggactgtgccaatcttcgccaggcgctcagtcgagctgcagctcagagccttcacccctgggatcagctccaaataacgacagtggtgtggagatgccaggcactgggcctggctccctgggggatcttactgccttggatgatactccacctggagccgacacttccgccttagcggcaccgtctgccggaggtttgcagctgagaaaacacatgaccacgatgcaccgcttcgagcaactgaagaaggagaagctgaagtccctgaaggacagctgctcctgggctgggcccacgcctcatacaagaaacaccaagctgcctcccctgcccggctctggctcaatcctcgagaactttagcggcagtggcggtggaggacccgcaggcctattgcctaatccacggctgagtgaactctccgcaagcgaagttactatgctctctcagttgcaggagaggagagacagctctacaagcacagtgtcaagcgcttatactgtatctcggcgctcctctggtatcagtccttatttttcctctcggcgtagctctgaggctagtcccctgggcgctggacgaccgcataacgcttcaagcgcggactcttatgacccaatcagcacagatgcctccagacgctcatctgaagcttctcagtgtagcggtggaagtggcctccttaatctgacccctgcgcagcaatacagcctgagggccaagtacgccgcagccactgggggcccaccacccacccctcttccaggcctcgagaggatgtctctgcggacacgtctcgcgctacttgacgcgccagaaagaacgctgccagccggctgcccccgtccactgggtcctcgcagggggtctgacgggcccacttatggacacggccacgctggggcggctccagctttcccacacgaggcgcctggaggcggggcgagacgggcatctgacccagtcaggcggccagacgccctcagtctaccacgggtgcagaggtttcatagcacgcataatgtgaaccccggtccgctgcctccctgcgccgaccgaagaggcctgcggctccagtcgcatcccagcactgacggtggactggcgaggggtgcctactctcctcgcccacctagcatctctgagaatgtggcaatggaagccgtcgctgccggcgtggatggcgccggtcctgaagccgacctgggattgccggaggatgacttagttctgccagatgatgtggtgcagtatattaaggcacacgcctccggggcactggacgaaggaaccggccaggtctaccccaccgaatctacggggttttcggataacccaaggctgccctcgcctggactccacggacagcgacgaatggtcgcagccgacagcaatgtgggaccatctgctcccatgttgggtgggtgtcagctgggctttggagccccctcttcactgaacaaaaataatatgccagtacaatggaacgaagtctctagtggcaccgtggacgccttagcctcccaggtaaaacccccaccattccctcagggtaacctcgcggtcgtgcagcagaagcctgcctttggccagtatcccggttatagcccacaaggattgcaggcgtcccccggtgggctcgactcgacccagccgcatcttcaaccacggtccggcgcgccttcacagggaatcccccgggtgaattacatgcagcagctgagacaacctgtcgccggatctcagtgtcccggaatgaccacaacaatgagcccccacgcctgctatggccaggttcatccccagttgtctcccagtaccatctcaggagccctcaatcagttcccccaatcctgttcaaatatgcctgccaagccgggccacctgggccacccacaacaaactgaagtggcaccagatcccactacaatgggaaatcgtcaccgggagctgggcgtgccggactcggctttggctggagtgccaccgccccatccggtccaaagctatccacagcagtcccaccatttagctgcttcgatgtctcaggagggataccaccaggtgccatcccttctgcctgccagacagcctggctttatggagcctcaaacgggcccaatgggggttgctacagccggattcggcttggtccagcctcggccacctttagaacccagtccgaccggcagacacagaggcgtcagggccgtccagcagcagctggcatatgcgagggctaccgggcatgcaatggcggcaatgccatcttcacaggaaacggccgaggctgtgcccaagggtgccatgggaaacatgggttcagtccccccccagcctccacctcaggacgccggaggggcacccgatcattcaatgttgtattactatgggcaaatccacatgtacgaacaagacggcggtctcgagaatctgggcagttgccaggttatgcggagccagccaccccagccacaagcctgccaagactccattcagcctcagcccttaccttcccctggcgtgaatcaggtgagcagcaccgtggactcccagctgctggaggcaccccagatcgatttcgatgctataatggacgatggcgaccatagcagcttatttagcggcgctctctccccctccctcttacactctctaagtcaaaacagctctagactcactacacccagaaactctcttacattaccctcgattcccgccgggatcagcaacatggccgtaggcgatatgtcatccatgctgaccagcctggcggaagaaagtaagtttttgaacatgatgacttag

SEQ ID NO: 154419 - DNA, 3504 bp, Artificial Sequence
  derived and/or modified sequence
gattgccacccaggacgatgagcggctgagatggagacgtctgcctcagccactgcctccgagaagcaagaagccaaaagtgggatcctggaggccgctggcttccccgacccgggtaaaaaggcctctcctttggtggtggctgcagcggcagcagcagcggtagctgcccaaggagtgccgcagcatctcttgccaccattccatgcgcccctaccgattgacatgcgacaccaggaaggaaggtaccattacgagcctcattctgtccacggtgtgcacgggccccctgccctcagcggcagccctgtcatctctgacatctccttgatccggctttccccgcacccggctggccctggggagtcccccttcaacgccccccacccgtacgtgaacccccacatggagcactacctccgttctgtgcacagcagccccacgctctccatgatctctgcagccaggggcctcagccccgctgatgtggcccaggagcaccttaaggagaggggactgtttggccttcctgctccaggcaccaccccctcagactattaccaccagatgaccctcgtggcaggccaccccgcgccctacggggacctgctgatgcagagcgggggcgctgccagcgcaccccatctccacgactacctcaaccccgtggacgtgtcccgtttctccagcccgcgggtgacgccccgcctgagccgcaagcgggcgctgtccatctccccactctcagacgccagcctggacctgcagcggatgatccgcacctcacccaactcgctagtggcctacatcaacaactcccgaagcagctcggcggccagcggttcctacgggcatctgtcagcgggtgccctcagcccagccttcaccttcccccaccccatcaaccccgtggcctaccagcagattctgagccagcagaggggtctggggtcagcctttggacacacaccacccctgatccagccctcacccaccttcctggcccagcagcccatggccctcacctccatcaatgccacgcccacccagctcagcagcagcagcaactgtctgagtgacaccaaccagaacaagcagagcagtgagtcggccgtcagcagcaccgtcaaccctgtcgccattcacaagcgcagcaaggtcaagaccgagcctgagggcctgcggccggcctcccctctggcgctgacgcagggccaggtgtctggacacggctcatgtgggtgtgcccttcccctctcccaggagcagctggctgacctcaaggaagatctggacagggatgactgtaagcaggaggctgaggtggtcatctatgagaccaactgccactgggaagactgcaccaaggagtacgacacccaggagcagctggtgcatcacatcaacaacgagcacatccacggggagaagaaggagtttgtgtgccgctggcaggcctgcacgcgggagcagaagcccttcaaggcgcagtacatgctggtggtgcacatgcggcgacacacgggcgagaagccccacaagtgcacgttcgagggctgctcgaaggcctactcccgcctggagaacctgaagacacacctgcggtcccacaccggggagaagccatatgtgtgtgagcacgagggctgcaacaaagccttctccaacgcctcggaccgcgccaagcaccagaatcgcacccactccaacgagaaaccctacatctgcaagatcccaggctgcaccaagagatacacagaccccagctctctccggaagcatgtgaaaacggtccacggcccagatgcccacgtcaccaagaagcagcgcaatgacgtgcacctccgcacaccgctgctcaaagagaatggggacagtgaggccggcacggagcctggcggcccagagagcaccgaggccagcagcaccagccaggccgtggaggactgcctgcacgtcagagccatcaagaccgagagctccgggctgtgtcagtccagccccggggcccagtcgtcctgcagcagcgagccctctcctctgggcagtgcccccaacaatgacagtggcgtggagatgccggggacggggcccgggagcctgggagacctgacggcactggatgacacacccccaggggccgacacctcagccctggctgccccctccgctggtggcctccagctgcgcaaacacatgaccaccatgcaccggttcgagcagctcaagaaggagaagctcaagtcactcaaggattcctgctcatgggccgggccgactccacacacgcggaacaccaagctgcctcccctcccgggaagtggctccatcctggaaaacttcagtggcagtgggggcggcgggcccgcggggctgctgccgaacccgcggctgtcggagctgtccgcgagcgaggtgaccatgctgagccagctgcaggagcgccgcgacagctccaccagcacggtcagctcggcctacaccgtgagccgccgctcctccggcatctccccctacttctccagccgccgctccagcgaggcctcgcccctgggcgccggccgcccgcacaacgcgagctccgctgactcctacgaccccatctccacggacgcgtcgcggcgctcgagcgaggccagccagtgcagcggcggctccgggctgctcaacctcacgccggcgcagcagtacagcctgcgggccaagtacgcggcagccactggcggccccccgcccactccgctgccgggcctggagcgcatgagcctgcggaccaggctggcgctgctggacgcgcccgagcgcacgctgcccgccggctgcccacgcccactggggccgcggcgtggcagcgacgggccgacctatggccacggccacgcgggggctgcgcccgccttcccccacgaggctccaggcggcggagccaggcgggccagcgaccctgtgcggcggcccgatgccctgtccctgccgcgggtgcagcgcttccacagcacccacaacgtgaaccccggcccgctgccgccctgtgccgacaggcgaggcctccgcctgcagagccacccgagcaccgacggcggcctggcccgcggcgcctactcgccccggccgcctagcatcagcgagaacgtggcgatggaggccgtggcggcaggagtggacggcgcggggcccgaggccgacctggggctgccggaggacgacctggtgcttccagacgacgtggtgcagtacatcaaggcgcacgccagtggcgctctggacgagggcaccgggcaggtgtatcccacggaaagcactggcttctctgacaaccccagactacccagcccggggctgcacggccagcgcaggatggtggctgcggactccaacgtgggcccctccgcccctatgctgggaggatgccagttaggctttggggcgccctccagcctgaacaaaaataacatgcctgtgcagtggaatgaggcatcagcaacatggctgtcggggacatga

SEQ ID NO: 154420 - DNA, 6768 bp, Artificial Sequence
  derived and/or modified sequence
gattgccacccaggacgatgagcggctgagatggagacgtctgcctcagccactgcctccgagaagcaagaagccaaaagtgggatcctggaggccgctggcttccccgacccgggtaaaaaggcctctcctttggtggtggctgcagcggcagcagcagcggtagctgcccaaggagtgccgcagcatctcttgccaccattccatgcgcccctaccgattgacatgcgacaccaggaaggaaggtaccattacgagcctcattctgtccacggtgtgcacgggccccctgccctcagcggcagccctgtcatctctgacatctccttgatccggctttccccgcacccggctggccctggggagtcccccttcaacgccccccacccgtacgtgaacccccacatggagcactacctccgttctgtgcacagcagccccacgctctccatgatctctgcagccaggggcctcagccccgctgatgtggcccaggagcaccttaaggagaggggactgtttggccttcctgctccaggcaccaccccctcagactattaccaccagatgaccctcgtggcaggccaccccgcgccctacggggacctgctgatgcagagcgggggcgctgccagcgcaccccatctccacgactacctcaaccccgtggacgtgtcccgtttctccagcccgcgggtgacgccccgcctgagccgcaagcgggcgctgtccatctccccactctcagacgccagcctggacctgcagcggatgatccgcacctcacccaactcgctagtggcctacatcaacaactcccgaagcagctcggcggccagcggttcctacgggcatctgtcagcgggtgccctcagcccagccttcaccttcccccaccccatcaaccccgtggcctaccagcagattctgagccagcagaggggtctggggtcagcctttggacacacaccacccctgatccagccctcacccaccttcctggcccagcagcccatggccctcacctccatcaatgccacgcccacccagctcagcagcagcagcaactgtctgagtgacaccaaccagaacaagcagagcagtgagtcggccgtcagcagcaccgtcaaccctgtcgccattcacaagcgcagcaaggtcaagaccgagcctgagggcctgcggccggcctcccctctggcgctgacgcagggccaggtgtctggacacggctcatgtgggtgtgcccttcccctctcccaggagcagctggctgacctcaaggaagatctggacagggatgactgtaagcaggaggctgaggtggtcatctatgagaccaactgccactgggaagactgcaccaaggagtacgacacccaggagcagctggtgcatcacatcaacaacgagcacatccacggggagaagaaggagtttgtgtgccgctggcaggcctgcacgcgggagcagaagcccttcaaggcgcagtacatgctggtggtgcacatgcggcgacacacgggcgagaagccccacaagtgcacgttcgagggctgctcgaaggcctactcccgcctggagaacctgaagacacacctgcggtcccacaccggggagaagccatatgtgtgtgagcacgagggctgcaacaaagccttctccaacgcctcggaccgcgccaagcaccagaatcgcacccactccaacgagaaaccctacatctgcaagatcccaggctgcaccaagagatacacagaccccagctctctccggaagcatgtgaaaacggtccacggcccagatgcccacgtcaccaagaagcagcgcaatgacgtgcacctccgcacaccgctgctcaaagagaatggggacagtgaggccggcacggagcctggcggcccagagagcaccgaggccagcagcaccagccaggccgtggaggactgcctgcacgtcagagccatcaagaccgagagctccgggctgtgtcagtccagccccggggcccagtcgtcctgcagcagcgagccctctcctctgggcagtgcccccaacaatgacagtggcgtggagatgccggggacggggcccgggagcctgggagacctgacggcactggatgacacacccccaggggccgacacctcagccctggctgccccctccgctggtggcctccagctgcgcaaacacatgaccaccatgcaccggttcgagcagctcaagaaggagaagctcaagtcactcaaggattcctgctcatgggccgggccgactccacacacgcggaacaccaagctgcctcccctcccgggaagtggctccatcctggaaaacttcagtggcagtgggggcggcgggcccgcggggctgctgccgaacccgcggctgtcggagctgtccgcgagcgaggtgaccatgctgagccagctgcaggagcgccgcgacagctccaccagcacggtcagctcggcctacaccgtgagccgccgctcctccggcatctccccctacttctccagccgccgctccagcgaggcctcgcccctgggcgccggccgcccgcacaacgcgagctccgctgactcctacgaccccatctccacggacgcgtcgcggcgctcgagcgaggccagccagtgcagcggcggctccgggctgctcaacctcacgccggcgcagcagtacagcctgcgggccaagtacgcggcagccactggcggccccccgcccactccgctgccgggcctggagcgcatgagcctgcggaccaggctggcgctgctggacgcgcccgagcgcacgctgcccgccggctgcccacgcccactggggccgcggcgtggcagcgacgggccgacctatggccacggccacgcgggggctgcgcccgccttcccccacgaggctccaggcggcggagccaggcgggccagcgaccctgtgcggcggcccgatgccctgtccctgccgcgggtgcagcgcttccacagcacccacaacgtgaaccccggcccgctgccgccctgtgccgacaggcgaggcctccgcctgcagagccacccgagcaccgacggcggcctggcccgcggcgcctactcgccccggccgcctagcatcagcgagaacgtggcgatggaggccgtggcggcaggagtggacggcgcggggcccgaggccgacctggggctgccggaggacgacctggtgcttccagacgacgtggtgcagtacatcaaggcgcacgccagtggcgctctggacgagggcaccgggcaggtgtatcccacggaaagcactggcttctctgacaaccccagactacccagcccggggctgcacggccagcgcaggatggtggctgcggactccaacgtgggcccctccgcccctatgctgggaggatgccagttaggctttggggcgccctccagcctgaacaaaaataacatgcctgtgcagtggaatgaggtgagctccggcaccgtagacgccctggccagccaggtgaagcctccaccctttcctcagggcaacctggcggtggtgcagcagaagcctgcctttggccagtacccgggctacagtccgcaaggcctacaggctagccctgggggcctggacagcacgcagccacacctgcagccccgcagcggagccccctcccagggcatccccagggtaaactacatgcagcagctgcgacagccagtggcaggcagccagtgtcctggcatgactaccactatgagcccccatgcctgctatggccaagtccacccccagctgagccccagcaccatcagtggggccctcaaccagttcccccaatcctgcagcaacatgccagccaagccagggcatctggggcaccctcagcagacagaagtggcacctgaccccaccacgatgggcaatcgccacagggaacttggggtccccgattcagccctggctggagtgccaccacctcacccagtccagagctacccacagcagagccatcacctggcagcctccatgagccaggagggctaccaccaggtccccagccttctgcctgcccgccagcctggcttcatggagccccaaacaggcccgatgggggtggctacagcaggctttggcctagtgcagccccggcctcccctcgagcccagccccactggccgccaccgtggggtacgtgctgtgcagcagcagctggcctacgccagggccacaggccatgccatggctgccatgccgtccagtcaggaaacagcagaggctgtgcccaagggagcgatgggcaacatggggtcggtgcctccccagccgcctccgcaggacgcaggtggggccccggaccacagcatgctctactactacggccagatccacatgtacgaacaggatggaggcctggagaacctcgggagctgccaggtcatgcggtcccagccaccacagccacaggcctgtcaggacagcatccagccccagcccttgccctcaccaggggtcaaccaggtgtccagcactgtggactcccagctcctggaggccccccagattgacttcgatgccatcatggatgatggcgatcactcgagtttgttctcgggtgctctgagccccagcctcctccacagcctctcccagaactcctcccgcctcaccaccccccgaaactccttgaccctgccctccatccccgcaggcatcagcaacatggctgtcggggacatgagctccatgctcaccagcctcgccgaggagagcaagttcctgaacatgatgacctagaggcccgagcgcctggtgctgagtgcacccggaggggtcatcgctgcccagagcctggggattccagctgtcttgtctttttccaaaaaagtgttaaataggcttgaggggttgttgcgcaatggccgcttcagatgacagatgttgtaagagaaggtttatgggcatcctctctggtcttttggattattcctcagaacaatgaaaaaagtctccataggacaggaaggaatgcaaaactcatttacacagtgctttccagcctttggtgcttacaggaccgcgctgttccggcttcttcacggctgacattcggctaacgagggattactttggccaaaacctttcaaaggatatgcagaaagatggtagggagcatttgggtttgaatctgaatgctatactggatactctgctccggaaagatgagctttttattctactacttggaaggaaaaggaattcctggtccacctgaattcctctatgaagcctaactcttgaggtctctaacataccttgtcatagaggaaaagcacagattatacctggatgattcaggagcacattctgattccaggtttggtagagctggctcttctactccgtaaagccgagtctgggactggcagcccatccaagtgtatatgaatgaataaagcatccaagtatatatgaatgaataaagtatgtaagtatcaccagaaaaaggaaagaaaaaatgtactccttggggcaagcccagaagctgccctggcctctccagaccgtgtttacagtgtttgcatgtagaatgtagcccttcctgaaaagaagacttgtttctaaatacctcggggctgctggagccgctgtgggttagggatggactgaggcctcgaggagtgagggtgcacccggggcccagcctcaggctgccctagggatctctcagtaggaagaggaagttgcgtgtttacccaatcctgtttctccaatgcaacgtccacccactttaccaccaaaaactccagggcctgacggcagcccggtcccccagcactcaccagcagcccagtgttctccaccaagccacagtgtgcatgcctggtatcctccggattcccttccttctgcccgctgagtcactgggcagagaatgatgacatgtgtaggtggtgtggttgggggtggaaaggggaaggggttgatcctcaggactctgagggagcatcgttgaattttcctgttcagtgtgaccaagacccacctggaaatggaatttggaactggcttcaggagacatcattcctgaacacactgtagggtgaattggtgcatcttccccaccatacacacacacacacacacacacacacacacacacacacacacaccccaaaccttttcatggggaatgtgtggcaaccttgccaaacagcaccactcagagtgtgactctgactgtgaccttggccttaatgaggaacttcttaggagagtttgaggacaaggccaacatcgtcatctgggctcgctgcgtcccagcacatcaaactctgtccagagacaaggccaactgcaaatgaaagccagggaacattgctaagggtctgtggctctgtggtggtgttcatcgccttcctgagataggatttcccttgccagtcccaacctgtatatattctgtacagaagacatccctgaatatactgtaggtgagtcgtccagccaaatttatatctccaaaacatttttagctttttctacatgctatgaattgagatgacatgctcaacttgtaaataagtctttttgtacattaaaaaagtaattttttcataatttatcttgtctatctgcttcccccttgacagtagttaatgagaacctgggcagtaaatttggtgcattcgagcagaaattaggctgtattttttcttaacagtgtcaaaattgactatcccgcctttgccaagaaatgtttaatgctgaggc

SEQ ID NO: 154421 - DNA, 6799 bp, Artificial Sequence
  derived and/or modified sequence
tgctgctttaccgacacatcaaagagcaaggattgccacccaggacgatgagcggctgagatggagacgtctgcctcagccactgcctccgagaagcaagaagccaaaagtgggatcctggaggccgctggcttccccgacccgggtaaaaaggcctctcctttggtggtggctgcagcggcagcagcagcggtagctgcccaaggagtgccgcagcatctcttgccaccattccatgcgcccctaccgattgacatgcgacaccaggaaggaaggtaccattacgagcctcattctgtccacggtgtgcacgggccccctgccctcagcggcagccctgtcatctctgacatctccttgatccggctttccccgcacccggctggccctggggagtcccccttcaacgccccccacccgtacgtgaacccccacatggagcactacctccgttctgtgcacagcagccccacgctctccatgatctctgcagccaggggcctcagccccgctgatgtggcccaggagcaccttaaggagaggggactgtttggccttcctgctccaggcaccaccccctcagactattaccaccagatgaccctcgtggcaggccaccccgcgccctacggggacctgctgatgcagagcgggggcgctgccagcgcaccccatctccacgactacctcaaccccgtggacgtgtcccgtttctccagcccgcgggtgacgccccgcctgagccgcaagcgggcgctgtccatctccccactctcagacgccagcctggacctgcagcggatgatccgcacctcacccaactcgctagtggcctacatcaacaactcccgaagcagctcggcggccagcggttcctacgggcatctgtcagcgggtgccctcagcccagccttcaccttcccccaccccatcaaccccgtggcctaccagcagattctgagccagcagaggggtctggggtcagcctttggacacacaccacccctgatccagccctcacccaccttcctggcccagcagcccatggccctcacctccatcaatgccacgcccacccagctcagcagcagcagcaactgtctgagtgacaccaaccagaacaagcagagcagtgagtcggccgtcagcagcaccgtcaaccctgtcgccattcacaagcgcagcaaggtcaagaccgagcctgagggcctgcggccggcctcccctctggcgctgacgcagggccaggtgtctggacacggctcatgtgggtgtgcccttcccctctcccaggagcagctggctgacctcaaggaagatctggacagggatgactgtaagcaggaggctgaggtggtcatctatgagaccaactgccactgggaagactgcaccaaggagtacgacacccaggagcagctggtgcatcacatcaacaacgagcacatccacggggagaagaaggagtttgtgtgccgctggcaggcctgcacgcgggagcagaagcccttcaaggcgcagtacatgctggtggtgcacatgcggcgacacacgggcgagaagccccacaagtgcacgttcgagggctgctcgaaggcctactcccgcctggagaacctgaagacacacctgcggtcccacaccggggagaagccatatgtgtgtgagcacgagggctgcaacaaagccttctccaacgcctcggaccgcgccaagcaccagaatcgcacccactccaacgagaaaccctacatctgcaagatcccaggctgcaccaagagatacacagaccccagctctctccggaagcatgtgaaaacggtccacggcccagatgcccacgtcaccaagaagcagcgcaatgacgtgcacctccgcacaccgctgctcaaagagaatggggacagtgaggccggcacggagcctggcggcccagagagcaccgaggccagcagcaccagccaggccgtggaggactgcctgcacgtcagagccatcaagaccgagagctccgggctgtgtcagtccagccccggggcccagtcgtcctgcagcagcgagccctctcctctgggcagtgcccccaacaatgacagtggcgtggagatgccggggacggggcccgggagcctgggagacctgacggcactggatgacacacccccaggggccgacacctcagccctggctgccccctccgctggtggcctccagctgcgcaaacacatgaccaccatgcaccggttcgagcagctcaagaaggagaagctcaagtcactcaaggattcctgctcatgggccgggccgactccacacacgcggaacaccaagctgcctcccctcccgggaagtggctccatcctggaaaacttcagtggcagtgggggcggcgggcccgcggggctgctgccgaacccgcggctgtcggagctgtccgcgagcgaggtgaccatgctgagccagctgcaggagcgccgcgacagctccaccagcacggtcagctcggcctacaccgtgagccgccgctcctccggcatctccccctacttctccagccgccgctccagcgaggcctcgcccctgggcgccggccgcccgcacaacgcgagctccgctgactcctacgaccccatctccacggacgcgtcgcggcgctcgagcgaggccagccagtgcagcggcggctccgggctgctcaacctcacgccggcgcagcagtacagcctgcgggccaagtacgcggcagccactggcggccccccgcccactccgctgccgggcctggagcgcatgagcctgcggaccaggctggcgctgctggacgcgcccgagcgcacgctgcccgccggctgcccacgcccactggggccgcggcgtggcagcgacgggccgacctatggccacggccacgcgggggctgcgcccgccttcccccacgaggctccaggcggcggagccaggcgggccagcgaccctgtgcggcggcccgatgccctgtccctgccgcgggtgcagcgcttccacagcacccacaacgtgaaccccggcccgctgccgccctgtgccgacaggcgaggcctccgcctgcagagccacccgagcaccgacggcggcctggcccgcggcgcctactcgccccggccgcctagcatcagcgagaacgtggcgatggaggccgtggcggcaggagtggacggcgcggggcccgaggccgacctggggctgccggaggacgacctggtgcttccagacgacgtggtgcagtacatcaaggcgcacgccagtggcgctctggacgagggcaccgggcaggtgtatcccacggaaagcactggcttctctgacaaccccagactacccagcccggggctgcacggccagcgcaggatggtggctgcggactccaacgtgggcccctccgcccctatgctgggaggatgccagttaggctttggggcgccctccagcctgaacaaaaataacatgcctgtgcagtggaatgaggtgagctccggcaccgtagacgccctggccagccaggtgaagcctccaccctttcctcagggcaacctggcggtggtgcagcagaagcctgcctttggccagtacccgggctacagtccgcaaggcctacaggctagccctgggggcctggacagcacgcagccacacctgcagccccgcagcggagccccctcccagggcatccccagggtaaactacatgcagcagctgcgacagccagtggcaggcagccagtgtcctggcatgactaccactatgagcccccatgcctgctatggccaagtccacccccagctgagccccagcaccatcagtggggccctcaaccagttcccccaatcctgcagcaacatgccagccaagccagggcatctggggcaccctcagcagacagaagtggcacctgaccccaccacgatgggcaatcgccacagggaacttggggtccccgattcagccctggctggagtgccaccacctcacccagtccagagctacccacagcagagccatcacctggcagcctccatgagccaggagggctaccaccaggtccccagccttctgcctgcccgccagcctggcttcatggagccccaaacaggcccgatgggggtggctacagcaggctttggcctagtgcagccccggcctcccctcgagcccagccccactggccgccaccgtggggtacgtgctgtgcagcagcagctggcctacgccagggccacaggccatgccatggctgccatgccgtccagtcaggaaacagcagaggctgtgcccaagggagcgatgggcaacatggggtcggtgcctccccagccgcctccgcaggacgcaggtggggccccggaccacagcatgctctactactacggccagatccacatgtacgaacaggatggaggcctggagaacctcgggagctgccaggtcatgcggtcccagccaccacagccacaggcctgtcaggacagcatccagccccagcccttgccctcaccaggggtcaaccaggtgtccagcactgtggactcccagctcctggaggccccccagattgacttcgatgccatcatggatgatggcgatcactcgagtttgttctcgggtgctctgagccccagcctcctccacagcctctcccagaactcctcccgcctcaccaccccccgaaactccttgaccctgccctccatccccgcaggcatcagcaacatggctgtcggggacatgagctccatgctcaccagcctcgccgaggagagcaagttcctgaacatgatgacctagaggcccgagcgcctggtgctgagtgcacccggaggggtcatcgctgcccagagcctggggattccagctgtcttgtctttttccaaaaaagtgttaaataggcttgaggggttgttgcgcaatggccgcttcagatgacagatgttgtaagagaaggtttatgggcatcctctctggtcttttggattattcctcagaacaatgaaaaaagtctccataggacaggaaggaatgcaaaactcatttacacagtgctttccagcctttggtgcttacaggaccgcgctgttccggcttcttcacggctgacattcggctaacgagggattactttggccaaaacctttcaaaggatatgcagaaagatggtagggagcatttgggtttgaatctgaatgctatactggatactctgctccggaaagatgagctttttattctactacttggaaggaaaaggaattcctggtccacctgaattcctctatgaagcctaactcttgaggtctctaacataccttgtcatagaggaaaagcacagattatacctggatgattcaggagcacattctgattccaggtttggtagagctggctcttctactccgtaaagccgagtctgggactggcagcccatccaagtgtatatgaatgaataaagcatccaagtatatatgaatgaataaagtatgtaagtatcaccagaaaaaggaaagaaaaaatgtactccttggggcaagcccagaagctgccctggcctctccagaccgtgtttacagtgtttgcatgtagaatgtagcccttcctgaaaagaagacttgtttctaaatacctcggggctgctggagccgctgtgggttagggatggactgaggcctcgaggagtgagggtgcacccggggcccagcctcaggctgccctagggatctctcagtaggaagaggaagttgcgtgtttacccaatcctgtttctccaatgcaacgtccacccactttaccaccaaaaactccagggcctgacggcagcccggtcccccagcactcaccagcagcccagtgttctccaccaagccacagtgtgcatgcctggtatcctccggattcccttccttctgcccgctgagtcactgggcagagaatgatgacatgtgtaggtggtgtggttgggggtggaaaggggaaggggttgatcctcaggactctgagggagcatcgttgaattttcctgttcagtgtgaccaagacccacctggaaatggaatttggaactggcttcaggagacatcattcctgaacacactgtagggtgaattggtgcatcttccccaccatacacacacacacacacacacacacacacacacacacacacacaccccaaaccttttcatggggaatgtgtggcaaccttgccaaacagcaccactcagagtgtgactctgactgtgaccttggccttaatgaggaacttcttaggagagtttgaggacaaggccaacatcgtcatctgggctcgctgcgtcccagcacatcaaactctgtccagagacaaggccaactgcaaatgaaagccagggaacattgctaagggtctgtggctctgtggtggtgttcatcgccttcctgagataggatttcccttgccagtcccaacctgtatatattctgtacagaagacatccctgaatatactgtaggtgagtcgtccagccaaatttatatctccaaaacatttttagctttttctacatgctatgaattgagatgacatgctcaacttgtaaataagtctttttgtacattaaaaaagtaattttttcataatttatcttgtctatctgcttcccccttgacagtagttaatgagaacctgggcagtaaatttggtgcattcgagcagaaattaggctgtattttttcttaacagtgtcaaaattgactatcccgcctttgccaagaaatgtttaatgctgaggca

SEQ ID NO: 154422 - DNA, 4761 bp, Artificial Sequence
  derived and/or modified sequence
atggagaccagcgccagcgccacagccagcgagaagcaggaggccaagagcggcatcctggaggccgccggcttcccagaccccgggaagaaggccagccccctggtggtggccgctgctgctgctgctgctgtggccgcccagggcgtgccccagcacctgctgccccccttccacgcccccctgcccatcgacatgaggcaccaggagggccgctaccactatgagccccacagcgtgcatggagtgcacggccccccagccctgagcggcagccctgtgatcagtgacatcagcctcatccggctgagcccccaccctgctggccctggagagagccccttcaatgccccccacccctacgtgaacccccacatggagcactacctgcggtctgtgcacagcagccccaccctgtccatgatctctgctgcccggggcctgagccctgcagatgtggcccaggagcacctgaaggagcggggcctgtttggcctgcctgcccctggcaccacccccagcgactactaccaccagatgaccctggtggccggccacccagccccctacggggacctgctgatgcagagcggcggggccgccagcgccccccacctgcatgactacctgaaccctgtggatgtgagccgcttcagcagcccccgggtgaccccccggctgagcaggaagagggccctgagcatcagccccctgagtgatgccagcctggacctgcagaggatgatccgcaccagccccaacagcctggtggcctacatcaacaacagccgcagcagcagcgctgccagcggcagctatggccacctgtctgctggggccctgagccctgccttcaccttcccccaccccatcaaccctgtggcctaccagcagatcctgagccagcagaggggcctgggcagcgccttcggccacaccccacccctcatccagcccagccccaccttcctggcccagcagcccatggccctgaccagcatcaatgccacccccacccagctgagcagcagcagcaactgcctgagtgacaccaaccagaacaagcagagcagcgagagcgctgtgagcagcacagtgaaccctgtggccatccacaagaggagcaaggtgaagacagagcctgagggcctgcggcctgccagccccctggccctgacccagggccaggtgtctggccacggcagctgtggctgtgccctgcccctgagccaggagcagctggccgacctgaaggaggacctggacagagatgactgcaagcaggaggccgaggtggtgatctatgagaccaactgccactgggaggactgcaccaaggagtatgacacccaggagcagctggtgcaccacatcaacaatgagcacatccacggggagaagaaggagtttgtgtgccgctggcaggcctgcacccgggagcagaagcccttcaaggcccagtacatgctggtggtgcacatgagaagacacactggagagaagccccacaagtgcacctttgagggctgcagcaaggcctacagccggctggagaacctgaagacccacctgcggagccacactggagagaagccctacgtgtgtgaacatgagggctgcaacaaggccttcagcaatgccagtgaccgggccaagcaccagaacagaacccacagcaatgagaagccctacatctgcaagatccctggctgcaccaagcgctacacagaccccagcagcctgaggaagcacgtgaagacagtgcacggcccagatgcccacgtgaccaagaagcagagaaatgatgtgcacctgcggacccccctgctgaaggaaaatggagacagcgaggccggcacagagcccggcggccctgagagcacagaggccagcagcaccagccaggccgtggaggactgcctgcacgtgcgggccatcaagacagagagcagcggcctgtgccagagcagccctggggcccagagcagctgcagcagcgagcccagccccctgggcagcgcccccaacaatgattctggagtggagatgcctggcaccggccctggcagcctgggggacctgacagccctggatgacaccccacctggagctgacaccagcgccctggccgcccccagcgctgggggcctgcagctgaggaagcacatgaccaccatgcacagatttgagcagctgaagaaggagaagctgaagagcctgaaggacagctgctcctgggccggccccaccccccacaccaggaacaccaagctgccccccctgcccggcagcggcagcatcctggagaacttcagcggcagcggcggcggcggccctgctggcctgctgcccaacccccggctgtctgagctgagcgccagcgaggtgaccatgctgagccagctgcaggagcggcgggacagcagcaccagcacagtgtcctctgcctacacagtgtccagaagaagcagcggcatcagcccctacttcagcagcagaagaagcagcgaggccagccccctgggcgccggccggccccacaatgccagcagcgctgacagctatgaccccatcagcacagatgccagccgccgcagcagcgaggccagccagtgcagcggcggcagcggcctgctgaacctgaccccagcccagcagtacagcctgcgggccaagtatgctgctgccactggaggccccccacccacccccctgcccggcctggagaggatgagcctgcggacccggctggccctgctggatgcccctgagaggaccctgcctgctggctgcccccggcccctgggcccccggcggggcagtgatggccccacctacggccacggccatgctggagctgccccagccttcccccatgaggcccctgggggcggggcccggcgggccagtgaccctgtgcggcggccagatgccctgagcctgccccgggtgcagcgcttccacagcacccacaacgtgaaccctggccccctgcccccctgtgccgaccggcggggcctgcggctgcagagccaccccagcacagatggcggcctggcccggggggcctacagcccccggccccccagcatcagtgaaaatgtggccatggaggccgtggccgccggcgtggatggagctggccctgaggccgacctgggcctgcctgaagatgacctggtgctgcctgatgatgtggtgcagtacatcaaggcccacgccagcggggccctggatgagggcaccggccaggtgtaccccacagagagcacaggcttcagtgacaacccccggctgcccagccctggcctgcacggccagaggaggatggtggccgctgacagcaatgtgggccccagcgcccccatgctgggcggctgccagctgggctttggagcccccagcagcctgaacaagaacaacatgcctgtgcagtggaatgaggtgtcctctggaacagtggatgccctggccagccaggtgaagcccccacccttcccccagggcaacctggccgtggtgcagcagaagccagccttcggccagtacccaggctacagcccccagggcctgcaggccagccctgggggcctggacagcacccagccccacctgcagcccaggtctggggcccccagccagggcatcccccgggtgaactacatgcagcagctgcggcagcctgtggccggcagccagtgccccggcatgaccaccaccatgagcccccacgcctgctacggccaggtgcacccccagctgagccccagcaccatcagcggggccctgaaccagttcccccagagctgcagcaacatgcctgccaagccaggccacctgggccacccccagcagacagaggtggccccagaccccaccaccatgggcaacagacaccgggagctgggcgtgcctgattctgccctggccggcgtgcccccaccccaccctgtgcagagctacccccagcagagccaccacctggccgcctccatgagccaggagggctaccaccaggtgcccagcctgctgcctgcccggcagcccggcttcatggagccccagacaggccccatgggcgtggccacagctggcttcggcctggtgcagcccaggcctcccctggagcccagccccaccggccgccacagaggagtgcgggctgtgcagcagcagctggcctatgcccgggccactggacatgccatggccgccatgcccagcagccaggagacagctgaggccgtgcccaagggggccatgggcaacatgggctctgtgcccccccagcccccaccccaggatgctgggggcgccccagaccacagcatgctgtactactacggccagatccacatgtatgagcaggacggcggcctggagaacctgggcagctgccaggtgatgaggagccagcccccccagccccaggcctgccaggacagcatccagccccagcccctgcccagccctggggtgaaccaggtgagcagcacagtggacagccagctgctggaggccccccagattgactttgatgccatcatggatgatggagaccacagcagcctcttcagcggggccctgagccccagcctgctgcacagcctgagccagaacagcagccggctgaccacccccaggaacagcctgaccctgcccagcatcccagctggcatcagcaacatggctgtgggggacatgagctccatgctgaccagcctggccgaggagagcaagttcctgaacatgatgacctag

SEQ ID NO: 154423 - DNA, 4761 bp, Artificial Sequence
  derived and/or modified sequence
atggagaccagcgccagcgccaccgccagcgagaagcaggaggccaagtccggcatcctggaggctgcgggatttccagaccctggcaagaaggctagccctttggttgttgcagccgctgcggcagccgccgtcgctgcccagggcgtgcctcagcacttgctgccaccttttcacgctccattgccaattgacatgaggcaccaggagggccggtaccactatgagccccattccgtgcatggagtgcacggcccgccggccttgtccggcagtcccgtcataagcgatattagtttgatccgcctgtcgccccacccagcaggtcctggtgagtctcctttcaacgcgccacacccatacgttaaccctcacatggagcattacctccggtctgtgcattcgtcacctaccctatccatgattagtgcagcaaggggtttgtctcccgccgatgttgcccaggagcacctcaaagagcggggcctgtttggtctcccggcgcctggcactactccttcggactactatcatcagatgacactggttgccgggcatcccgctccctatggcgacttactgatgcagtccggaggggctgcatcagcaccccatctccacgactatctgaaccccgtcgacgttagcaggtttagctctcctagagtgactcccagattatccagaaagcgcgccttaagcatctcgcctctatcggacgcatctctcgacttacaacggatgattcgaacctcgcctaattccctggttgcctacataaacaactccaggagctcatctgctgccagcggaagttatggacatctttccgctggagctctctctcctgcctttacttttccacatcctatcaatccggtggcataccagcaaattctatcacaacagaggggcctcggcagcgcttttggccatactcctccgttgatccagccgtctccgacatttttggctcaacagccgatggctttgacaagcatcaacgcaacaccgacccagctgagttccagtagcaattgcctttcagatactaatcagaataaacagagtagtgaaagcgcagtcagttccactgtaaacccagtcgctatccacaaacggtctaaagtaaaaacggagccagaaggccttcggccagcatctccattggccctgacccagggccaggtgtctggccatggcagttgcgggtgtgctctgcctctgagtcaggaacaactagctgacctgaaggaagacttggacagagacgattgcaagcaggaggccgaggtggtaatctacgaaacaaactgccattgggaggattgcacaaaggaatacgatacacaggaacaactggttcaccacatcaataatgaacacatacatggggagaaaaaagaattcgtctgtcggtggcaagcttgtacccgagaacagaaaccctttaaagctcaatacatgctggtcgtccatatgagaaggcacaccggggagaaaccccataagtgtacattcgaaggttgcagcaaagcttatagcagactcgaaaatctgaagacgcacctgcgttcacataccggggaaaagccatacgtatgtgagcacgaaggctgcaacaaggcttttagcaacgcatcggatagagcaaagcatcaaaaccgcacccactctaacgaaaaaccctatatctgcaagatcccaggttgcacaaagagatataccgatccgtcttctctgagaaagcacgtgaaaacagtacatggtccagatgcacacgttacgaaaaaacagaggaatgacgtccatctacgaactcccctgctgaaagagaacggggactctgaggcaggcactgagccgggaggacccgagagcactgaggctagcagtacttcacaggctgtagaggactgcctgcatgtacgggccataaaaaccgagtcaagcggcctatgtcaatccagccccggcgcccagagctcttgcagcagcgaaccctccccactcggatccgccccaaataacgattctggggtagagatgccgggtacagggcctgggtcactcggtgatctgaccgcgttggatgatacccctcccggagctgatacctccgccttagcagcccctagcgctggaggcctgcagctacgaaaacatatgacaactatgcatcggttcgaacaattaaagaaggagaaactcaagtctttgaaggatagttgcagttgggcaggacccacccctcacaccaggaataccaaattacctcctctgcccggtagcggctcaatcctcgagaacttctctggttccggcggtggtggcccagccggtctgttgccaaaccctagactctccgagcttagtgcatcggaggtcactatgttgtcccagctacaggaaaggcgagatagcagtacgagtactgtttcatctgcctacactgtgagtcggaggagcagtgggattagtccctacttttcttccaggcgctctagtgaagcatccccgttgggagccggccgacctcacaatgcctcaagcgcggatagctatgatcccattagcacggacgcgagtaggcggtcttccgaagcaagtcaatgctccggggggtcagggctgctgaacctgactcccgcacagcagtacagtttacgggcaaaatatgcggcagcaactggtgggcctccgcctacaccgctcccgggcctcgaaaggatgtcgctaaggacacgtttggcgctactagacgcacccgagagaactctccccgccggttgtcctcggcctctcgggcctcggcgtgggagcgatgggccaacttatggccacggacacgcaggcgccgcacccgcttttccccatgaagcgcccggagggggcgccagaagggccagcgacccagtcagaagaccagacgccttgtcactccctagagttcagcggtttcattcaacacataatgtgaaccccgggccgttacccccatgtgccgataggagagggctgcggctacagagtcatcccagcacagatgggggtctagcccggggagcttatagtccacgtcccccaagcatcagtgaaaacgttgccatggaagctgtggccgcgggagtggacggtgctgggccagaagccgatcttggactccctgaggacgaccttgtcttgccagatgatgtggtgcagtacatcaaggctcatgctagtggtgcgctggatgaaggtacaggacaggtatatcccactgagtccacaggattcagtgacaatccgagactgccatctcccggcctgcacggacagcgtagaatggtcgctgccgatagtaatgtaggcccatccgccccaatgctaggcggatgtcagctgggatttggagccccttcttcacttaacaagaataacatgccagttcagtggaacgaggtgagtagcggcaccgtcgacgcgttggcatcgcaggtcaaaccaccccccttcccgcagggaaacttggccgtagtacagcagaaacccgctttcggtcagtaccccggctatagtcctcagggattgcaggccagtccagggggcctggatagtacgcagcctcaccttcagcctcgcagcggcgctccgagccaggggatccctcgcgtgaactacatgcagcagctcagacagcccgtggcgggaagccagtgccccggaatgacgaccaccatgtctcctcatgcttgttacggtcaggtacacccccagctgtcccccagcactatcagtggggcactaaatcagtttccacagagttgtagcaatatgcctgccaaaccaggccatctagggcatccacagcagacagaagtggcaccagatcccactaccatgggcaatagacacagggaattaggcgtcccagattcagcactcgccggggtgccgccccctcacccagtccagtcttacccgcagcaatctcatcatctagctgcctctatgtcccaggaagggtatcaccaggttccctcacttctgcctgccagacagcctggctttatggaaccccagaccggccccatgggggtcgctacagctgggttcggactcgtccaaccccggccaccgctggagccttctccaaccggacgccatcgcggggttcgggcggtgcaacagcagctcgcctacgctcgagccaccggacacgccatggccgcaatgccgtccagccaggagacagccgaagcagtcccgaaaggggccatgggcaacatgggctcagtgcctccccagccacctcctcaagacgcagggggtgcgcctgatcattccatgctatactattacggacagattcacatgtacgagcaggacggggggctcgagaacttagggtcttgtcaggtcatgcgtagtcagccacctcagccccaggcctgtcaagactcgatccagccacagcctcttcctagccctggggtcaatcaggtcagtagtacggtcgactcgcagctactggaggccccacagatcgactttgacgccatcatggatgacggggatcatagcagtctgttctcaggggcactgtccccaagtcttctccactcgttaagccagaacagcagccgactcacaacaccccgcaacagcctcaccttacctagcatacccgcaggtattagtaatatggcggtaggcgacatgagttcaatgctcacatccctagccgaagaaagtaaattcctgaatatgatgacctag

SEQ ID NO: 154424 - DNA, 4761 bp, Artificial Sequence
  derived and/or modified sequence
atggagaccagcgccagcgccaccgccagcgagaagcaggaggccaagtcagggatccttgaggccgccggatttcccgacccaggcaaaaaggcatccccactggtcgtggcagctgctgccgctgctgccgtggcagcacaaggggtgccacagcatctgcttccgcccttccacgccccactgcctattgacatgcggcaccaagaagggcggtaccattacgaaccacattccgtgcacggcgtgcatgggccgccggctctcagcggttcacctgtcataagtgatatcagtcttattcggctctcaccgcaccctgcaggccccggagagtctccctttaatgccccccacccctacgttaacccacacatggagcactacctccggtctgttcactcaagccctacgttgtccatgatctctgccgctagggggctaagcccagcagacgtggcccaagagcacctgaaagagcggggactgttcggactccctgccccgggcaccacgccatcagactattatcaccaaatgactcttgtcgcaggccatccagcaccgtacggcgacttgctcatgcagagtgggggcgctgctagcgctcctcacctgcacgattacctgaacccagtggacgtgtcccggttttcctccccacgggtgacaccacgactcagtagaaagcgcgccctgtctatttctcccttgtccgatgcgagcctagacctgcagcgtatgatccgtactagccccaactccttggttgcctacataaataacagtcgctcttcgtcagctgcttccggatcctacggccatttgagtgccggtgcattatcgccagcctttacctttccacacccaattaaccccgtggcctatcagcaaatcctgagccaacaaaggggcttgggaagtgcgttcgggcacacacctccccttatccagccttccccaacctttctcgcacaacagcctatggccctaaccagtattaatgcgactcccacacaactgagcagcagtagtaattgtctctccgacaccaaccagaataagcagtcttccgaatcagcagttagcagtacagtgaaccctgtagccattcacaagcgcagcaaggtgaaaactgagcccgaaggtctccgcccggctagccccctggccctgacccagggacaagtttccggtcacggatcctgtggatgcgcccttccattatcccaagagcagttggccgatcttaaagaggatttagatagggacgactgcaagcaggaagccgaagtcgttatctacgaaacaaactgtcactgggaggactgcacaaaggaatatgacacccaagagcagctggttcatcacatcaataatgagcacatccacggcgagaagaaagagtttgtctgccggtggcaggcttgcactagggaacagaaaccattcaaagcgcaatacatgctggtagtgcacatgcggcggcataccggcgaaaaaccccataagtgcacgttcgaaggttgctccaaggcttattcccggctggaaaacctaaagacacacttgagatcgcacaccggtgagaagccctatgtgtgtgagcatgaaggatgtaacaaggccttttccaacgcgagcgatcgagctaaacatcagaacaggacccactctaacgagaaaccttacatctgcaagatccctggttgtactaaacgttacacagacccctcatccctaaggaagcatgtgaagactgtccatggtccagacgctcatgtaacgaagaaacagcgcaacgacgtgcatctacgaacacccctgctgaaggaaaatggcgactcggaggctggcactgagcctggcggacctgaaagcaccgaggcttcaagcactagtcaggctgtggaggactgcctacatgtgcgggccatcaagacagaatcttcaggtctgtgccaaagctcccccggagctcagtcatcatgtagttctgaaccttctccactcgggagtgcccctaataatgattcaggcgtggaaatgccaggcactggaccggggagtctcggtgatctcactgccctcgatgatacgccacccggcgccgatacatcagccctcgcggcaccaagtgctggtgggttacaactccgaaagcatatgaccactatgcatagatttgagcagctgaagaaggagaaactaaaatccctgaaagactcctgctcatgggctggacccaccccacataccaggaacaccaaacttcccccgctccctgggagcggtagcatccttgaaaacttcagcggttccggcggcggcgggcccgctggactgcttcctaacccccgcctctcagagctctcagcttccgaggtgaccatgcttagtcagttacaggaaagacgagactcaagtaccagtacagtctcttctgcgtatacagtgtcaagacggtcctctggcatttccccctatttcagcagccgccgttccagcgaggcttcccccctcggcgcaggccgcccacacaatgcaagctccgccgactcctacgatcccattagcactgacgcaagcaggagaagctctgaggcaagtcagtgctctggcggctctgggttattgaatttgactccggctcagcaatacagcctgcgtgcaaagtatgccgccgccaccggtggacctccccccactccactccccggcctggagaggatgtccttacgcactagactggcccttctcgatgccccagaacggaccctgcctgccgggtgcccccgcccactgggcccaagacgaggatctgatggccccacatacggacacggtcacgccggtgctgcgcccgcatttcctcacgaagccccaggtgggggcgcccgacgtgctagtgaccccgttcggaggcccgacgccttatctttgccgagggtgcaacgttttcactcaacgcacaatgtcaaccctggcccattgcctccctgcgctgacaggcgaggacttaggttacagtctcatccttccacggacggtggcctcgcgcgcggggcctactcaccgaggcccccctccataagcgaaaacgtggccatggaagctgtcgctgccggcgttgacggggctggccccgaggccgacttggggctgccagaggacgatctggtattaccggacgacgtcgttcagtatattaaggcccatgcttcgggcgcactcgatgaaggcaccgggcaagtgtatccaactgaaagcacaggcttctctgataatcccagattgccaagtccgggtctgcacggtcaacggcgcatggttgccgccgactcaaatgtgggcccctctgcccctatgctgggcgggtgtcagcttgggttcggggcgcctagtagcctgaacaaaaataatatgcccgtgcaatggaacgaagtgtcctctggaacggtggacgccctcgcctctcaagtgaagccccccccattcccccaggggaatctggcggtggtgcagcaaaagcccgcattcggccaatacccagggtattctcctcagggcctgcaggcatcacctggcggcctcgatagcacccagccacatctacagccaagatccggcgctccttcccaagggatcccgcgcgtaaactatatgcaacagctgcgccagcccgtggctggctcccagtgccctggaatgacgaccactatgagccctcatgcctgttacggccaggttcacccccagttatcgcctagcactatttctggagccctaaatcagttcccgcaatcgtgtagtaacatgcctgccaagccaggccatttgggccacccacaacagacagaagtggctcctgacccgaccacaatgggtaaccggcacagagagctgggggtgcccgattctgctctggcgggcgtgccccctcctcaccctgtccagagctaccctcagcaatcccatcacctggctgcatcaatgtctcaggaagggtaccaccaggtacctagcctgctgcccgctcgacagcccggcttcatggaaccccagactggaccaatgggagttgccacagccggttttggactggtacagccgagaccgccacttgaaccaagtccgactggccgacaccgcggagtgcgcgccgtccagcagcagttggcgtacgcacgcgcgactggccacgccatggccgccatgccctcatcacaggagaccgccgaggccgtacctaagggggcgatgggtaacatgggttccgtcccacctcagccacccccccaggacgcaggcggagcaccagatcactccatgctctattactatggccaaatccatatgtacgaacaagacgggggtctcgaaaatctgggctcatgtcaagtaatgagaagccaacctccgcaacctcaagcctgtcaggactctatacagccgcagcctctgccatctccgggcgttaatcaggtgtccagcaccgtcgacagccagctcctcgaagctcctcaaatcgattttgacgctatcatggatgacggagaccatagctcactgttttctggggccctctctccgagccttttgcactcgctgagccagaactccagccgacttaccacgccccgtaactcactcaccctcccatcaataccggctggcattagcaacatggctgtgggggatatgagcagtatgctgacatcactggctgaggagtctaaattccttaacatgatgacatag

SEQ ID NO: 154425 - DNA, 4761 bp, Artificial Sequence
  derived and/or modified sequence
atggagaccagtgctagtgcaaccgcctctgaaaaacaagaggctaaatccggcatactcgaggcagccggatttcctgaccctggcaaaaaagcttccccattggtggtggccgctgccgctgccgcagcggttgccgctcagggggtgccccaacatttgctccctccctttcacgcacccctcccgattgacatgagacaccaggagggccgataccactacgaacctcattctgttcatggggtgcacggcccacccgcattgtcaggcagtcctgtgatctctgacatctctttgatccgcctttcgccacacccggcaggacccggtgaatcgcctttcaacgcccctcacccctacgttaatccacatatggaacactacctccggtcagtgcacagctccccaacacttagcatgataagcgctgccagaggcctgtcacctgctgatgtggctcaggagcatctcaaagaacggggactgttcggcctacctgcacccggtactacaccgagtgactactatcaccaaatgactctggtggccggtcaccccgcaccctatggagaccttctcatgcaaagcggcggagcagcatccgctccacatctccacgactacctgaacccagtggatgtgtctagatttagctcgcccagggtcacacctagactctcgagaaaacgtgctctttctattagccctctttctgacgcgtcattagatctccagcgtatgattcgaacgtcacccaactctctcgtggcctacataaataacagccggtctagctctgctgcatcaggcagctacggccatctgtccgcaggagcactttctcccgcatttaccttcccacacccaatcaacccagtggcataccagcagatcttaagtcagcagcgcggattaggctctgcctttggacacacccctcctctcatacagccaagcccaaccttcttagctcagcaaccaatggccctaacttccatcaatgccaccccaacccagctgtcctctagtagtaattgcttgtctgacaccaaccaaaataagcagtcctctgaaagcgcagtgtcatcaactgtcaatcccgtggcaatacataagcggagcaaagtgaaaaccgaaccagagggcctccgacccgctagcccactagccctgacgcagggccaggtgagcggacacgggtcttgcgggtgcgccctgcccctgtcgcaggaacagctcgccgatctgaaagaagatctggacagagatgactgcaagcaagaggctgaagttgtgatatatgaaacaaactgccattgggaggactgtacgaaggaatatgatacccaggagcagctggtgcatcatattaataatgaacatatacacggggaaaagaaggaatttgtgtgccgctggcaagcttgtactagggaacagaaaccatttaaagctcagtatatgcttgtggtgcacatgcgcaggcatacgggcgaaaaaccccacaaatgtactttcgagggctgcagcaaggcatacagcaggttggaaaacttaaaaactcacctgcgcagtcatactggcgagaagccgtacgtatgtgagcatgaaggatgcaacaaggcgttcagcaacgccagcgatcgagccaaacaccagaaccgcacacattcaaatgagaagccttatatttgtaagatcccaggctgtacgaagcgatacaccgatccttccagcttgcgcaagcacgtcaagaccgtgcacggacctgatgcccacgtgaccaagaaacaacgcaacgacgtgcatctgcgcactccactcttgaaggagaacggtgacagtgaggcgggtaccgagcccggtggtccagaatcaaccgaggcttcatccacgagtcaagccgtcgaagactgtcttcacgtaagagcgattaaaacagaaagttctgggttatgtcaatctagccccggagctcagtcctcatgctcttccgaaccgagcccactggggagtgctcccaacaacgacagtggagtagagatgccgggtaccggccctgggtctttgggagatctgacggccctcgacgatacccccccaggagcagatacttccgctttagccgctccgtctgccggaggactacagctaaggaagcacatgactaccatgcaccggtttgaacagttaaaaaaggaaaaactgaaatcactgaaagactcatgcagctgggcaggccctaccccacacactcgcaatactaaactgcccccacttcctgggtccggtagtattctggaaaatttttctgggtccggcggtggtggccctgctggccttctgcctaaccctagattaagtgagctgtccgcctcagaggtcaccatgctgtcccagctgcaggaacgccgagattcaagcacgtcgacagtatcctccgcttatacagtgagccgcaggtcttcagggatttcgccgtacttctcgtcgaggcgctctagcgaagcttcgccgcttggggcaggtcgacctcacaacgctagtagtgcagactcctatgacccgatatcgaccgatgcttcgcgccgaagcagcgaggcttctcagtgttccggaggatcaggcctcctcaacctaactcctgcccaacagtacagcttgcgggctaaatacgctgccgcaacaggcggacctccacctactccgctgcctgggctcgagcgcatgagcctgcgtacccggctcgccttgctggatgcacccgagcgaactctgccggctggatgcccgagacccctcggaccacgtcgcggtagtgacgggcctacatatgggcatggacacgcaggggctgcccctgccttcccccacgaggcaccgggaggtggtgccagacgagcttctgaccctgtcaggagaccggatgctttaagcctccccagggttcaacgatttcatagcacccacaatgttaacccagggccactccctccctgcgcagacagacgagggttacgcctgcaatcccatccatccacagacggtggattggcgagaggggcatactcccctcggcctccctcaatttcggaaaacgtagccatggaagcggtcgcagccggagtcgacggggctggtccagaggcagatttgggcctgccagaagacgatctggtcctgcccgatgacgtggtgcagtatataaaagcccacgcttcaggtgccctcgatgagggtactggacaggtgtatcccacggaaagcactggcttctccgacaacccacgcttgccaagtcctgggctccacgggcagcggagaatggtggcggctgacagcaatgtaggcccatctgctcccatgcttggaggatgtcagctgggattcggtgctccatccagtttgaacaagaacaatatgcctgtccagtggaatgaagtatctagcgggaccgtggacgcactggcctctcaggtgaagcctcccccatttccacaggggaacttagctgttgtgcagcagaaacccgcattcggacagtatccgggatacagcccgcagggcttgcaggcgtcaccaggcggtttagacagtacacagccccatttgcagccacgctccggtgctccctcccagggcatcccacgggtgaactacatgcagcagctccgccagcctgttgctggttcccagtgtccaggcatgacaaccactatgtccccccacgcctgctacggtcaagttcatcctcagctgtcaccaagcacaatctcaggtgctctgaaccagtttcctcagagttgtagtaatatgcccgcaaagcccggacaccttggccaccctcagcagaccgaagtagcccctgatccaacaaccatgggaaataggcacagagaactaggagtgccagacagcgccttagcaggggtgccacctccccatccagttcagtcctaccctcaacagagtcaccatctagccgcttccatgtctcaggagggttaccatcaagtgccatcccttttgccggcacgccagcccggttttatggaaccccaaactggcccaatgggagtcgcaaccgcaggctttgggctcgtacaacctcggccacccctggagcctagccccacagggagacacagaggcgttcgggcagtgcagcagcagctggcgtatgccagagccactggtcatgccatggccgctatgccatccagccaggaaactgcagaggcagttcccaagggcgctatgggcaacatgggctccgtcccgccacaacctccgccacaggacgctggcggagctccagatcacagcatgttgtactattacggccagatccatatgtatgagcaggacggtggcttagagaacctcgggagctgtcaggtgatgaggtcccagcctccacagccacaagcctgccaagatagtatacaacctcagccccttccctcacctggagttaatcaggtgtcctccacagtggattctcagctgctggaggctccccagatagattttgatgctatcatggatgatggcgaccatagttctctcttcagcggagctttgagcccaagcctcttgcacagcctttcccagaatagctctcggctgacaacaccaaggaatagcctgacgctgccctcaattcctgccggaataagtaatatggcagtgggcgacatgtcatcaatgctgacttcacttgcagaggagtccaagtttctcaacatgatgacttag

SEQ ID NO: 154426 - DNA, 4761 bp, Artificial Sequence
  derived and/or modified sequence
atggagacttccgcaagtgccaccgcctccgaaaaacaggaggccaaatctggcatcttggaggccgcagggtttccagatcctggaaaaaaggcttccccactggtggtagcggctgccgcagcagcggctgtggccgctcaaggagtgccacagcatttgctccccccatttcacgctcctctccctatagacatgcgccaccaggaggggcgatatcactacgaacctcacagtgtgcacggcgtgcacggcccaccggctctttccggcagcccagtaattagtgatatatcactcattagactttcaccgcacccagcagggccaggggaatctccttttaacgctccccacccgtacgtaaacccacacatggagcattatctgcgctcagtccatagttcgcccactctgtctatgatcagcgctgcacggggtctgtcacctgccgatgttgcacaggagcatttgaaagagcggggtctcttcgggctgcccgcacctgggaccaccccaagtgattattatcaccagatgactcttgtcgcgggtcacccagccccttacggtgacctgttgatgcagtcaggtggagccgctagcgcaccccatctacacgactacctgaacccagtggacgtgagtagattcagctctccccgagttacgcctcgcctgtcgcgcaaaagagcgttgtcaatatccccgctgagcgacgctagcctggatcttcaacgaatgatacgaaccagccccaactccttggtggcttacattaacaattcaaggagctcttccgctgccagtggctcctacggtcacctgagcgctggagcactctcccctgccttcaccttccctcatccaataaaccccgttgcttatcagcagattctgtcccagcagcgcggactcggcagtgcctttggccatactccacccctaatacagcctagccccacattcctagcccagcaaccaatggccctcacttcaatcaacgcgactcctacccagctctcatcctcttccaactgtcttagcgacacaaatcaaaacaaacagagtagcgagtcagccgtgagctctacagttaatccagtcgccatccataagcgctcaaaggtgaaaacagaacctgaagggctaagacccgcaagtcccctggccctcacacagggccaagtgtctggccacgggagctgtgggtgtgcactgccactctctcaggagcaattggcggatctgaaggaggacttagaccgtgatgactgtaagcaggaggcagaagtggtgatctacgagaccaactgccattgggaggactgtaccaaggagtatgacacccaggaacagctggtgcaccatataaataacgagcacatccatggagaaaagaaagaattcgtgtgccgctggcaggcctgcactcgcgagcagaaaccttttaaagcacagtatatgttggtggtgcacatgcggcgtcacacaggcgaaaaacctcataagtgcacttttgagggatgttccaaggcttatagccgcctcgagaacctcaagactcatctccggtcccacaccggcgagaagccgtatgtgtgcgagcacgaaggctgcaataaggctttttccaacgcatcggatcgggctaagcatcaaaacagaacccattctaatgaaaagccatacatatgcaaaatacccggttgcacgaagcgctatacagacccatcttccctgcgtaaacacgttaaaacagtacacggcccagacgctcacgtgactaaaaaacagaggaacgatgtacacctgaggaccccgctgctgaaggagaatggtgactctgaagctggtaccgaaccagggggaccagaaagcactgaagctagcagcacaagccaggcagtcgaagactgtctccatgttcgggctatcaaaacagagagctcaggactgtgtcagagcagcccgggtgcccaatcatcttgcagcagtgagccctctccactgggcagcgcaccgaataatgacagcggagtggagatgcctggtacaggccctggcagcttgggcgatttgaccgccttggacgacacaccacccggtgctgacacatctgccttggcagctccaagtgctggtggactccagctgagaaaacatatgacaaccatgcacaggttcgaacagcttaaaaaagagaagttaaagtctctaaaagattcctgttcttgggccggaccaaccccacacactagaaacacaaagctgccgccactcccagggagtggaagcatcttagaaaattttagcggttccggaggcggaggacctgcgggactccttcctaatccaagactatccgagttgagtgcctctgaggtgacaatgttgtcgcagttacaagagcgcagggacagcagtacttccaccgtctcctctgcctacactgttagtcggagatcctctggaattagtccatacttttcatctcggagatcctcggaggcttcccccctgggagcagggaggccccataatgccagctctgcggactcttacgatccgattagtacagacgccagtaggcgttcgtctgaggcgagccagtgcagtggtggaagcgggctgctgaacctgactcctgcccagcaatattctctccgcgcaaaatacgctgcggcaacgggcggtcctccaccaactcccttacccggactggagaggatgtctcttaggaccaggctggccctgctggatgccccagagaggaccctgccagctgggtgtcctaggccccttggccctcgacggggttccgacggcccaacctacgggcacgggcatgctggcgcagctcccgcttttccccatgaggcccctggaggcggtgccaggagggcctccgaccccgtccgtaggcctgatgctttatccctgccccgagtgcaacgctttcactctacgcacaatgttaatcccggtccactgcctccctgtgccgatagacgcggactgcggcttcagtcacatccgtcaactgatggagggcttgcgcgtggtgcttactcaccccgaccccctagcatctcagagaacgtggctatggaggccgttgctgctggcgtcgacggcgcaggaccagaggcagacttgggtctccccgaggacgacttggttcttcctgacgatgtggtgcagtacataaaggcgcatgcgagtggcgcactcgatgaaggaacagggcaggtgtaccctacggaaagcactggattcagcgataaccccagactgccttctccaggcctccacggacagagacggatggtagctgctgactctaatgtaggcccaagcgcccctatgctggggggatgtcagctcggattcggagcgcctagctcactcaataagaataacatgcccgtccagtggaacgaggtctcttcaggtaccgtggatgccttagcctctcaggtcaagcctccgccttttcctcagggcaacctggcagttgtgcagcagaagcccgctttcggacagtaccctggctactccccacaggggctgcaggcctctccaggcggtttggattccacacagccccacctacaaccaaggtcaggggcaccttctcagggcattcccagggtcaactacatgcagcagctgagacagccagtggcgggttcacagtgccctggcatgactaccactatgtccccacacgcctgctacggccaagtgcacccccagttgagtccatccacaatttccggggctctgaaccaatttccccagagttgctccaatatgccagcgaagcccggacatcttggccacccacagcagacggaggtggctccagatcccactaccatgggaaaccggcaccgggaactgggtgttccagactccgctctcgctggggtgccgcctcctcaccctgtacaatcatacccccagcagtcacatcacctagctgctagcatgagccaggagggatatcaccaggtacctagcctcttgccggcacgtcaaccagggtttatggagccacagaccggaccaatgggcgtcgcaactgccggatttgggctggtccagccaagaccgccactggaaccatccccaaccggacgacacaggggagtccgtgccgtgcagcaacaattagcttacgctcgggcaacaggccatgccatggctgcaatgcccagctctcaagagacggctgaggcggtgcctaaaggggcaatgggaaatatggggagcgtgccgcctcagccacctcctcaagacgctggtggggctccagatcacagtatgctgtattactacgggcagatccacatgtacgaacaggatggaggtctcgaaaatttaggatcgtgccaggttatgaggtcacagccacctcaaccccaggcttgtcaggacagcatccaacctcagcccctgcctagcccaggtgtgaaccaagtgagttctactgtggactctcaactgctggaggctccccaaatcgatttcgatgcgattatggacgatggcgaccactccagcctgttttctggagcgctcagcccctctttgctgcattctctgtctcaaaacagctctaggctcacaaccccccgaaactcgcttacattgcctagtataccggctggcatcagcaacatggccgtgggggatatgtccagtatgctgacttcactggcagaagagtctaagttcctgaatatgatgacctag

SEQ ID NO: 154427 - DNA, 4761 bp, Artificial Sequence
  derived and/or modified sequence
atggagaccagcgccagcgccaccgccagcgagaagcaggaggccaagagcggcatcctggaggccgccggcttccccgaccccggcaagaaggccagccccctggtggtggccgccgccgccgccgccgccgtggccgcccagggcgtgccccagcacctgctgccccccttccacgcccccctgcccatcgacatgagacaccaggagggcagataccactacgagccccacagcgtgcacggcgtgcacggcccccccgccctgagcggcagccccgtgatcagcgacatcagcctgatcagactgagcccccaccccgccggccccggcgagagccccttcaacgccccccacccctacgtgaacccccacatggagcactacctgagaagcgtgcacagcagccccaccctgagcatgatcagcgccgccagaggcctgagccccgccgacgtggcccaggagcacctgaaggagagaggcctgttcggcctgcccgcccccggcaccacccccagcgactactaccaccagatgaccctggtggccggccaccccgccccctacggcgacctgctgatgcagagcggcggcgccgccagcgccccccacctgcacgactacctgaaccccgtggacgtgagcagattcagcagccccagagtgacccccagactgagcagaaagagagccctgagcatcagccccctgagcgacgccagcctggacctgcagagaatgatcagaaccagccccaacagcctggtggcctacatcaacaacagcagaagcagcagcgccgccagcggcagctacggccacctgagcgccggcgccctgagccccgccttcaccttcccccaccccatcaaccccgtggcctaccagcagatcctgagccagcagagaggcctgggcagcgccttcggccacaccccccccctgatccagcccagccccaccttcctggcccagcagcccatggccctgaccagcatcaacgccacccccacccagctgagcagcagcagcaactgcctgagcgacaccaaccagaacaagcagagcagcgagagcgccgtgagcagcaccgtgaaccccgtggccatccacaagagaagcaaggtgaagaccgagcccgagggcctgagacccgccagccccctggccctgacccagggccaggtgagcggccacggcagctgcggctgcgccctgcccctgagccaggagcagctggccgacctgaaggaggacctggacagagacgactgcaagcaggaggccgaggtggtgatctacgagaccaactgccactgggaggactgcaccaaggagtacgacacccaggagcagctggtgcaccacatcaacaacgagcacatccacggcgagaagaaggagttcgtgtgcagatggcaggcctgcaccagagagcagaagcccttcaaggcccagtacatgctggtggtgcacatgagaagacacaccggcgagaagccccacaagtgcaccttcgagggctgcagcaaggcctacagcagactggagaacctgaagacccacctgagaagccacaccggcgagaagccctacgtgtgcgagcacgagggctgcaacaaggccttcagcaacgccagcgacagagccaagcaccagaacagaacccacagcaacgagaagccctacatctgcaagatccccggctgcaccaagagatacaccgaccccagcagcctgagaaagcacgtgaagaccgtgcacggccccgacgcccacgtgaccaagaagcagagaaacgacgtgcacctgagaacccccctgctgaaggagaacggcgacagcgaggccggcaccgagcccggcggccccgagagcaccgaggccagcagcaccagccaggccgtggaggactgcctgcacgtgagagccatcaagaccgagagcagcggcctgtgccagagcagccccggcgcccagagcagctgcagcagcgagcccagccccctgggcagcgcccccaacaacgacagcggcgtggagatgcccggcaccggccccggcagcctgggcgacctgaccgccctggacgacaccccccccggcgccgacaccagcgccctggccgcccccagcgccggcggcctgcagctgagaaagcacatgaccaccatgcacagattcgagcagctgaagaaggagaagctgaagagcctgaaggacagctgcagctgggccggccccaccccccacaccagaaacaccaagctgccccccctgcccggcagcggcagcatcctggagaacttcagcggcagcggcggcggcggccccgccggcctgctgcccaaccccagactgagcgagctgagcgccagcgaggtgaccatgctgagccagctgcaggagagaagagacagcagcaccagcaccgtgagcagcgcctacaccgtgagcagaagaagcagcggcatcagcccctacttcagcagcagaagaagcagcgaggccagccccctgggcgccggcagaccccacaacgccagcagcgccgacagctacgaccccatcagcaccgacgccagcagaagaagcagcgaggccagccagtgcagcggcggcagcggcctgctgaacctgacccccgcccagcagtacagcctgagagccaagtacgccgccgccaccggcggccccccccccacccccctgcccggcctggagagaatgagcctgagaaccagactggccctgctggacgcccccgagagaaccctgcccgccggctgccccagacccctgggccccagaagaggcagcgacggccccacctacggccacggccacgccggcgccgcccccgccttcccccacgaggcccccggcggcggcgccagaagagccagcgaccccgtgagaagacccgacgccctgagcctgcccagagtgcagagattccacagcacccacaacgtgaaccccggccccctgcccccctgcgccgacagaagaggcctgagactgcagagccaccccagcaccgacggcggcctggccagaggcgcctacagccccagaccccccagcatcagcgagaacgtggccatggaggccgtggccgccggcgtggacggcgccggccccgaggccgacctgggcctgcccgaggacgacctggtgctgcccgacgacgtggtgcagtacatcaaggcccacgccagcggcgccctggacgagggcaccggccaggtgtaccccaccgagagcaccggcttcagcgacaaccccagactgcccagccccggcctgcacggccagagaagaatggtggccgccgacagcaacgtgggccccagcgcccccatgctgggcggctgccagctgggcttcggcgcccccagcagcctgaacaagaacaacatgcccgtgcagtggaacgaggtgagcagcggcaccgtggacgccctggccagccaggtgaagcccccccccttcccccagggcaacctggccgtggtgcagcagaagcccgccttcggccagtaccccggctacagcccccagggcctgcaggccagccccggcggcctggacagcacccagccccacctgcagcccagaagcggcgcccccagccagggcatccccagagtgaactacatgcagcagctgagacagcccgtggccggcagccagtgccccggcatgaccaccaccatgagcccccacgcctgctacggccaggtgcacccccagctgagccccagcaccatcagcggcgccctgaaccagttcccccagagctgcagcaacatgcccgccaagcccggccacctgggccacccccagcagaccgaggtggcccccgaccccaccaccatgggcaacagacacagagagctgggcgtgcccgacagcgccctggccggcgtgccccccccccaccccgtgcagagctacccccagcagagccaccacctggccgccagcatgagccaggagggctaccaccaggtgcccagcctgctgcccgccagacagcccggcttcatggagccccagaccggccccatgggcgtggccaccgccggcttcggcctggtgcagcccagaccccccctggagcccagccccaccggcagacacagaggcgtgagagccgtgcagcagcagctggcctacgccagagccaccggccacgccatggccgccatgcccagcagccaggagaccgccgaggccgtgcccaagggcgccatgggcaacatgggcagcgtgcccccccagccccccccccaggacgccggcggcgcccccgaccacagcatgctgtactactacggccagatccacatgtacgagcaggacggcggcctggagaacctgggcagctgccaggtgatgagaagccagcccccccagccccaggcctgccaggacagcatccagccccagcccctgcccagccccggcgtgaaccaggtgagcagcaccgtggacagccagctgctggaggccccccagatcgacttcgacgccatcatggacgacggcgaccacagcagcctgttcagcggcgccctgagccccagcctgctgcacagcctgagccagaacagcagcagactgaccacccccagaaacagcctgaccctgcccagcatccccgccggcatcagcaacatggccgtgggcgacatgagcagcatgctgaccagcctggccgaggagagcaagttcctgaacatgatgacctag

SEQ ID NO: 154428 - protein, 558 aa, Artificial Sequence
  derived and/or modified sequence
MYRYLGEALLLSRAGPAALGSASADSAALLGWARGQPAAAPQPGLALAARRHYSEAVADREDDPNFFKMVEGFFDRGASIVEDKLVEDLRTRESEEQKRNRVRGILRIIKPCNHVLSLSFPIRRDDGSWEVIEGYRAQHSQHRTPCKGGIRYSTDVSVDEVKALASLMTYKCAVVDVPFGGAKAGVKINPKNYTDNELEKITRRFTMELAKKGFIGPGIDVPAPDMSTGEREMSWIADTYASTIGHYDINAHACVTGKPISQGGIHGRISATGRGVFHGIENFINEASYMSILGMTPGFGDKTFVVQGFGNVGLHSMRYLHRFGAKCIAVGESDGSIWNPDGIDPKELEDFKLQHGSILGFPKAKPYEGSILEADCDILIPAASEKQLTKSNAPRVKAKIIAEGANGPTTPEADKIFLERNIMVIPDLYLNAGGVTVSYFEWLKNLNHVSYGRLTFKYERDSNYHLLMSVQESLERKFGKHGGTIPIVPTAEFQDRISGASEKDIVHSGLAYTMERSARQIMRTAMKYNLGLDLRTAAYVNAIEKVFKVYNEAGVTFT

SEQ ID NO: 154429 - protein, 515 aa, Artificial Sequence
  derived and/or modified sequence
MYRYLGPGTARRRPAAGAGIGRPAPLQRGGGRPRGRPQLLQDGGGLLRSRRQHRGGQAGGGPEDPGERGAEAEPGARHPADHQALQPCAESLLPQHSQHRTPCKGGIRYSTDVSVDEVKALASLMTYKCAVVDVPFGGAKAGVKINPKNYTDNELEKITRRFTMELAKKGFIGPGIDVPAPDMSTGEREMSWIADTYASTIGHYDINAHACVTGKPISQGGIHGRISATGRGVFHGIENFINEASYMSILGMTPGFGDKTFVVQGFGNVGLHSMRYLHRFGAKCIAVGESDGSIWNPDGIDPKELEDFKLQHGSILGFPKAKPYEGSILEADCDILIPAASEKQLTKSNAPRVKAKIIAEGANGPTTPEADKIFLERNIMVIPDLYLNAGGVTVSYFEWLKNLNHVSYGRLTFKYERDSNYHLLMSVQESLERKFGKHGGTIPIVPTAEFQDRISGASEKDIVHSGLAYTMERSARQIMRTAMKYNLGLDLRTAAYVNAIEKVFKVYNEAGVTFT

SEQ ID NO: 154430 - protein, 490 aa, Artificial Sequence [sequence omitted]

SEQ ID NO: 154431 - protein, 257 aa, Artificial Sequence
  derived and/or modified sequence
ENFIVEGFGNVGLHSMRYLHRFGAKCIAVGESDGSIWNPDGIDPKELEDFKLQHGSILGFPKAKPYEGSILEADCDILIPAASEKQLTKSNAPRVKAKIIAEGANGPTTPEADKIFLERNIMVIPDLYLNAGGVTVSYFEWLKNLNHVSYGRLTFKYERDSNYHLLMSVQESLERKFGKHGGTIPIVPTAEFQDRISGASEKDIVHSGLAYTMERSARQIMRTAMKYNLGLDLRTAAYVNAIEKVFKVYNEAGVTFT

SEQ ID NO: 154432 - protein, 391 aa, Artificial Sequence
  derived and/or modified sequence
MTYKCAVVDVPFGGAKAGVKINPKNYTDNELEKITRRFTMELAKKGFIGPGIDVPAPDMSTGEREMSWIADTYASTIGHYDINAHACVTGKPISQGGIHGRISATGRGVFHGIENFINEASYMSILGMTPGFGDKTFVVQGFGNVGLHSMRYLHRFGAKCIAVGESDGSIWNPDGIDPKELEDFKLQHGSILGFPKAKPYEGSILEADCDILIPAASEKQLTKSNAPRVKAKIIAEGANGPTTPEADKIFLERNIMVIPDLYLNAGGVTVSYFEWLKNLNHVSYGRLTFKYERDSNYHLLMSVQESLERKFGKHGGTIPIVPTAEFQDRISGASEKDIVHSGLAYTMERSARQIMRTAMKYNLGLDLRTAAYVNAIEKVFKVYNEAGVTFT

SEQ ID NO: 154433 - protein, 425 aa, Artificial Sequence
  derived and/or modified sequence
MTCPCDNASSVFLGFCIRYSTDVSVDEVKALASLMTYKCAVVDVPFGGAKAGVKINPKNYTDNELEKITRRFTMELAKKGFIGPGIDVPAPDMSTGEREMSWIADTYASTIGHYDINAHACVTGKPISQGGIHGRISATGRGVFHGIENFINEASYMSILGMTPGFGDKTFVVQGFGNVGLHSMRYLHRFGAKCIAVGESDGSIWNPDGIDPKELEDFKLQHGSILGFPKAKPYEGSILEADCDILIPAASEKQLTKSNAPRVKAKIIAEGANGPTTPEADKIFLERNIMVIPDLYLNAGGVTVSYFEWLKNLNHVSYGRLTFKYERDSNYHLLMSVQESLERKFGKHGGTIPIVPTAEFQDRISGASEKDIVHSGLAYTMERSARQIMRTAMKYNLGLDLRTAAYVNAIEKVFKVYNEAGVTFT

SEQ ID NO: 154434 - DNA, 1677 bp, Artificial Sequence
  derived and/or modified sequence
atgtaccgctacctgggtgaagcactcctgctcagccgcgccggtcccgccgcactcggctcagctagcgccgatagcgccgcccttctgggatgggctaggggtcaaccagcagcagccccccagcccggtctggcgctggcagctagacggcattactcagaggccgtcgctgaccgcgaagatgatccaaacttctttaaaatggtggaagggtttttcgaccggggtgcatccatcgtggaggacaagctggtggaggatttaaggactagagagagcgaggagcagaagaggaaccgggtccgagggattcttcgaatcattaagccatgcaaccacgtcctttctctaagtttccccataagaagggacgacggcagttgggaagtcattgagggatacagggcccagcactcacaacataggacaccttgcaaaggcggtattcggtatagcactgatgtgagcgtcgacgaggttaaggccttagcctcattgatgacctataaatgcgctgtggtcgacgtgcctttcggaggagctaaggctggcgttaaaatcaaccctaagaactataccgacaacgagctggagaagatcactcgcaggtttacgatggagctcgcgaagaagggatttatcggcccgggcatagacgtgcccgcgcctgacatgtccactggcgaaagggaaatgtcttggatcgccgatacttacgcctctaccataggccattatgatatcaatgcgcacgcttgtgttactggaaaaccaatcagccaaggaggtattcacgggaggatcagtgccacggggcggggcgtgttccacggcatcgagaatttcatcaacgaagctagttacatgtctatcctgggcatgaccccgggattcggagacaagacttttgtcgtccaaggctttggcaatgtgggactgcacagcatgaggtatctacacagattcggcgccaagtgcatagcagttggggagagtgatgggagcatttggaaccccgacggcatcgatcccaaggagctggaagacttcaagctccagcatggatcaatcctcgggttccctaaagcaaagccctacgaagggtccatactggaagcggactgtgatattctcatacccgctgcaagcgaaaagcagctcacaaaatccaacgccccccgcgtgaaagcgaagatcatcgctgaaggagcaaatgggcctacgacacccgaagccgataagatcttcctggagagaaacatcatggtgataccggatctatacttgaacgccggcggagttaccgtgtcctattttgaatggctcaagaacctcaatcatgtgagctacgggagattgacatttaaatacgagcgagactccaattatcatcttttaatgtccgtgcaagaatccttggagcgtaaatttggtaaacacggcggcaccatccctatcgtgcccacagcagaattccaggatcggatatccggggcatctgagaaggacatcgttcactccgggttggcatacacaatggagagatccgctcggcagatcatgcgaactgctatgaaatacaacctggggcttgatttacggactgctgcctacgtgaatgccattgaaaaggtgttcaaggtgtataatgaagccggagtaacctttacatag

SEQ ID NO: 154435 - DNA, 1548 bp, Artificial Sequence
  derived and/or modified sequence
atgtaccgatacctgggacccgggacagccagacgacgcccagccgccggagccggcatcggtaggcctgctccactgcagcgcggggggggtaggcctcgaggccggccacagctactccaggatggcggcggactgctccgctccaggagacagcacaggggaggacaggctggaggaggtcctgaggatcccggagaaagaggggccgaagccgagcccggtgcaagacacccagctgatcatcaggctctccagccctgcgctgagtcattacttccccagcactcacagcatcggaccccgtgcaagggaggcatcagatattccacagatgtgtccgtcgatgaggttaaggctttagcttccctgatgacatacaagtgcgccgtcgtcgacgtgcccttcggcggcgctaaggctggggtaaagattaatccaaaaaattacactgacaatgaacttgaaaagattacacggaggttcaccatggagttggccaagaaaggatttatcgggcccggaatcgatgtacccgcccctgacatgagcacgggggagagagagatgtcctggatcgcagacacttatgcttcaactattggacattatgacatcaatgcgcatgcctgcgtgaccggtaaacccatctcacagggcggaattcacggcaggataagtgccaccggacggggcgtttttcacggcatcgagaactttattaacgaagcatcttacatgtccatccttggaatgacacccgggttcggcgataagacgttcgtggtacagggcttcggaaacgttggcctccactctatgagatatctgcatcgcttcggagccaaatgtatcgccgttggtgagtctgacggtagcatttggaatccagacgggattgaccctaaagaactggaagactttaaattgcaacacgggtccatcttgggttttcccaaggccaagccctatgaaggaagcattctagaggcagactgcgatattttgatacccgccgcctccgaaaagcagctgacaaaatcaaatgctcctcgggtaaaggctaaaattattgccgaaggtgcaaatggccccactacaccggaggccgacaagattttcctggaacggaacattatggttatccccgacctgtatttgaatgctggcggagttacggtgtcctattttgaatggttgaagaacttaaaccacgtcagttatggacgtttaacatttaaatacgaaagagactcaaattaccacctcctaatgtccgttcaagagagccttgagaggaagttcggcaagcacggcggcacgattcctatagttcccacagccgagtttcaagaccgaatttcgggcgcttcagagaaggacatagtgcactctggactggcctacactatggagagatccgcacgccagatcatgcgtacagccatgaaatataatttgggcttggacctgcggactgccgcctacgtgaatgccattgaaaaggtctttaaagtgtataatgaggcaggtgttacttttacttag

SEQ ID NO: 154436 - DNA, 1473 bp, Artificial Sequence
  derived and/or modified sequence
atggtggaaggatttttcgataggggggcgtcaatagtcgaggataaactggtcgaggacctgcgaactagagagtccgaggaacagaaacgaaatcgggtgagaggaatccttcgcatcatcaagccatgtaaccatgtactcagcttgagcttccccatacgccgtgacgatggctcttgggaggtcatagaagggtatagggctcagcattctcagcacaggacaccctgcaagggtggcatcagatactccacagacgtgtctgtggatgaggttaaggctcttgcttcattgatgacatacaagtgcgctgtggtcgatgtcccattcggtggggccaaggcaggcgttaaaatcaatcctaaaaactacactgataatgagttagagaagatcacaaggagattcacgatggagttggccaagaaagggtttatcggccctgggattgatgtacctgcccctgatatgagcaccggcgagagggagatgagttggatcgctgatacctatgcatcaaccataggtcactacgacatcaacgcccacgcttgtgtcacaggcaaacctattagccaaggaggtatacatggccgcattagtgccactgggagaggtgttttccatggcatcgaaaacttcatcaacgaggcatcatacatgtcgatcctcggcatgacacccggttttggcgataaaacgttcgtggtgcagggattcggtaatgtgggactgcacagcatgagatacctgcatcgtttcggggccaaatgcattgctgtgggggagtctgatggatccatctggaacccggacggcattgatccaaaggaactggaggacttcaagctccaacacggcagtattctgggttttccgaaagccaaaccctacgagggatctatcctggaagctgattgcgatatcctcatccctgctgcctcagagaaacagctgactaaaagtaatgctccccgcgtgaaggccaagataattgccgagggagctaacggacctaccactcctgaagccgataaaatattcctggagcgcaacatcatggtgattcctgatctttacttgaatgccggaggcgtcaccgtttcttatttcgaatggctaaagaatctcaatcacgtgtcctacgggcgcctgacttttaagtacgagcgggattctaattaccacctgctcatgagtgtgcaggaatctctggagcggaagtttgggaaacacggcggaactattcccattgtgcctaccgccgaattccaggataggattagcggggctagcgaaaaagacatcgtgcattccggattggcatacaccatggagaggtccgctcgacaaattatgaggaccgctatgaaatataacctcggtttggacctcaggacagctgcttacgtaaatgcaattgagaaagttttcaaggtctataacgaggctggagttacatttacctag

SEQ ID NO: 154437 - DNA, 1278 bp, Artificial Sequence
  derived and/or modified sequence
atgacatgtccctgtgataatgccagttccgttttcctcggattttgcatcagatactcgacggacgtatctgtggacgaagtaaaagcactcgcttcgctgatgacatataaatgcgccgtagttgatgtgcctttcggcggggccaaggcgggtgtgaagatcaaccccaagaattatacggacaacgaactggaaaaaatcactaggaggttcacaatggaactcgccaaaaagggtttcatcggacctggaatagatgtgcccgctcccgatatgagcactggtgaacgcgagatgtcctggatcgcagacacgtacgcctcaaccatcggtcactatgatattaatgctcacgcctgcgtcactgggaaacccatctcacaggggggcattcatgggcgtatttccgctaccgggaggggggtgttccacggcattgagaacttcattaacgaagcttcttatatgagcatcctaggaatgaccccaggctttggcgacaaaacatttgtggtccagggatttggcaatgtgggtctccattccatgcgctacttacaccgatttggagctaaatgtattgcggtgggcgaatcggatggctctatttggaacccagacggcatagaccccaaggagttggaggatttcaaactgcagcacgggtcaatattaggcttccccaaagcaaagccatacgaaggtagtatcttagaggctgattgcgatattctcattcccgccgcctctgaaaaacagttgactaaatcaaacgcaccgagagtgaaagccaaaattatcgctgagggagccaatggacccaccaccccagaagcagacaaaatcttcctagagcgcaacataatggttattccagacttatatttaaacgccgggggggtaactgtgtcatatttcgagtggctgaaaaatctgaaccacgtgtcatacggcagactcacatttaagtatgaaagggattctaattatcacctgttgatgagcgtgcaggagtccttggaacgcaagttcggtaaacacggaggcaccatccctatcgtgccgactgccgaattccaagatagaatcagcggtgccagtgaaaaggacatcgtacattcaggcttagcctacaccatggagcgttcggccaggcagatcatgaggacggctatgaagtacaacttaggattggacctgcgaactgcagcatatgtgaatgcaatcgaaaaggtgttcaaagtttacaacgaggccggtgtgactttcacatag

SEQ ID NO: 154438 - DNA, 3039 bp, Artificial Sequence
  derived and/or modified sequence
gggcaacccgcgcgggacccttcctccctagtcgcggggagtctgagaaagcgcgcctgtttcgcgaccatcacgcacctcccctccgcttgtggccatgtaccgctacctgggcgaagcgctgttgctgtcccgggccgggcccgctgccctgggctcggcgtccgccgactcggccgcgttgctgggctgggcccggggacagcccgccgccgccccgcagccggggctggcattggccgcccggcgccactacagcgaggcggtggccgaccgcgaggacgaccccaacttcttcaagatggtggagggcttcttcgatcgcggcgccagcatcgtggaggacaagctggtggaggacctgaggacccgggagagcgaggagcagaagcggaaccgggtgcgcggcatcctgcggatcatcaagccctgcaaccatgtgctgagtctctccttccccatccggcgcgacgacggctcctgggaggtcatcgaaggctaccgggcccagcacagccagcaccgcacgccctgcaagggaggtatccgttacagcactgatgtgagtgtagatgaagtaaaagctttggcttctctgatgacatacaagtgtgcagtggttgatgtgccgtttgggggtgctaaagctggtgttaagatcaatcccaagaactatactgataatgaattggaaaagatcacaaggaggttcaccatggagctagcaaaaaagggctttattggtcctggcattgatgtgcctgctccagacatgagcacaggtgagcgggagatgtcctggatcgctgatacctatgccagcaccatagggcactatgatattaatgcacacgcctgtgttactggtaaacccatcagccaagggggaatccatggacgcatctctgctactggccgtggtgtcttccatgggattgaaaatttcatcaatgaagcttcttacatgagcattttaggaatgacaccagggtttggagataaaacatttgttgttcagggatttggtaatgtgggcctacactctatgagatatttacatcgttttggtgctaaatgtattgctgttggtgagtctgatgggagtatatggaatccagatggtattgacccaaaggaactggaagacttcaaattgcaacatgggtccattctgggcttccccaaggcaaagccctatgaaggaagcatcttggaggccgactgtgacatactgatcccagctgccagtgagaagcagttgaccaaatccaacgcacccagagtcaaagccaagatcattgctgaaggtgccaatgggccaacaactccagaagctgacaagatcttcctggagagaaacattatggttattccagatctctacttgaatgctggaggagtgacagtatcttactttgagtggctgaagaatctaaatcatgtcagctatggccgtttgaccttcaaatatgaaagggattctaactaccacttgctcatgtctgttcaagagagtttagaaagaaaatttggaaagcatggtggaactattcccattgtacccacggcagagttccaagacaggatatcgggtgcatctgagaaagacatcgtgcactctggcttggcatacacaatggagcgttctgccaggcaaattatgcgcacagccatgaagtataacctgggattggacctgagaacagctgcctatgttaatgccattgagaaagtcttcaaagtgtacaatgaagctggtgtgaccttcacatagatggatcatggctgacttcctcactatcctcttcacatgtaacttctgcagacctatcacaagtttacatgtaaccacagaaatccctttctctcctgactcattaataatggataccattctcaacaagtcaatccaagtcagcccgttaaggagaaagaaattaaggttagcggatcatgtacaagctgagtgtgaaagtagaaatcacctacaccagagagccattttggtattttgcctttaaataaaaagcctcctttatctggctgtgcagccttgctctgtggcttttcccaacacaatcagtgctagtgctggggaggaacagtcaagagcagtcagttgcttgcttattttttctggatgagtctgggacacactgtaactttaacacatttaagaagtaggtgtgtggccttttcagaaggtggcatggtcctcaagtgagttcttagtattttatatcagcaaaataattcaattttgcaggttgcaaacaaatataaaacctgtttctgtttatgaatattattcttttagaatagaataagtacatgctgctgtaataaaattgcctttaatcacttaacaagcctaaccttgactcaaacagtgaatgcctatagaaataataaatgaaaaaaactagtatttttatatcataaaacaatgtcatttatagcttatcattcatgtattgtccagcagacattaaaagccctgtggataattaagttatcttcatacctgcaaaatggtggaggctattttcattaaaactgtcagaatttgcttactataattatgatacagtccaaagaatgcagtcactttttatcatgttaactaattgttctcttttgaagatctatggttgactaattaaacaataattcaagtagagtgtcccagaaaaaaaccacttgggctccctgtttggagtctggctggctctgagcattgccaatggcccctactcacctgactttgtatcctctccttttagaggctttgcattctgcacccagcttcactaacagtgggctgaaaacatccttgggttgagtgtttcatttgggagttatttggccagggccttttgaacagtagtgtccccatgaagtgctagataatatatgtgtaagagtcagctttttttttttttttaactctaacacccttcagaaatttctaactactttgtaactgcatggcttaacctggtgataaaagcagttattaaaagtctacgttttccaaaa

SEQ ID NO: 154439 - DNA, 2809 bp, Artificial Sequence
  derived and/or modified sequence
atgtaccgctacctgggcccggggacagcccgccgccgccccgcagccggggctggcattggccgcccggcgccactacagcgaggcggtggccgaccgcgaggacgaccccaacttcttcaagatggtggagggcttcttcgatcgcggcgccagcatcgtggaggacaagctggtggaggacctgaggacccgggagagcgaggagcagaagcggaaccgggtgcgcggcatcctgcggatcatcaagccctgcaaccatgtgctgagtctctccttccccagcacagccagcaccgcacgccctgcaagggaggtatccgttacagcactgatgtgagtgtagatgaagtaaaagctttggcttctctgatgacatacaagtgtgcagtggttgatgtgccgtttgggggtgctaaagctggtgttaagatcaatcccaagaactatactgataatgaattggaaaagatcacaaggaggttcaccatggagctagcaaaaaagggctttattggtcctggcattgatgtgcctgctccagacatgagcacaggtgagcgggagatgtcctggatcgctgatacctatgccagcaccatagggcactatgatattaatgcacacgcctgtgttactggtaaacccatcagccaagggggaatccatggacgcatctctgctactggccgtggtgtcttccatgggattgaaaatttcatcaatgaagcttcttacatgagcattttaggaatgacaccagggtttggagataaaacatttgttgttcagggatttggtaatgtgggcctacactctatgagatatttacatcgttttggtgctaaatgtattgctgttggtgagtctgatgggagtatatggaatccagatggtattgacccaaaggaactggaagacttcaaattgcaacatgggtccattctgggcttccccaaggcaaagccctatgaaggaagcatcttggaggccgactgtgacatactgatcccagctgccagtgagaagcagttgaccaaatccaacgcacccagagtcaaagccaagatcattgctgaaggtgccaatgggccaacaactccagaagctgacaagatcttcctggagagaaacattatggttattccagatctctacttgaatgctggaggagtgacagtatcttactttgagtggctgaagaatctaaatcatgtcagctatggccgtttgaccttcaaatatgaaagggattctaactaccacttgctcatgtctgttcaagagagtttagaaagaaaatttggaaagcatggtggaactattcccattgtacccacggcagagttccaagacaggatatcgggtgcatctgagaaagacatcgtgcactctggcttggcatacacaatggagcgttctgccaggcaaattatgcgcacagccatgaagtataacctgggattggacctgagaacagctgcctatgttaatgccattgagaaagtcttcaaagtgtacaatgaagctggtgtgaccttcacatagatggatcatggctgacttcctcactatcctcttcacatgtaacttctgcagacctatcacaagtttacatgtaaccacagaaatccctttctctcctgactcattaataatggataccattctcaacaagtcaatccaagtcagcccgttaaggagaaagaaattaaggttagcggatcatgtacaagctgagtgtgaaagtagaaatcacctacaccagagagccattttggtattttgcctttaaataaaaagcctcctttatctggctgtgcagccttgctctgtggcttttcccaacacaatcagtgctagtgctggggaggaacagtcaagagcagtcagttgcttgcttattttttctggatgagtctgggacacactgtaactttaacacatttaagaagtaggtgtgtggccttttcagaaggtggcatggtcctcaagtgagttcttagtattttatatcagcaaaataattcaattttgcaggttgcaaacaaatataaaacctgtttctgtttatgaatattattcttttagaatagaataagtacatgctgctgtaataaaattgcctttaatcacttaacaagcctaaccttgactcaaacagtgaatgcctatagaaataataaatgaaaaaaactagtatttttatatcataaaacaatgtcatttatagcttatcattcatgtattgtccagcagacattaaaagccctgtggataattaagttatcttcatacctgcaaaatggtggaggctattttcattaaaactgtcagaatttgcttactataattatgatacagtccaaagaatgcagtcactttttatcatgttaactaattgttctcttttgaagatctatggttgactaattaaacaataattcaagtagagtgtcccagaaaaaaaccacttgggctccctgtttggagtctggctggctctgagcattgccaatggcccctactcacctgactttgtatcctctccttttagaggctttgcattctgcacccagcttcactaacagtgggctgaaaacatccttgggttgagtgtttcatttgggagttatttggccagggccttttgaacagtagtgtccccatgaagtgctagataatatatgtgtaagagtcagctttttttttttttttaactctaacacccttcagaaatttctaactactttgtaactgcatggcttaacctggtgataaaagcagttattaaaagtctacgttttcc

SEQ ID NO: 154440 - DNA, 1763 bp, Artificial Sequence
  derived and/or modified sequence
aaaagggcaacccgcgcgggacccttcctccctagtcgcggggagtctgagaaagcgcgcctgtttcgcgaccatcacgcacctcccctccgcttgtggccgaccgcgaggacgaccccaacttcttcaagatggtggagggcttcttcgatcgcggcgccagcatcgtggaggacaagctggtggaggacctgaggacccgggagagcgaggagcagaagcggaaccgggtgcgcggcatcctgcggatcatcaagccctgcaaccatgtgctgagtctctccttccccatccggcgcgacgacggctcctgggaggtcatcgaaggctaccgggcccagcacagccagcaccgcacgccctgcaagggaggtatccgttacagcactgatgtgagtgtagatgaagtaaaagctttggcttctctgatgacatacaagtgtgcagtggttgatgtgccgtttgggggtgctaaagctggtgttaagatcaatcccaagaactatactgataatgaattggaaaagatcacaaggaggttcaccatggagctagcaaaaaagggctttattggtcctggcattgatgtgcctgctccagacatgagcacaggtgagcgggagatgtcctggatcgctgatacctatgccagcaccatagggcactatgatattaatgcacacgcctgtgttactggtaaacccatcagccaagggggaatccatggacgcatctctgctactggccgtggtgtcttccatgggattgaaaatttcatcaatgaagcttcttacatgagcattttaggaatgacaccagggtttggagataaaacatttgttgttcagggatttggtaatgtgggcctacactctatgagatatttacatcgttttggtgctaaatgtattgctgttggtgagtctgatgggagtatatggaatccagatggtattgacccaaaggaactggaagacttcaaattgcaacatgggtccattctgggcttccccaaggcaaagccctatgaaggaagcatcttggaggccgactgtgacatactgatcccagctgccagtgagaagcagttgaccaaatccaacgcacccagagtcaaagccaagatcattgctgaaggtgccaatgggccaacaactccagaagctgacaagatcttcctggagagaaacattatggttattccagatctctacttgaatgctggaggagtgacagtatcttactttgagtggctgaagaatctaaatcatgtcagctatggccgtttgaccttcaaatatgaaagggattctaactaccacttgctcatgtctgttcaagagagtttagaaagaaaatttggaaagcatggtggaactattcccattgtacccacggcagagttccaagacaggatatcgggtgcatctgagaaagacatcgtgcactctggcttggcatacacaatggagcgttctgccaggcaaattatgcgcacagccatgaagtataacctgggattggacctgagaacagctgcctatgttaatgccattgagaaagtcttcaaagtgtacaatgaagctggtgtgaccttcacatagatggatcatggctgacttcctcactatcctcttcacatgtaacttctgcagacctatcacaagtttacatgtaaccacagaaatccctttctctcctgactcattaataatggataccattctcaacaagtcaatccaagtcagcccgttaaggagaaa

SEQ ID NO: 154441 - DNA, 2984 bp, Artificial Sequence
  derived and/or modified sequence
atgcagagtagacgctgcaccggtctccttttggtcccggtgtctgtgtcacacacggcgggtcctgccgaaatgcacttctaggaaagggaatgacctgcccgtgtgataatgcctcgtcagtgttcttgggcttttatgcccagctctctcctgtttttataagtcgcagctccgcaaactcactgaagcaactcgtttaccatagtttttactacatgtacctgaggccgttagatttgtctgtgttaaggatttgaaaggaggcagaaattaatacagattcaagtgttcactatcaagtcggaattgttaatatgtgaaatactactgttaaaggcaggaaaggctttattaaggacaagaagacaaactaggagaaggagctactcaagaccttccgattatctttacaaaaaggcaactacacctagaagattctgcagccacacacattctgccttcacttgaggtcaactgccttcaccaaggtatccgttacagcactgatgtgagtgtagatgaagtaaaagctttggcttctctgatgacatacaagtgtgcagtggttgatgtgccgtttgggggtgctaaagctggtgttaagatcaatcccaagaactatactgataatgaattggaaaagatcacaaggaggttcaccatggagctagcaaaaaagggctttattggtcctggcattgatgtgcctgctccagacatgagcacaggtgagcgggagatgtcctggatcgctgatacctatgccagcaccatagggcactatgatattaatgcacacgcctgtgttactggtaaacccatcagccaagggggaatccatggacgcatctctgctactggccgtggtgtcttccatgggattgaaaatttcatcaatgaagcttcttacatgagcattttaggaatgacaccagggtttggagataaaacatttgttgttcagggatttggtaatgtgggcctacactctatgagatatttacatcgttttggtgctaaatgtattgctgttggtgagtctgatgggagtatatggaatccagatggtattgacccaaaggaactggaagacttcaaattgcaacatgggtccattctgggcttccccaaggcaaagccctatgaaggaagcatcttggaggccgactgtgacatactgatcccagctgccagtgagaagcagttgaccaaatccaacgcacccagagtcaaagccaagatcattgctgaaggtgccaatgggccaacaactccagaagctgacaagatcttcctggagagaaacattatggttattccagatctctacttgaatgctggaggagtgacagtatcttactttgagtggctgaagaatctaaatcatgtcagctatggccgtttgaccttcaaatatgaaagggattctaactaccacttgctcatgtctgttcaagagagtttagaaagaaaatttggaaagcatggtggaactattcccattgtacccacggcagagttccaagacaggatatcgggtgcatctgagaaagacatcgtgcactctggcttggcatacacaatggagcgttctgccaggcaaattatgcgcacagccatgaagtataacctgggattggacctgagaacagctgcctatgttaatgccattgagaaagtcttcaaagtgtacaatgaagctggtgtgaccttcacatagatggatcatggctgacttcctcactatcctcttcacatgtaacttctgcagacctatcacaagtttacatgtaaccacagaaatccctttctctcctgactcattaataatggataccattctcaacaagtcaatccaagtcagcccgttaaggagaaagaaattaaggttagcggatcatgtacaagctgagtgtgaaagtagaaatcacctacaccagagagccattttggtattttgcctttaaataaaaagcctcctttatctggctgtgcagccttgctctgtggcttttcccaacacaatcagtgctagtgctggggaggaacagtcaagagcagtcagttgcttgcttattttttctggatgagtctgggacacactgtaactttaacacatttaagaagtaggtgtgtggccttttcagaaggtggcatggtcctcaagtgagttcttagtattttatatcagcaaaataattcaattttgcaggttgcaaacaaatataaaacctgtttctgtttatgaatattattcttttagaatagaataagtacatgctgctgtaataaaattgcctttaatcacttaacaagcctaaccttgactcaaacagtgaatgcctatagaaataataaatgaaaaaaactagtatttttatatcataaaacaatgtcatttatagcttatcattcatgtattgtccagcagacattaaaagccctgtggataattaagttatcttcatacctgcaaaatggtggaggctattttcattaaaactgtcagaatttgcttactataattatgatacagtccaaagaatgcagtcactttttatcatgttaactaattgttctcttttgaagatctatggttgactaattaaacaataattcaagtagagtgtcccagaaaaaaaccacttgggctccctgtttggagtctggctggctctgagcattgccaatggcccctactcacctgactttgtatcctctccttttagaggctttgcattctgcacccagcttcactaacagtgggctgaaaacatccttgggttgagtgtttcatttgggagttatttggccagggccttttgaacagtagtgtccccatgaagtgctagataatatatgtgtaagagtcagctttttttttttttttaactctaacacccttcagaaatttctaactactttgtaactgcatggcttaacctggtgataaaagcagttattaaaagtctacgttttcc

SEQ ID NO: 154442 - DNA, 1537 bp, Artificial Sequence
  derived and/or modified sequence
gtatatgctgatcttgcatgcagagtagacgctgcaccggtctccttttggtcccggtgtctgtgtcacacacggcgggtcctgccgaaatgcacttctaggaaagggaatgacctgcccgtgtgataatgcctcgtcagtgttcttgggcttttgtatccgttacagcactgatgtgagtgtagatgaagtaaaagctttggcttctctgatgacatacaagtgtgcagtggttgatgtgccgtttgggggtgctaaagctggtgttaagatcaatcccaagaactatactgataatgaattggaaaagatcacaaggaggttcaccatggagctagcaaaaaagggctttattggtcctggcattgatgtgcctgctccagacatgagcacaggtgagcgggagatgtcctggatcgctgatacctatgccagcaccatagggcactatgatattaatgcacacgcctgtgttactggtaaacccatcagccaagggggaatccatggacgcatctctgctactggccgtggtgtcttccatgggattgaaaatttcatcaatgaagcttcttacatgagcattttaggaatgacaccagggtttggagataaaacatttgttgttcagggatttggtaatgtgggcctacactctatgagatatttacatcgttttggtgctaaatgtattgctgttggtgagtctgatgggagtatatggaatccagatggtattgacccaaaggaactggaagacttcaaattgcaacatgggtccattctgggcttccccaaggcaaagccctatgaaggaagcatcttggaggccgactgtgacatactgatcccagctgccagtgagaagcagttgaccaaatccaacgcacccagagtcaaagccaagatcattgctgaaggtgccaatgggccaacaactccagaagctgacaagatcttcctggagagaaacattatggttattccagatctctacttgaatgctggaggagtgacagtatcttactttgagtggctgaagaatctaaatcatgtcagctatggccgtttgaccttcaaatatgaaagggattctaactaccacttgctcatgtctgttcaagagagtttagaaagaaaatttggaaagcatggtggaactattcccattgtacccacggcagagttccaagacaggatatcgggtgcatctgagaaagacatcgtgcactctggcttggcatacacaatggagcgttctgccaggcaaattatgcgcacagccatgaagtataacctgggattggacctgagaacagctgcctatgttaatgccattgagaaagtcttcaaagtgtacaatgaagctggtgtgaccttcacatagatggatcatggctgacttcctcactatcctcttcacatgtaacttctgcagacctatcacaagtttacatgtaaccacagaaatccctttctctcctgactcattaataatggataccattctcaacaagtcaatccaagtcagcccgtt

SEQ ID NO: 154443 - DNA, 1677 bp, Artificial Sequence
  derived and/or modified sequence
atgtaccgctacctgggggaggccctgctgctgagccgggccggccctgctgccctgggcagcgccagcgctgacagcgctgccctgctgggctgggcccggggccagcctgctgctgccccccagcccggcctggccctggccgcccggcggcactacagcgaggccgtggccgacagagaagatgaccccaacttcttcaagatggtggagggcttctttgacagaggagccagcatcgtggaggacaagctggtggaggacctgcggacccgggagagcgaggagcagaagaggaacagagtgcggggcatcctgcgcatcatcaagccctgcaaccacgtgctgagcctgtccttccccatcagaagagatgatggctcctgggaggtgattgagggctaccgggcccagcacagccagcacaggaccccctgcaagggcggcatccgctacagcacagatgtgtctgtggatgaggtgaaggccctggccagcctgatgacctacaagtgtgctgtggtggatgtgccctttggaggagccaaggccggcgtgaagatcaaccccaagaactacacagacaatgagctggagaagatcacccggcgcttcaccatggagctggccaagaagggcttcatcggccctggcattgatgtgcctgccccagacatgagcactggagagcgggagatgtcctggattgctgacacctacgccagcaccatcggccactatgacatcaatgcccacgcctgtgtgacaggcaagcccatcagccagggcggcatccacggccgcatcagcgccaccggccggggcgtcttccacggcatcgagaacttcatcaatgaggccagctacatgagcatcctgggcatgaccccaggctttggagacaagacctttgtggtgcagggctttggaaatgtgggcctgcacagcatgagatacctgcacagatttggagccaagtgcatcgctgtgggggagagtgatggcagcatctggaacccagatggcatcgaccccaaggagctggaggacttcaagctgcagcacggcagcatcctgggcttccccaaggccaagccctatgagggcagcatcctggaggccgactgtgacatcctgatcccagctgccagcgagaagcagctgaccaagagcaatgccccccgggtgaaggccaagatcatcgccgagggcgccaacggccccaccaccccagaggccgacaagatcttcctggagaggaacatcatggtgatcccagacctgtacctgaatgctgggggcgtgacagtgtcctactttgagtggctgaagaacctgaaccacgtgtcctatggccgcctgaccttcaagtatgaaagagacagcaactaccacctgctgatgtctgtgcaggagagcctggagaggaagtttgggaagcatggaggcaccatccccatcgtgcccacagctgagttccaggaccgcatcagcggggccagcgagaaggacatcgtgcacagcggcctggcctacaccatggagaggtctgcccggcagatcatgaggacagccatgaagtacaacctgggcctggacctgaggacagctgcctacgtgaatgccatcgagaaggtgttcaaggtgtacaatgaagctggggtgaccttcacctag

SEQ ID NO: 154444 - DNA, 1548 bp, Artificial Sequence
  derived and/or modified sequence
atgtaccgctacctgggccctggaacagcccggcggcggcctgctgctggggccggcatcggccgcccagcccccctgcagagaggaggcggccggccccggggccggccccagctgctgcaggacggcggcggcctgctgcggagccggcggcagcacagaggaggccaggccggcggcggcccagaagatcctggagagagaggagctgaggccgagcccggggcccggcaccctgctgaccaccaggccctgcagccctgtgccgagagcctgctgccccagcacagccagcacaggaccccctgcaagggcggcatccgctacagcacagatgtgtctgtggatgaggtgaaggccctggccagcctgatgacctacaagtgtgctgtggtggatgtgccctttggaggagccaaggccggcgtgaagatcaaccccaagaactacacagacaatgagctggagaagatcacccggcgcttcaccatggagctggccaagaagggcttcatcggccctggcattgatgtgcctgccccagacatgagcactggagagcgggagatgtcctggattgctgacacctacgccagcaccatcggccactatgacatcaatgcccacgcctgtgtgacaggcaagcccatcagccagggcggcatccacggccgcatcagcgccaccggccggggcgtcttccatggaattgagaacttcatcaatgaggccagctacatgagcatcctgggcatgaccccaggctttggagacaagacctttgtggtgcagggctttggaaatgtgggcctgcacagcatgagatacctgcacagatttggagccaagtgcatcgctgtgggggagagtgatggcagcatctggaacccagatggcatcgaccccaaggagctggaggacttcaagctgcagcacggcagcatcctgggcttccccaaggccaagccctatgagggcagcatcctggaggccgactgtgacatcctgatcccagctgccagcgagaagcagctgaccaagagcaatgccccccgggtgaaggccaagatcatcgccgagggcgccaacggccccaccaccccagaggccgacaagatcttcctggagaggaacatcatggtgatcccagacctgtacctgaatgctgggggcgtgacagtgtcctactttgagtggctgaagaacctgaaccacgtgtcctatggccgcctgaccttcaagtatgagcgggacagcaactaccacctgctgatgtctgtgcaggagagcctggagaggaagtttgggaagcacggcggcaccatccccatcgtgcccacagctgagttccaggaccgcatcagcggggccagcgagaaggacatcgtgcacagcggcctggcctacaccatggagaggtctgcccggcagatcatgaggacagccatgaagtacaacctgggcctggacctgaggacagctgcctacgtgaatgccatcgagaaggtgttcaaggtgtacaatgaggccggcgtgaccttcacctag

SEQ ID NO: 154445 - DNA, 1473 bp, Artificial Sequence
  derived and/or modified sequence
atggtggagggcttctttgacagaggagccagcatcgtggaggacaagctggtggaggacctgcggacccgggagagcgaggagcagaagaggaacagagtgcggggcatcctgcgcatcatcaagccctgcaaccacgtgctgagcctgtccttccccatcagaagagatgatggctcctgggaggtgattgagggctaccgggcccagcacagccagcacaggaccccctgcaagggcggcatccgctacagcacagatgtgtctgtggatgaggtgaaggccctggccagcctgatgacctacaagtgtgctgtggtggatgtgccctttggaggagccaaggccggcgtgaagatcaaccccaagaactacacagacaatgagctggagaagatcacccggcgcttcaccatggagctggccaagaagggcttcatcggccctggcattgatgtgcctgccccagacatgagcactggagagcgggagatgtcctggattgctgacacctacgccagcaccatcggccactatgacatcaatgcccacgcctgtgtgacaggcaagcccatcagccagggcggcatccacggccgcatcagcgccaccggccggggcgtcttccacggcatcgagaacttcatcaatgaggccagctacatgagcatcctgggcatgaccccaggctttggagacaagacctttgtggtgcagggctttggaaatgtgggcctgcacagcatgagatacctgcacagatttggagccaagtgcatcgctgtgggggagagtgatggcagcatctggaacccagatggcatcgaccccaaggagctggaggacttcaagctgcagcacggcagcatcctgggcttccccaaggccaagccctatgagggcagcatcctggaggccgactgtgacatcctgatcccagctgccagcgagaagcagctgaccaagagcaatgccccccgggtgaaggccaagatcatcgccgagggcgccaacggccccaccaccccagaggccgacaagatcttcctggagaggaacatcatggtgatcccagacctgtacctgaatgctgggggcgtgacagtgtcctactttgagtggctgaagaacctgaaccacgtgtcctatggccgcctgaccttcaagtatgaaagagacagcaactaccacctgctgatgtctgtgcaggagagcctggagaggaagtttgggaagcatggaggcaccatccccatcgtgcccacagctgagttccaggaccgcatcagcggggccagcgagaaggacatcgtgcacagcggcctggcctacaccatggagaggtctgcccggcagatcatgaggacagccatgaagtacaacctgggcctggacctgaggacagctgcctacgtgaatgccatcgagaaggtgttcaaggtgtacaatgaagctggggtgaccttcacctag

SEQ ID NO: 154446 - DNA, 1278 bp, Artificial Sequence
  derived and/or modified sequence
atgacctgcccctgtgacaatgccagcagcgtcttcctgggcttctgcatccgctacagcacagatgtgtctgtggatgaggtgaaggccctggccagcctgatgacctacaagtgtgctgtggtggatgtgccctttggaggagccaaggccggcgtgaagatcaaccccaagaactacacagacaatgagctggagaagatcacccggcgcttcaccatggagctggccaagaagggcttcatcggccctggcattgatgtgcctgccccagacatgagcactggagagcgggagatgtcctggattgctgacacctacgccagcaccatcggccactatgacatcaatgcccacgcctgtgtgacaggcaagcccatcagccagggcggcatccacggccgcatcagcgccaccggccggggcgtcttccatggaattgagaacttcatcaatgaggccagctacatgagcatcctgggcatgaccccaggctttggagacaagacctttgtggtgcagggctttggaaatgtgggcctgcacagcatgagatacctgcacagatttggagccaagtgcatcgctgtgggggagagtgatggcagcatctggaacccagatggcatcgaccccaaggagctggaggacttcaagctgcagcacggcagcatcctgggcttccccaaggccaagccctatgagggcagcatcctggaggccgactgtgacatcctgatcccagctgccagcgagaagcagctgaccaagagcaatgccccccgggtgaaggccaagatcatcgccgagggcgccaacggccccaccaccccagaggccgacaagatcttcctggagaggaacatcatggtgatcccagacctgtacctgaatgctgggggcgtgacagtgtcctactttgagtggctgaagaacctgaaccacgtgtcctatggccgcctgaccttcaagtatgagcgggacagcaactaccacctgctgatgtctgtgcaggagagcctggagaggaagtttgggaagcacggcggcaccatccccatcgtgcccacagctgagttccaggaccgcatcagcggggccagcgagaaggacatcgtgcacagcggcctggcctacaccatggagaggtctgcccggcagatcatgaggacagccatgaagtacaacctgggcctggacctgaggacagctgcctacgtgaatgccatcgagaaggtgttcaaggtgtacaatgaggccggcgtgaccttcacctag

SEQ ID NO: 154447 - DNA, 1677 bp, Artificial Sequence
  derived and/or modified sequence
atgtaccggtacctgggcgaggccctgctgctgagccgggccggccctgctgccctaggatcggccagcgctgacagcgccgccctgcttggatgggctcgggggcagcccgcagctgcacctcagcctgggctcgccctagctgctaggagacactattcagaagcagtcgcagaccgggaagatgaccccaatttctttaaaatggtagagggtttctttgacaggggtgcgtctatagtggaagacaagctggttgaagacttacggactagggaaagcgaggagcagaagaggaacagagtgagaggcatccttcggatcataaaaccatgtaatcacgtgttatcgcttagcttcccaatacggcgcgacgacggttcctgggaggtgatcgagggataccgggctcagcatagccaacacaggaccccctgcaaaggcggtattagatactccacagatgtctccgttgatgaagttaaagccctggccagtctcatgacatataagtgtgcggtggtcgacgtgcctttcggaggagccaaggctggggtgaaaattaacccaaaaaactatactgataatgagctagaaaagataaccaggagatttactatggagctcgcaaaaaaaggattcatagggcctggcattgatgtccccgcccctgacatgtccacgggtgagcgggagatgtcttggatcgccgatacctatgcgtccacaatcggacattacgatatcaatgcccacgcttgtgtgaccggaaagccaatatctcaggggggaatacatggcaggatctccgccacagggcgaggcgtgttccacgggatcgaaaatttcatcaacgaagctagctacatgagtatcctcggcatgacccccggcttcggggataagacgtttgtcgtccagggctttggcaatgtgggcctgcattccatgcggtatctccatcgctttggagctaaatgcatcgccgtcggggagagtgatggctccatatggaatccagatggcatcgatcctaaggagctggaggatttcaaacttcagcacggctcgatcttaggttttcccaaggctaagccatatgaaggctctattctcgaggcagattgcgatatcttaattcccgccgcatccgagaagcagttgaccaagtccaacgcacctcgggtgaaggctaagattatcgccgagggcgctaacggaccgacgacaccagaagcagacaagatcttcctggagagaaatattatggtcatccctgacctttatctcaacgccggaggggtcaccgtaagctactttgagtggctaaagaatctgaaccacgtctcttacggaagactgactttcaagtacgagcgggattccaattatcatctgttaatgagcgttcaggagtccttggagcgcaagtttggcaaacacggcggcacaatcccgatcgttcccacagctgaatttcaggaccgtatcagcggcgcctcagaaaaggacatcgtccactcaggactggcgtacactatggagagaagtgctagacaaattatgcggaccgccatgaagtataatttgggactcgatctccgcacagccgcttatgtgaatgcgatcgagaaagtgtttaaggtgtacaacgaagctggagttactttcacttag

SEQ ID NO: 154448 - DNA, 1548 bp, Artificial Sequence
  derived and/or modified sequence
atgtaccggtacctgggccccggcaccgcccggcggcggcccgccgctggcgctggtattggacgtcccgccccccttcagaggggtgggggaaggccgagagggcgtccacagttgctgcaggacggcggaggactcctccggagtcgtcgccaacaccgcggaggacaggcaggaggaggccctgaggaccctggcgaacggggcgcggaagccgaacctggggcacggcaccccgcagaccaccaggcactgcagccatgtgcagaaagtctgctgccccagcacagccagcatcgcaccccatgtaagggaggaattcgttatagcactgatgtttctgtggatgaagtgaaagctttagctagcctaatgacctacaaatgcgccgtggtggatgttccattcggcggcgctaaggcaggagtcaaaatcaatcctaaaaactacaccgacaatgagctggaaaagatcacccgaagattcactatggagctcgctaaaaaaggatttatagggcctggtatcgacgtacccgcaccggacatgtccacgggggaacgcgagatgtcatggatcgctgatacatacgcaagtacaatcggccattatgatattaacgcccacgcctgcgtcaccggcaagcccatctctcagggaggcatccatggacgtataagcgccaccggccgcggagtctttcatggaatcgagaacttcataaacgaggctagttacatgtccatcttgggaatgacgcccggcttcggggacaagacttttgtggtgcagggattcggcaatgtgggactacatagtatgcgctatctgcaccgattcggagcgaagtgtatcgccgtcggggaaagcgacggaagcatttggaaccctgacggaattgatcccaaggagctcgaggattttaagctccaacacggatccatattgggttttccaaaggctaagccctatgagggtagcatcctggaggccgactgtgacatcttgatccccgctgccagcgaaaagcaactgacaaagtccaatgctccacgggttaaggctaaaataatcgctgagggggccaacggacccaccacacccgaggccgataagatttttctggagcgcaatatcatggtcatccctgacctgtatctcaatgccggcggggtaacagtcagttacttcgagtggctgaagaaccttaatcatgttagctacggacgactgacattcaagtatgagcgagactctaattaccacctgctgatgtcagtgcaagagagtctggagcgcaaattcggcaaacatggagggacgattcctatagtgccgactgctgagtttcaggaccgcatcagtggcgcatctgagaaggacattgtgcattccggcctcgcctacacaatggagcggagtgcccggcagatcatgcgcacagcaatgaaatacaatctcgggcttgacctgagaaccgctgcctacgtgaacgctattgagaaggtctttaaagtctacaatgaggccggggtgaccttcacatag

SEQ ID NO: 154449 - DNA, 1473 bp, Artificial Sequence
  derived and/or modified sequence
atggtggagggcttcttcgaccggggcgccagcatcgtggaggacaaactggtcgaagacttgcgaaccagggagagcgaagaacagaagaggaatcgagtgaggggaatcctgaggatcataaagccatgtaaccacgtcctgtcactaagcttccccatacgccgggacgacggttcatgggaagtcatagagggctatcgggcccagcattctcagcaccgcaccccctgcaaaggtgggattaggtacagtaccgacgtgtccgtcgatgaagtcaaagctctcgctagcctcatgacctacaagtgtgccgtggtagacgtgccttttggaggggccaaggctggcgttaaaattaatcccaagaactatacagataatgaacttgagaagataacccgtaggtttaccatggagttggctaaaaagggattcatcgggcctggaatagatgtgcccgccccagacatgtctactggcgagagagaaatgagttggatcgctgacacatacgctagtaccatcggccattacgatatcaacgcccacgcctgtgtcaccggaaaaccaatatcccaggggggaattcatggtcggatttctgctacaggccggggagtcttccatggcattgagaatttcattaatgaggcaagctatatgagcattctcggtatgacacctggcttcggagacaagaccttcgtggtgcagggatttggcaacgtgggcctccactccatgagatacctccaccggttcggcgctaaatgtatcgccgtgggcgaatcagacggtagcatctggaatccagacggaatcgacccaaaggagcttgaggacttcaaacttcaacacggctccattttggggttccctaaagctaagccttatgagggctcgatactggaggcagactgcgacattttgatcccggccgcaagcgaaaaacagctcactaaatccaacgcaccccgggtgaaggctaagattatagctgagggggccaatgggcccaccacgcccgaggcagataaaattttcctggagcgcaatattatggtgatccccgatctctacctgaacgctgggggcgtgactgtgagctatttcgagtggctgaaaaatctgaaccatgtatcatatggaagacttacgttcaaatacgagcgggattcgaattatcacctcttgatgagtgtccaggaatccctagaacgaaagttcggcaagcacggcgggactatacccatcgtgccgactgccgagttccaggatcgcatatcaggtgccagcgaaaaggatattgtccatagcggcctcgcctatactatggagcggtcagcgcgccagattatgcgtaccgctatgaaatataatttggggctagacctgcgcacggcagcgtacgtgaatgccatcgaaaaagtgtttaaggtctataatgaggcgggagtcacttttacttag

SEQ ID NO: 154450 - DNA, 1278 bp, Artificial Sequence
  derived and/or modified sequence
atgacctgcccctgcgacaacgccagcagcgtgttcctgggcttctgtatcaggtattccacagatgtctccgttgacgaggtgaaagcacttgcttctctgatgacgtacaaatgcgctgttgtggacgtaccatttgggggggctaaggccggagtgaaaattaacccgaagaattataccgataatgaactggagaaaatcaccaggcggttcaccatggagctggccaagaagggcttcatcggccccggtatcgacgtgcctgcgcccgatatgagtacgggagaaagagaaatgtcctggatcgcagacacttacgctagtacaattggccattatgatataaacgctcacgcctgtgtgactggcaaacccatcagtcagggtggaatccatggcaggatttccgcaaccggtcgcggagtgtttcacggtatcgagaactttatcaatgaagcctcgtacatgtctattctgggtatgacaccgggtttcggagataaaacattcgttgtccaggggttcggtaacgtgggtctgcattctatgagataccttcatagatttggcgcgaagtgcatcgcagttggagagtcggacggatccatttggaaccctgacggcatcgacccaaaagagctggaggatttcaaactgcagcatggctcgatcctggggttccccaaagccaagccatatgaaggtagcatcctggaggccgactgcgacatcctgatacccgcagcttctgagaagcagttgacaaagagcaacgctcccagagttaaggctaagatcatagccgagggcgccaacgggcctacaactccggaagcagacaagatttttctcgaacgtaacatcatggtaatacccgatttatatttaaatgctggcggagtcactgtgtcatacttcgagtggctgaagaacctgaatcacgtctcatacggccgccttacctttaagtacgaaagggatagcaattaccacttattaatgagcgtacaggaatccttggaacggaagttcgggaagcacggcgggaccatccctattgtccccacagcagagtttcaggataggatttctggtgcttctgaaaaggacatagtgcattccggattagcttacaccatggagagaagtgcccgccaaataatgcgcacggccatgaaatacaacctcgggctggatcttcgaactgcagcttacgtcaatgcaatcgaaaaggtgtttaaggtctataacgaagccggcgttactttcacttag

SEQ ID NO: 154451 - DNA, 1677 bp, Artificial Sequence
  derived and/or modified sequence
atgtaccgataccttggcgaagctcttctcttatcccgggctggcccagcggcattgggatctgcgtcagccgactccgctgccttactggggtgggccagggggcagccagctgctgcccctcaacccggactggcccttgccgcaaggaggcactactccgaggcggtggccgatagagaagacgatccgaacttctttaagatggtcgaagggttctttgataggggagcgtctattgtagaagataagctggttgaagacctgaggactagagaaagcgaagagcagaaacgaaacagggttagggggattcttcggatcatcaagccatgtaaccacgtgctgtcactgtcgttccctataaggagagacgatgggtcatgggaggttattgagggatacagggcacagcattcccagcaccgcaccccttgtaagggcggtattcgctattcaactgatgtttcagtagatgaagtcaaggccctggcatcattaatgacatataagtgtgccgttgtggatgtgccatttggtggagccaaggctggcgtcaaaatcaatcccaagaattacacggacaacgaattagagaagatcacaagaaggttcactatggaactggccaaaaaaggcttcatcggcccaggcatcgacgtacccgcaccagacatgtctacgggggagcgggaaatgagctggatcgccgacacatatgcatcaaccatcgggcactatgatatcaacgcccatgcctgtgtaactggtaaacccatcagccagggcggaattcatggtaggatctccgctactgggagaggagtgttccacgggatcgaaaacttcattaatgaggcatcatacatgagcattctcggcatgactcctggattcggcgacaagacttttgtcgtccagggtttcggcaatgtaggactccatagcatgagatacctgcacagatttggggcaaagtgcatagctgtcggagagtccgacggatccatttggaacccagacggaatcgaccctaaggagctggaggactttaaattgcagcatggatccattctagggttccccaaggccaagccgtacgaggggtccatcctcgaggcagactgtgacatcctaatccctgctgccagcgagaagcagcttacgaagagtaacgcccctagagtgaaagccaagatcatcgcggagggcgcaaatggacccacaaccccagaagccgataagatcttcttggagcgcaacatcatggtcatacctgatttatacctgaacgcgggaggcgttaccgtgtcatatttcgagtggctgaaaaacctgaatcatgtgagttacggccgactcaccttcaaatatgagagagacagcaactatcacctgctgatgtctgtgcaggaatccctggagcgtaagttcggtaagcacgggggaactattccgatagtgcctactgctgagtttcaggatcgaatcagcggcgctagtgagaaagacattgtccactccgggttggcgtacacgatggagagatccgctagacagatcatgagaacagcaatgaaatataatcttggccttgatctgaggactgccgcttacgtgaacgcaatcgagaaggtgtttaaggtttacaacgaggccggtgtgacttttacgtag

SEQ ID NO: 154452 - DNA, 1548 bp, Artificial Sequence
  derived and/or modified sequence
atgtacaggtatctgggccctgggactgcaagacgcagacctgccgcaggggctggtattggaagaccggcacccctccagcggggaggtggaagacccagaggcagacctcaactgctccaggacggcggtggcctgctaaggagccggagacagcaccgtggtggacaggcaggaggaggccctgaggatcccggtgaaagaggcgctgaggcagaaccgggtgcacggcacccagcagatcaccaggctctgcaaccgtgtgcggagagcctccttcctcaacatagtcagcatcgaactccttgcaagggcggtattcgttattccaccgatgtctccgtcgacgaggttaaagcactggccagcctaatgacttataagtgtgcagttgtcgacgtcccatttgggggagcaaaagctggcgtaaaaatcaatcccaaaaactacaccgacaatgaactggaaaaaatcactagacggttcaccatggagctggcgaagaagggcttcatcggaccaggcattgacgtacccgcacctgacatgtctacgggggagcgggaaatgagttggatcgccgacacctacgcttctactatagggcattatgacatcaacgcgcacgcttgtgtgaccgggaagccaatatcacaaggcggaattcacgggaggatcagtgccaccggtaggggagtatttcatggcatcgagaatttcataaatgaggcctcctacatgtctattcttgggatgacaccaggttttggtgataaaacttttgtagtgcagggcttcggtaatgttggtctgcactccatgcgatatctgcacaggttcggagcaaagtgtatcgccgttggcgagtcagatggatctatctggaatcccgatggcattgacccaaaagagttagaagatttcaagttacagcacggcagcatccttggctttcctaaggccaaaccctatgaagggagtattttggaggccgattgcgacattctaatcccagccgctagcgaaaagcagcttaccaaaagcaacgcaccacgggtaaaagccaaaatcatagcggaaggagcaaatggcccaaccacacccgaggctgacaagatttttcttgaacgcaacatcatggtgataccggacttatacctgaatgccggaggcgtgacagtgtcatatttcgagtggctaaagaatttaaatcacgtttcctacggaagactgaccttcaagtacgaacgggacagcaattaccatctgctgatgtccgtccaggagagccttgagaggaagtttggaaagcacgggggtaccatacccattgtgcctacagccgaattccaggatagaatcagcggagccagtgaaaaggatattgttcattcaggactggcttacacaatggaacggtcggccaggcaaatcatgcggacggcaatgaaatataacctcggcctagatctgcgcacagccgcatatgtgaacgccatcgaaaaggtgttcaaagtctataacgaggctggtgtcacctttacctag

SEQ ID NO: 154453 - DNA, 1473 bp, Artificial Sequence
  derived and/or modified sequence
atggttgagggattcttcgaccggggagcctccatcgtggaggacaagttagtggaagatttgagaacccgggagtctgaggaacagaaacgaaatcgtgtccgaggcattcttagaataattaagccttgcaaccacgtcctgtcgttatcttttcccattaggcgcgacgatgggtcctgggaagtcatcgaagggtaccgagcccagcacagtcagcatagaacgccctgtaaaggtggaatccggtacagtacagatgtgtccgtcgacgaggtaaaggcacttgcctccctcatgacttataaatgtgcagtcgtggacgtgccttttggcggagccaaggctggcgtcaagattaatccgaagaattatactgacaacgagttagagaaaatcaccagacgctttaccatggaactggccaaaaagggattcatcgggcctggaattgacgttcccgctccagacatgagtaccggcgagcgagaaatgtcatggatagccgacacctacgcgagcaccatcggccactatgatatcaacgctcacgcttgcgtaacaggtaagcccatatctcagggaggcattcatggcaggatcagcgccacaggcaggggtgtttttcacggaattgagaattttataaacgaagcgtcttacatgagcattctgggaatgactcctggattcggtgacaagacgtttgtggtccaggggttcgggaacgtgggcttacactctatgcgctatctccatagattcggagcaaagtgcatcgccgtcggagagagtgatggctccatctggaatccagatggcattgaccccaaggaattggaggattttaagctgcagcacgggtccatcctcggatttcccaaagccaaaccttatgagggttccattctggaggcggattgtgatatattgataccagcagcctctgagaaacagctaacgaagtctaatgctcctagggttaaagcaaaaattattgctgagggagccaatggcccaaccacccctgaggcagataaaatcttccttgaacgcaatattatggtgatccctgacttgtatcttaatgcagggggagtcaccgtgagctactttgaatggctcaagaaccttaaccatgtttcttacgggagactaacattcaagtacgagagggactctaactatcatctgctgatgtctgtgcaggagtcattggaacgcaagtttggaaagcatggagggacgattccaatcgttccaactgctgagtttcaagatcgcatttccggggcaagcgaaaaagacattgttcactcaggtctggcgtatacaatggaacgttcagctcggcagataatgcgaacagctatgaagtacaatctagggctcgacttgcgaactgccgcatacgtgaatgccattgaaaaggttttcaaggtgtataacgaggccggtgtgacttttacctag

SEQ ID NO: 154454 - DNA, 1278 bp, Artificial Sequence
  derived and/or modified sequence
atgacatgcccctgcgataacgcaagttccgtattccttggattctgcatcagatacagcacggatgtctctgtggacgaagttaaggctctggcatctctgatgacctataagtgcgccgtggtcgatgtcccctttggcggtgccaaggcaggagtgaagatcaaccctaaaaattatacagataatgagcttgagaagattacgcggaggttcactatggagcttgccaagaagggcttcatcggacccggtattgacgtgccggctcccgacatgtctactggggagcgagagatgtcctggatagctgacacctatgccagtactatcgggcattacgacataaacgcacacgcttgtgtgactggaaaacctatctcacagggtggcatccacgggaggatcagcgctacagggagaggcgtgttccatggcatcgagaattttattaatgaggcgtcctacatgtccatcctgggcatgacgccaggttttggtgacaaaacattcgtggtgcaaggctttggcaacgtggggcttcacagtatgagatacttacaccgttttggggctaagtgcatagcagttggcgaatctgacggcagcatttggaacccggatggcattgacccaaaggagctcgaggattttaagctacaacacggttccatactgggttttccaaaggcaaaaccctacgaagggtcgatactagaggcagactgtgacatcctgattcccgcagcctcggaaaagcagctgacaaaatccaatgctccccgagtaaaggccaaaattatcgctgagggggctaacggccctaccacccccgaggccgataagatctttctggaaaggaacattatggtcatccctgacctgtatctaaacgccggaggtgtcactgtcagttacttcgagtggctgaagaacctcaaccatgtaagctatggacggttgacctttaaatatgagcgagatagtaattatcacctgctgatgtctgtccaggagtcgctagagcgtaagttcggtaagcacggcggaaccattcctatcgtccccacggctgagtttcaagatcgtatcagcggggcttcggagaaagacatcgtgcactccggactggcgtacacaatggagaggtctgctagacaaatcatgaggaccgctatgaagtacaatctaggtctggatctcaggactgcggcttatgttaacgccattgaaaaagtgttcaaagtttataacgaagctggagtgacatttacctag

SEQ ID NO: 154455 - DNA, 1677 bp, Artificial Sequence
  derived and/or modified sequence
atgtacagatacctgggcgaggccctgctgctgagcagagccggccccgccgccctgggcagcgccagcgccgacagcgccgccctgctgggctgggccagaggccagcccgccgccgccccccagcccggcctggccctggccgccagaagacactacagcgaggccgtggccgacagagaggacgaccccaacttcttcaagatggtggagggcttcttcgacagaggcgccagcatcgtggaggacaagctggtggaggacctgagaaccagagagagcgaggagcagaagagaaacagagtgagaggcatcctgagaatcatcaagccctgcaaccacgtgctgagcctgagcttccccatcagaagagacgacggcagctgggaggtgatcgagggctacagagcccagcacagccagcacagaaccccctgcaagggcggcatcagatacagcaccgacgtgagcgtggacgaggtgaaggccctggccagcctgatgacctacaagtgcgccgtggtggacgtgcccttcggcggcgccaaggccggcgtgaagatcaaccccaagaactacaccgacaacgagctggagaagatcaccagaagattcaccatggagctggccaagaagggcttcatcggccccggcatcgacgtgcccgcccccgacatgagcaccggcgagagagagatgagctggatcgccgacacctacgccagcaccatcggccactacgacatcaacgcccacgcctgcgtgaccggcaagcccatcagccagggcggcatccacggcagaatcagcgccaccggcagaggcgtgttccacggcatcgagaacttcatcaacgaggccagctacatgagcatcctgggcatgacccccggcttcggcgacaagaccttcgtggtgcagggcttcggcaacgtgggcctgcacagcatgagatacctgcacagattcggcgccaagtgcatcgccgtgggcgagagcgacggcagcatctggaaccccgacggcatcgaccccaaggagctggaggacttcaagctgcagcacggcagcatcctgggcttccccaaggccaagccctacgagggcagcatcctggaggccgactgcgacatcctgatccccgccgccagcgagaagcagctgaccaagagcaacgcccccagagtgaaggccaagatcatcgccgagggcgccaacggccccaccacccccgaggccgacaagatcttcctggagagaaacatcatggtgatccccgacctgtacctgaacgccggcggcgtgaccgtgagctacttcgagtggctgaagaacctgaaccacgtgagctacggcagactgaccttcaagtacgagagagacagcaactaccacctgctgatgagcgtgcaggagagcctggagagaaagttcggcaagcacggcggcaccatccccatcgtgcccaccgccgagttccaggacagaatcagcggcgccagcgagaaggacatcgtgcacagcggcctggcctacaccatggagagaagcgccagacagatcatgagaaccgccatgaagtacaacctgggcctggacctgagaaccgccgcctacgtgaacgccatcgagaaggtgttcaaggtgtacaacgaggccggcgtgaccttcacctag

SEQ ID NO: 154456 - DNA, 1548 bp, Artificial Sequence
  derived and/or modified sequence
atgtacagatacctgggccccggcaccgccagaagaagacccgccgccggcgccggcatcggcagacccgcccccctgcagagaggcggcggcagacccagaggcagaccccagctgctgcaggacggcggcggcctgctgagaagcagaagacagcacagaggcggccaggccggcggcggccccgaggaccccggcgagagaggcgccgaggccgagcccggcgccagacaccccgccgaccaccaggccctgcagccctgcgccgagagcctgctgccccagcacagccagcacagaaccccctgcaagggcggcatcagatacagcaccgacgtgagcgtggacgaggtgaaggccctggccagcctgatgacctacaagtgcgccgtggtggacgtgcccttcggcggcgccaaggccggcgtgaagatcaaccccaagaactacaccgacaacgagctggagaagatcaccagaagattcaccatggagctggccaagaagggcttcatcggccccggcatcgacgtgcccgcccccgacatgagcaccggcgagagagagatgagctggatcgccgacacctacgccagcaccatcggccactacgacatcaacgcccacgcctgcgtgaccggcaagcccatcagccagggcggcatccacggcagaatcagcgccaccggcagaggcgtgttccacggcatcgagaacttcatcaacgaggccagctacatgagcatcctgggcatgacccccggcttcggcgacaagaccttcgtggtgcagggcttcggcaacgtgggcctgcacagcatgagatacctgcacagattcggcgccaagtgcatcgccgtgggcgagagcgacggcagcatctggaaccccgacggcatcgaccccaaggagctggaggacttcaagctgcagcacggcagcatcctgggcttccccaaggccaagccctacgagggcagcatcctggaggccgactgcgacatcctgatccccgccgccagcgagaagcagctgaccaagagcaacgcccccagagtgaaggccaagatcatcgccgagggcgccaacggccccaccacccccgaggccgacaagatcttcctggagagaaacatcatggtgatccccgacctgtacctgaacgccggcggcgtgaccgtgagctacttcgagtggctgaagaacctgaaccacgtgagctacggcagactgaccttcaagtacgagagagacagcaactaccacctgctgatgagcgtgcaggagagcctggagagaaagttcggcaagcacggcggcaccatccccatcgtgcccaccgccgagttccaggacagaatcagcggcgccagcgagaaggacatcgtgcacagcggcctggcctacaccatggagagaagcgccagacagatcatgagaaccgccatgaagtacaacctgggcctggacctgagaaccgccgcctacgtgaacgccatcgagaaggtgttcaaggtgtacaacgaggccggcgtgaccttcacctag

SEQ ID NO: 154457 - DNA, 1473 bp, Artificial Sequence
  derived and/or modified sequence
atggtggagggcttcttcgacagaggcgccagcatcgtggaggacaagctggtggaggacctgagaaccagagagagcgaggagcagaagagaaacagagtgagaggcatcctgagaatcatcaagccctgcaaccacgtgctgagcctgagcttccccatcagaagagacgacggcagctgggaggtgatcgagggctacagagcccagcacagccagcacagaaccccctgcaagggcggcatcagatacagcaccgacgtgagcgtggacgaggtgaaggccctggccagcctgatgacctacaagtgcgccgtggtggacgtgcccttcggcggcgccaaggccggcgtgaagatcaaccccaagaactacaccgacaacgagctggagaagatcaccagaagattcaccatggagctggccaagaagggcttcatcggccccggcatcgacgtgcccgcccccgacatgagcaccggcgagagagagatgagctggatcgccgacacctacgccagcaccatcggccactacgacatcaacgcccacgcctgcgtgaccggcaagcccatcagccagggcggcatccacggcagaatcagcgccaccggcagaggcgtgttccacggcatcgagaacttcatcaacgaggccagctacatgagcatcctgggcatgacccccggcttcggcgacaagaccttcgtggtgcagggcttcggcaacgtgggcctgcacagcatgagatacctgcacagattcggcgccaagtgcatcgccgtgggcgagagcgacggcagcatctggaaccccgacggcatcgaccccaaggagctggaggacttcaagctgcagcacggcagcatcctgggcttccccaaggccaagccctacgagggcagcatcctggaggccgactgcgacatcctgatccccgccgccagcgagaagcagctgaccaagagcaacgcccccagagtgaaggccaagatcatcgccgagggcgccaacggccccaccacccccgaggccgacaagatcttcctggagagaaacatcatggtgatccccgacctgtacctgaacgccggcggcgtgaccgtgagctacttcgagtggctgaagaacctgaaccacgtgagctacggcagactgaccttcaagtacgagagagacagcaactaccacctgctgatgagcgtgcaggagagcctggagagaaagttcggcaagcacggcggcaccatccccatcgtgcccaccgccgagttccaggacagaatcagcggcgccagcgagaaggacatcgtgcacagcggcctggcctacaccatggagagaagcgccagacagatcatgagaaccgccatgaagtacaacctgggcctggacctgagaaccgccgcctacgtgaacgccatcgagaaggtgttcaaggtgtacaacgaggccggcgtgaccttcacctag

SEQ ID NO: 154458 - DNA, 1278 bp, Artificial Sequence
  derived and/or modified sequence
atgacctgcccctgcgacaacgccagcagcgtgttcctgggcttctgcatcagatacagcaccgacgtgagcgtggacgaggtgaaggccctggccagcctgatgacctacaagtgcgccgtggtggacgtgcccttcggcggcgccaaggccggcgtgaagatcaaccccaagaactacaccgacaacgagctggagaagatcaccagaagattcaccatggagctggccaagaagggcttcatcggccccggcatcgacgtgcccgcccccgacatgagcaccggcgagagagagatgagctggatcgccgacacctacgccagcaccatcggccactacgacatcaacgcccacgcctgcgtgaccggcaagcccatcagccagggcggcatccacggcagaatcagcgccaccggcagaggcgtgttccacggcatcgagaacttcatcaacgaggccagctacatgagcatcctgggcatgacccccggcttcggcgacaagaccttcgtggtgcagggcttcggcaacgtgggcctgcacagcatgagatacctgcacagattcggcgccaagtgcatcgccgtgggcgagagcgacggcagcatctggaaccccgacggcatcgaccccaaggagctggaggacttcaagctgcagcacggcagcatcctgggcttccccaaggccaagccctacgagggcagcatcctggaggccgactgcgacatcctgatccccgccgccagcgagaagcagctgaccaagagcaacgcccccagagtgaaggccaagatcatcgccgagggcgccaacggccccaccacccccgaggccgacaagatcttcctggagagaaacatcatggtgatccccgacctgtacctgaacgccggcggcgtgaccgtgagctacttcgagtggctgaagaacctgaaccacgtgagctacggcagactgaccttcaagtacgagagagacagcaactaccacctgctgatgagcgtgcaggagagcctggagagaaagttcggcaagcacggcggcaccatccccatcgtgcccaccgccgagttccaggacagaatcagcggcgccagcgagaaggacatcgtgcacagcggcctggcctacaccatggagagaagcgccagacagatcatgagaaccgccatgaagtacaacctgggcctggacctgagaaccgccgcctacgtgaacgccatcgagaaggtgttcaaggtgtacaacgaggccggcgtgaccttcacctag

SEQ ID NO: 154459 - protein, 607 aa, Artificial Sequence
  derived and/or modified sequence
MPRKKPFSVKQKKKQLQDKRERKRGLQDGLRSSSNSRSGSRERREEQTDTSDGESVTHHIRRLNQQPSQGLGPRGYDPNRYRLHFERDSREEVERRKRAAREQVLQPVSAELLELDIREVYQPGSVLDFPRRPPWSYEMSKEQLMSQEERSFQDYLGKIHGAYSSEKLSYFEHNLETWRQLWRVLEMSDIVLLITDIRHPVVNFPPALYEYVTGELGLALVLVLNKVDLAPPALVVAWKHYFHQHYPQLHVVLFTSFPRDPRTPQDPSSVLKKSRRRGRGWTRALGPEQLLRACEAITVGKVDLSSWREKIARDVAGATWGNGSGEEEEEEDGPAVLVEQQTDSAMEPTGPTQERYKDGVVTIGCVGFPNVGKSSLINGLVGRKVVSVSRTPGHTRYFQTYFLTPSVKLCDCPGLIFPSLLPRQLQVLAGIYPIAQIQEPYTAVGYLASRIPVQALLHLRHPEAEDPSAEHPWCAWDICEAWAEKRGYKTAKAARNDVYRAANSLLRLAVDGRLSLCFHPPGYSEQKGTWESHPETTELVVLQGRVGPAGDEEEEEEEELSSSCEEEGEEDRDADEEGEGDEETPTSAPGSSLAGRNPYALLGEDEC

SEQ ID NO: 154460 - protein, 407 aa, Artificial Sequence
  derived and/or modified sequence
VVNFPPALYEYVTGELGLALVLVLNKVDLAPPALVVAWKHYFHQHYPQLHVVLFTSFPRDPRTPQDPSSVLKKSRRRGRGWTRALGPEQLLRACEAITVGKVDLSSWREKIARDVAGATWGNGSGEEEEEEDGPAVLVEQQTDSAMEPTGPTQERYKDGVVTIGCVGFPNVGKSSLINGLVGRKVVSVSRTPGHTRYFQTYFLTPSVKLCDCPGLIFPSLLPRQLQVLAGIYPIAQIQEPYTAVGYLASRIPVQALLHLRHPEAEDPSAEHPWCAWDICEAWAEKRGYKTAKAARNDVYRAANSLLRLAVDGRLSLCFHPPGYSEQKGTWESHPETTELVVLQGRVGPAGDEEEEEEEELSSSCEEEGEEDRDADEEGEGDEETPTSAPGSSLAGRNPYALLGEDEC

SEQ ID NO: 154461 - protein, 264 aa, Artificial Sequence
  derived and/or modified sequence
MGERVLWPLRAGQHWRHRPLPAGLQDGLRSSSNSRSGSRERREEQTDTSDGESVTHHIRRLNQQPSQGLGPRGYDPNRYRLHFERDSREEVERRKRAAREQVLQPVSAELLELDIREVYQPGSVLDFPRRPPWSYEMSKEQLMSQEERSFQDYLGKIHGAYSSEKLSYFEHNLETWRQLWRVLEMSDIVLLITDIRHPVVNFPPALYEYVTGELGLALVLVLNKVDLAPPALVVAWKHYFHQHYPQLHVVLFTSFPRDPRTPQD

SEQ ID NO: 154462 - protein, 429 aa, Artificial Sequence
  derived and/or modified sequence
MEAAVVLEMSDIVLLITDIRHPVVNFPPALYEYVTGELGLALVLVLNKVDLAPPALVVAWKHYFHQHYPQLHVVLFTSFPRDPRTPQDPSSVLKKSRRRGRGWTRALGPEQLLRACEAITVGKVDLSSWREKIARDVAGATWGNGSGEEEEEEDGPAVLVEQQTDSAMEPTGPTQERYKDGVVTIGCVGFPNVGKSSLINGLVGRKVVSVSRTPGHTRYFQTYFLTPSVKLCDCPGLIFPSLLPRQLQVLAGIYPIAQIQEPYTAVGYLASRIPVQALLHLRHPEAEDPSAEHPWCAWDICEAWAEKRGYKTAKAARNDVYRAANSLLRLAVDGRLSLCFHPPGYSEQKGTWESHPETTELVVLQGRVGPAGDEEEEEEEELSSSCEEEGEEDRDADEEGEGDEETPTSAPGSSLAGRNPYALLGEDEC

SEQ ID NO: 154463 - protein, 404 aa, Artificial Sequence
  derived and/or modified sequence
MSKEQLMSQEERSFQDYLGKIHGAYSSEKLSYFEHNLETWRQLWRVLEMSDIVLLITDIRHPVVNFPPALYEYVTGELGLALVLVLNKVDLAPPALVVAWKHYFHQHYPQLHVVLFTSFPRDPRTPQDPSSVLKKSRRRGRGWTRALGPEQLLRACEAITVGKGFPNVGKSSLINGLVGRKVVSVSRTPGHTRYFQTYFLTPSVKLCDCPGLIFPSLLPRQLQVLAGIYPIAQIQEPYTAVGYLASRIPVQALLHLRHPEAEDPSAEHPWCAWDICEAWAEKRGYKTAKAARNDVYRAANSLLRLAVDGRLSLCFHPPGYSEQKGTWESHPETTELVVLQGRVGPAGDEEEEEEEELSSSCEEEGEEDRDADEEGEGDEETPTSAPGSSLAGRNPYALLGEDEC

SEQ ID NO: 154464 - protein, 66 aa, Artificial Sequence
  derived and/or modified sequence
VVNFPPALYEYVTGELGLALVLVLNKVDLAPPALVVAWKHYFHQHYPQLHVVLFTSFPRDPRTPQD

SEQ ID NO: 154465 - protein, 262 aa, Artificial Sequence
  derived and/or modified sequence
MEPTGPTQERYKDGVVTIGCVGFPNVGKSSLINGLVGRKVVSVSRTPGHTRYFQTYFLTPSVKLCDCPGLIFPSLLPRQLQVLAGIYPIAQIQEPYTAVGYLASRIPVQALLHLRHPEAEDPSAEHPWCAWDICEAWAEKRGYKTAKAARNDVYRAANSLLRLAVDGRLSLCFHPPGYSEQKGTWESHPETTELVVLQGRVGPAGDEEEEEEEELSSSCEEEGEEDRDADEEGEGDEETPTSAPGSSLAGRNPYALLGEDEC

SEQ ID NO: 154466 - DNA, 1824 bp, Artificial Sequence
  derived and/or modified sequence
atgcctaggaagaaaccatttagcgtgaaacagaaaaagaaacagctgcaggataagcgcgaacgcaagaggggcttacaggacgggctccgaagcagctctaattccaggtcaggctcccgagaacgaagggaggagcaaactgatacttccgatggcgaatcagtcacccaccacattcgccgtctgaatcaacagcctagtcagggcctaggcccacggggctatgacccaaacagatatagactgcattttgaacgcgacagcagggaagaagtggaaaggcggaaaagggccgccagagaacaggtcctccagcccgtgtctgccgagcttttggagttggatatacgggaggtgtaccagcccgggtccgtgctggattttcccaggcggccaccctggtcttatgaaatgtccaaagagcagctgatgtcacaggaggagagaagcttccaggattacttgggcaagatacatggtgcttactcatctgaaaaactgtcttactttgaacataacctggagacctggagacaactgtggcgggtcctggaaatgagtgatatagtcctgctgattacagacattcggcacccagtggtgaactttccgcccgctctgtatgagtacgtcacgggggagcttggacttgcccttgtcctcgtcctgaacaaggtggatctggccccaccggccctggtcgtcgcgtggaagcactacttccaccagcattacccacaattgcatgtggtgttgtttacctcgtttccgcgggacccccgcaccccccaggatccttcttcagtactgaaaaaatcccggagacggggacgaggctggaccagagccttgggccccgagcagttattgcgggcctgtgaagccatcaccgtgggaaaggtcgatctctcttcttggagggagaagattgctcgcgatgtggccggagcaacatggggcaatggctccggagaggaggaggaggaagaagacggacctgcagtcctggtcgagcagcagactgattcagccatggagcctacaggcccgactcaggaacgctacaaagacggagtagtaaccattggctgtgtaggttttccaaacgtgggaaagtcctccttgatcaatgggctagtcggacgcaaagtggtgagtgtctcacggactcctggccataccagatattttcagacctactttctgaccccctcagtaaaattgtgtgactgccccgggctcatatttcccagcttgcttcctagacaacttcaagtgctggccggaatctaccctatagctcagatccaggagccttacaccgctgtggggtacttagcctccaggatccccgtccaggctctgctgcatctccggcacccggaggctgaggacccaagtgccgaacacccgtggtgtgcctgggacatctgcgaggcctgggccgaaaagcgcggttacaaaactgctaaagcagccaggaacgacgtataccgggctgctaacagtctattacgtttagccgtggatggacgcctttctttgtgctttcaccctccagggtacagcgaacaaaaagggacctgggaaagccatcccgagaccacagaactcgttgtcttgcaggggagagtaggaccagcaggagacgaggaagaggaggaggaagaggaactgtcctcctcatgcgaagaggagggagaggaggaccgagacgccgatgaagagggcgagggggatgaggagacccccacttctgctcccggctcaagtctggccggcaggaacccttacgctctcctgggggaggacgagtgctag

SEQ ID NO: 154467 - DNA, 1224 bp, Artificial Sequence
  derived and/or modified sequence
gtcgtcaattttccccctgccttatacgagtatgtaacaggtgagctgggtttggcccttgtcttggtgctcaataaggtcgatctggccccgcctgctttggtggttgcttggaagcactacttccaccagcattacccacagttacacgtcgtactgttcaccagctttccccgcgatcccaggactcctcaagatccgtcttctgtgctgaaaaagtccagacgacgcggtaggggttggacaagagcattagggccagaacaactgctacgagcgtgtgaggcaatcaccgtcggtaaagtagacttatcatcgtggagagagaagatcgcaagagatgtggctggagcaacctggggcaacggctccggtgaggaagaggaagaagaggacggccccgccgtgcttgttgagcaacagaccgattccgccatggagcctactggccccacacaggagcggtacaaggacggcgtggtaactatcggctgtgtggggtttcctaacgtaggcaagtcttccctgataaatggcctggtgggacgtaaagtcgtttcagtgtccagaacaccagggcatacaagatacttccaaacttactttctcacaccctccgtcaagctgtgcgactgtccaggactgatttttccctcgctgctgcctagacagctgcaagtgctggccgggatctatcctattgctcaaatacaggaaccctatactgctgtaggttaccttgcctctcgcattcctgtacaggctctactgcacctgaggcatccagaggccgaggatccgagtgccgagcacccctggtgcgcttgggacatttgcgaggcatgggccgaaaagcgcgggtataaaaccgcgaaagctgcccgaaacgatgtgtaccgagcagccaactcgcttttacgtttagccgtggacggacgactgagcttgtgctttcatccccctggatattccgagcagaagggaacgtgggagtctcatcctgagaccacagaactcgtggtactgcaaggacgggtgggaccagccggcgacgaagaagaggaggaggaagaggagctgtcctcgtcttgtgaggaggagggagaagaggaccgggatgcagacgaagaaggcgagggggacgaagagacccccacgtccgcgcctgggtcctctctggcgggtcgtaatccgtatgccctgctaggggaagacgagtgttag

SEQ ID NO: 154468 - DNA, 1824 bp, Artificial Sequence
  derived and/or modified sequence
atgccgcgtaaaaagcctttctcagtcaagcagaagaaaaaacaactgcaggataaacgtgaaaggaagagggggttacaggatggcttgcgcagctcctctaattcgcgttccggctcccgagagaggcgcgaagaacagacagacacaagcgatggagagtcagttacccaccatatcagaaggctaaatcagcaaccctcacaaggactgggcccaaggggttatgatcccaatcggtatcggttacactttgagcgcgatagcagagaagaggtcgagcggagaaaacgcgctgcacgagaacaggtgctgcaacccgtttctgcggaactcctggagcttgacatccgcgaagtctatcagccaggctcagttcttgacttccctcgcagaccaccctggtcctacgaaatgtctaaggagcagctcatgtcccaagaagaaagaagttttcaggattaccttggcaagatccatggtgcatattcctccgaaaaactttcctacttcgaacacaacctggagacgtggagacaactatggcgtgtgctggaaatgtccgacattgtactcctcattacggacatccggcacccggttgtcaacttcccgcccgccctgtacgaatacgttactggtgaacttggactggcgctagtgttggtcctcaataaagtcgatctggcaccacccgcgcttgtggtggcctggaagcattatttccatcagcattatccacagctgcatgtggttctcttcacttcttttcccagagatccaaggaccccccaggacccctccagcgtgctgaagaaatctcgacgtcggggaaggggctggacaagggctctgggcccagagcaacttctccgagcatgcgaggccattaccgtggggaaggtggacttgagctcatggcgcgaaaagattgcgcgggatgtggccggggctacctggggaaatggatcaggcgaagaggaggaggaggaagacggccccgcggtgctagtagagcagcagacagactccgctatggagccaacaggcccaacccaagaaagatataaagatggggtcgtcaccattggatgcgtcgggttccccaacgtgggcaaaagctccctgatcaacggccttgtcggaagaaaggtggtgagcgtgagtcgcacccctgggcataccaggtattttcaaacttattttttgacccccagcgtcaaactttgtgattgtccaggattaatctttccctcactactgccgcgtcagttacaggtactcgctgggatctacccgatcgcacagatccaggaaccatacacagccgtaggttatctagcctcaagaataccagttcaagccctcttacatctgaggcaccccgaggccgaggacccatcagctgagcacccctggtgcgcatgggacatctgcgaagcttgggcggagaagaggggctataagaccgctaaggccgcccggaacgacgtgtaccgggctgctaacagcctcttacggctggctgtggacgggagactatctctctgttttcacccccccggatatagtgagcaaaagggtacttgggagtctcaccctgagacaaccgagctggtggtgctgcagggccgggtggggcccgctggagatgaagaagaagaggaggaggaggagctgtcttcatcatgtgaagaggagggggaagaagaccgtgacgccgatgaggagggggagggcgatgaagaaaccccaacctccgcacccggatccagtctcgcgggccgaaacccgtatgctctcctcggagaggatgagtgttag

SEQ ID NO: 154469 - DNA, 795 bp, Artificial Sequence
  derived and/or modified sequence
atgggggaacgtgtactatggcccctgagagccgggcagcattggcggcatagacctcttccagctggactgcaggatggcttgcggagcagctcaaattctaggtcgggtagccgtgagcgcagggaagagcagactgacacatcagatggggaaagcgtcacacatcatatccgacgtttgaatcaacagccatcgcagggtctaggaccacgtggctacgatcccaataggtaccgactgcactttgagagagactctcgcgaggaggtcgaacgtcgaaaaagagccgccagggaacaggtgctacagcctgtaagtgcagaattactggaattggatatacgagaggtgtaccagcccggatcagtgctcgatttcccacgccgtccaccatggagttatgagatgtcgaaggagcaactcatgagccaggaggaacgctctttccaggactacctggggaagattcatggtgcttacagtagcgaaaagctcagctatttcgagcataacttggaaacttggagacagctttggagggtactcgaaatgtcagacattgtgctgctgattacggacatccgtcatcccgtggtgaattttcctcctgccctgtatgagtacgtaactggcgagttaggattggcactagttcttgtcctgaacaaagtggatctcgcgcctcctgccctcgtggtggcttggaagcattatttccaccagcactatccccagctgcacgttgtcttgttcacatcatttcctcgagacccccgcaccccccaagattag

SEQ ID NO: 154470 - DNA, 1824 bp, Artificial Sequence
  derived and/or modified sequence
atgccaagaaagaagccattctcagtgaaacagaagaagaaacaattgcaggacaagcgcgagcgtaaaagaggtctgcaggatggcttgcgcagctcctctaattcccggtcagggtctcgcgagcgtagagaagagcagacagacacttccgacggggaaagcgtcacacatcacattcgccggctgaatcagcagccatcccagggcctagggcctcgcgggtatgatcctaatcgttaccgtttacactttgaaagggattcccgcgaggaagtggagagaagaaagagagcggctcgagagcaggtgctgcagcctgtgtctgctgagttactggagttagacattcgcgaagtgtaccagcccggatccgtacttgatttcccacgtcgaccaccctggagctatgaaatgagcaaagagcagctaatgagtcaggaggagcggtcttttcaggactacctcggaaaaatccacggcgcatatagcagtgagaagctctcttacttcgaacacaatctggagacatggcggcaactctggagagtgctggaaatgagtgatatcgtcttacttataaccgacatccgccatccggtggtcaattttccccctgccttgtatgaatacgttacaggagagttgggcctagcgctagttctggtcctgaataaagtggacctggccccgcccgctctggttgttgcttggaaacactacttccaccagcactacccccagcttcatgtggtgctgttcacttcatttccacgcgacccccgaacgccgcaagacccttcaagtgtgctcaaaaagtcccgtcgccggggacgcggatggactcgagctctggggccagagcagctgctgcgggcttgcgaggctattactgtcggaaaagtggatctgtcttcatggcgggagaaaattgcccgtgacgtggctggagctacatggggcaatgggagcggagaggaggaagaggaagaggacggacccgcagtcctcgttgagcagcagacggattcggcaatggagccgaccggcccgacccaggaaagatataaggacggagtggttactataggctgtgtcgggtttcctaacgtggggaagtccagtttgattaatggcctggtgggcagaaaggtggttagcgtgtcccggacccctggtcatactaggtattttcaaacttattttctgaccccatcagtcaaattgtgcgactgtccaggactcatctttcccagcctgctccctaggcaactccaggtgctagctggcatttatcccatcgcgcagatacaagaaccttataccgccgtgggctacctggcctcccggatccccgtgcaagccttgctgcatctacgccatcccgaagcagaggacccgtctgcagaacacccctggtgcgcatgggacatctgtgaggcctgggcagaaaaacgcggctacaaaacagcaaaagccgcacgcaacgacgtatatagagcagctaacagtttgctccgattggcagttgacggacgcctgagcttatgttttcaccctcctggctactccgaacagaagggaacctgggaaagccaccctgagaccaccgaactcgtggtgctgcagggaagggttgggcccgccggagacgaggaggaggaagaagaggaggaactgtcgtccagctgcgaggaggaaggcgaggaggaccgagatgcggacgaggagggcgagggcgatgaggaaactccaactagtgcgcctggttcatcactggctggccggaatccctatgccctgctgggtgaagacgagtgctag

SEQ ID NO: 154471 - DNA, 1290 bp, Artificial Sequence
  derived and/or modified sequence
atggaggcagccgtggtgttggagatgagtgatattgtgctgctgatcacagatattcgtcaccctgtcgtgaacttccccccggctctctatgaatatgtgactggcgaactgggcctcgctctggtcctggtgctcaacaaggtcgatctcgcaccgccagctcttgttgtcgcttggaagcactatttccatcagcactatccccaactgcatgttgtactctttacatcattcccccgggacccgcggacaccgcaagatccaagctccgtcctgaaaaagagccgccgacgcgggcgcgggtggacccgggccttgggaccggaacagctgttgcgggcctgcgaagcaattaccgtaggaaaggtcgacctaagctcctggagagagaagatcgcgcgcgatgttgccggggccacttgggggaatggaagtggagaggaggaggaagaggaagacgggcccgccgtactcgtggaacagcagacagactctgcgatggagcctactggacccactcaagaaaggtataaagatggggtggtgacgattggctgtgtaggttttccaaatgttgggaagtcctcactgatcaatggattggttggcaggaaggtggtaagtgtgtctcgcacacctggccacactcgatacttccaaacctattttctgactcccagtgtaaaattgtgcgactgtcctggtctgatatttccatccctcctccctaggcaacttcaagtgctagctggaatctaccctatagctcagatccaagaaccctacacggctgtcggttacctggcttcacgaataccagtccaggcccttctgcacctccgccatccagaggcggaggatccatctgctgaacacccatggtgtgcctgggatatctgtgaggcttgggccgagaaaagaggatacaaaacagctaaagccgcaagaaatgatgtgtacagagctgccaacagcctgttgaggctggctgtcgatggccgactgagtctttgtttccatccgcccggctacagcgaacagaaggggacctgggaatcacaccctgaaaccactgagctcgtggtgctgcaaggacgcgtgggacctgccggcgacgaagaagaggaggaagaggaggagcttagttctagttgcgaggaagaaggtgaagaagatcgtgatgccgacgaagagggggaaggcgacgaagagacccctaccagtgctcccggatctagtctggcgggccggaacccctatgcgttgctaggggaagatgagtgttag

SEQ ID NO: 154472 - DNA, 1824 bp, Artificial Sequence
  derived and/or modified sequence
atgccacgcaaaaaaccttttagcgtaaaacagaaaaagaaacagctgcaagataagagggagaggaaacgtggcctgcaagatggcctgcgttcatcatccaactcacgtagtggctcacgagaacggcgagaagagcagacagatacctctgatggagagtcggttacccaccacattaggcgcttaaatcagcagccctcacagggcctggggccccgaggatatgatcccaatagatacaggttacatttcgaaagggatagccgtgaagaagtagagcgccgcaaaagggcggctcgggagcaagtccttcagccggtatcagccgagttgctcgaactcgacatccgcgaggtgtatcagcctggtagtgtcctggatttcccgcgcagaccaccctggtcctacgagatgtcaaaagaacaacttatgagccaggaggaacggagttttcaagattatctgggaaaaattcacggagcctattcttcggaaaagctgtcctactttgaacacaacttggaaacatggcgacagctctggcgggtgctggagatgtcagatatcgtgttactgattacagacatcagacaccctgtagtcaactttccacccgccttgtacgaatacgtgactggggaactgggattggcactcgttctggtcctgaataaagtagatctggcaccgcctgctctggtggtagcatggaaacactacttccatcaacactacccacagctgcacgtggtcctctttacatcttttcccagggatccgagaaccccgcaggacccgtcctccgtgttgaagaagtcaagaagaagaggccgcggctggacccgcgctctcggcccagagcagctgctgcgcgcatgtgaagccataactgtcggcaaagttgatttgagcagttggagggaaaaaatcgcacgagatgtcgctggcgccacatggggcaacgggtccggagaggaagaagaagaggaggatggaccagcggtgctggtagaacaacaaaccgactctgctatggaacccacaggtcccacgcaagagcggtacaaggacggtgtggtgaccataggctgcgtcggcttccccaatgtggggaagtcctcacttattaacgggctggtggggcggaaagtcgtgagtgtgagcagaacacccggccacactaggtatttccagacctacttcttaacccccagcgtgaagctttgtgattgccccggcctgattttcccaagtttgctgccaaggcaactgcaggtgctggcaggcatctatcctatcgcccagatacaggaaccttatactgccgtggggtacttggcatcccgcatcccggtccaggccctgctacatttaagacatccagaggcggaagatcctagtgccgagcatccttggtgtgcatgggacatctgtgaagcttgggcggaaaagagaggatacaaaactgcaaaagcagctaggaatgacgtttaccgcgccgctaatagcctgctccgactcgcagttgacggccggctgtccctctgtttccaccctcctggttattctgaacagaaagggacatgggagtcacaccccgaaactactgagctagtcgttctccagggacgtgtggggccagcaggcgacgaggaggaagaagaagaggaggagctctcctcgtcatgcgaggaggagggggaggaggaccgggatgccgatgaggagggagagggggacgaggagactcccacgtctgcaccgggatcatccctagccggccgcaacccgtacgccctgctgggagaggatgaatgttag

SEQ ID NO: 154473 - DNA, 1215 bp, Artificial Sequence
  derived and/or modified sequence
atgtctaaggaacaattaatgtcacaggaggagcgatcatttcaggactaccttggaaaaatccacggcgcctacagctccgagaagctttcctactttgagcataatttagagacttggaggcaactttggagagttctagaaatgtccgatattgtgctcctgattactgacatccgtcaccccgtggttaattttcctccagcattgtatgagtatgtgacaggcgaactcggcttggccctggtgttagtgctcaataaagtggacctagcgcctccggcccttgttgttgcctggaagcattactttcaccagcattatccacaacttcatgtggtgttattcacgagtttcccacgggaccccagaactcctcaagacccatcctcggtgctcaagaagagccgtcggagagggcgcggatggacccgggcattagggcctgagcagttacttagggcatgcgaagccattacagttggcaagggctttcctaatgtggggaagtcttcactgatcaatggcttggtcggcagaaaggttgtgagcgtgagtcggacccctggccataccaggtacttccagacatactttctcacaccttctgtgaaactgtgtgactgcccaggcctcattttcccctcactgctgcctcggcagctgcaggtgttggcaggaatttaccctattgctcagattcaggaaccatacaccgcagtgggttaccttgcgtcacggatcccagtgcaggccctcttgcatctgagacaccctgaggccgaagacccctctgccgaacatccctggtgtgcatgggacatttgcgaagcctgggcagaaaaaaggggttataagaccgccaaagcagctagaaacgacgtctacagagccgctaatagcctgctaagattagcagtggatggtcgcttgtcactttgttttcaccctccgggatattcagaacaaaagggaacctgggagtcccatccagagacgaccgagctggtggtgctacaggggcgggtcggccccgcgggagatgaagaggaagaagaagaagaggagttgtcaagctcttgcgaggaggagggagaagaggacagagacgccgacgaagagggagaaggcgacgaagagaccccgaccagcgcaccagggagctctctagccgggcgtaacccctatgctctgcttggggaagacgagtgctag

SEQ ID NO: 154474 - DNA, 795 bp, Artificial Sequence
  derived and/or modified sequence
atgggggaacgggtgctttggccactacgtgcgggacagcactggcgccacaggcccttacctgccgggcttcaggatggcctccgcagttcctccaacagtaggagcggttcgcgcgaacgccgggaggaacaaacggatactagcgatggcgagagcgtcacgcatcacatcaggaggctgaaccagcaaccatctcaggggttgggcccaagaggctatgatcctaacagataccggctgcatttcgagcgcgattcgcgtgaggaggtagagcgtcgcaagcgagccgctcgcgagcaggtgctccagcctgtgtcagctgagttgttggaacttgacattagggaggtttaccaacccggcagtgttctggattttccacgccgtcccccatggagctacgaaatgtcaaaggaacagctgatgtcccaagaagaaaggagttttcaggattaccttggaaaaatccacggagcttattccagtgaaaagctgtcctatttcgaacacaacctcgagacgtggaggcaactgtggagagtgctcgagatgagtgacatcgtgctgctgattaccgacatccgccatccggttgtcaacttcccaccagccctttatgagtacgtgactggggaactggggctggcactcgttttagtgctgaataaggtggacctggcgccacccgccctcgtcgtagcctggaaacactactttcaccagcactacccacaacttcatgtcgtgttgttcacttcttttccaagggacccaagaactccgcaggattag

SEQ ID NO: 154475 - DNA, 795 bp, Artificial Sequence
  derived and/or modified sequence
atgggtgagagggtgctgtggcccctccgggccggccaacattggaggcacaggcccttgcctgcgggtctgcaggacggcctccgaagcagctccaattcgcgaagtggaagccgcgagagacgggaggaacagaccgatactagcgatggcgaaagcgtaacacaccatatccgtagacttaatcagcagcctagccaaggtctcgggccgcggggctatgaccctaacagatatcgcctgcacttcgagcgagacagccgggaagaggttgagagaaggaagcgggccgcccgggagcaagttctgcagcctgtgtctgctgagctcctagagttggacattagagaggtataccagcccggctctgtacttgactttcccagaaggcctccgtggtcctatgagatgagtaaggagcagcttatgtcgcaagaggagcgcagctttcaggattacctgggcaagatccatggggcttattcatcagaaaagctgtcctactttgaacataacctggagacctggaggcagctctggcgagtactggaaatgtccgatatcgttcttctgatcacagatatcaggcacccagtggtgaacttcccccccgccctgtatgagtacgtgaccggtgaactcggcttggctctggtgctggtccttaacaaagtagatttggcaccccccgccttagtggtggcctggaagcactactttcatcagcattatccccagctgcatgttgtgctctttaccagcttccccagagacccgcgaaccccacaggattag

SEQ ID NO: 154476 - DNA, 795 bp, Artificial Sequence
  derived and/or modified sequence
atgggagagcgggtgttatggcctttacgcgccgggcagcactggcgccacaggccgctgcccgccggattgcaggacggactacgctccagtagtaactcccggagtgggagcagagagaggagggaggaacagacagatacttctgatggcgagtcagtaacccaccatatccgccgattgaaccagcagccgtcacagggactaggccctcggggctacgatcccaacaggtatcgcctccacttcgagagagacagtagggaggaggttgagcggagaaagcgggctgccagggagcaggttctgcaacctgtctcagctgagctcctcgaacttgatataagggaggtttaccagccaggtagcgtcctggatttccccaggcgccctccttggtcttatgagatgagcaaggaacaactaatgagccaagaggaaagaagttttcaggattacctggggaagatccatggcgcatactcctctgagaagttatcatactttgaacataacctagagacatggaggcaattatggcgtgtcctggagatgtccgacattgtgctgttgatcacagacattagacaccctgtggtaaacttcccaccagccctgtacgagtacgtgacaggcgagctgggcctggctctggtgctggtactgaacaaggtggacctggctccccctgcactagtggttgcttggaagcactacttccatcagcattatccgcagctgcatgtcgtgcttttcactagcttcccccgcgaccctaggacaccccaggactag

SEQ ID NO: 154477 - DNA, 1824 bp, Artificial Sequence
  derived and/or modified sequence
atgcctcgcaagaaaccgttcagcgtgaaacagaaaaaaaagcagctccaagacaagagagagcgcaaacgtgggctacaggatgggctgaggagctcttctaattccagaagcggatcaagagaacggagagaagaacaaaccgacacaagcgatggcgaatctgtcacccaccacatccgccgcctgaaccaacagccttcccaggggctgggaccacggggttatgacccaaatcggtacaggcttcactttgaaagggattcaagggaggaagtggaaagacggaagagggccgcacgcgagcaggtgcttcagcctgtatcagctgaactcctggagctggacattagagaggtgtatcagcctggatcggtactagacttcccccgtcggcctccctggagctatgaaatgagcaaggagcagctgatgtcccaggaagagcgctcgtttcaggactacctggggaagattcacggtgcttattcctctgaaaaactgtcctatttcgagcacaacctcgaaacatggaggcagttatggcgggtgctcgaaatgtctgacattgttctcctcattactgacataaggcatcccgtcgtgaatttcccaccggccctgtatgaatacgtcaccggggagcttggccttgccctagtgctcgtcttgaataaagtcgacctcgctccccccgcgctggtggtggcctggaagcactatttccaccagcactaccctcagctgcatgtggttctattcactagctttcccagagaccctcgaactcctcaggacccatcaagcgttctcaaaaaaagccggaggaggggcagggggtggacaagagcacttggaccagaacagctgcttagagcgtgtgaagccatcacagtgggcaaagtcgacctctcctcttggcgcgagaagattgccagggacgtagccggtgccacatggggaaacggaagcggtgaagaggaagaggaagaggatgggcctgcagtactagtcgagcagcaaactgattccgccatggaacctacgggacccactcaggagcgatataaggacggcgtcgtgacgattggttgcgttggcttccctaacgtgggcaaatctagccttattaatggccttgttggccgcaaggtggtgagcgtgagccgaacacctgggcatactcgttactttcaaacttattttctcactccttccgtcaagctatgtgattgtcctggcttgatttttccctccctgctccccaggcagctccaggttctcgctggcatttaccccatcgcccagattcaggagccttacaccgctgtaggatacctcgcctcacggataccagtgcaagcgttactgcacctgaggcatcccgaagccgaagatccttctgccgagcacccctggtgtgcttgggacatttgtgaagcttgggcggaaaagcggggctacaagactgccaaggccgcgagaaatgatgtttatcgggcagccaatagcctgctgcgacttgccgtcgacggtagattatccctgtgctttcatccacctggctattcagaacaaaaggggacatgggagtcacaccctgagacaacagaactggttgtccttcagggccgcgtggggcccgcgggggacgaagaagaagaggaagaggaagaactatcttcttcctgcgaggaggaaggtgaggaggaccgtgatgccgacgaggagggagagggcgatgaagagacacctacaagtgcccctgggagcagccttgctgggaggaacccgtacgccctgctcggggaggacgagtgctag

SEQ ID NO: 154478 - DNA, 1824 bp, Artificial Sequence
  derived and/or modified sequence
atgccaagaaaaaagccattttccgtgaaacagaagaaaaagcagctccaggacaaacgtgaaaggaaaagagggcttcaagacggcctgcgaagcagtagcaacagccgtagtggatcgcgcgaaagaagggaagagcagactgatactagcgacggggagagcgtaacacaccatataagacggttgaaccaacagccatcccaggggcttggaccgcgcggctacgacccgaaccgctatagactgcattttgaacgggatagtagagaggaggtagagagaaggaagcgagccgcccgtgagcaggtgctgcagcctgtgtcagctgaactgctcgaactggacatccgggaggtgtatcagcctggctcggtacttgattttccccgccgccctccatggtcctatgagatgagtaaggagcagctgatgagtcaggaagaacgaagcttccaggattatttgggcaagatccacggagcttattcaagtgagaagctgtcctattttgagcataatctggaaacttggcggcagctgtggagagttttggagatgtccgacatcgtcctgttgatcacagacatcaggcaccctgttgtgaattttccacctgcactgtatgagtacgtgacaggagaattgggattggccctggttctggtgctcaacaaagtcgatcttgcacctcctgctctcgtcgttgcctggaaacactatttccatcagcattatcctcagcttcacgtggtcctctttaccagcttccccagagatccacggactccccaggacccgagttcggtacttaaaaagagccgcagaagagggaggggttggacacgtgcgctggggccagaacagcttctgcgagcctgtgaggctatcaccgtgggcaaggtcgacctgtctagctggcgtgagaaaattgcccgcgatgtggccggcgcaacttgggggaacggtagtggggaggaagaggaagaggaggacgggcctgctgtcttggtcgaacaacagacagactctgccatggaacctacagggccaacgcaagagagatataaggacggcgtggtgaccatcggctgtgtcggtttccctaacgtgggcaagagttccctcatcaatggacttgtgggaaggaaggtggtcagtgtgtcccgcactccgggccatacaaggtacttccaaacttacttcctcactccttcagtaaagctttgtgattgtccgggcttgatttttccctcccttctcccccggcagctccaggtgctcgcaggcatttaccccatcgcccagatacaggagccatacacagccgtaggttacctggcttcccggatccccgtgcaagctctgctgcaccttcgccaccctgaggctgaagacccctctgctgagcacccatggtgtgcctgggacatatgtgaagcctgggctgaaaaaagagggtacaaaacagccaaggctgctcgaaacgacgtttatcgggcagccaacagtctcctacgcttggctgtggacggcaggctctcattgtgtttccaccctcctggatattccgaacaaaaggggacatgggagtcgcatcccgaaaccactgagcttgtggtattgcagggcagggtgggcccagcaggcgacgaggaagaagaagaagaggaagagttaagcagttcttgtgaggaggagggcgaggaagatagagatgctgatgaagaaggtgagggagacgaagagacccccacctctgcccctggctcatcactcgcagggaggaatccatacgcgttgctgggggaggacgagtgctag

SEQ ID NO: 154479 - DNA, 795 bp, Artificial Sequence
  derived and/or modified sequence
atgggcgaacgagtgctgtggcctcttagggcaggacagcactggcgacataggcccctccccgccgggcttcaagatggcctccgtagcagctcaaattctcgctcgggttcaagggaacggcgtgaagaacaaaccgatacgtcagacggcgagtcagtgacccaccacatacgacgtctgaatcaacagccttcgcagggcctgggcccgcggggctacgaccccaatagataccggcttcattttgaaagggactctcgcgaggaggttgagcggcggaaacgggccgccagagagcaggtgctgcaaccagtttccgccgaactgttggagctcgacattcgagaggtctaccagcctggctcagtccttgatttccctaggcgtcccccttggagctacgagatgtccaaagagcagctaatgtcgcaggaagagagaagcttccaggattacctaggtaagatccacggcgcttactcttccgaaaagctgagctacttcgaacacaatctcgagacatggcgtcaactttggagggtgctagagatgagcgatatcgtgctgcttattacagatatccgtcacccagtagtcaattttcctcctgctctttacgagtatgtgacaggggagctaggactcgctctggttctggtgttaaacaaggtggacttggcccctccggccctcgtggtggcttggaaacactacttccaccagcattaccctcagctacacgtggtgctctttacatcatttccgcgggacccgcggacccctcaggactag

SEQ ID NO: 154480 - DNA, 795 bp, Artificial Sequence
  derived and/or modified sequence
atgggcgagcgggtattgtggccccttagggcgggacagcactggagacacagacctcttcctgccggtttacaggatggactgcgctctagtagtaatagcaggagtggaagccgggaacgtcgagaagagcagacggatacttccgacggcgaatctgtgacccaccatattcgacgactgaaccagcagcctagtcagggtctcggcccccgggggtatgaccccaaccgttatcgccttcatttcgaacgggacagcagggaggaggtggagaggcggaagagggcagcccgagaacaggtgctccagcccgtctccgccgaactgctggagctggatatcagagaggtctaccagccaggctctgttctggattttccacgcaggccaccgtggagctatgaaatgagcaaagagcaactgatgtctcaagaggaacgaagctttcaggactacttgggaaagattcacggggcctacagttctgagaagttgtcatacttcgaacacaacttagaaacttggagacagctttggcgagtcctggagatgtccgacatcgtactgcttatcaccgacatccggcatcccgttgttaactttcccccagcgctctatgaatacgttaccggcgaacttggattggctctggtgttggtattaaataaagtcgatttagctccacctgcacttgtcgtagcctggaaacattacttccatcaacattacccccagcttcacgtggttctcttcactagtttccctagagacccacgcacaccccaggattag

SEQ ID NO: 154481 - DNA, 1824 bp, Artificial Sequence
  derived and/or modified sequence
atgcccaggaaaaaacctttctccgtgaagcagaagaagaagcagctgcaggataaaagagaacgtaagcgcgggctccaggatggtctgaggtcctcctcaaacagtaggtccggatcacgcgagcggcgggaggaacagacggatacttctgacggggagagtgtgactcaccacattaggagactcaatcagcagccatctcagggactgggaccccggggctacgatcctaatcgctaccgtttacactttgagcgcgattcccgagaagaggtggaacgaaggaagcgagcagcacgcgagcaggtactgcagccagtgtccgcagagctgttagaattggatatccgagaagtctaccagccgggcagtgtcttggactttccaaggcggcctccctggagctatgagatgtctaaggaacagcttatgagccaggaggagcgatctttccaagactatcttggaaagattcatggcgcctacagttcagagaaactgtcttatttcgagcacaacctagaaacatggcgccagttgtggagggtgctggagatgagtgacattgtgcttctgataaccgatattcgtcatcccgttgttaacttcccccctgcactttacgagtacgtgaccggtgagctgggtctcgccttggtgcttgttctgaataaggttgacttggcgcctcccgcccttgtagtggcctggaaacattacttccatcaacattatccacagctacatgtcgttctcttcaccagctttccaagagatcctcgtacccctcaggacccaagcagcgtgctaaaaaagagtagaagacgaggacgagggtggacaagggccctgggtcctgaacagctgttaagagcgtgtgaggctataacggtcggcaaagtggacctttcatcctggcgagagaagatcgctcgagatgtggcaggtgcaacatggggtaacgggtccggcgaggaggaagaggaggaggacggaccagctgtgttggtggagcagcaaactgattctgctatggagcccacggggcccacacaggaaagatataaggatggtgtagtaacaatcggttgcgtcgggttcccaaatgtggggaaaagcagtctgattaatggtctggtgggacgcaaggtggtcagtgtctcccgcaccccgggccatacaagatactttcagacatacttcctgaccccctctgttaaactctgcgactgtccaggcctgatctttccgtctctactccctcggcagctgcaggtcctagccggcatctaccccattgctcaaattcaagagccttacaccgcagtcggctatctagccagcaggattcccgtgcaggctttactccatctgagacatcccgaggctgaggaccctagcgccgagcacccatggtgtgcatgggatatctgcgaagcatgggccgagaagaggggctacaaaacagctaaagctgctcggaacgatgtgtacagggccgcaaactccctcctgcgcctggctgtggacgggcgcctaagcctctgctttcacccacccggctatagcgaacagaagggcacgtgggaatcacatcctgaaaccacagagctggtagtactgcagggacgcgttggcccggccggcgatgaggaggaggaagaggaagaagagttatctagcagctgcgaagaagagggggaagaagatcgcgatgcggatgaggaaggggagggcgacgaggagacccctacgtctgcccccggctcttccttggcgggcaggaatccgtatgcactactgggggaggacgaatgctag

SEQ ID NO: 154482 - DNA, 201 bp, Artificial Sequence
  derived and/or modified sequence
gtcgtgaattttccacccgccctctatgagtacgtgacaggggagctcggattggctctcgttctagtgttaaacaaagtcgacctggcccctccagctcttgtagtggcctggaaacattattttcatcagcattatccccaactccacgtggtgctcttcacttcttttcctcgtgaccctcgcacgccgcaagactag

SEQ ID NO: 154483 - DNA, 795 bp, Artificial Sequence
  derived and/or modified sequence
atgggggaacgagtgctttggccactgagagccggtcagcattggaggcatcgtcctttgcccgctggactgcaggacgggctccggtcttcgagcaactccaggagcggatcccgtgaacgcagggaagagcaaaccgacactagtgatggggagtccgtaacccatcacatacgacggctgaaccagcagccgtcccagggtctgggccctcgaggttatgacccaaaccggtatcggctccacttcgaacgggatagtcgggaagaagtggaacggagaaaaagggctgcccgcgagcaggtccttcaacccgtaagtgcagagttactagaacttgatatccgggaggtttaccaacccggttccgtcctagacttccctaggaggcccccctggagctatgaaatgtccaaggaacagctgatgtctcaggaagaaaggagttttcaagactatctgggcaagattcacggcgcctactcctcagagaaactaagctacttcgaacataatttagagacatggcgccagttgtggcgtgttctcgaaatgtccgacatcgttttgctaattaccgacatcagacatccagtggtaaattttccccccgccctgtacgagtacgtcacaggagaactcggtctcgctttagtactggtgctgaataaagtcgatttagcccctccagccctcgtggtcgcctggaaacactattttcaccagcactaccctcaactgcatgttgtcctcttcacatcgttcccccgcgatcctcggacaccccaagactag

SEQ ID NO: 154484 - DNA, 1215 bp, Artificial Sequence
  derived and/or modified sequence
atgagcaaagaacagctcatgagccaagaagaaagatcttttcaggattatctggggaaaatccacggagcttactccagcgagaagttatcttatttcgagcacaacctagaaacgtggaggcaactgtggcgagtgctcgaaatgtccgatatcgtcttgttgattactgacattaggcaccccgtggtcaattttccgccggctctgtacgaatatgtgaccggtgagctgggactagcgttggtacttgttctcaacaaagtcgatcttgctccacctgctctggtagtggcctggaagcactatttccatcagcactatccacagttgcatgtggttctctttactagtttcccacgggatccgcgcacgccacaggaccctagtagtgtgcttaagaagagccgtcgaaggggacggggctggacccgtgcacttggcccggaacagcttctgcgcgcctgcgaagccataaccgtagggaaaggatttccaaatgttgggaagtcaagcctgatcaatggtcttgtcggccggaaggttgtatccgtatcccggacgccaggccatacgcgctattttcagacttatttcctaacccccagtgtaaaattgtgcgactgtcctggactcatttttccgtccctgctgccaagacagctccaggtcctggctggtatttaccccattgctcagatccaggagccctacaccgcggtgggctacctggcttccaggatcccagttcaggctctgttacacctccgacacccagaggcggaggacccatcggccgaacacccttggtgtgcctgggatatctgcgaagcctgggccgagaaacgggggtacaagaccgctaaagctgcgaggaacgatgtttatagagccgcgaacagcttactgcggctggctgtggacgggcggcttagtctatgtttccacccccctggatacagtgagcagaaaggaacttgggaatctcatcccgagactaccgaattagtagtgttgcaaggcagggtgggtccagccggggatgaggaagaagaagaggaagaagagctgtctagctcttgcgaggaagagggagaagaggaccgagatgctgatgaagaaggagagggcgacgaggagactcccacatcagcaccaggttcttccttagcgggcagaaatccttatgccctcctcggggaagatgagtgctag

SEQ ID NO: 154485 - DNA, 789 bp, Artificial Sequence
  derived and/or modified sequence
atggaaccgacaggccccactcaagagcggtacaaggatggagtggtgacaatcgggtgtgttggcttcccaaacgtggggaagtcatccctgattaatgggttggtgggcagaaaagtggtatcagtctctcgtactcccggccacacccggtatttccagacgtattttctgacaccttcagtgaaactgtgtgattgtcctggtctcatctttccgtcactgctgccacggcagctgcaagttctagccgggatttaccccatcgcacagatccaagaaccatacaccgccgttgggtatttagcatctcggatccccgtgcaggcccttctccacttgcgccaccctgaagccgaggaccctagcgccgaacacccttggtgcgcgtgggacatttgcgaagcctgggccgagaagcgaggatataaaaccgctaaggccgctagaaacgacgtttatcgcgcagccaactcattattacgcctggcggtagacggccgattgtccctgtgttttcaccctcccggctattcagaacagaaaggcacctgggagtcgcacccagagactactgaactggtggtgctgcagggtcgagtggggcccgctggtgatgaagaggaagaggaggaggaggagctttcttcatcatgtgaagaagaaggggaagaagacagagacgcagatgaggagggggaaggagatgaggagacaccaacgagcgctccaggaagttccctcgcaggccgtaatccatacgccctgcttggcgaggacgagtgttag

SEQ ID NO: 154486 - DNA, 789 bp, Artificial Sequence
  derived and/or modified sequence
atggagccaaccggtcccacccaggagaggtacaaggatggcgttgtgaccattggctgcgttggtttcccaaacgtaggcaaaagcagcctgatcaacggactcgtggggaggaaagttgtttccgtgagcaggacccctggccacactcgctacttccaaacatactttctcacgcctagcgtgaagctgtgcgattgccctggcttgattttcccgagcctgcttcccaggcagctgcaggtacttgcaggcatctacccaatagcacaaattcaagagccatacacagccgtcgggtatttggcttccagaatcccagtgcaggcactgctccacctgcgacaccctgaggcagaggaccctagtgccgaacatccatggtgtgcttgggacatctgcgaggcgtgggccgagaagagaggctacaaaacagcaaaggcggccaggaatgatgtgtaccgggctgccaatagcctactacgactagcggtcgacgggaggctctccctctgctttcaccctcccgggtactctgagcagaagggtacatgggaatcacatcctgaaactacggaattagtggttctccaggggcgcgtcgggccggcaggcgacgaggaagaagaagaggaggaggagctgtcttcttcctgtgaggaggagggcgaggaggaccgggatgcagatgaggaaggagaaggcgacgaagagacacctacatcagcccctggatcttccctggccggccgcaacccttatgcactcctgggtgaggatgagtgttag

SEQ ID NO: 154487 - DNA, 1290 bp, Artificial Sequence
  derived and/or modified sequence
atggaggcggcggtggtgttggagatgtcggacatcgttctccttattacggatattcgacacccggttgtcaactttcccccagctctgtacgagtatgtgactggagaattaggcctggccctcgtcttggttctgaataaggtcgacctggctccccccgccctggtggtggcctggaaacactactttcaccagcattatcctcagctgcatgttgttctgttcacgtcctttccccgggacccgcggacgccccaagatccaagttcggtcttaaagaagtcaagacgccggggtcgagggtggacacgcgccttgggcccagagcaactcctgagggcctgtgaggctataaccgtcggtaaggtggatctgtcttcctggcgagaaaagattgcccgggacgtcgcgggagccacctggggaaatggatccggcgaggaggaagaggaggaagatgggcctgccgtgcttgtggagcagcagacagattccgccatggagcccacaggacctacccaggagcgttataaagacggcgtcgttactattgggtgcgttggattcccaaatgtggggaaaagctcactcataaatggactcgtcggccggaaagtggtttcagtttctagaacacccggacacacgaggtactttcagacctattttcttaccccgagtgttaagttgtgcgattgtcctggactgatcttcccttcccttttacctcggcaactgcaggtgctggccgggatttacccgatcgctcaaatacaggagccctatactgcagtcggctatctagcaagcaggatcccggtgcaagcgctgctgcatttaaggcatccagaggctgaagacccttccgccgagcacccctggtgtgcgtgggatatttgcgaagcctgggcagaaaagcggggctacaaaactgctaaagccgctcgaaatgatgtttatcgggctgcaaacagtctgttgaggctcgcagtcgacggaagattgtctctctgcttccacccccccggttatagcgagcagaaggggacgtgggaaagtcaccctgaaaccacggagttagtcgtcctccagggccgggtcggccctgcaggggacgaagaggaggaggaagaggaagaactcagttctagttgtgaagaggaaggcgaggaggatcgggacgctgatgaggaaggggagggtgacgaggaaactcctacatccgcccccggttcctcactcgccggtcgtaacccttacgccctactgggcgaagatgaatgctag

SEQ ID NO: 154488 - DNA, 1215 bp, Artificial Sequence
  derived and/or modified sequence
atgtccaaggagcagctaatgagtcaggaggagcggagcttccaggactacctgggcaaaatccacggcgcttatagcagtgaaaagctgtcgtattttgagcacaatttggaaacttggaggcagttgtggcgtgttctggagatgtctgacattgttctcctaataacagatattcggcacccagtggttaacttcccacccgctttgtatgaatacgtcaccggcgaactggggctggcccttgtgttagtccttaataaagttgatcttgccccacctgccttagtggtggcatggaagcattatttccaccaacactatccccagctccacgtggtgctcttcacgagcttcccaagagaccctagaacaccccaggatcctagtagcgttttaaagaaatcgcgaagaagaggccgcggttggacgagggcattaggccctgaacagctcctgcgcgcttgtgaagcgattactgtgggtaagggctttcccaacgtgggaaagtcaagcctaattaacggcctggtcgggcggaaggttgtgtccgtcagtaggaccccaggacacactaggtactttcagacctacttcttgacaccaagcgtcaagctgtgtgattgtcccggacttattttcccatcacttctgcctcggcagctccaggtgctggctggaatctatcctattgcacagatccaggaaccttacaccgccgtgggatacctcgccagcagaattcccgttcaagccctcctccacttgagacaccctgaggccgaggacccctccgctgagcacccgtggtgcgcctgggacatatgcgaagcttgggctgaaaagagaggctataaaactgcgaaggccgcacgaaacgacgtgtacagggccgcaaactcactgctgagactagccgttgacggcaggcttagtctctgttttcacccccctggatatagcgaacaaaagggcacctgggaatcccatcctgagaccacagaactcgtagtgcttcagggccgagtaggacctgccggcgacgaggaggaggaagaagaggaggagttgagcagttcctgtgaagaggaaggagaagaagacagagacgccgacgaagaaggcgagggagacgaggagacaccaacatcagccccgggcagctccctggcgggcagaaacccctacgcactgctgggtgaagacgaatgctag

SEQ ID NO: 154489 - DNA, 1215 bp, Artificial Sequence
  derived and/or modified sequence
atgtctaaggagcaactgatgagccaagaggagaggagttttcaggactacctgggtaaaatacatggcgcttactctagtgaaaagttgagctacttcgagcataaccttgaaacttggaggcaactgtggcgagtgctggagatgagtgacatcgtcctgctgataaccgatattaggcaccctgtggtgaactttccacctgcgctgtatgagtatgtgacaggcgaactgggcctggccttggttctggtcctgaacaaggtagatttagcacccccagcattggtggtggcttggaaacactatttccaccagcattatcctcagcttcatgttgtcctgttcacttcgttcccccgcgacccgaggaccccccaggatccaagctccgttctgaagaaaagcagacgccgcggacgcggttggacaagagccctgggtcccgagcagctcttgagggcgtgtgaagctattactgtcggcaagggttttcctaatgtggggaagagctcgctgatcaatgggctggtcggtcgtaaggtggtctccgtgtccagaacccctggacatacaagatatttccagacatactttctgaccccaagcgtgaaactctgcgactgccctgggctcattttccctagtcttctgcctcgccagctacaggtgctcgctggcatttatcccatcgcgcagatccaggagccatacaccgctgtcggctaccttgccagtaggataccagtacaggcactgctgcacctccgccatccagaggctgaagacccaagcgcggagcacccctggtgcgcttgggatatttgtgaagcatgggctgagaaacgcggttataaaaccgccaaggcagcgcgaaacgacgtgtacagagccgccaactcacttctccgtctggccgtggatggaagactctctctgtgctttcacccgcccggctatagcgaacagaaaggtacttgggaaagccatcccgaaacaactgagctcgttgtgctgcaaggacgggttgggcctgccggtgatgaagaggaggaagaggaagaagaacttagttcctcctgtgaggaggaaggtgaagaagacagggatgccgacgaagaaggggagggcgacgaggaaaccccaactagcgctcctggaagctccctcgcaggtcgcaacccctacgcactgttaggtgaggatgagtgttag

SEQ ID NO: 154490 - DNA, 789 bp, Artificial Sequence
  derived and/or modified sequence
atggagcccacgggacccacccaggaaagatacaaagatggtgttgtcactatagggtgtgtcggttttccaaacgtcgggaagagctcactcataaatggcctggtgggaaggaaagttgtctccgtctctaggacccccggtcacacgcgctactttcaaacgtattttctcacccctagtgtgaagctttgcgactgtcccggattgatcttcccaagtttgctgccacgccagctccaggtgctggccggcatctatcctatagcccagatccaggagccttacacggcagtgggctatttagcatctagaatccctgttcaggccttgctccacttgcgacatcccgaggcggaggatccttccgctgagcatccatggtgtgcctgggacatttgcgaagcatgggccgagaagcgcgggtacaaaacagcaaaggccgcccgcaacgatgtataccgcgcagcgaactccttgctgcgtttggctgtcgatggccgcctgtcattgtgctttcaccctccagggtactctgagcagaagggaacttgggagtcccatccagaaacgactgagctcgtcgtgctgcaggggcgcgtcggcccagcaggagacgaggaggaggaagaagaggaggaactcagttctagctgcgaggaagaaggagaggaggatagggacgcagacgaggaaggagaaggtgatgaggagacacctactagtgcccctgggtccagccttgccggccggaatccctatgccctgctgggcgaagatgagtgctag

SEQ ID NO: 154491 - DNA, 1290 bp, Artificial Sequence
  derived and/or modified sequence
atggaggctgcggtcgtactagagatgagcgacattgtgctgctgatcaccgacatccggcatcccgtagtaaatttccctcccgcactctatgaatatgtcactggcgaactgggcctggcactcgttctggtgttaaataaggtcgacctcgcgccaccagccctggtcgtcgcctggaagcactacttccatcagcactatccccagcttcacgtagttctttttacgtcgttcccccgggacccaaggacaccacaggatccttcatccgtcctgaagaagtctagaaggaggggacgcggctggacgcgagcgcttggcccggagcagttgctccgggcctgcgaagcgattacagtcggaaaggtagacctcagttcctggcgcgagaagattgctcgagatgtcgctggagctacatggggtaatgggagtggggaagaagaggaagaagaagatggccctgctgtgctcgtggagcaacagacagatagcgctatggagcctactggtcccacgcaagagagatacaaagatggagtcgtaactatcggctgcgtggggttccccaatgttggcaaaagctcattaataaatggactggtgggccgcaaggtcgtgtccgtgtcccgcacacccggacatacgcgctacttccagacatacttcctgaccccaagcgtgaaactgtgtgactgcccgggtctgatttttcctagcctgctgccgcgacagctccaggttttagccgggatatacccaattgcccagattcaggagccgtacacggccgtgggctatctcgcttctaggatccccgttcaggccctgctccacttgcggcacccagaagcagaggacccatctgcagaacacccatggtgtgcgtgggacatctgtgaagcttgggctgaaaagaggggctacaagaccgccaaggccgcacgtaatgacgtgtaccgagctgctaatagcctattgagattggccgtggacggaagactgagcctgtgttttcatcccccaggttacagtgaacaaaagggaacatgggagtcccatccggaaacaacggaactggtcgtactgcaggggcgggtcggtccagctggagatgaagaggaggaggaggaagaagaactctccagctcgtgcgaagaagaaggcgaggaggaccgtgacgcagatgaagaaggagagggcgacgaagagacacccacctccgcacccggctcatcgctcgccggccgaaacccttatgctctgctgggtgaagatgaatgttag

SEQ ID NO: 154492 - DNA, 1290 bp, Artificial Sequence
  derived and/or modified sequence
atggaggcagccgtggtacttgaaatgtctgacattgtgcttctgatcactgacattcgtcatccggtggtcaattttccgccagcactgtatgaatacgtcacgggcgaacttggtttggccctagtgctcgtgctcaataaggtggatttggcccccccagctcttgtggtggcctggaaacattattttcatcagcactatccacagttgcacgtcgtattattcacttctttccccagagatcctaggacacctcaggatccctctagcgtcctcaagaaatcacgaaggaggggaagagggtggacccgggctcttggacccgagcaactgctgcgtgcatgtgaagcgattaccgtcggaaaggtggatctgtcatcatggcgggaaaaaattgctcgcgacgtggccggagccacatgggggaatgggtcaggagaggaagaagaagaagaggatggtcccgccgtgctcgtcgaacagcaaactgattccgcaatggaacccacgggtcctactcaggaacggtacaaggatggagtcgtgaccatcgggtgcgtcggctttcccaacgtagggaaaagttccctcattaacggcctggttgggcgcaaagtggtgagtgtatctcgaacccccgggcacacacgctactttcagacctactttttgactcccagtgtgaagctgtgcgactgtcctggcctgatattcccaagcctgttacccagacagctgcaggtcttagcggggatttacccaattgcccagatccaggagccttacaccgccgtcggataccttgcgtctaggattcccgttcaggccttgttgcacctgagacaccccgaggctgaagacccaagcgccgagcacccctggtgtgcctgggatatttgcgaggcatgggctgagaagcgcggctataaaacagcaaaggcagctcgtaacgatgtctatagggctgctaactcattgctcaggctggctgtagatggcaggttgtccctgtgcttccaccctccaggatattcagagcagaaggggacctgggaatcccaccccgaaactaccgagctggtcgtgctgcagggaagggtgggacccgccggagatgaggaggaagaagaggaagaagagctgtcctcttcctgtgaagaagaaggggaagaagacagagacgctgatgaggaaggggaaggtgatgaagagactccaaccagtgctcccgggagcagcctggcgggcagaaatccctatgcactgctgggagaagacgagtgttag

SEQ ID NO: 154493 - DNA, 789 bp, Artificial Sequence
  derived and/or modified sequence
atggaacccacaggcccaacacaagagaggtacaaggatggtgtggtcaccataggctgtgtcggctttccgaacgttggcaagtctagtcttataaatggactggtgggccggaaagtggtcagtgtgtcccggactccggggcacacaagatacttccaaacttatttcctgactcccagtgtgaagctttgcgactgccctggcctaatattcccatcactcctgcctcggcagctgcaggtcttggccggaatctatccaattgcccagatccaggagccctacacggccgtgggatatctggccagccgaattccagtgcaggcgctgttacatctccgtcaccccgaggcagaagaccctagcgcagaacatccgtggtgtgcatgggacatctgcgaggcttgggccgagaaaagaggctataagacggctaaggctgcccgcaacgacgtgtatcgcgctgcgaatagtctgcttaggctggctgtagacggacgcctcagtctgtgctttcatccccctggctatagtgagcaaaagggcacatgggaatcccatccagaaaccacagagctggtggttttacaaggcagggtgggcccggcaggtgacgaagaggaggaggaagaggaggaactgtctagcagctgcgaagaggaaggcgaagaggacagggatgccgacgaagagggcgagggagacgaggagaccccaacatccgcccctggttcatctctggctggtaggaacccgtatgctcttctcggggaggatgagtgttag

SEQ ID NO: 154494 - DNA, 1215 bp, Artificial Sequence
  derived and/or modified sequence
atgtccaaggaacagctaatgagccaggaggaacgctcctttcaagattatctgggtaagatccacggtgcctacagttccgagaagctatcctatttcgaacacaatctggaaacctggagacagctgtggcgcgttctggaaatgtccgatattgtgctcctgataacggatatcagacaccccgtggtgaattttccaccggctttatacgaatatgtgaccggggaactgggactggcacttgtactggtcctcaacaaggtggatctggcccctcccgccttggtggttgcctggaaacattactttcaccagcattatcctcaactgcacgtcgtgctgttcaccagttttccaagagatccgaggactcctcaagatccttcttccgtactgaagaagtctaggcggcggggcagaggttggacccgcgcgctggggcctgagcagctactgcgagcatgcgaggctatcacagttggcaaaggatttccaaacgtcggcaaatcatcccttattaacgggcttgtggggcggaaggttgtgagcgtgtctagaaccccgggccataccaggtatttccagacctactttcttactccatcagttaagctgtgtgattgtcccggcctcattttcccttctctgctgcctcgccagttgcaagttctcgcaggaatttatccgattgcccagattcaggaaccctataccgccgttggctatctcgcctcccgcataccagtccaggcattactccatcttaggcatcctgaggccgaggatccgtctgctgagcatccgtggtgtgcatgggacatctgcgaagcctgggccgagaagcgcgggtacaagacagccaaggcggcaaggaacgatgtgtatagggccgctaacagcttgctcagactagccgtggacggacgtttgagcctgtgcttccatccccccggctactcagagcagaagggaacttgggaaagccaccccgaaaccaccgagctggtagtgctgcagggcagggtgggaccagctggggacgaagaagaggaggaggaggaagaactgagtagtagctgcgaggaagaaggagaggaggacagagacgccgacgaggaaggtgagggtgatgaggaaacccctacctccgcgcccggtagttccctggccggtcggaacccctacgcgctactgggagaggatgaatgttag

SEQ ID NO: 154495 - DNA, 1290 bp, Artificial Sequence
  derived and/or modified sequence
atggaagctgccgtcgtgctggaaatgagcgatattgttttgctgataacagacatcagacacccagtggtgaactttcctcccgctttatacgaatatgttaccggcgagcttggcctggccctcgtactggtgttaaataaagtggatcttgccccacccgccctggtggttgcatggaaacactactttcaccagcactaccctcaactgcatgtggtgttatttactagctttccccgggaccctagaacccctcaggatccatcaagcgttctgaaaaagagccggcggagaggccgaggttggacacgcgctctaggtccagaacagctgctccgcgcttgcgaggctatcaccgtcggcaaggttgacttatctagttggcgagagaaaatcgctagggatgttgctggggcaacctggggaaacggaagcggagaggaagaagaagaagaagatgggcccgccgtcctcgtggaacaacagaccgactcggctatggaacccacgggccccacacaagaacgctataaagatggagtcgttacaattgggtgcgtgggtttcccgaacgtgggcaaaagcagcctgatcaacggattggtcggccgcaaagttgtttccgtttccaggaccccaggccacactcgttattttcaaacctactttctcacaccctctgtgaaactctgcgactgtccaggcctcatttttcccagtctgcttcctcgccagctacaagtacttgccgggatctaccctatcgcccagatacaagagccgtatacagccgtcggctatcttgcatccagaatccctgtacaggctttgcttcatctgcgacatcccgaagccgaggatcccagcgccgagcacccttggtgtgcctgggacatctgtgaagcctgggccgaaaaacggggatataagacagccaaagcagcacgtaacgacgtgtaccgcgcagccaactctctcctgcgattggcagtggacggcagactgagcctctgttttcacccccctggatatagtgagcagaaaggcacctgggagtctcatccagagacaacggagctggttgtgctgcaggggagggtgggccctgcaggagacgaagaggaagaagaggaggaagaactgagtagctcatgcgaagaggaaggcgaggaagacagagacgctgacgaggagggcgaaggtgacgaggaaacacccacttccgcacctggaagcagcctggcagggcgcaacccctatgcccttctcggagaggacgagtgttag

SEQ ID NO: 154496 - DNA, 1290 bp, Artificial Sequence
  derived and/or modified sequence
atggaggcggccgtggtgctcgaaatgtctgatattgttctcctgattaccgacatacggcaccccgtcgtcaacttccccccagcactgtatgaatatgttacaggagagctaggccttgctctggtgctcgtattaaacaaagtcgatctagcccctcctgctctggttgtggcatggaaacattacttccaccagcactatccccagctgcatgtagtcctcttcaccagctttccgcgtgatccccggacccctcaagacccaagtagtgttcttaagaaaagtaggcgtcgaggacgcgggtggacacgagctctaggcccagagcagctgctccgggcctgtgaggccattaccgtggggaaggtggacctgagttcctggcgcgaaaaaatcgcgcgagatgtcgccggggctacctggggcaacggctcaggagaagaggaggaagaagaagacgggcctgccgttctggtcgagcagcagacagatagcgctatggagcctactggccctactcaggaacgctacaaggacggcgtagtgactatcggctgtgttggattccctaacgtcggaaagagctcattaattaacggactagtcggacgaaaggtggtgtctgtgagtagaacacctggccatacccgctacttccagacctattttcttacaccctcagtgaagttgtgcgactgtcccgggttgattttccctagcttactgcccagacagctgcaggtgttggcaggtatctatccaatcgcccaaatccaagagccctataccgcggtgggttacctcgcgtctcgcatccccgtacaagcactgctacatctgcgacatcccgaggccgaggacccaagtgccgagcatccttggtgcgcatgggacatctgcgaggcctgggcggaaaagcgaggttataagacggctaaggccgcccggaacgatgtgtaccgtgcagcgaacagtctgctgagactggcagtcgatggaaggctgagcctgtgtttccatcctcccgggtacagtgagcagaagggcacttgggagtcccaccctgaaaccaccgagttggtcgtgctacaaggtagagtgggaccagcaggcgatgaagaggaggaagaggaggaggagcttagcagttcctgtgaggaagagggggaagaagatcgagacgcagatgaggaaggcgagggagatgaggagaccccaacttcagcaccggggagttcattagcgggacggaatccatacgccctgctcggggaagatgaatgctag

SEQ ID NO: 154497 - DNA, 789 bp, Artificial Sequence
  derived and/or modified sequence
atggagcctacaggcccgacccaggagagatacaaagatggcgtggtcactatcgggtgcgtgggctttccaaatgtgggcaaatcttctctcattaatggccttgtgggacgcaaagttgtgagcgtcagccgtacccctggccacacgagatacttccagacatattttttgactccatcagtaaaattgtgtgactgccctgggcttatctttccatccctgctgcctaggcaactgcaagtccttgccgggatctacccgattgcccagattcaagagccttacaccgccgtaggataccttgctagccggatcccagtccaagcactcctccatttgcgacacccagaagcagaggatccttcagctgaacatccctggtgcgcctgggacatctgcgaggcatgggcagagaaacgaggttacaagacagctaaggctgctaggaatgacgtctaccgggcagctaactctcttctcaggctcgctgtggatgggcgcctttccctctgcttccatccccccggatactcagaacagaagggcacctgggaatcacacccagaaacgaccgagctggtcgtcctgcaggggcgcgttggacccgccggggatgaggaagaggaagaggaggaagagctgtcatcgagctgtgaagaagagggggaggaggaccgcgacgccgacgaagaaggggagggagacgaggagaccccaaccagtgccccggggagcagcttggcaggcaggaatccctacgcactccttggagaggatgaatgctag

SEQ ID NO: 154498 - DNA, 1290 bp, Artificial Sequence
  derived and/or modified sequence
atggaggcagccgtcgtgctggaaatgagcgatatcgttctgctaataacggacatcagacatcctgtcgtgaattttccccccgccctgtatgagtacgtgacaggcgagctgggactcgcactggtactggtcctcaataaagtggacctcgccccgccagcactggttgtggcatggaaacattactttcaccagcactacccccaactgcatgtggtgctgttcacctctttcccgagggatccgcggaccccacaggatccgtcatctgtccttaagaaaagcaggcgcagggggcgtgggtggactcgggctctgggccctgagcagctccttagagcctgtgaggccatcacagtgggcaaagtagatctatcaagctggagggagaaaatcgcgagggatgtcgcgggagcaacatggggtaatggaagcggcgaggaggaggaggaggaagacggacctgctgtgctcgtggagcaacagacagacagcgcaatggagcccactggaccaacgcaagaaaggtacaaagacggcgtggtaaccattggctgtgtagggtttcccaatgtgggcaagtcttcccttattaacggtctcgtcggtcgtaaggtcgtgagtgtctcacgcacacctggacatacccgctattttcagacctactttttaaccccatctgtgaaactatgtgactgcccgggcctcattttcccgagccttctccctagacagcttcaggtccttgccggtatctacccaattgcacaaatccaggagccttataccgcagtcggatacttggcctctcggatccccgtacaggcgctgctccacttaaggcatcccgaagccgaggacccatctgctgagcacccttggtgcgcctgggacatctgcgaagcatgggctgagaagcgcggctacaagacagccaaagcagcacggaatgatgtataccgagccgccaattcactgctaaggcttgccgtggacggacgccttagtctatgcttccatccccccggctacagcgaacagaaaggcacctgggaatcacatcccgaaaccaccgaactggtggttctacaggggagagttggacccgctggcgacgaggaggaggaggaggaagaggagctcagctccagctgcgaagaagaaggagaggaagatcgggacgccgatgaggagggagagggagacgaggaaactccaacgagcgctcctggctcctctctggcggggcggaacccgtatgccctgctgggagaggatgagtgctag

SEQ ID NO: 154499 - DNA, 1215 bp, Artificial Sequence
  derived and/or modified sequence
atgagtaaagaacagttaatgagtcaagaggagcggagcttccaggactatctcggcaagatacatggtgcctactcatccgaaaaattatcctacttcgaacacaatctggagacctggcgccagctctggagggttctggagatgtctgacatagttctgctgattaccgacatccggcaccccgtcgtcaattttcccccagctctgtatgagtatgttaccggagaactgggattggcccttgtcctcgtgttaaataaagtcgatctggcgccacctgccttagtagttgcctggaagcattattttcaccaacactatccccagctgcacgttgtcctattcactagctttccgagggatcctcgcaccccccaggacccctcttccgtgctcaaaaagagtcgccgtcgcgggaggggctggacacgggctctcggccctgagcaactgttacgtgcatgcgaagcaatcacggtagggaaggggtttccaaacgtgggaaagtctagcctcatcaatgggctggtgggcaggaaggtggtttcagttagcagaacacccgggcacactcgatattttcagacctactttcttacaccatctgttaagctgtgcgattgtccaggactcattttcccctctctgttacctagacagttgcaggttctggctggaatttacccaatcgctcagatccaagaaccctatactgctgtcggatatctggcaagtcggatacctgtgcaggcactgttacacttaagacaccccgaggctgaggatccaagcgccgaacacccatggtgtgcgtgggacatctgtgaggcctgggccgagaagaggggctataagacagccaaggccgctagaaacgacgtctatagagccgctaactctcttttacgccttgcagtcgacggacgcctgtccctatgcttccatccccccggttattcggagcagaaagggacctgggagagccaccccgagaccacagagctggtagtgctccagggtcgggtggggcccgcaggggatgaggaagaagaggaggaggaagaactttcctcatcatgtgaggaagagggtgaagaggatagagacgccgacgaagagggagagggagacgaggaaactccaacttccgctcctgggagttcgctggctggaaggaatccctacgcattgctaggagaagatgaatgctag

SEQ ID NO: 154500 - DNA, 1215 bp, Artificial Sequence
  derived and/or modified sequence
atgagcaaggaacagctcatgagtcaggaagaaagaagttttcaggattacttaggcaaaatacacggagcctacagctctgagaaactgtcctactttgagcacaatttggagacatggaggcagctgtggcgagttctcgaaatgagcgatattgtcctcttgattacggatatcagacatcccgtggtcaattttcccccagctctgtacgagtatgtgacgggagagcttgggttagcccttgtgctggtcctaaacaaggtcgacttggcacccccagccctggttgtcgcctggaagcactatttccaccagcattatccccagctccatgtggtcctgtttacctctttcccaagggatcctagaaccccacaggacccatccagcgtgctcaagaagagcaggcgacggggtcgcggctggacaagagccctcggccccgagcaacttctccgagcatgcgaagcgattactgtcggtaagggcttccctaacgtgggcaagtcctccttgattaacggcctggtgggacgtaaggttgtctccgtctctagaacacctggacacacaagatacttccagacttattttcttacaccaagcgtgaagctgtgcgattgtcctggcttaatcttcccctcactgctcccccgccagctgcaagttttggcaggaatataccctattgctcagatccaggagccgtacactgccgtcggttacctggctagcagaattcctgtgcaggccctgctgcacctccgacaccctgaggccgaggacccgagtgctgagcatccttggtgcgcttgggatatttgtgaagcctgggccgagaagcggggatacaaaactgcgaaagctgcccgcaacgatgtctacagagctgcaaattcgctcctccggctggccgtggatggcaggttgagtttgtgttttcatcccccgggatacagtgagcagaagggaacatgggagtcacaccctgagaccactgaactggtggtccttcagggtagagtgggtccggctggggatgaggaggaggaagaagaggaggaacttagctcaagttgcgaggaggagggcgaagaggatagggatgcagatgaggagggcgaaggagatgaggaaactcccacatctgcccctggatcttccctggcgggtaggaacccatatgcactgctgggcgaggacgagtgttag

SEQ ID NO: 154501 - DNA, 789 bp, Artificial Sequence
  derived and/or modified sequence
atggaacctaccggacctacacaggaacggtataaagatggagttgtgaccatagggtgtgtggggttccctaacgtgggtaagagcagccttatcaatggactggtggggaggaaggtggtctctgtctcccgcacaccaggacacacgagatatttccagacttatttcttaaccccttccgtaaagctctgtgactgccctggcctcatttttccatccctactacctcgtcagctccaagtgcttgcaggaatatatcccattgctcaaattcaggagccttatactgccgtcggatatttagcgtcacgcatcccggtgcaggccctgcttcacctacggcaccccgaagcagaggatccttctgcagagcacccctggtgcgcatgggatatctgcgaagcatgggccgagaaaagagggtacaaaactgccaaggccgcacggaacgatgtgtatcgggcggccaatagcctcctccgcctggcagtggacgggaggttgtccctttgtttccatcctcccggttacagcgaacagaaggggacttgggaatcccatcctgaaaccaccgaactcgtggtcctccagggtcgagtgggaccagccggtgatgaagaagaggaagaggaagaagagctctccagtagctgcgaagaggaaggcgaggaggacagagacgctgacgaggagggcgaaggcgacgaagaaaccccaacaagcgctcctggaagtagcctggctggcagaaatccttatgccttgctcggggaagatgagtgttag

SEQ ID NO: 154502 - DNA, 7490 bp, Artificial Sequence
  derived and/or modified sequence
tgcctccctccgtctctgccaggcatggcggcaacctcacaccttccctttgctgcgtttctataaatgctttgaaaaaattactcttttcttccctcgctggaaaacaccacaaccagctcctcagagtgtgtcacagagtcaacaggctctcgggccagagggcctgagaagaggactgtcgcaccgtaagatcgccacatccggtcctcggttactatggtaacagctgcaggcacaacttcgtgccctttgacctccccccaaaagtccttgtcccgcttgggtttcccttctcgcccgcttttgcacttatgatctgtaaacctgctccttatcatcgttcccacaaggaatttgggtcccaacaggtcggcacccaggactctcagaccgccgccctcccctaaagacctctgaccgtgcccccggtgtagtccagcaacctggacgcagtctcggctttccactaaggtcaagcccggggctttgtagtatagcctcagcgtgtccacgccccctctcccctaggtagtaggccccgccctccgctccgccgccccctccaggtgagtggtaggttctcccgggagcgcaaggtagtgatgacacgcgccccccctcctccgaacgcgagttggtagcgtccgtgacggagttagcctggtcctcccacgcgcgcctccttcctcgccgccggggcgccctctcggtgccactggctctcacgtgccagtagcccaccccgcatcatcctctcgcctcgctcctggagggaagtgactatatctcccccgtccgccttccatcgccgccgcggcggtaattctgtcgggcccgcccgctgacgtcacctgctagccccgcctcctctagggtcccgggcccctgcggcgggggctgccccggggggcagtcagttgaggcggcgggagctcggcggagggcgggccaggtgactggtccgggccatgccgaggaagaagccattcagcgtgaagcagaagaagaagcagttgcaggacaaacgggagcggaagagagggcttcaagatgggctgcgctccagttccaacagccgcagcgggagccgggagcggcgagaggaacagaccgacacctcggacggggagtctgtgacccatcatatccgcaggcttaaccagcagccttctcaggggctgggtccacgaggctacgacccaaatcgataccgactgcattttgagagagacagcagggaggaggtagagaggagaaagagagcagcccgggagcaagttctacagccggtcagtgctgagttgttggagctggacatccgggaggtgtatcagcctggctcagttctggactttcctcgacgtcctccttggagctatgagatgtccaaggagcaactaatgagccaagaggaacggagcttccaagactatcttgggaagattcatggggcttactcctctgagaaactcagctactttgagcacaatctggagacatggaggcagctgtggcgggtgttagagatgtctgacatcgtcctgcttatcactgatatccgacatccagttgtgaatttcccgccagcactttatgagtatgtgactggagaacttggactggccctggtgctggttttgaacaaggtggatctggccccgccagctcttgtggttgcctggaagcattatttccatcaacactatccccagctccacgtcgtccttttcacctcttttcctcgggacccccgcaccccacaggaccctagtagtgtcttgaagaagagtcggaggcgggggagaggatggactcgggccctggggccagagcagttgctgagagcctgtgaagccatcactgtggggaaagtggacttgagcagctggcgggagaagattgctcgggatgtggctggggccacctggggtaatggctctggggaggaggaggaagaggaggatggcccagcagtcctggtggagcagcagactgattcagcaatggagccaactggcccaacccaagagcgctacaaggatggggtggtgaccatcggctgtgtgggtttccctaatgtgggaaagtcctcgctgatcaatgggctggtggggcggaaagtcgtgagtgtctccagaaccccgggccatacccgatactttcagacctactttcttaccccctctgtgaagctctgtgactgcccaggcctcatcttcccatctcttctgcctaggcagttgcaggttctggcagggatctaccctatcgcccagatccaggagccctacactgctgtgggctacctggcctcccgaattcccgtgcaggccctgctccacctgcgccacccagaggctgaggacccctcagcggaacacccctggtgtgcctgggacatctgtgaagcctgggcagagaaacgtggttacaagacagccaaggcggctcggaatgatgtgtacagagcagccaacagtctcttgcggctggcagtggacggccgcctcagcctgtgttttcatcccccaggctacagtgaacagaaaggcacctgggagtcccatccagagaccacggagctggtggttttgcagggcagggtggggccagcaggtgacgaggaggaggaggaagaggaagagctgagcagctcctgtgaggaggagggagaggaggaccgggatgcggatgaggagggagaaggggatgaggagaccccaacctcggctccagggtccagcctggctggccgaaacccttatgccctgctgggtgaggatgagtgctgagttcctcgcccagcgccatcttccctcccagtatctttgcttttggactgacctgggggtatctcccctctgccaccccaattgtgaataaagattgtttgctttgtagccccttccccagatgaactgaggtgagagcggctgttccaggctaacagctgtgggaggcttctctcctcttctcccttcttttttcatgcattctctttgcaagggaaagttctcttaggagtttagtaggttctcagtctctgaaacctgcttcctctacccattctcccactctgcaccttaggaatcccgttatctacatggggaggggaggtctaaatccagctcccttttggagtttgtgccattctccgatttgagcagcagccctgtgtgccccctgccgccagacctgctcattccaggagcttctgggagaaggaacagtaagagaggaactgtgtcccaagctgatgtctcttaatgagatttttacaggaattgttcaaattcagcaaatatttattgagggtctattgtgtgtcttgacctgtgctgagcaccaagcatataaggatgtaccaccagagcctgacctaaatttgaagcctggccatgatcaaaaccccaccttcaggcacccaagtttttggattaagaagggtgaatgatgttctccaaatcctgggggctcatgcagtataattctaggacttcatgttgatacaaatttttagttaaggcaaaacgcttgtgaaaatgttgattaaatgtgtacgagtagttttaattactggtgaacaactagcgtgcacatttatgatttgagcagaacagccctttaagtacagtgttaagtttcattgtttaaaagcttggcagctacgagtatttgaggtacataggggcgggcacagaaccagcctcctgaattccatttactctggtttgggggtggaacaaagatgatccagtgcagggtctgagctagaacctagcaggtggccagaaccattttagggtttcacctcagcatttcggcagaaatcagctctctcgtgagtcagggcaccttaggctttgctgtatatccctttgttaagccagcagctagactcctagattgaattcttttagaaatgggagaatgagcttttttattgactgccagtgttgtctgtattggatgatagcaaaaagtgtagttggacaggttgcccactagatggagtgagaagtaccagactccttttttctctaaagcagatcctttcaggatctgagtcactgggcagtttctctaatgcgagcagacagaccctgttaaccaaggagcaaaggaaagtatatttaaagaggctaaggtgtttggccacatattgctttaggttcatctccattggtctcagtgtggacataactcctggaattcactccagtgcaaagtttaaataataccagcatgagaatgtacttgaaggtttcccaaaatgtgctagacaagaaagagaaaaggtcccagctgagagaaaaatccacctgtctcccatctggggctctttggcctcactgatagaaaaggaaaaggggcccaagctaagcttactttgagggttcatgatgttcagagatgctcaggggacttctccgctgcaggaggtggggtgaggacattggattcatttcctcaaaatatggagagaaaggagaaaaatcagaattctatttgtacctctgcttcctgtgctgtttatctttgcttgtctttatctttttccacctcaggggtttcatcaggggtatttgggagagtctaggggtggggatgaagaattgactgggagctgaggaggggggatttttatgctgaagacctggcaggaggcaactcctgacacccccacagggttagactgtaaaacctcttccatgacttgctgactctataggataatagcaacaggaaaagaactgagggacgtgcagatgaggatgaatagggccccaacaccagtgcctgaggctgaggttagaactgactacaaagacacaggaaaccaagggcccagtctcccctccacgctgaaatacgcaccctcttgtctgggtcatgtctactatgtgaatacttgaccatggaggtctggggctctggtggcttccatagctggctagtctcttgatggagagaaatcagggcttctctcatccatgctggaatttcatttagatgtcaacttccaagtttccctttttccagatgggattatagtcctgcttctggaacagggtagctgtgtgtggtccaggatagttcaattatctggccctttgttcacttcttacaatcattgatacagtcaacaaaaattggttaaaaacaatatatgccagacatatatccctgagttctgggacaataaccaaaattgaataaggcaatatcctactctcaagcaatagagggtaggaatagaataataataatataatacaatagctctatagcagtatgtaaactataaaagcattattttacgtgtttctattgaactgtcataactaaataagatggttagtactataattatcccaaggattcattcactcatagaacatttgttgagcaattactacctgccagtcacttccaagtggtaagtgagatagaaatggttctttgtggcgctcacaatttattggagaatggaaacacaattacaaaaaaaaagtgtgataagttctgggagaagggtggtacaggatcctgtggggtagtggtggctccatataggagggacattgggatactgatcaggaaggagtgggggacagggctagaagctgcattagtataaagttatgtcagactgccaaaacaaaacaaacacaaaaaatcagtagtctgtggtaaagaattgctataggaacagccagtaggggcagttaagctggtcttggtgaatcaggggaagcgtcctagaggaacagatgtccatgctgaggccaaatgctggacaggagttagccagacagggaaattgcattctgggcagaggagacagcaaaggtcaagaaacatgacaactttggaagactgtaacttgttcagaggcagagggtgcaaaggagaaatgaggaaaggtgaagctggagaggtgggcttggtccagctcttgctgggccttttcagccgtgttaaagatttagactgtatccagagggatgttgaactttaagcctaagactgaaaaggtgagaattgtgccttagatcactatggttgcagtgtggagactggtttggaaaggggagaaatcagaggcttttacagccatcccagggagagagaatgaacaccagaattagggtaatggaagatggaaagaagagaaatcgttttatgggttgctcaggagatagaattgacatgtcttgggattgttttgctgtgtaggggagagagacaagtcaagagtatacatcctgtttctgacttggcaactgggtgggtcatgggtctgtttcctgagacagttgtctacagccataccaccgtaagcgccctaaatctcatcagagacagtttatgcaaatggagcttggggaaagagaggtcgtggctggagacagagatttgggcatcatcaacatataggtgtggggagcagagaaggctgaggaagaaagcaggaaacatataaaaaggagagcagggaaaggagccagtgagacaggaaaaacctagtaacgtggtgtgatgaagctaggggaggaaggaaggaaggaagggcggcgtggaacgctgctgatgggtggtggcggggaaaatgaacgagtatccaccagcaacgagaggggcctccatggtcttggtgggagcatttctttggagaggtggaatcagaagccccagatgtcagagggttaaggaataatttggaggaaaagcgtaaaggcagtggaggtgaggagagaattttcaaaatgtttggcagtgattgcaatgaaagaaaaaaatggagggagcagagtatatgcagttgaggaacttttttagtttggagtgtgttaacacgatgttaggaagaaggatcaagtgaaggagaaaggtgaaaatgctggaaggtggggcttagtgatgaaacaaaccttggggacaggtgggcgtggtactgagagtcccagtgaggggagtgccctcaggcaggcgccggtggcttctgtcacaggagggaacagcgctgacattcagctggttcgcactgatacggctcaaccagtttgttaaaacatgtctgttccagtgtcagtaatatacgagtaactgcaatatgcagtaaaaattataaattctaatacaaactcagttcaagctaattaagagatcgcaacagccgttggtaaatggacttcccgctgcatttgagaagctttgcagcgccatctgccggtgtcgtagcatcactgcaggctgagaggctgctttgcgccttcatcttgaagcactctgaaattgcctgtttaaattaccttggaatcatggagttgctactgcttctgaatagtttagcttctactttgattttattgttagtgcattgtcgttcttgtgtcagtagcaagtttcagtgttttaatatttacaaatacaaaaatttttaataaaatattaaagccaaacttgaatgaagagacaacaaa

SEQ ID NO: 154503 - DNA, 5919 bp, Artificial Sequence
  derived and/or modified sequence
gttgtgaatttcccgccagcactttatgagtatgtgactggagaacttggactggccctggtgctggttttgaacaaggtggatctggccccgccagctcttgtggttgcctggaagcattatttccatcaacactatccccagctccacgtcgtccttttcacctcttttcctcgggacccccgcaccccacaggatcctagtagtgtcttgaagaagagtcggaggcgggggagaggatggactcgggccctggggccagagcagttgctgagagcctgtgaagccatcactgtggggaaagtggacttgagcagctggcgggagaagattgctcgggatgtggctggggccacctggggtaatggctctggggaggaggaggaagaggaggatggcccagcagtcctggtggagcagcagactgattcagcaatggagccaactggcccaacccaagagcgctacaaggatggggtggtgaccatcggctgtgtgggtttccctaatgtgggaaagtcctcgctgatcaatgggctggtggggcggaaagtcgtgagtgtctccagaaccccgggccatacccgatactttcagacctactttcttaccccctctgtgaagctctgtgactgcccaggcctcatcttcccatctcttctgcctaggcagttgcaggttctggcagggatctaccctatcgcccagatccaggagccctacactgctgtgggctacctggcctcccgaattcccgtgcaggccctgctccacctgcgccacccagaggctgaggacccctcagcggaacacccctggtgtgcctgggacatctgtgaagcctgggcagagaaacgtggttacaagacagccaaggcggctcggaatgatgtgtacagagcagccaacagtctcttgcggctggcagtggacggccgcctcagcctgtgttttcatcccccaggctacagtgaacagaaaggcacctgggagtcccatccagagaccacggagctggtggttttgcagggcagggtggggccagcaggtgacgaggaggaggaggaagaggaagagctgagcagctcctgtgaggaggagggagaggaggaccgggatgcggatgaggagggagaaggggatgaggagaccccaacctcggctccagggtccagcctggctggccgaaacccttatgccctgctgggtgaggatgagtgctgagttcctcgcccagcgccatcttccctcccagtatctttgcttttggactgacctgggggtatctcccctctgccaccccaattgtgaataaagattgtttgctttgtagccccttccccagatgaactgaggtgagagcggctgttccaggctaacagctgtgggaggcttctctcctcttctcccttcttttttcatgcattctctttgcaagggaaagttctcttaggagtttagtaggttctcagtctctgaaacctgcttcctctacccattctcccactctgcaccttaggaatcccgttatctacatggggaggggaggtctaaatccagctcccttttggagtttgtgccattctccgatttgagcagcagccctgtgtgccccctgccgccagacctgctcattccaggagcttctgggagaaggaacagtaagagaggaactgtgtcccaagctgatgtctcttaatgagatttttacaggaattgttcaaattcagcaaatatttattgagggtctattgtgtgtcttgacctgtgctgagcaccaagcatataaggatgtaccaccagagcctgacctaaatttgaagcctggccatgatcaaaaccccaccttcaggcacccaagtttttggattaagaagggtgaatgatgttctccaaatcctgggggctcatgcagtataattctaggacttcatgttgatacaaatttttagttaaggcaaaacgcttgtgaaaatgttgattaaatgtgtacgagtagttttaattactggtgaacaactagcgtgcacatttatgatttgagcagaacagccctttaagtacagtgttaagtttcattgtttaaaagcttggcagctacgagtatttgaggtacataggggcgggcacagaaccagcctcctgaattccatttactctggtttgggggtggaacaaagatgatccagtgcagggtctgagctagaacctagcaggtggccagaaccattttagggtttcacctcagcatttcggcagaaatcagctctctcgtgagtcagggcaccttaggctttgctgtatatccctttgttaagccagcagctagactcctagattgaattcttttagaaatgggagaatgagcttttttattgactgccagtgttgtctgtattggatgatagcaaaaagtgtagttggacaggttgcccactagatggagtgagaagtaccagactccttttttctctaaagcagatcctttcaggatctgagtcactgggcagtttctctaatgcgagcagacagaccctgttaaccaaggagcaaaggaaagtatatttaaagaggctaaggtgtttggccacatattgctttaggttcatctccattggtctcagtgtggacataactcctggaattcactccagtgcaaagtttaaataataccagcatgagaatgtacttgaaggtttcccaaaatgtgctagacaagaaagagaaaaggtcccagctgagagaaaaatccacctgtctcccatctggggctctttggcctcactgatagaaaaggaaaaggggcccaagctaagcttactttgagggttcatgatgttcagagatgctcaggggacttctccgctgcaggaggtggggtgaggacattggattcatttcctcaaaatgtggagagaaaggagaaaaatcagaattctatttgtacctctgcttcctgtgctgtttatctttgcttgtctttatctttttccacctcaggggtttcatcaggggtatttgggagagtctaggggtggggatgaagaattgactgggagctgaggaggggggatttttatgctgaagacctggcaggaggcaactcctgacacccccacagggttagactgtaaaacctcttccatgacttgctgactctataggataatagcaacaggaaaagaactgagggacgtgcagatgaggatgaatagggccccaacaccagtgcctgaggctgaggttagaactgactacaaagacacaggaaaccaagggcccagtctcccctccacgctgaaatacgcaccctcttgtctgggtcatgtctactatgtgaatacttgaccatggaggtctggggctctggtggcttccatagctggctagtctcttgatggagagaaatcagggcttctctcatccatgctggaatttcatttagatgtcaacttccaagtttccctttttccagatgggattatagtcctgcttctggaacagggtagctgtgtgtggtccaggatagttcaattatctggccctttgttcacttcttacaatcattgatacagtcaacaaaaattggttaaaaacaatatatgccagacatatatccctgagttctgggacaataaccaaaattgaataaggcaatatcctactctcaagcaatagagggtaggaatagaataataataatataatacaatagctctatagcagtatgtaaactataaaagcattattttacgtgtttctattgaactgtcataactaaataagatggttagtactataattatcccaaggattcattcactcatagaacatttgttgagcaattactacctgccagtcacttccaagtggtaagtgagatagaaatggttctttgtggcactcacaatttattggagaatggaaacacaattacaaaaaaaaagtgtgataagttctgggagaagggtggtacaggatcctgtggggtagtggtggctccatataggagggacattgggatactgatcaggaaggagtgggggacagggctagaagctgcattagtataaagttatgtcagactgccaaaacaaaacaaacacaaaaaatcagtagtctgtggtaaagaattgctataggaacagccagtaggggcagttaagctggtcttggtgaatcaggggaagcgtcctagaggaacagatgtccatgctgaggccaaatgctggacaggagttagccagacagggaaattgcattctgggcagaggagacagcaaaggtcaagaaacatgacaactttggaagactgtaacttgttcagaggcagagggtgcaaaggagaaatgaggaaaggtgaagctggagaggtgggcttggtccagctcttgctgggccttttcagccgtgttaaagatttagactgtatccagagggatgttgaactttaagcctaagactgaaaaggtgagaattgtgccttagatcactatggttgcagtgtggagactggtttggaaaggggagaaatcagaggcttttacagccatcccagggagagagaatgaacaccagaattagggtaatggaagatggaaagaagagaaatcgttttatgggttgctcaggagatagaattgacatgtcttgggattgttttgctgtgtaggggagagagacaagtcaagagtatacatcctgtttctgacttggcaactgggtgggtcatgggtctgtttcctgagacagttgtctacagccataccaccgtaagcgccctaaatctcatcagagacagtttatgcaaatggagcttggggaaagagaggtcgtggctggagacagagatttgggcatcatcaacatataggtgtggggagcagagaaggctgaggaagaaagcaggaaacatataaaaaggagagcagggaaaggagccagtgagacaggaaaaacctagtaacgtggtgtgatgaagctaggggaggaaggaaggaaggaagggcggcgtggaacgctgctgatgggtggtggcggggaaaatgaacgagtatccaccagcaacgagaggggcctccatggtcttggtgggagcatttctttggagaggtggaatcagaagccccagatgtcagagggttaaggaataatttggaggaaaagcgtaaaggcagtggaggtgaggagagaattttcaaaatgtttggcagtgattgcaatgaaagaaaaaaatggagggagcagagtatatgcagttgaggaacttttttagtttggagtgtgttaacacgatgttaggaagaaggatcaagtgaaggagaaaggtgaaaatgctggaaggtggggcttagtgatgaaacaaaccttggggacaggtgggcgtggtactgagagtcccagtgaggggagtgccctcaggcaggcgccggtggcttctgtcacaggagggaacagcgctgacattcagctggttcgcactgatacggctcaaccagtttgttaaaacatgtctgttccagtgtcagtaatatacgagtaactgcaatatgcagtaaaaattataaattctaatacaaactcagttcaagctaattaagagatcgcaacagccgttggtaaatggacttcccgctgcatttgagaagctttgcagcgccatctgccggtgtcgtagcatcactgcaggctgagaggctgctttgcgccttcatcttgaagcactctgaaattgcctgtttaaattaccttggaatcatggagttgctactgcttctgaatagtttagcttctactttgattttattgttagtgcattgtcgttcttgtgtcagtagcaagtttcagtgttttaatatttacaaatacaaaaatttttaataaaatattaaagccaaacttgaatgaagagacaacaaa

SEQ ID NO: 154504 - DNA, 7490 bp, Artificial Sequence
  derived and/or modified sequence
tgcctccctccgtctctgccaggcatggcggcaacctcacaccttccctttgctgcgtttctataaatgctttgaaaaaattactcttttcttccctcgctggaaaacaccacaaccagctcctcagagtgtgtcacagagtcaacaggctctcgggccagagggcctgagaagaggactgtcgcaccgtaagatcgccacatccggtcctcggttactatggtaacagctgcaggcacaacttcgtgccctttgacctccccccaaaagtccttgtcccgcttgggtttcccttctcgcccgcttttgcacttatgatctgtaaacctgctccttatcatcgttcccacaaggaatttgggtcccaacaggtcggcacccaggactctcagaccgccgccctcccctaaagacctctgaccgtgcccccggtgtagtccagcaacctggacgcagtctcggctttccactaaggtcaagcccggggctttgtagtatagcctcagcgtgtccacgccccctctcccctaggtagtaggccccgccctccgctccgccgccccctccaggtgagtggtaggttctcccgggagcgcaaggtagtgatgacacgcgccccccctcctccgaacgcgagttggtagcgtccgtgacggagttagcctggtcctcccacgcgcgcctccttcctcgccgccggggcgccctctcggtgccactggctctcacgtgccagtagcccaccccgcatcatcctctcgcctcgctcctggagggaagtgactatatctcccccgtccgccttccatcgccgccgcggcggtaattctgtcgggcccgcccgctgacgtcacctgctagccccgcctcctctagggtcccgggcccctgcggcgggggctgccccggggggcagtcagttgaggcggcgggagctcggcggagggcgggccaggtgactggtccgggccatgccgaggaagaagccattcagcgtgaagcagaagaagaagcagttgcaggacaaacgggagcggaagagagggcttcaagatgggctgcgctccagttccaacagccgcagcgggagccgggagcggcgagaggaacagaccgacacctcggacggggagtctgtgacccatcatatccgcaggcttaaccagcagccttctcaggggctgggtccacgaggctacgacccaaatcgataccgactgcattttgagagagacagcagggaggaggtagagaggagaaagagagcagcccgggagcaagttctacagccggtcagtgctgagttgttggagctggacatccgggaggtgtatcagcctggctcagttctggactttcctcgacgtcctccttggagctatgagatgtccaaggagcaactaatgagccaagaggaacggagcttccaagactatcttgggaagattcatggggcttactcctctgagaaactcagctactttgagcacaatctggagacatggaggcagctgtggcgggtgttagagatgtctgacatcgtcctgcttatcactgatatccgacatccagttgtgaatttcccgccagcactttatgagtatgtgactggagaacttggactggccctggtgctggttttgaacaaggtggatctggccccgccagctcttgtggttgcctggaagcattatttccatcaacactatccccagctccacgtcgtccttttcacctcttttcctcgggacccccgcaccccacaggatcctagtagtgtcttgaagaagagtcggaggcgggggagaggatggactcgggccctggggccagagcagttgctgagagcctgtgaagccatcactgtggggaaagtggacttgagcagctggcgggagaagattgctcgggatgtggctggggccacctggggtaatggctctggggaggaggaggaagaggaggatggcccagcagtcctggtggagcagcagactgattcagcaatggagccaactggcccaacccaagagcgctacaaggatggggtggtgaccatcggctgtgtgggtttccctaatgtgggaaagtcctcgctgatcaatgggctggtggggcggaaagtcgtgagtgtctccagaaccccgggccatacccgatactttcagacctactttcttaccccctctgtgaagctctgtgactgcccaggcctcatcttcccatctcttctgcctaggcagttgcaggttctggcagggatctaccctatcgcccagatccaggagccctacactgctgtgggctacctggcctcccgaattcccgtgcaggccctgctccacctgcgccacccagaggctgaggacccctcagcggaacacccctggtgtgcctgggacatctgtgaagcctgggcagagaaacgtggttacaagacagccaaggcggctcggaatgatgtgtacagagcagccaacagtctcttgcggctggcagtggacggccgcctcagcctgtgttttcatcccccaggctacagtgaacagaaaggcacctgggagtcccatccagagaccacggagctggtggttttgcagggcagggtggggccagcaggtgacgaggaggaggaggaagaggaagagctgagcagctcctgtgaggaggagggagaggaggaccgggatgcggatgaggagggagaaggggatgaggagaccccaacctcggctccagggtccagcctggctggccgaaacccttatgccctgctgggtgaggatgagtgctgagttcctcgcccagcgccatcttccctcccagtatctttgcttttggactgacctgggggtatctcccctctgccaccccaattgtgaataaagattgtttgctttgtagccccttccccagatgaactgaggtgagagcggctgttccaggctaacagctgtgggaggcttctctcctcttctcccttcttttttcatgcattctctttgcaagggaaagttctcttaggagtttagtaggttctcagtctctgaaacctgcttcctctacccattctcccactctgcaccttaggaatcccgttatctacatggggaggggaggtctaaatccagctcccttttggagtttgtgccattctccgatttgagcagcagccctgtgtgccccctgccgccagacctgctcattccaggagcttctgggagaaggaacagtaagagaggaactgtgtcccaagctgatgtctcttaatgagatttttacaggaattgttcaaattcagcaaatatttattgagggtctattgtgtgtcttgacctgtgctgagcaccaagcatataaggatgtaccaccagagcctgacctaaatttgaagcctggccatgatcaaaaccccaccttcaggcacccaagtttttggattaagaagggtgaatgatgttctccaaatcctgggggctcatgcagtataattctaggacttcatgttgatacaaatttttagttaaggcaaaacgcttgtgaaaatgttgattaaatgtgtacgagtagttttaattactggtgaacaactagcgtgcacatttatgatttgagcagaacagccctttaagtacagtgttaagtttcattgtttaaaagcttggcagctacgagtatttgaggtacataggggcgggcacagaaccagcctcctgaattccatttactctggtttgggggtggaacaaagatgatccagtgcagggtctgagctagaacctagcaggtggccagaaccattttagggtttcacctcagcatttcggcagaaatcagctctctcgtgagtcagggcaccttaggctttgctgtatatccctttgttaagccagcagctagactcctagattgaattcttttagaaatgggagaatgagcttttttattgactgccagtgttgtctgtattggatgatagcaaaaagtgtagttggacaggttgcccactagatggagtgagaagtaccagactccttttttctctaaagcagatcctttcaggatctgagtcactgggcagtttctctaatgcgagcagacagaccctgttaaccaaggagcaaaggaaagtatatttaaagaggctaaggtgtttggccacatattgctttaggttcatctccattggtctcagtgtggacataactcctggaattcactccagtgcaaagtttaaataataccagcatgagaatgtacttgaaggtttcccaaaatgtgctagacaagaaagagaaaaggtcccagctgagagaaaaatccacctgtctcccatctggggctctttggcctcactgatagaaaaggaaaaggggcccaagctaagcttactttgagggttcatgatgttcagagatgctcaggggacttctccgctgcaggaggtggggtgaggacattggattcatttcctcaaaatgtggagagaaaggagaaaaatcagaattctatttgtacctctgcttcctgtgctgtttatctttgcttgtctttatctttttccacctcaggggtttcatcaggggtatttgggagagtctaggggtggggatgaagaattgactgggagctgaggaggggggatttttatgctgaagacctggcaggaggcaactcctgacacccccacagggttagactgtaaaacctcttccatgacttgctgactctataggataatagcaacaggaaaagaactgagggacgtgcagatgaggatgaatagggccccaacaccagtgcctgaggctgaggttagaactgactacaaagacacaggaaaccaagggcccagtctcccctccacgctgaaatacgcaccctcttgtctgggtcatgtctactatgtgaatacttgaccatggaggtctggggctctggtggcttccatagctggctagtctcttgatggagagaaatcagggcttctctcatccatgctggaatttcatttagatgtcaacttccaagtttccctttttccagatgggattatagtcctgcttctggaacagggtagctgtgtgtggtccaggatagttcaattatctggccctttgttcacttcttacaatcattgatacagtcaacaaaaattggttaaaaacaatatatgccagacatatatccctgagttctgggacaataaccaaaattgaataaggcaatatcctactctcaagcaatagagggtaggaatagaataataataatataatacaatagctctatagcagtatgtaaactataaaagcattattttacgtgtttctattgaactgtcataactaaataagatggttagtactataattatcccaaggattcattcactcatagaacatttgttgagcaattactacctgccagtcacttccaagtggtaagtgagatagaaatggttctttgtggcactcacaatttattggagaatggaaacacaattacaaaaaaaaagtgtgataagttctgggagaagggtggtacaggatcctgtggggtagtggtggctccatataggagggacattgggatactgatcaggaaggagtgggggacagggctagaagctgcattagtataaagttatgtcagactgccaaaacaaaacaaacacaaaaaatcagtagtctgtggtaaagaattgctataggaacagccagtaggggcagttaagctggtcttggtgaatcaggggaagcgtcctagaggaacagatgtccatgctgaggccaaatgctggacaggagttagccagacagggaaattgcattctgggcagaggagacagcaaaggtcaagaaacatgacaactttggaagactgtaacttgttcagaggcagagggtgcaaaggagaaatgaggaaaggtgaagctggagaggtgggcttggtccagctcttgctgggccttttcagccgtgttaaagatttagactgtatccagagggatgttgaactttaagcctaagactgaaaaggtgagaattgtgccttagatcactatggttgcagtgtggagactggtttggaaaggggagaaatcagaggcttttacagccatcccagggagagagaatgaacaccagaattagggtaatggaagatggaaagaagagaaatcgttttatgggttgctcaggagatagaattgacatgtcttgggattgttttgctgtgtaggggagagagacaagtcaagagtatacatcctgtttctgacttggcaactgggtgggtcatgggtctgtttcctgagacagttgtctacagccataccaccgtaagcgccctaaatctcatcagagacagtttatgcaaatggagcttggggaaagagaggtcgtggctggagacagagatttgggcatcatcaacatataggtgtggggagcagagaaggctgaggaagaaagcaggaaacatataaaaaggagagcagggaaaggagccagtgagacaggaaaaacctagtaacgtggtgtgatgaagctaggggaggaaggaaggaaggaagggcggcgtggaacgctgctgatgggtggtggcggggaaaatgaacgagtatccaccagcaacgagaggggcctccatggtcttggtgggagcatttctttggagaggtggaatcagaagccccagatgtcagagggttaaggaataatttggaggaaaagcgtaaaggcagtggaggtgaggagagaattttcaaaatgtttggcagtgattgcaatgaaagaaaaaaatggagggagcagagtatatgcagttgaggaacttttttagtttggagtgtgttaacacgatgttaggaagaaggatcaagtgaaggagaaaggtgaaaatgctggaaggtggggcttagtgatgaaacaaaccttggggacaggtgggcgtggtactgagagtcccagtgaggggagtgccctcaggcaggcgccggtggcttctgtcacaggagggaacagcgctgacattcagctggttcgcactgatacggctcaaccagtttgttaaaacatgtctgttccagtgtcagtaatatacgagtaactgcaatatgcagtaaaaattataaattctaatacaaactcagttcaagctaattaagagatcgcaacagccgttggtaaatggacttcccgctgcatttgagaagctttgcagcgccatctgccggtgtcgtagcatcactgcaggctgagaggctgctttgcgccttcatcttgaagcactctgaaattgcctgtttaaattaccttggaatcatggagttgctactgcttctgaatagtttagcttctactttgattttattgttagtgcattgtcgttcttgtgtcagtagcaagtttcagtgttttaatatttacaaatacaaaaatttttaataaaatattaaagccaaacttgaatgaagagacaacaaa

SEQ ID NO: 154505 - DNA, 1093 bp, Artificial Sequence
  derived and/or modified sequence
gcacatctggaaggaggggtgtgcccgctgcacctctggggatcgtgggagggggtcgtgggaccgcgtcaaccctcgcggcctatcgcggaggggatcccccaccccccctacatctggaaggggtggggaaggatggagagttgggggaggggaatccctccagctagcacggggcgccgtccccactgctccctgaaggagtgactccccccacgcacatccgggagggtcccaaatagggtgtctgggaggactgaacatcggaagaagttgagtgggatgaaagggagtcaggccgatgggggagagggtcttatggcccctgagagctggccagcactggcgtcaccggcccctccccgcagggcttcaagatgggctgcgctccagttccaacagccgcagcgggagccgggagcggcgagaggaacagaccgacacctcggacggggagtctgtgacccatcatatccgcaggcttaaccagcagccttctcaggggctgggtccacgaggctacgacccaaatcgataccgactgcattttgagagagacagcagggaggaggtagagaggagaaagagagcagcccgggagcaagttctacagccggtcagtgctgagttgttggagctggacatccgggaggtgtatcagcctggctcagttctggactttcctcgacgtcctccttggagctatgagatgtccaaggagcaactaatgagccaagaggaacggagcttccaagactatcttgggaagattcatggggcttactcctctgagaaactcagctactttgagcacaatctggagacatggaggcagctgtggcgggtgttagagatgtctgacatcgtcctgcttatcactgatatccgacatccagttgtgaatttcccgccagcactttatgagtatgtgactggagaacttggactggccctggtgctggttttgaacaaggtggatctggccccgccagctcttgtggttgcctggaagcattatttccatcaacactatccccagctccacgtcgtccttttcacctcttttcctcgggacccccgcaccccacaggac

SEQ ID NO: 154506 - DNA, 7490 bp, Artificial Sequence
  derived and/or modified sequence
tgcctccctccgtctctgccaggcatggcggcaacctcacaccttccctttgctgcgtttctataaatgctttgaaaaaattactcttttcttccctcgctggaaaacaccacaaccagctcctcagagtgtgtcacagagtcaacaggctctcgggccagagggcctgagaagaggactgtcgcaccgtaagatcgccacatccggtcctcggttactatggtaacagctgcaggcacaacttcgtgccctttgacctccccccaaaagtccttgtcccgcttgggtttcccttctcgcccgcttttgcacttatgatctgtaaacctgctccttatcatcgttcccacaaggaatttgggtcccaacaggtcggcacccaggactctcagaccgccgccctcccctaaagacctctgaccgtgcccccggtgtagtccagcaacctggacgcagtctcggctttccactaaggtcaagcccggggctttgtagtatagcctcagcgtgtccacgccccctctcccctaggtagtaggccccgccctccgctccgccgccccctccaggtgagtggtaggttctcccgggagcgcaaggtagtgatgacacgcgccccccctcctccgaacgcgagttggtagcgtccgtgacggagttagcctggtcctcccacgcgcgcctccttcctcgccgccggggcgccctctcggtgccactggctctcacgtgccagtagcccaccccgcatcatcctctcgcctcgctcctggagggaagtgactatatctcccccgtccgccttccatcgccgccgcggcggtaattctgtcgggcccgcccgctgacgtcacctgctagccccgcctcctctagggtcccgggcccctgcggcgggggctgccccggggggcagtcagttgaggcggcgggagctcggcggagggcgggccaggtgactggtccgggccatgccgaggaagaagccattcagcgtgaagcagaagaagaagcagttgcaggacaaacgggagcggaagagagggcttcaagatgggctgcgctccagttccaacagccgcagcgggagccgggagcggcgagaggaacagaccgacacctcggacggggagtctgtgacccatcatatccgcaggcttaaccagcagccttctcaggggctgggtccacgaggctacgacccaaatcgataccgactgcattttgagagagacagcagggaggaggtagagaggagaaagagagcagcccgggagcaagttctacagccggtcagtgctgagttgttggagctggacatccgggaggtgtatcagcctggctcagttctggactttcctcgacgtcctccttggagctatgagatgtccaaggagcaactaatgagccaagaggaacggagcttccaagactatcttgggaagattcatggggcttactcctctgagaaactcagctactttgagcacaatctggagacatggaggcagctgtggcgggtgttagagatgtctgacatcgtcctgcttatcactgatatccgacatccagttgtgaatttcccgccagcactttatgagtatgtgactggagaacttggactggccctggtgctggttttgaacaaggtggatctggccccgccagctcttgtggttgcctggaagcattatttccatcaacactatccccagctccacgtcgtccttttcacctcttttcctcgggacccccgcaccccacaggatcctagtagtgtcttgaagaagagtcggaggcgggggagaggatggactcgggccctggggccagagcagttgctgagagcctgtgaagccatcactgtggggaaagtggacttgagcagctggcgggagaagattgctcgggatgtggctggggccacctggggtaatggctctggggaggaggaggaagaggaggatggcccagcagtcctggtggagcagcagactgattcagcaatggagccaactggcccaacccaagagcgctacaaggatggggtggtgaccatcggctgtgtgggtttccctaatgtgggaaagtcctcgctgatcaatgggctggtggggcggaaagtcgtgagtgtctccagaaccccgggccatacccgatactttcagacctactttcttaccccctctgtgaagctctgtgactgcccaggcctcatcttcccatctcttctgcctaggcagttgcaggttctggcagggatctaccctatcgcccagatccaggagccctacactgctgtgggctacctggcctcccgaattcccgtgcaggccctgctccacctgcgccacccagaggctgaggacccctcagcggaacacccctggtgtgcctgggacatctgtgaagcctgggcagagaaacgtggttacaagacagccaaggcggctcggaatgatgtgtacagagcagccaacagtctcttgcggctggcagtggacggccgcctcagcctgtgttttcatcccccaggctacagtgaacagaaaggcacctgggagtcccatccagagaccacggagctggtggttttgcagggcagggtggggccagcaggtgacgaggaggaggaggaagaggaagagctgagcagctcctgtgaggaggagggagaggaggaccgggatgcggatgaggagggagaaggggatgaggagaccccaacctcggctccagggtccagcctggctggccgaaacccttatgccctgctgggtgaggatgagtgctgagttcctcgcccagcgccatcttccctcccagtatctttgcttttggactgacctgggggtatctcccctctgccaccccaattgtgaataaagattgtttgctttgtagccccttccccagatgaactgaggtgagagcggctgttccaggctaacagctgtgggaggcttctctcctcttctcccttcttttttcatgcattctctttgcaagggaaagttctcttaggagtttagtaggttctcagtctctgaaacctgcttcctctacccattctcccactctgcaccttaggaatcccgttatctacatggggaggggaggtctaaatccagctcccttttggagtttgtgccattctccgatttgagcagcagccctgtgtgccccctgccgccagacctgctcattccaggagcttctgggagaaggaacagtaagagaggaactgtgtcccaagctgatgtctcttaatgagatttttacaggaattgttcaaattcagcaaatatttattgagggtctattgtgtgtcttgacctgtgctgagcaccaagcatataaggatgtaccaccagagcctgacctaaatttgaagcctggccatgatcaaaaccccaccttcaggcacccaagtttttggattaagaagggtgaatgatgttctccaaatcctgggggctcatgcagtataattctaggacttcatgttgatacaaatttttagttaaggcaaaacgcttgtgaaaatgttgattaaatgtgtacgagtagttttaattactggtgaacaactagcgtgcacatttatgatttgagcagaacagccctttaagtacagtgttaagtttcattgtttaaaagcttggcagctacgagtatttgaggtacataggggcgggcacagaaccagcctcctgaattccatttactctggtttgggggtggaacaaagatgatccagtgcagggtctgagctagaacctagcaggtggccagaaccattttagggtttcacctcagcatttcggcagaaatcagctctctcgtgagtcagggcaccttaggctttgctgtatatccctttgttaagccagcagctagactcctagattgaattcttttagaaatgggagaatgagcttttttattgactgccagtgttgtctgtattggatgatagcaaaaagtgtagttggacaggttgcccactagatggagtgagaagtaccagactccttttttctctaaagcagatcctttcaggatctgagtcactgggcagtttctctaatgcgagcagacagaccctgttaaccaaggagcaaaggaaagtatatttaaagaggctaaggtgtttggccacatattgctttaggttcatctccattggtctcagtgtggacataactcctggaattcactccagtgcaaagtttaaataataccagcatgagaatgtacttgaaggtttcccaaaatgtgctagacaagaaagagaaaaggtcccagctgagagaaaaatccacctgtctcccatctggggctctttggcctcactgatagaaaaggaaaaggggcccaagctaagcttactttgagggttcatgatgttcagagatgctcaggggacttctccgctgcaggaggtggggtgaggacattggattcatttcctcaaaatgtggagagaaaggagaaaaatcagaattctatttgtacctctgcttcctgtgctgtttatctttgcttgtctttatctttttccacctcaggggtttcatcaggggtatttgggagagtctaggggtggggatgaagaattgactgggagctgaggaggggggatttttatgctgaagacctggcaggaggcaactcctgacacccccacagggttagactgtaaaacctcttccatgacttgctgactctataggataatagcaacaggaaaagaactgagggacgtgcagatgaggatgaatagggccccaacaccagtgcctgaggctgaggttagaactgactacaaagacacaggaaaccaagggcccagtctcccctccacgctgaaatacgcaccctcttgtctgggtcatgtctactatgtgaatacttgaccatggaggtctggggctctggtggcttccatagctggctagtctcttgatggagagaaatcagggcttctctcatccatgctggaatttcatttagatgtcaacttccaagtttccctttttccagatgggattatagtcctgcttctggaacagggtagctgtgtgtggtccaggatagttcaattatctggccctttgttcacttcttacaatcattgatacagtcaacaaaaattggttaaaaacaatatatgccagacatatatccctgagttctgggacaataaccaaaattgaataaggcaatatcctactctcaagcaatagagggtaggaatagaataataataatataatacaatagctctatagcagtatgtaaactataaaagcattattttacgtgtttctattgaactgtcataactaaataagatggttagtactataattatcccaaggattcattcactcatagaacatttgttgagcaattactacctgccagtcacttccaagtggtaagtgagatagaaatggttctttgtggcgctcacaatttattggagaatggaaacacaattacaaaaaaaaagtgtgataagttctgggagaagggtggtacaggatcctgtggggtagtggtggctccatataggagggacattgggatactgatcaggaaggagtgggggacagggctagaagctgcattagtataaagttatgtcagactgccaaaacaaaacaaacacaaaaaatcagtagtctgtggtaaagaattgctataggaacagccagtaggggcagttaagctggtcttggtgaatcaggggaagcgtcctagaggaacagatgtccatgctgaggccaaatgctggacaggagttagccagacagggaaattgcattctgggcagaggagacagcaaaggtcaagaaacatgacaactttggaagactgtaacttgttcagaggcagagggtgcaaaggagaaatgaggaaaggtgaagctggagaggtgggcttggtccagctcttgctgggccttttcagccgtgttaaagatttagactgtatccagagggatgttgaactttaagcctaagactgaaaaggtgagaattgtgccttagatcactatggttgcagtgtggagactggtttggaaaggggagaaatcagaggcttttacagccatcccagggagagagaatgaacaccagaattagggtaatggaagatggaaagaagagaaatcgttttatgggttgctcaggagatagaattgacatgtcttgggattgttttgctgtgtaggggagagagacaagtcaagagtatacatcctgtttctgacttggcaactgggtgggtcatgggtctgtttcctgagacagttgtctacagccataccaccgtaagcgccctaaatctcatcagagacagtttatgcaaatggagcttggggaaagagaggtcgtggctggagacagagatttgggcatcatcaacatataggtgtggggagcagagaaggctgaggaagaaagcaggaaacatataaaaaggagagcagggaaaggagccagtgagacaggaaaaacctagtaacgtggtgtgatgaagctaggggaggaaggaaggaaggaagggcggcgtggaacgctgctgatgggtggtggcggggaaaatgaacgagtatccaccagcaacgagaggggcctccatggtcttggtgggagcatttctttggagaggtggaatcagaagccccagatgtcagagggttaaggaataatttggaggaaaagcgtaaaggcagtggaggtgaggagagaattttcaaaatgtttggcagtgattgcaatgaaagaaaaaaatggagggagcagagtatatgcagttgaggaacttttttagtttggagtgtgttaacacgatgttaggaagaaggatcaagtgaaggagaaaggtgaaaatgctggaaggtggggcttagtgatgaaacaaaccttggggacaggtgggcgtggtactgagagtcccagtgaggggagtgccctcaggcaggcgccggtggcttctgtcacaggagggaacagcgctgacattcagctggttcgcactgatacggctcaaccagtttgttaaaacatgtctgttccagtgtcagtaatatacgagtaactgcaatatgcagtaaaaattataaattctaatacaaactcagttcaagctaattaagagatcgcaacagccgttggtaaatggacttcccgctgcatttgagaagctttgcagcgccatctgccggtgtcgtagcatcactgcaggctgagaggctgctttgcgccttcatcttgaagcactctgaaattgcctgtttaaattaccttggaatcatggagttgctactgcttctgaatagtttagcttctactttgattttattgttagtgcattgtcgttcttgtgtcagtagcaagtttcagtgttttaatatttacaaatacaaaaatttttaataaaatattaaagccaaacttgaatgaagagacaacaaa

SEQ ID NO: 154507 - DNA, 5977 bp, Artificial Sequence
  derived and/or modified sequence
atggaggcagctgtggtgttagagatgtctgacatcgtcctgcttatcactgatatccgacatccagttgtgaatttcccgccagcactttatgagtatgtgactggagaacttggactggccctggtgctggttttgaacaaggtggatctggccccgccagctcttgtggttgcctggaagcattatttccatcaacactatccccagctccacgtcgtccttttcacctcttttcctcgggacccccgcaccccacaggaccctagtagtgtcttgaagaagagtcggaggcgggggagaggatggactcgggccctggggccagagcagttgctgagagcctgtgaagccatcactgtggggaaagtggacttgagcagctggcgggagaagattgctcgggatgtggctggggccacctggggtaatggctctggggaggaggaggaagaggaggatggcccagcagtcctggtggagcagcagactgattcagcaatggagccaactggcccaacccaagagcgctacaaggatggggtggtgaccatcggctgtgtgggtttccctaatgtgggaaagtcctcgctgatcaatgggctggtggggcggaaagtcgtgagtgtctccagaaccccgggccatacccgatactttcagacctactttcttaccccctctgtgaagctctgtgactgcccaggcctcatcttcccatctcttctgcctaggcagttgcaggttctggcagggatctaccctatcgcccagatccaggagccctacactgctgtgggctacctggcctcccgaattcccgtgcaggccctgctccacctgcgccacccagaggctgaggacccctcagcggaacacccctggtgtgcctgggacatctgtgaagcctgggcagagaaacgtggttacaagacagccaaggcggctcggaatgatgtgtacagagcagccaacagtctcttgcggctggcagtggacggccgcctcagcctgtgttttcatcccccaggctacagtgaacagaaaggcacctgggagtcccatccagagaccacggagctggtggttttgcagggcagggtggggccagcaggtgacgaggaggaggaggaagaggaagagctgagcagctcctgtgaggaggagggagaggaggaccgggatgcggatgaggagggagaaggggatgaggagaccccaacctcggctccagggtccagcctggctggccgaaacccttatgccctgctgggtgaggatgagtgctgagttcctcgcccagcgccatcttccctcccagtatctttgcttttggactgacctgggggtatctcccctctgccaccccaattgtgaataaagattgtttgctttgtagccccttccccagatgaactgaggtgagagcggctgttccaggctaacagctgtgggaggcttctctcctcttctcccttcttttttcatgcattctctttgcaagggaaagttctcttaggagtttagtaggttctcagtctctgaaacctgcttcctctacccattctcccactctgcaccttaggaatcccgttatctacatggggaggggaggtctaaatccagctcccttttggagtttgtgccattctccgatttgagcagcagccctgtgtgccccctgccgccagacctgctcattccaggagcttctgggagaaggaacagtaagagaggaactgtgtcccaagctgatgtctcttaatgagatttttacaggaattgttcaaattcagcaaatatttattgagggtctattgtgtgtcttgacctgtgctgagcaccaagcatataaggatgtaccaccagagcctgacctaaatttgaagcctggccatgatcaaaaccccaccttcaggcacccaagtttttggattaagaagggtgaatgatgttctccaaatcctgggggctcatgcagtataattctaggacttcatgttgatacaaatttttagttaaggcaaaacgcttgtgaaaatgttgattaaatgtgtacgagtagttttaattactggtgaacaactagcgtgcacatttatgatttgagcagaacagccctttaagtacagtgttaagtttcattgtttaaaagcttggcagctacgagtatttgaggtacataggggcgggcacagaaccagcctcctgaattccatttactctggtttgggggtggaacaaagatgatccagtgcagggtctgagctagaacctagcaggtggccagaaccattttagggtttcacctcagcatttcggcagaaatcagctctctcgtgagtcagggcaccttaggctttgctgtatatccctttgttaagccagcagctagactcctagattgaattcttttagaaatgggagaatgagcttttttattgactgccagtgttgtctgtattggatgatagcaaaaagtgtagttggacaggttgcccactagatggagtgagaagtaccagactccttttttctctaaagcagatcctttcaggatctgagtcactgggcagtttctctaatgcgagcagacagaccctgttaaccaaggagcaaaggaaagtatatttaaagaggctaaggtgtttggccacatattgctttaggttcatctccattggtctcagtgtggacataactcctggaattcactccagtgcaaagtttaaataataccagcatgagaatgtacttgaaggtttcccaaaatgtgctagacaagaaagagaaaaggtcccagctgagagaaaaatccacctgtctcccatctggggctctttggcctcactgatagaaaaggaaaaggggcccaagctaagcttactttgagggttcatgatgttcagagatgctcaggggacttctccgctgcaggaggtggggtgaggacattggattcatttcctcaaaatatggagagaaaggagaaaaatcagaattctatttgtacctctgcttcctgtgctgtttatctttgcttgtctttatctttttccacctcaggggtttcatcaggggtatttgggagagtctaggggtggggatgaagaattgactgggagctgaggaggggggatttttatgctgaagacctggcaggaggcaactcctgacacccccacagggttagactgtaaaacctcttccatgacttgctgactctataggataatagcaacaggaaaagaactgagggacgtgcagatgaggatgaatagggccccaacaccagtgcctgaggctgaggttagaactgactacaaagacacaggaaaccaagggcccagtctcccctccacgctgaaatacgcaccctcttgtctgggtcatgtctactatgtgaatacttgaccatggaggtctggggctctggtggcttccatagctggctagtctcttgatggagagaaatcagggcttctctcatccatgctggaatttcatttagatgtcaacttccaagtttccctttttccagatgggattatagtcctgcttctggaacagggtagctgtgtgtggtccaggatagttcaattatctggccctttgttcacttcttacaatcattgatacagtcaacaaaaattggttaaaaacaatatatgccagacatatatccctgagttctgggacaataaccaaaattgaataaggcaatatcctactctcaagcaatagagggtaggaatagaataataataatataatacaatagctctatagcagtatgtaaactataaaagcattattttacgtgtttctattgaactgtcataactaaataagatggttagtactataattatcccaaggattcattcactcatagaacatttgttgagcaattactacctgccagtcacttccaagtggtaagtgagatagaaatggttctttgtggcgctcacaatttattggagaatggaaacacaattacaaaaaaaaagtgtgataagttctgggagaagggtggtacaggatcctgtggggtagtggtggctccatataggagggacattgggatactgatcaggaaggagtgggggacagggctagaagctgcattagtataaagttatgtcagactgccaaaacaaaacaaacacaaaaaatcagtagtctgtggtaaagaattgctataggaacagccagtaggggcagttaagctggtcttggtgaatcaggggaagcgtcctagaggaacagatgtccatgctgaggccaaatgctggacaggagttagccagacagggaaattgcattctgggcagaggagacagcaaaggtcaagaaacatgacaactttggaagactgtaacttgttcagaggcagagggtgcaaaggagaaatgaggaaaggtgaagctggagaggtgggcttggtccagctcttgctgggccttttcagccgtgttaaagatttagactgtatccagagggatgttgaactttaagcctaagactgaaaaggtgagaattgtgccttagatcactatggttgcagtgtggagactggtttggaaaggggagaaatcagaggcttttacagccatcccagggagagagaatgaacaccagaattagggtaatggaagatggaaagaagagaaatcgttttatgggttgctcaggagatagaattgacatgtcttgggattgttttgctgtgtaggggagagagacaagtcaagagtatacatcctgtttctgacttggcaactgggtgggtcatgggtctgtttcctgagacagttgtctacagccataccaccgtaagcgccctaaatctcatcagagacagtttatgcaaatggagcttggggaaagagaggtcgtggctggagacagagatttgggcatcatcaacatataggtgtggggagcagagaaggctgaggaagaaagcaggaaacatataaaaaggagagcagggaaaggagccagtgagacaggaaaaacctagtaacgtggtgtgatgaagctaggggaggaaggaaggaaggaagggcggcgtggaacgctgctgatgggtggtggcggggaaaatgaacgagtatccaccagcaacgagaggggcctccatggtcttggtgggagcatttctttggagaggtggaatcagaagccccagatgtcagagggttaaggaataatttggaggaaaagcgtaaaggcagtggaggtgaggagagaattttcaaaatgtttggcagtgattgcaatgaaagaaaaaaatggagggagcagagtatatgcagttgaggaacttttttagtttggagtgtgttaacacgatgttaggaagaaggatcaagtgaaggagaaaggtgaaaatgctggaaggtggggcttagtgatgaaacaaaccttggggacaggtgggcgtggtactgagagtcccagtgaggggagtgccctcaggcaggcgccggtggcttctgtcacaggagggaacagcgctgacattcagctggttcgcactgatacggctcaaccagtttgttaaaacatgtctgttccagtgtcagtaatatacgagtaactgcaatatgcagtaaaaattataaattctaatacaaactcagttcaagctaattaagagatcgcaacagccgttggtaaatggacttcccgctgcatttgagaagctttgcagcgccatctgccggtgtcgtagcatcactgcaggctgagaggctgctttgcgccttcatcttgaagcactctgaaattgcctgtttaaattaccttggaatcatggagttgctactgcttctgaatagtttagcttctactttgattttattgttagtgcattgtcgttcttgtgtcagtagcaagtttcagtgttttaatatttacaaatacaaaaatttttaataaaatattaaagccaaacttgaatgaagag

SEQ ID NO: 154508 - DNA, 1717 bp, Artificial Sequence
  derived and/or modified sequence
attccacttccggaaggttgcggagaacatctgcggcggccgcattccggagccaactgcctccctccgtctctgccaggcatggcggcaacctcacaccttccctttgctgcgtttctataaatgctttgaaaaaattactcttttcttccctcgctggaaaacaccacaaccagcagccttctcaggggctgggtccacgaggctacgacccaaatcgataccgactgcattttgagagagacagcagggaggaggtagagaggagaaagagagcagcccgggagcaagttctacagccggtcagtgctgagttgttggagctggacatccgggaggtgtatcagcctggctcagttctggactttcctcgacgtcctccttggagctatgagatgtccaaggagcaactaatgagccaagaggaacggagcttccaagactatcttgggaagattcatggggcttactcctctgagaaactcagctactttgagcacaatctggagacatggaggcagctgtggcgggtgttagagatgtctgacatcgtcctgcttatcactgatatccgacatccagttgtgaatttcccgccagcactttatgagtatgtgactggagaacttggactggccctggtgctggttttgaacaaggtggatctggccccgccagctcttgtggttgcctggaagcattatttccatcaacactatccccagctccacgtcgtccttttcacctcttttcctcgggacccccgcaccccacaggaccctagtagtgtcttgaagaagagtcggaggcgggggagaggatggactcgggccctggggccagagcagttgctgagagcctgtgaagccatcactgtggggaaaggtttccctaatgtgggaaagtcctcgctgatcaatgggctggtggggcggaaagtcgtgagtgtctccagaaccccgggccatacccgatactttcagacctactttcttaccccctctgtgaagctctgtgactgcccaggcctcatcttcccatctcttctgcctaggcagttgcaggttctggcagggatctaccctatcgcccagatccaggagccctacactgctgtgggctacctggcctcccgaattcccgtgcaggccctgctccacctgcgccacccagaggctgaggacccctcagcggaacacccctggtgtgcctgggacatctgtgaagcctgggcagagaaacgtggttacaagacagccaaggcggctcggaatgatgtgtacagagcagccaacagtctcttgcggctggcagtggacggccgcctcagcctgtgttttcatcccccaggctacagtgaacagaaaggcacctgggagtcccatccagagaccacggagctggtggttttgcagggcagggtggggccagcaggtgacgaggaggaggaggaagaggaagagctgagcagctcctgtgaggaggagggagaggaggaccgggatgcggatgaggagggagaaggggatgaggagaccccaacctcggctccagggtccagcctggctggccgaaacccttatgccctgctgggtgaggatgagtgctgagttcctcgcccagcgccatcttccctcccagtatctttgcttttggactgacctgggggtatctcccctctgccaccccaattgtgaataaagattgtttgctttgt

SEQ ID NO: 154509 - DNA, 1093 bp, Artificial Sequence
  derived and/or modified sequence
gcacatctggaaggaggggtgtgcccgctgcacctctggggatcgtgggagggggtcgtgggaccgcgtcaaccctcgcggcctatcgcggaggggatcccccaccccccctacatctggaaggggtggggaaggatggagagttgggggaggggaatccctccagctagcacggggcgccgtccccactgctccctgaaggagtgactccccccacgcacatccgggagggtcccaaatagggtgtctgggaggactgaacatcggaagaagttgagtgggatgaaagggagtcaggccgatgggggagagggtcttatggcccctgagagctggccagcactggcgtcaccggcccctccccgcagggcttcaagatgggctgcgctccagttccaacagccgcagcgggagccgggagcggcgagaggaacagaccgacacctcggacggggagtctgtgacccatcatatccgcaggcttaaccagcagccttctcaggggctgggtccacgaggctacgacccaaatcgataccgactgcattttgagagagacagcagggaggaggtagagaggagaaagagagcagcccgggagcaagttctacagccggtcagtgctgagttgttggagctggacatccgggaggtgtatcagcctggctcagttctggactttcctcgacgtcctccttggagctatgagatgtccaaggagcaactaatgagccaagaggaacggagcttccaagactatcttgggaagattcatggggcttactcctctgagaaactcagctactttgagcacaatctggagacatggaggcagctgtggcgggtgttagagatgtctgacatcgtcctgcttatcactgatatccgacatccagttgtgaatttcccgccagcactttatgagtatgtgactggagaacttggactggccctggtgctggttttgaacaaggtggatctggccccgccagctcttgtggttgcctggaagcattatttccatcaacactatccccagctccacgtcgtccttttcacctcttttcctcgggacccccgcaccccacaggat

SEQ ID NO: 154510 - DNA, 7490 bp, Artificial Sequence
  derived and/or modified sequence
tgcctccctccgtctctgccaggcatggcggcaacctcacaccttccctttgctgcgtttctataaatgctttgaaaaaattactcttttcttccctcgctggaaaacaccacaaccagctcctcagagtgtgtcacagagtcaacaggctctcgggccagagggcctgagaagaggactgtcgcaccgtaagatcgccacatccggtcctcggttactatggtaacagctgcaggcacaacttcgtgccctttgacctccccccaaaagtccttgtcccgcttgggtttcccttctcgcccgcttttgcacttatgatctgtaaacctgctccttatcatcgttcccacaaggaatttgggtcccaacaggtcggcacccaggactctcagaccgccgccctcccctaaagacctctgaccgtgcccccggtgtagtccagcaacctggacgcagtctcggctttccactaaggtcaagcccggggctttgtagtatagcctcagcgtgtccacgccccctctcccctaggtagtaggccccgccctccgctccgccgccccctccaggtgagtggtaggttctcccgggagcgcaaggtagtgatgacacgcgccccccctcctccgaacgcgagttggtagcgtccgtgacggagttagcctggtcctcccacgcgcgcctccttcctcgccgccggggcgccctctcggtgccactggctctcacgtgccagtagcccaccccgcatcatcctctcgcctcgctcctggagggaagtgactatatctcccccgtccgccttccatcgccgccgcggcggtaattctgtcgggcccgcccgctgacgtcacctgctagccccgcctcctctagggtcccgggcccctgcggcgggggctgccccggggggcagtcagttgaggcggcgggagctcggcggagggcgggccaggtgactggtccgggccatgccgaggaagaagccattcagcgtgaagcagaagaagaagcagttgcaggacaaacgggagcggaagagagggcttcaagatgggctgcgctccagttccaacagccgcagcgggagccgggagcggcgagaggaacagaccgacacctcggacggggagtctgtgacccatcatatccgcaggcttaaccagcagccttctcaggggctgggtccacgaggctacgacccaaatcgataccgactgcattttgagagagacagcagggaggaggtagagaggagaaagagagcagcccgggagcaagttctacagccggtcagtgctgagttgttggagctggacatccgggaggtgtatcagcctggctcagttctggactttcctcgacgtcctccttggagctatgagatgtccaaggagcaactaatgagccaagaggaacggagcttccaagactatcttgggaagattcatggggcttactcctctgagaaactcagctactttgagcacaatctggagacatggaggcagctgtggcgggtgttagagatgtctgacatcgtcctgcttatcactgatatccgacatccagttgtgaatttcccgccagcactttatgagtatgtgactggagaacttggactggccctggtgctggttttgaacaaggtggatctggccccgccagctcttgtggttgcctggaagcattatttccatcaacactatccccagctccacgtcgtccttttcacctcttttcctcgggacccccgcaccccacaggatcctagtagtgtcttgaagaagagtcggaggcgggggagaggatggactcgggccctggggccagagcagttgctgagagcctgtgaagccatcactgtggggaaagtggacttgagcagctggcgggagaagattgctcgggatgtggctggggccacctggggtaatggctctggggaggaggaggaagaggaggatggcccagcagtcctggtggagcagcagactgattcagcaatggagccaactggcccaacccaagagcgctacaaggatggggtggtgaccatcggctgtgtgggtttccctaatgtgggaaagtcctcgctgatcaatgggctggtggggcggaaagtcgtgagtgtctccagaaccccgggccatacccgatactttcagacctactttcttaccccctctgtgaagctctgtgactgcccaggcctcatcttcccatctcttctgcctaggcagttgcaggttctggcggggatctaccctatcgcccagatccaggagccctacactgctgtgggctacctggcctcccgaattcccgtgcaggccctgctccacctgcgccacccagaggctgaggacccctcagcggaacacccctggtgtgcctgggacatctgtgaagcctgggcagagaaacgtggttacaagacagccaaggcggctcggaatgatgtgtacagagcagccaacagtctcttgcggctggcagtggacggccgcctcagcctgtgttttcatcccccaggctacagtgaacagaaaggcacctgggagtcccatccagagaccacggagctggtggttttgcagggcagggtggggccagcaggtgacgaggaggaggaggaagaggaagagctgagcagctcctgtgaggaggagggagaggaggaccgggatgcggatgaggagggagaaggggatgaggagaccccaacctcggctccagggtccagcctggctggccgaaacccttatgccctgctgggtgaggatgagtgctgagttcctcgcccagcgccatcttccctcccagtatctttgcttttggactgacctgggggtatctcccctctgccaccccaattgtgaataaagattgtttgctttgtagccccttccccagatgaactgaggtgagagcggctgttccaggctaacagctgtgggaggcttctctcctcttctcccttcttttttcatgcattctctttgcaagggaaagttctcttaggagtttagtaggttctcagtctctgaaacctgcttcctctacccattctcccactctgcaccttaggaatcccgttatctacatggggaggggaggtctaaatccagctcccttttggagtttgtgccattctccgatttgagcagcagccctgtgtgccccctgccgccagacctgctcattccaggagcttctgggagaaggaacagtaagagaggaactgtgtcccaagctgatgtctcttaatgagatttttacaggaattgttcaaattcagcaaatatttattgagggtctattgtgtgtcttgacctgtgctgagcaccaagcatataaggatgtaccaccagagcctgacctaaatttgaagcctggccatgatcaaaaccccaccttcaggcacccaagtttttggattaagaagggtgaatgatgttctccaaatcctgggggctcatgcagtataattctaggacttcatgttgatacaaatttttagttaaggcaaaacgcttgtgaaaatgttgattaaatgtgtacgagtagttttaattactggtgaacaactagcgtgcacatttatgatttgagcagaacagccctttaagtacagtgttaagtttcattgtttaaaagcttggcagctacgagtatttgaggtacataggggcgggcacagaaccagcctcctgaattccatttactctggtttgggggtggaacaaagatgatccagtgcagggtctgagctagaacctagcaggtggccagaaccattttagggtttcacctcagcatttcggcagaaatcagctctctcgtgagtcagggcaccttaggctttgctgtatatccctttgttaagccagcagctagactcctagattgaattcttttagaaatgggagaatgagcttttttattgactgccagtgttgtctgtattggatgatagcaaaaagtgtagttggacaggttgcccactagatggagtgagaagtaccagactccttttttctctaaagcagatcctttcaggatctgagtcactgggcagtttctctaatgcgagcagacagaccctgttaaccaaggagcaaaggaaagtatatttaaagaggctaaggtgtttggccacatattgctttaggttcatctccattggtctcagtgtggacataactcctggaattcactccagtgcaaagtttaaataataccagcatgagaatgtacttgaaggtttcccaaaatgtgctagacaagaaagagaaaaggtcccagctgagagaaaaatccacctgtctcccatctggggctctttggcctcactgatagaaaaggaaaaggggcccaagctaagcttactttgagggttcatgatgttcagagatgctcaggggacttctccgctgcaggaggtggggtgaggacattggattcatttcctcaaaatgtggagagaaaggagaaaaatcagaattctatttgtacctctgcttcctgtgctgtttatctttgcttgtctttatctttttccacctcaggggtttcatcaggggtatttgggagagtctaggggtggggatgaagaattgactgggagctgaggaggggggatttttatgctgaagacctggcaggaggcaactcctgacacccccacagggttagactgtaaaacctcttccatgacttgctgactctataggataatagcaacaggaaaagaactgagggacgtgcagatgaggatgaatagggccccaacaccagtgcctgaggctgaggttagaactgactacaaagacacaggaaaccaagggcccagtctcccctccacgctgaaatacgcaccctcttgtctgggtcatgtctactatgtgaatacttgaccatggaggtctggggctctggtggcttccatagctggctagtctcttgatggagagaaatcagggcttctctcatccatgctggaatttcatttagatgtcaacttccaagtttccctttttccagatgggattatagtcctgcttctggaacagggtagctgtgtgtggtccaggatagttcaattatctggccctttgttcacttcttacaatcattgatacagtcaacaaaaattggttaaaaacaatatatgccagacatatatccctgagttctgggacaataaccaaaattgaataaggcaatatcctactctcaagcaatagagggtaggaatagaataataataatataatacaatagctctatagcagtatgtaaactataaaagcattattttacgtgtttctattgaactgtcataactaaataagatggttagtactataattatcccaaggattcattcactcatagaacatttgttgagcaattactacctgccagtcacttccaagtggtaagtgagatagaaatggttctttgtggcgctcacaatttattggagaatggaaacacaattacaaaaaaaaagtgtgataagttctgggagaagggtggtacaggatcctgtggggtagtggtggctccatataggagggacattgggatactgatcaggaaggagtgggggacagggctagaagctgcattagtataaagttatgtcagactgccaaaacaaaacaaacacaaaaaatcagtagtctgtggtaaagaattgctataggaacagccagtaggggcagttaagctggtcttggtgaatcaggggaagcgtcctagaggaacagatgtccatgctgaggccaaatgctggacaggagttagccagacagggaaattgcattctgggcagaggagacagcaaaggtcaagaaacatgacaactttggaagactgtaacttgttcagaggcagagggtgcaaaggagaaatgaggaaaggtgaagctggagaggtgggcttggtccagctcttgctgggccttttcagccgtgttaaagatttagactgtatccagagggatgttgaactttaagcctaagactgaaaaggtgagaattgtgccttagatcactatggttgcagtgtggagactggtttggaaaggggagaaatcagaggcttttacagccatcccagggagagagaatgaacaccagaattagggtaatggaagatggaaagaagagaaatcgttttatgggttgctcaggagatagaattgacatgtcttgggattgttttgctgtgtaggggagagagacaagtcaagagtatacatcctgtttctgacttggcaactgggtgggtcatgggtctgtttcctgagacagttgtctacagccataccaccgtaagcgccctaaatctcatcagagacagtttatgcaaatggagcttggggaaagagaggtcgtggctggagacagagatttgggcatcatcaacatataggtgtggggagcagagaaggctgaggaagaaagcaggaaacatataaaaaggagagcagggaaaggagccagtgagacaggaaaaacctagtaacgtggtgtgatgaagctaggggaggaaggaaggaaggaagggcggcgtggaacgctgctgatgggtggtggcggggaaaatgaacgagtatccaccagcaacgagaggggcctccatggtcttggtgggagcatttctttggagaggtggaatcagaagccccagatgtcagagggttaaggaataatttggaggaaaagcgtaaaggcagtggaggtgaggagagaattttcaaaatgtttggcagtgattgcaatgaaagaaaaaaatggagggagcagagtatatgcagttgaggaacttttttagtttggagtgtgttaacacgatgttaggaagaaggatcaagtgaaggagaaaggtgaaaatgctggaaggtggggcttagtgatgaaacaaaccttggggacaggtgggcgtggtactgagagtcccagtgaggggagtgccctcaggcaggcgccggtggcttctgtcacaggagggaacagcgctgacattcagctggttcgcactgatacggctcaaccagtttgttaaaacatgtctgttccagtgtcagtaatatacgagtaactgcaatatgcagtaaaaattataaattctaatacaaactcagttcaagctaattaagagatcgcaacagccgttggtaaatggacttcccgctgcatttgagaagctttgcagcgccatctgccggtgtcgtagcatcactgcaggctgagaggctgctttgcgccttcatcttgaagcactctgaaattgcctgtttaaattaccttggaatcatggagttgctactgcttctgaatagtttagcttctactttgattttattgttagtgcattgtcgttcttgtgtcagtagcaagtttcagtgttttaatatttacaaatacaaaaatttttaataaaatattaaagccaaacttgaatgaagagacaacaaa

SEQ ID NO: 154511 - DNA, 198 bp, Artificial Sequence
  derived and/or modified sequence
gttgtgaatttcccgccagcactttatgagtatgtgactggagaacttggactggccctggtgctggttttgaacaaggtggatctggccccgccagctcttgtggttgcctggaagcattatttccatcaacactatccccagctccacgtcgtccttttcacctcttttcctcgggacccccgcaccccacaggat

SEQ ID NO: 154512 - DNA, 1094 bp, Artificial Sequence
  derived and/or modified sequence
gcacatctggaaggaggggtgtgcccgctgcacctctggggatcgtgggagggggtcgtgggaccgcgtcaaccctcgcggcctatcgcggaggggatcccccaccccccctacatctggaaggggtggggaaggatggagagttgggggaggggaatccctccagctagcacggggcgccgtccccactgctccctgaaggagtgactccccccacgcacatccgggagggtcccaaatagggtgtctgggaggactgaacatcggaagaagttgagtgggatgaaagggagtcaggccgatgggggagagggtcttatggcccctgagagctggccagcactggcgtcaccggcccctccccgcagggcttcaagatgggctgcgctccagttccaacagccgcagcgggagccgggagcggcgagaggaacagaccgacacctcggacggggagtctgtgacccatcatatccgcaggcttaaccagcagccttctcaggggctgggtccacgaggctacgacccaaatcgataccgactgcattttgagagagacagcagggaggaggtagagaggagaaagagagcagcccgggagcaagttctacagccggtcagtgctgagttgttggagctggacatccgggaggtgtatcagcctggctcagttctggactttcctcgacgtcctccttggagctatgagatgtccaaggagcaactaatgagccaagaggaacggagcttccaagactatcttgggaagattcatggggcttactcctctgagaaactcagctactttgagcacaatctggagacatggaggcagctgtggcgggtgttagagatgtctgacatcgtcctgcttatcactgatatccgacatccagttgtgaatttcccgccagcactttatgagtatgtgactggagaacttggactggccctggtgctggttttgaacaaggtggatctggccccgccagctcttgtggttgcctggaagcattatttccatcaacactatccccagctccacgtcgtccttttcacctcttttcctcgggacccccgcaccccacaggatc

SEQ ID NO: 154513 - DNA, 1717 bp, Artificial Sequence
  derived and/or modified sequence
attccacttccggaaggttgcggagaacatctgcggcggccgcattccggagccaactgcctccctccgtctctgccaggcatggcggcaacctcacaccttccctttgctgcgtttctataaatgctttgaaaaaattactcttttcttccctcgctggaaaacaccacaaccagcagccttctcaggggctgggtccacgaggctacgacccaaatcgataccgactgcattttgagagagacagcagggaggaggtagagaggagaaagagagcagcccgggagcaagttctacagccggtcagtgctgagttgttggagctggacatccgggaggtgtatcagcctggctcagttctggactttcctcgacgtcctccttggagctatgagatgtccaaggagcaactaatgagccaagaggaacggagcttccaagactatcttgggaagattcatggggcttactcctctgagaaactcagctactttgagcacaatctggagacatggaggcagctgtggcgggtgttagagatgtctgacatcgtcctgcttatcactgatatccgacatccagttgtgaatttcccgccagcactttatgagtatgtgactggagaacttggactggccctggtgctggttttgaacaaggtggatctggccccgccagctcttgtggttgcctggaagcattatttccatcaacactatccccagctccacgtcgtccttttcacctcttttcctcgggacccccgcaccccacaggatcctagtagtgtcttgaagaagagtcggaggcgggggagaggatggactcgggccctggggccagagcagttgctgagagcctgtgaagccatcactgtggggaaaggtttccctaatgtgggaaagtcctcgctgatcaatgggctggtggggcggaaagtcgtgagtgtctccagaaccccgggccatacccgatactttcagacctactttcttaccccctctgtgaagctctgtgactgcccaggcctcatcttcccatctcttctgcctaggcagttgcaggttctggcagggatctaccctatcgcccagatccaggagccctacactgctgtgggctacctggcctcccgaattcccgtgcaggccctgctccacctgcgccacccagaggctgaggacccctcagcggaacacccctggtgtgcctgggacatctgtgaagcctgggcagagaaacgtggttacaagacagccaaggcggctcggaatgatgtgtacagagcagccaacagtctcttgcggctggcagtggacggccgcctcagcctgtgttttcatcccccaggctacagtgaacagaaaggcacctgggagtcccatccagagaccacggagctggtggttttgcagggcagggtggggccagcaggtgacgaggaggaggaggaagaggaagagctgagcagctcctgtgaggaggagggagaggaggaccgggatgcggatgaggagggagaaggggatgaggagaccccaacctcggctccagggtccagcctggctggccgaaacccttatgccctgctgggtgaggatgagtgctgagttcctcgcccagcgccatcttccctcccagtatctttgcttttggactgacctgggggtatctcccctctgccaccccaattgtgaataaagattgtttgctttgt

SEQ ID NO: 154514 - DNA, 1486 bp, Artificial Sequence
  derived and/or modified sequence
gtgacggagttagcctggtcctcccacgcgcgcctccttcctcgccgccggggcgccctctcggtgccactggctctcacgtgccagtagcccaccccgcatcatcctctcgcctcgctcctggagggaagtgactatatctcccccgtccgccttccatcgccgccgcggcggtaattctgtcgggcccgcccgctgacgtcacctgctagccccgcctcctctagggtcccgggcccctgcggcgggggctgccccggggggcagtcagttgaggcggcgggagctcggcggagggcgggccaggtgactggtccgggccatgccgaggaagaagccattcagcgtcctggtggagcagcagactgattcagcaatggagccaactggcccaacccaagagcgctacaaggatggggtggtgaccatcggctgtgtgggtttccctaatgtgggaaagtcctcgctgatcaatgggctggtggggcggaaagtcgtgagtgtctccagaaccccgggccatacccgatactttcagacctactttcttaccccctctgtgaagctctgtgactgcccaggcctcatcttcccatctcttctgcctaggcagttgcaggttctggcagggatctaccctatcgcccagatccaggagccctacactgctgtgggctacctggcctcccgaattcccgtgcaggccctgctccacctgcgccacccagaggctgaggacccctcagcggaacacccctggtgtgcctgggacatctgtgaagcctgggcagagaaacgtggttacaagacagccaaggcggctcggaatgatgtgtacagagcagccaacagtctcttgcggctggcagtggacggccgcctcagcctgtgttttcatcccccaggctacagtgaacagaaaggcacctgggagtcccatccagagaccacggagctggtggttttgcagggcagggtggggccagcaggtgacgaggaggaggaggaagaggaagagctgagcagctcctgtgaggaggagggagaggaggaccgggatgcggatgaggagggagaaggggatgaggagaccccaacctcggctccagggtccagcctggctggccgaaacccttatgccctgctgggtgaggatgagtgctgagttcctcgcccagcgccatcttccctcccagtatctttgcttttggactgacctgggggtatctcccctctgccaccccaattgtgaataaagattgtttgctttgtagccccttccccagatgaactgaggtgagagcggctgttccaggctaacagctgtgggaggcttctctcctcttctcccttcttttttcatgcattctctttgcaagggaaagttctcttaggagtttagtaggttctcagtctctgaaacctgcttcctctacccattctcccactctgcaccttaggaatcccgttatctacatggggaggg

SEQ ID NO: 154515 - DNA, 1486 bp, Artificial Sequence
  derived and/or modified sequence
gtgacggagttagcctggtcctcccacgcgcgcctccttcctcgccgccggggcgccctctcggtgccactggctctcacgtgccagtagcccaccccgcatcatcctctcgcctcgctcctggagggaagtgactatatctcccccgtccgccttccatcgccgccgcggcggtaattctgtcgggcccgcccgctgacgtcacctgctagccccgcctcctctagggtcccgggcccctgcggcgggggctgccccggggggcagtcagttgaggcggcgggagctcggcggagggcgggccaggtgactggtccgggccatgccgaggaagaagccattcagcgtcctggtggagcagcagactgattcagcaatggagccaactggcccaacccaagagcgctacaaggatggggtggtgaccatcggctgtgtgggtttccctaatgtgggaaagtcctcgctgatcaatgggctggtggggcggaaagtcgtgagtgtctccagaaccccgggccatacccgatactttcagacctactttcttaccccctctgtgaagctctgtgactgcccaggcctcatcttcccatctcttctgcctaggcagttgcaggttctggcggggatctaccctatcgcccagatccaggagccctacactgctgtgggctacctggcctcccgaattcccgtgcaggccctgctccacctgcgccacccagaggctgaggacccctcagcggaacacccctggtgtgcctgggacatctgtgaagcctgggcagagaaacgtggttacaagacagccaaggcggctcggaatgatgtgtacagagcagccaacagtctcttgcggctggcagtggacggccgcctcagcctgtgttttcatcccccaggctacagtgaacagaaaggcacctgggagtcccatccagagaccacggagctggtggttttgcagggcagggtggggccagcaggtgacgaggaggaggaggaagaggaagagctgagcagctcctgtgaggaggagggagaggaggaccgggatgcggatgaggagggagaaggggatgaggagaccccaacctcggctccagggtccagcctggctggccgaaacccttatgccctgctgggtgaggatgagtgctgagttcctcgcccagcgccatcttccctcccagtatctttgcttttggactgacctgggggtatctcccctctgccaccccaattgtgaataaagattgtttgctttgtagccccttccccagatgaactgaggtgagagcggctgttccaggctaacagctgtgggaggcttctctcctcttctcccttcttttttcatgcattctctttgcaagggaaagttctcttaggagtttagtaggttctcagtctctgaaacctgcttcctctacccattctcccactctgcaccttaggaatcccgttatctacatggggaggg

SEQ ID NO: 154516 - DNA, 5977 bp, Artificial Sequence
  derived and/or modified sequence
atggaggcagctgtggtgttagagatgtctgacatcgtcctgcttatcactgatatccgacatccagttgtgaatttcccgccagcactttatgagtatgtgactggagaacttggactggccctggtgctggttttgaacaaggtggatctggccccgccagctcttgtggttgcctggaagcattatttccatcaacactatccccagctccacgtcgtccttttcacctcttttcctcgggacccccgcaccccacaggatcctagtagtgtcttgaagaagagtcggaggcgggggagaggatggactcgggccctggggccagagcagttgctgagagcctgtgaagccatcactgtggggaaagtggacttgagcagctggcgggagaagattgctcgggatgtggctggggccacctggggtaatggctctggggaggaggaggaagaggaggatggcccagcagtcctggtggagcagcagactgattcagcaatggagccaactggcccaacccaagagcgctacaaggatggggtggtgaccatcggctgtgtgggtttccctaatgtgggaaagtcctcgctgatcaatgggctggtggggcggaaagtcgtgagtgtctccagaaccccgggccatacccgatactttcagacctactttcttaccccctctgtgaagctctgtgactgcccaggcctcatcttcccatctcttctgcctaggcagttgcaggttctggcggggatctaccctatcgcccagatccaggagccctacactgctgtgggctacctggcctcccgaattcccgtgcaggccctgctccacctgcgccacccagaggctgaggacccctcagcggaacacccctggtgtgcctgggacatctgtgaagcctgggcagagaaacgtggttacaagacagccaaggcggctcggaatgatgtgtacagagcagccaacagtctcttgcggctggcagtggacggccgcctcagcctgtgttttcatcccccaggctacagtgaacagaaaggcacctgggagtcccatccagagaccacggagctggtggttttgcagggcagggtggggccagcaggtgacgaggaggaggaggaagaggaagagctgagcagctcctgtgaggaggagggagaggaggaccgggatgcggatgaggagggagaaggggatgaggagaccccaacctcggctccagggtccagcctggctggccgaaacccttatgccctgctgggtgaggatgagtgctgagttcctcgcccagcgccatcttccctcccagtatctttgcttttggactgacctgggggtatctcccctctgccaccccaattgtgaataaagattgtttgctttgtagccccttccccagatgaactgaggtgagagcggctgttccaggctaacagctgtgggaggcttctctcctcttctcccttcttttttcatgcattctctttgcaagggaaagttctcttaggagtttagtaggttctcagtctctgaaacctgcttcctctacccattctcccactctgcaccttaggaatcccgttatctacatggggaggggaggtctaaatccagctcccttttggagtttgtgccattctccgatttgagcagcagccctgtgtgccccctgccgccagacctgctcattccaggagcttctgggagaaggaacagtaagagaggaactgtgtcccaagctgatgtctcttaatgagatttttacaggaattgttcaaattcagcaaatatttattgagggtctattgtgtgtcttgacctgtgctgagcaccaagcatataaggatgtaccaccagagcctgacctaaatttgaagcctggccatgatcaaaaccccaccttcaggcacccaagtttttggattaagaagggtgaatgatgttctccaaatcctgggggctcatgcagtataattctaggacttcatgttgatacaaatttttagttaaggcaaaacgcttgtgaaaatgttgattaaatgtgtacgagtagttttaattactggtgaacaactagcgtgcacatttatgatttgagcagaacagccctttaagtacagtgttaagtttcattgtttaaaagcttggcagctacgagtatttgaggtacataggggcgggcacagaaccagcctcctgaattccatttactctggtttgggggtggaacaaagatgatccagtgcagggtctgagctagaacctagcaggtggccagaaccattttagggtttcacctcagcatttcggcagaaatcagctctctcgtgagtcagggcaccttaggctttgctgtatatccctttgttaagccagcagctagactcctagattgaattcttttagaaatgggagaatgagcttttttattgactgccagtgttgtctgtattggatgatagcaaaaagtgtagttggacaggttgcccactagatggagtgagaagtaccagactccttttttctctaaagcagatcctttcaggatctgagtcactgggcagtttctctaatgcgagcagacagaccctgttaaccaaggagcaaaggaaagtatatttaaagaggctaaggtgtttggccacatattgctttaggttcatctccattggtctcagtgtggacataactcctggaattcactccagtgcaaagtttaaataataccagcatgagaatgtacttgaaggtttcccaaaatgtgctagacaagaaagagaaaaggtcccagctgagagaaaaatccacctgtctcccatctggggctctttggcctcactgatagaaaaggaaaaggggcccaagctaagcttactttgagggttcatgatgttcagagatgctcaggggacttctccgctgcaggaggtggggtgaggacattggattcatttcctcaaaatgtggagagaaaggagaaaaatcagaattctatttgtacctctgcttcctgtgctgtttatctttgcttgtctttatctttttccacctcaggggtttcatcaggggtatttgggagagtctaggggtggggatgaagaattgactgggagctgaggaggggggatttttatgctgaagacctggcaggaggcaactcctgacacccccacagggttagactgtaaaacctcttccatgacttgctgactctataggataatagcaacaggaaaagaactgagggacgtgcagatgaggatgaatagggccccaacaccagtgcctgaggctgaggttagaactgactacaaagacacaggaaaccaagggcccagtctcccctccacgctgaaatacgcaccctcttgtctgggtcatgtctactatgtgaatacttgaccatggaggtctggggctctggtggcttccatagctggctagtctcttgatggagagaaatcagggcttctctcatccatgctggaatttcatttagatgtcaacttccaagtttccctttttccagatgggattatagtcctgcttctggaacagggtagctgtgtgtggtccaggatagttcaattatctggccctttgttcacttcttacaatcattgatacagtcaacaaaaattggttaaaaacaatatatgccagacatatatccctgagttctgggacaataaccaaaattgaataaggcaatatcctactctcaagcaatagagggtaggaatagaataataataatataatacaatagctctatagcagtatgtaaactataaaagcattattttacgtgtttctattgaactgtcataactaaataagatggttagtactataattatcccaaggattcattcactcatagaacatttgttgagcaattactacctgccagtcacttccaagtggtaagtgagatagaaatggttctttgtggcgctcacaatttattggagaatggaaacacaattacaaaaaaaaagtgtgataagttctgggagaagggtggtacaggatcctgtggggtagtggtggctccatataggagggacattgggatactgatcaggaaggagtgggggacagggctagaagctgcattagtataaagttatgtcagactgccaaaacaaaacaaacacaaaaaatcagtagtctgtggtaaagaattgctataggaacagccagtaggggcagttaagctggtcttggtgaatcaggggaagcgtcctagaggaacagatgtccatgctgaggccaaatgctggacaggagttagccagacagggaaattgcattctgggcagaggagacagcaaaggtcaagaaacatgacaactttggaagactgtaacttgttcagaggcagagggtgcaaaggagaaatgaggaaaggtgaagctggagaggtgggcttggtccagctcttgctgggccttttcagccgtgttaaagatttagactgtatccagagggatgttgaactttaagcctaagactgaaaaggtgagaattgtgccttagatcactatggttgcagtgtggagactggtttggaaaggggagaaatcagaggcttttacagccatcccagggagagagaatgaacaccagaattagggtaatggaagatggaaagaagagaaatcgttttatgggttgctcaggagatagaattgacatgtcttgggattgttttgctgtgtaggggagagagacaagtcaagagtatacatcctgtttctgacttggcaactgggtgggtcatgggtctgtttcctgagacagttgtctacagccataccaccgtaagcgccctaaatctcatcagagacagtttatgcaaatggagcttggggaaagagaggtcgtggctggagacagagatttgggcatcatcaacatataggtgtggggagcagagaaggctgaggaagaaagcaggaaacatataaaaaggagagcagggaaaggagccagtgagacaggaaaaacctagtaacgtggtgtgatgaagctaggggaggaaggaaggaaggaagggcggcgtggaacgctgctgatgggtggtggcggggaaaatgaacgagtatccaccagcaacgagaggggcctccatggtcttggtgggagcatttctttggagaggtggaatcagaagccccagatgtcagagggttaaggaataatttggaggaaaagcgtaaaggcagtggaggtgaggagagaattttcaaaatgtttggcagtgattgcaatgaaagaaaaaaatggagggagcagagtatatgcagttgaggaacttttttagtttggagtgtgttaacacgatgttaggaagaaggatcaagtgaaggagaaaggtgaaaatgctggaaggtggggcttagtgatgaaacaaaccttggggacaggtgggcgtggtactgagagtcccagtgaggggagtgccctcaggcaggcgccggtggcttctgtcacaggagggaacagcgctgacattcagctggttcgcactgatacggctcaaccagtttgttaaaacatgtctgttccagtgtcagtaatatacgagtaactgcaatatgcagtaaaaattataaattctaatacaaactcagttcaagctaattaagagatcgcaacagccgttggtaaatggacttcccgctgcatttgagaagctttgcagcgccatctgccggtgtcgtagcatcactgcaggctgagaggctgctttgcgccttcatcttgaagcactctgaaattgcctgtttaaattaccttggaatcatggagttgctactgcttctgaatagtttagcttctactttgattttattgttagtgcattgtcgttcttgtgtcagtagcaagtttcagtgttttaatatttacaaatacaaaaatttttaataaaatattaaagccaaacttgaatgaagag

SEQ ID NO: 154517 - DNA, 5977 bp, Artificial Sequence
  derived and/or modified sequence
atggaggcagctgtggtgttagagatgtctgacatcgtcctgcttatcactgatatccgacatccagttgtgaatttcccgccagcactttatgagtatgtgactggagaacttggactggccctggtgctggttttgaacaaggtggatctggccccgccagctcttgtggttgcctggaagcattatttccatcaacactatccccagctccacgtcgtccttttcacctcttttcctcgggacccccgcaccccacaggatcctagtagtgtcttgaagaagagtcggaggcgggggagaggatggactcgggccctggggccagagcagttgctgagagcctgtgaagccatcactgtggggaaagtggacttgagcagctggcgggagaagattgctcgggatgtggctggggccacctggggtaatggctctggggaggaggaggaagaggaggatggcccagcagtcctggtggagcagcagactgattcagcaatggagccaactggcccaacccaagagcgctacaaggatggggtggtgaccatcggctgtgtgggtttccctaatgtgggaaagtcctcgctgatcaatgggctggtggggcggaaagtcgtgagtgtctccagaaccccgggccatacccgatactttcagacctactttcttaccccctctgtgaagctctgtgactgcccaggcctcatcttcccatctcttctgcctaggcagttgcaggttctggcagggatctaccctatcgcccagatccaggagccctacactgctgtgggctacctggcctcccgaattcccgtgcaggccctgctccacctgcgccacccagaggctgaggacccctcagcggaacacccctggtgtgcctgggacatctgtgaagcctgggcagagaaacgtggttacaagacagccaaggcggctcggaatgatgtgtacagagcagccaacagtctcttgcggctggcagtggacggccgcctcagcctgtgttttcatcccccaggctacagtgaacagaaaggcacctgggagtcccatccagagaccacggagctggtggttttgcagggcagggtggggccagcaggtgacgaggaggaggaggaagaggaagagctgagcagctcctgtgaggaggagggagaggaggaccgggatgcggatgaggagggagaaggggatgaggagaccccaacctcggctccagggtccagcctggctggccgaaacccttatgccctgctgggtgaggatgagtgctgagttcctcgcccagcgccatcttccctcccagtatctttgcttttggactgacctgggggtatctcccctctgccaccccaattgtgaataaagattgtttgctttgtagccccttccccagatgaactgaggtgagagcggctgttccaggctaacagctgtgggaggcttctctcctcttctcccttcttttttcatgcattctctttgcaagggaaagttctcttaggagtttagtaggttctcagtctctgaaacctgcttcctctacccattctcccactctgcaccttaggaatcccgttatctacatggggaggggaggtctaaatccagctcccttttggagtttgtgccattctccgatttgagcagcagccctgtgtgccccctgccgccagacctgctcattccaggagcttctgggagaaggaacagtaagagaggaactgtgtcccaagctgatgtctcttaatgagatttttacaggaattgttcaaattcagcaaatatttattgagggtctattgtgtgtcttgacctgtgctgagcaccaagcatataaggatgtaccaccagagcctgacctaaatttgaagcctggccatgatcaaaaccccaccttcaggcacccaagtttttggattaagaagggtgaatgatgttctccaaatcctgggggctcatgcagtataattctaggacttcatgttgatacaaatttttagttaaggcaaaacgcttgtgaaaatgttgattaaatgtgtacgagtagttttaattactggtgaacaactagcgtgcacatttatgatttgagcagaacagccctttaagtacagtgttaagtttcattgtttaaaagcttggcagctacgagtatttgaggtacataggggcgggcacagaaccagcctcctgaattccatttactctggtttgggggtggaacaaagatgatccagtgcagggtctgagctagaacctagcaggtggccagaaccattttagggtttcacctcagcatttcggcagaaatcagctctctcgtgagtcagggcaccttaggctttgctgtatatccctttgttaagccagcagctagactcctagattgaattcttttagaaatgggagaatgagcttttttattgactgccagtgttgtctgtattggatgatagcaaaaagtgtagttggacaggttgcccactagatggagtgagaagtaccagactccttttttctctaaagcagatcctttcaggatctgagtcactgggcagtttctctaatgcgagcagacagaccctgttaaccaaggagcaaaggaaagtatatttaaagaggctaaggtgtttggccacatattgctttaggttcatctccattggtctcagtgtggacataactcctggaattcactccagtgcaaagtttaaataataccagcatgagaatgtacttgaaggtttcccaaaatgtgctagacaagaaagagaaaaggtcccagctgagagaaaaatccacctgtctcccatctggggctctttggcctcactgatagaaaaggaaaaggggcccaagctaagcttactttgagggttcatgatgttcagagatgctcaggggacttctccgctgcaggaggtggggtgaggacattggattcatttcctcaaaatgtggagagaaaggagaaaaatcagaattctatttgtacctctgcttcctgtgctgtttatctttgcttgtctttatctttttccacctcaggggtttcatcaggggtatttgggagagtctaggggtggggatgaagaattgactgggagctgaggaggggggatttttatgctgaagacctggcaggaggcaactcctgacacccccacagggttagactgtaaaacctcttccatgacttgctgactctataggataatagcaacaggaaaagaactgagggacgtgcagatgaggatgaatagggccccaacaccagtgcctgaggctgaggttagaactgactacaaagacacaggaaaccaagggcccagtctcccctccacgctgaaatacgcaccctcttgtctgggtcatgtctactatgtgaatacttgaccatggaggtctggggctctggtggcttccatagctggctagtctcttgatggagagaaatcagggcttctctcatccatgctggaatttcatttagatgtcaacttccaagtttccctttttccagatgggattatagtcctgcttctggaacagggtagctgtgtgtggtccaggatagttcaattatctggccctttgttcacttcttacaatcattgatacagtcaacaaaaattggttaaaaacaatatatgccagacatatatccctgagttctgggacaataaccaaaattgaataaggcaatatcctactctcaagcaatagagggtaggaatagaataataataatataatacaatagctctatagcagtatgtaaactataaaagcattattttacgtgtttctattgaactgtcataactaaataagatggttagtactataattatcccaaggattcattcactcatagaacatttgttgagcaattactacctgccagtcacttccaagtggtaagtgagatagaaatggttctttgtggcactcacaatttattggagaatggaaacacaattacaaaaaaaaagtgtgataagttctgggagaagggtggtacaggatcctgtggggtagtggtggctccatataggagggacattgggatactgatcaggaaggagtgggggacagggctagaagctgcattagtataaagttatgtcagactgccaaaacaaaacaaacacaaaaaatcagtagtctgtggtaaagaattgctataggaacagccagtaggggcagttaagctggtcttggtgaatcaggggaagcgtcctagaggaacagatgtccatgctgaggccaaatgctggacaggagttagccagacagggaaattgcattctgggcagaggagacagcaaaggtcaagaaacatgacaactttggaagactgtaacttgttcagaggcagagggtgcaaaggagaaatgaggaaaggtgaagctggagaggtgggcttggtccagctcttgctgggccttttcagccgtgttaaagatttagactgtatccagagggatgttgaactttaagcctaagactgaaaaggtgagaattgtgccttagatcactatggttgcagtgtggagactggtttggaaaggggagaaatcagaggcttttacagccatcccagggagagagaatgaacaccagaattagggtaatggaagatggaaagaagagaaatcgttttatgggttgctcaggagatagaattgacatgtcttgggattgttttgctgtgtaggggagagagacaagtcaagagtatacatcctgtttctgacttggcaactgggtgggtcatgggtctgtttcctgagacagttgtctacagccataccaccgtaagcgccctaaatctcatcagagacagtttatgcaaatggagcttggggaaagagaggtcgtggctggagacagagatttgggcatcatcaacatataggtgtggggagcagagaaggctgaggaagaaagcaggaaacatataaaaaggagagcagggaaaggagccagtgagacaggaaaaacctagtaacgtggtgtgatgaagctaggggaggaaggaaggaaggaagggcggcgtggaacgctgctgatgggtggtggcggggaaaatgaacgagtatccaccagcaacgagaggggcctccatggtcttggtgggagcatttctttggagaggtggaatcagaagccccagatgtcagagggttaaggaataatttggaggaaaagcgtaaaggcagtggaggtgaggagagaattttcaaaatgtttggcagtgattgcaatgaaagaaaaaaatggagggagcagagtatatgcagttgaggaacttttttagtttggagtgtgttaacacgatgttaggaagaaggatcaagtgaaggagaaaggtgaaaatgctggaaggtggggcttagtgatgaaacaaaccttggggacaggtgggcgtggtactgagagtcccagtgaggggagtgccctcaggcaggcgccggtggcttctgtcacaggagggaacagcgctgacattcagctggttcgcactgatacggctcaaccagtttgttaaaacatgtctgttccagtgtcagtaatatacgagtaactgcaatatgcagtaaaaattataaattctaatacaaactcagttcaagctaattaagagatcgcaacagccgttggtaaatggacttcccgctgcatttgagaagctttgcagcgccatctgccggtgtcgtagcatcactgcaggctgagaggctgctttgcgccttcatcttgaagcactctgaaattgcctgtttaaattaccttggaatcatggagttgctactgcttctgaatagtttagcttctactttgattttattgttagtgcattgtcgttcttgtgtcagtagcaagtttcagtgttttaatatttacaaatacaaaaatttttaataaaatattaaagccaaacttgaatgaagag

SEQ ID NO: 154518 - DNA, 5977 bp, Artificial Sequence
  derived and/or modified sequence
atggaggcagctgtggtgttagagatgtctgacatcgtcctgcttatcactgatatccgacatccagttgtgaatttcccgccagcactttatgagtatgtgactggagaacttggactggccctggtgctggttttgaacaaggtggatctggccccgccagctcttgtggttgcctggaagcattatttccatcaacactatccccagctccacgtcgtccttttcacctcttttcctcgggacccccgcaccccacaggatcctagtagtgtcttgaagaagagtcggaggcgggggagaggatggactcgggccctggggccagagcagttgctgagagcctgtgaagccatcactgtggggaaagtggacttgagcagctggcgggagaagattgctcgggatgtggctggggccacctggggtaatggctctggggaggaggaggaagaggaggatggcccagcagtcctggtggagcagcagactgattcagcaatggagccaactggcccaacccaagagcgctacaaggatggggtggtgaccatcggctgtgtgggtttccctaatgtgggaaagtcctcgctgatcaatgggctggtggggcggaaagtcgtgagtgtctccagaaccccgggccatacccgatactttcagacctactttcttaccccctctgtgaagctctgtgactgcccaggcctcatcttcccatctcttctgcctaggcagttgcaggttctggcagggatctaccctatcgcccagatccaggagccctacactgctgtgggctacctggcctcccgaattcccgtgcaggccctgctccacctgcgccacccagaggctgaggacccctcagcggaacacccctggtgtgcctgggacatctgtgaagcctgggcagagaaacgtggttacaagacagccaaggcggctcggaatgatgtgtacagagcagccaacagtctcttgcggctggcagtggacggccgcctcagcctgtgttttcatcccccaggctacagtgaacagaaaggcacctgggagtcccatccagagaccacggagctggtggttttgcagggcagggtggggccagcaggtgacgaggaggaggaggaagaggaagagctgagcagctcctgtgaggaggagggagaggaggaccgggatgcggatgaggagggagaaggggatgaggagaccccaacctcggctccagggtccagcctggctggccgaaacccttatgccctgctgggtgaggatgagtgctgagttcctcgcccagcgccatcttccctcccagtatctttgcttttggactgacctgggggtatctcccctctgccaccccaattgtgaataaagattgtttgctttgtagccccttccccagatgaactgaggtgagagcggctgttccaggctaacagctgtgggaggcttctctcctcttctcccttcttttttcatgcattctctttgcaagggaaagttctcttaggagtttagtaggttctcagtctctgaaacctgcttcctctacccattctcccactctgcaccttaggaatcccgttatctacatggggaggggaggtctaaatccagctcccttttggagtttgtgccattctccgatttgagcagcagccctgtgtgccccctgccgccagacctgctcattccaggagcttctgggagaaggaacagtaagagaggaactgtgtcccaagctgatgtctcttaatgagatttttacaggaattgttcaaattcagcaaatatttattgagggtctattgtgtgtcttgacctgtgctgagcaccaagcatataaggatgtaccaccagagcctgacctaaatttgaagcctggccatgatcaaaaccccaccttcaggcacccaagtttttggattaagaagggtgaatgatgttctccaaatcctgggggctcatgcagtataattctaggacttcatgttgatacaaatttttagttaaggcaaaacgcttgtgaaaatgttgattaaatgtgtacgagtagttttaattactggtgaacaactagcgtgcacatttatgatttgagcagaacagccctttaagtacagtgttaagtttcattgtttaaaagcttggcagctacgagtatttgaggtacataggggcgggcacagaaccagcctcctgaattccatttactctggtttgggggtggaacaaagatgatccagtgcagggtctgagctagaacctagcaggtggccagaaccattttagggtttcacctcagcatttcggcagaaatcagctctctcgtgagtcagggcaccttaggctttgctgtatatccctttgttaagccagcagctagactcctagattgaattcttttagaaatgggagaatgagcttttttattgactgccagtgttgtctgtattggatgatagcaaaaagtgtagttggacaggttgcccactagatggagtgagaagtaccagactccttttttctctaaagcagatcctttcaggatctgagtcactgggcagtttctctaatgcgagcagacagaccctgttaaccaaggagcaaaggaaagtatatttaaagaggctaaggtgtttggccacatattgctttaggttcatctccattggtctcagtgtggacataactcctggaattcactccagtgcaaagtttaaataataccagcatgagaatgtacttgaaggtttcccaaaatgtgctagacaagaaagagaaaaggtcccagctgagagaaaaatccacctgtctcccatctggggctctttggcctcactgatagaaaaggaaaaggggcccaagctaagcttactttgagggttcatgatgttcagagatgctcaggggacttctccgctgcaggaggtggggtgaggacattggattcatttcctcaaaatgtggagagaaaggagaaaaatcagaattctatttgtacctctgcttcctgtgctgtttatctttgcttgtctttatctttttccacctcaggggtttcatcaggggtatttgggagagtctaggggtggggatgaagaattgactgggagctgaggaggggggatttttatgctgaagacctggcaggaggcaactcctgacacccccacagggttagactgtaaaacctcttccatgacttgctgactctataggataatagcaacaggaaaagaactgagggacgtgcagatgaggatgaatagggccccaacaccagtgcctgaggctgaggttagaactgactacaaagacacaggaaaccaagggcccagtctcccctccacgctgaaatacgcaccctcttgtctgggtcatgtctactatgtgaatacttgaccatggaggtctggggctctggtggcttccatagctggctagtctcttgatggagagaaatcagggcttctctcatccatgctggaatttcatttagatgtcaacttccaagtttccctttttccagatgggattatagtcctgcttctggaacagggtagctgtgtgtggtccaggatagttcaattatctggccctttgttcacttcttacaatcattgatacagtcaacaaaaattggttaaaaacaatatatgccagacatatatccctgagttctgggacaataaccaaaattgaataaggcaatatcctactctcaagcaatagagggtaggaatagaataataataatataatacaatagctctatagcagtatgtaaactataaaagcattattttacgtgtttctattgaactgtcataactaaataagatggttagtactataattatcccaaggattcattcactcatagaacatttgttgagcaattactacctgccagtcacttccaagtggtaagtgagatagaaatggttctttgtggcgctcacaatttattggagaatggaaacacaattacaaaaaaaaagtgtgataagttctgggagaagggtggtacaggatcctgtggggtagtggtggctccatataggagggacattgggatactgatcaggaaggagtgggggacagggctagaagctgcattagtataaagttatgtcagactgccaaaacaaaacaaacacaaaaaatcagtagtctgtggtaaagaattgctataggaacagccagtaggggcagttaagctggtcttggtgaatcaggggaagcgtcctagaggaacagatgtccatgctgaggccaaatgctggacaggagttagccagacagggaaattgcattctgggcagaggagacagcaaaggtcaagaaacatgacaactttggaagactgtaacttgttcagaggcagagggtgcaaaggagaaatgaggaaaggtgaagctggagaggtgggcttggtccagctcttgctgggccttttcagccgtgttaaagatttagactgtatccagagggatgttgaactttaagcctaagactgaaaaggtgagaattgtgccttagatcactatggttgcagtgtggagactggtttggaaaggggagaaatcagaggcttttacagccatcccagggagagagaatgaacaccagaattagggtaatggaagatggaaagaagagaaatcgttttatgggttgctcaggagatagaattgacatgtcttgggattgttttgctgtgtaggggagagagacaagtcaagagtatacatcctgtttctgacttggcaactgggtgggtcatgggtctgtttcctgagacagttgtctacagccataccaccgtaagcgccctaaatctcatcagagacagtttatgcaaatggagcttggggaaagagaggtcgtggctggagacagagatttgggcatcatcaacatataggtgtggggagcagagaaggctgaggaagaaagcaggaaacatataaaaaggagagcagggaaaggagccagtgagacaggaaaaacctagtaacgtggtgtgatgaagctaggggaggaaggaaggaaggaagggcggcgtggaacgctgctgatgggtggtggcggggaaaatgaacgagtatccaccagcaacgagaggggcctccatggtcttggtgggagcatttctttggagaggtggaatcagaagccccagatgtcagagggttaaggaataatttggaggaaaagcgtaaaggcagtggaggtgaggagagaattttcaaaatgtttggcagtgattgcaatgaaagaaaaaaatggagggagcagagtatatgcagttgaggaacttttttagtttggagtgtgttaacacgatgttaggaagaaggatcaagtgaaggagaaaggtgaaaatgctggaaggtggggcttagtgatgaaacaaaccttggggacaggtgggcgtggtactgagagtcccagtgaggggagtgccctcaggcaggcgccggtggcttctgtcacaggagggaacagcgctgacattcagctggttcgcactgatacggctcaaccagtttgttaaaacatgtctgttccagtgtcagtaatatacgagtaactgcaatatgcagtaaaaattataaattctaatacaaactcagttcaagctaattaagagatcgcaacagccgttggtaaatggacttcccgctgcatttgagaagctttgcagcgccatctgccggtgtcgtagcatcactgcaggctgagaggctgctttgcgccttcatcttgaagcactctgaaattgcctgtttaaattaccttggaatcatggagttgctactgcttctgaatagtttagcttctactttgattttattgttagtgcattgtcgttcttgtgtcagtagcaagtttcagtgttttaatatttacaaatacaaaaatttttaataaaatattaaagccaaacttgaatgaagag

SEQ ID NO: 154519 - DNA, 1717 bp, Artificial Sequence
  derived and/or modified sequence
attccacttccggaaggttgcggagaacatctgcggcggccgcattccggagccaactgcctccctccgtctctgccaggcatggcggcaacctcacaccttccctttgctgcgtttctataaatgctttgaaaaaattactcttttcttccctcgctggaaaacaccacaaccagcagccttctcaggggctgggtccacgaggctacgacccaaatcgataccgactgcattttgagagagacagcagggaggaggtagagaggagaaagagagcagcccgggagcaagttctacagccggtcagtgctgagttgttggagctggacatccgggaggtgtatcagcctggctcagttctggactttcctcgacgtcctccttggagctatgagatgtccaaggagcaactaatgagccaagaggaacggagcttccaagactatcttgggaagattcatggggcttactcctctgagaaactcagctactttgagcacaatctggagacatggaggcagctgtggcgggtgttagagatgtctgacatcgtcctgcttatcactgatatccgacatccagttgtgaatttcccgccagcactttatgagtatgtgactggagaacttggactggccctggtgctggttttgaacaaggtggatctggccccgccagctcttgtggttgcctggaagcattatttccatcaacactatccccagctccacgtcgtccttttcacctcttttcctcgggacccccgcaccccacaggatcctagtagtgtcttgaagaagagtcggaggcgggggagaggatggactcgggccctggggccagagcagttgctgagagcctgtgaagccatcactgtggggaaaggtttccctaatgtgggaaagtcctcgctgatcaatgggctggtggggcggaaagtcgtgagtgtctccagaaccccgggccatacccgatactttcagacctactttcttaccccctctgtgaagctctgtgactgcccaggcctcatcttcccatctcttctgcctaggcagttgcaggttctggcggggatctaccctatcgcccagatccaggagccctacactgctgtgggctacctggcctcccgaattcccgtgcaggccctgctccacctgcgccacccagaggctgaggacccctcagcggaacacccctggtgtgcctgggacatctgtgaagcctgggcagagaaacgtggttacaagacagccaaggcggctcggaatgatgtgtacagagcagccaacagtctcttgcggctggcagtggacggccgcctcagcctgtgttttcatcccccaggctacagtgaacagaaaggcacctgggagtcccatccagagaccacggagctggtggttttgcagggcagggtggggccagcaggtgacgaggaggaggaggaagaggaagagctgagcagctcctgtgaggaggagggagaggaggaccgggatgcggatgaggagggagaaggggatgaggagaccccaacctcggctccagggtccagcctggctggccgaaacccttatgccctgctgggtgaggatgagtgctgagttcctcgcccagcgccatcttccctcccagtatctttgcttttggactgacctgggggtatctcccctctgccaccccaattgtgaataaagattgtttgctttgt

SEQ ID NO: 154520 - DNA, 1824 bp, Artificial Sequence
  derived and/or modified sequence
atgcccaggaagaagcccttctctgtgaagcagaagaagaagcagctgcaggacaagcgggagaggaagaggggcctgcaggacggcctgcggagcagcagcaacagccgcagcggcagccgggagcggcgggaggagcagacagacaccagtgatggagagagcgtgacccaccacatccggcggctgaaccagcagcccagccagggcctgggcccccggggctatgaccccaaccgctaccgcctgcactttgagcgggacagccgggaggaggtggagaggaggaagagagctgcccgggagcaggtgctgcagcctgtgtctgctgagctgctggagctggacatccgggaggtgtaccagcccggctctgtgctggacttccccaggaggcctccctggagctatgagatgagcaaggagcagctgatgagccaggaggagaggagcttccaggactacctgggcaagatccacggggcctacagcagcgagaagctgagctactttgagcacaacctggagacctggaggcagctgtggagggtgctggagatgtctgacatcgtgctgctgatcacagacatccgccaccctgtggtgaacttccccccagccctgtatgaatatgtgactggagagctgggcctggccctggtgctggtgctgaacaaggtggacctggcccccccagccctggtggtggcctggaagcactacttccaccagcactacccccagctgcacgtggtgctcttcaccagcttcccccgggaccccaggaccccccaggaccccagctctgtgctgaagaagagcagaagaagaggccggggctggacccgggccctgggccctgagcagctgctgcgggcctgtgaggccatcaccgtgggcaaggtggacctgagctcctggagggagaagatcgccagagatgtggccggggccacctggggcaatggcagcggggaggaggaggaggaggaggatggccctgctgtgctggtggagcagcagacagacagcgccatggagcccaccggccccacccaggagcgctacaaggatggagtggtgaccatcggctgtgtgggcttccccaacgtgggcaagagcagcctcatcaatggcctggtgggcaggaaggtggtgtctgtgtccaggaccccaggccacacccgctacttccagacctacttcctgacccccagcgtgaagctgtgtgactgccccggcctcatcttccccagcctgctgccccggcagctgcaggtgctggccggcatctaccccatcgcccagatccaggagccctacacagctgtgggctacctggccagccgcatccctgtgcaggccctgctgcacctgcggcaccctgaggccgaggaccccagcgctgagcacccctggtgtgcctgggacatctgtgaggcctgggccgagaagaggggctacaagacagccaaggccgccagaaatgatgtgtacagagctgccaacagcctgctgcggctggccgtggatggccgcctgagcctgtgcttccaccccccaggctacagcgagcagaagggcacctgggagagccaccctgagaccacagagctggtggtgctgcagggccgggtgggccctgctggagatgaggaggaggaggaggaggaggagctgagcagcagctgtgaggaggagggggaggaggacagagatgctgatgaggagggggagggagatgaggagacccccaccagcgcccctggcagcagcctggccggcaggaacccctatgccctgctgggggaggatgagtgctag

SEQ ID NO: 154521 - DNA, 1224 bp, Artificial Sequence
  derived and/or modified sequence
gtggtgaacttccccccagccctgtatgaatatgtgactggagagctgggcctggccctggtgctggtgctgaacaaggtggacctggcccccccagccctggtggtggcctggaagcactacttccaccagcactacccccagctgcacgtggtgctcttcaccagcttcccccgggaccccaggaccccccaggaccccagctctgtgctgaagaagagcagaagaagaggccggggctggacccgggccctgggccctgagcagctgctgcgggcctgtgaggccatcaccgtgggcaaggtggacctgagctcctggagggagaagatcgccagagatgtggccggggccacctggggcaatggcagcggggaggaggaggaggaggaggatggccctgctgtgctggtggagcagcagacagacagcgccatggagcccaccggccccacccaggagcgctacaaggatggagtggtgaccatcggctgtgtgggcttccccaacgtgggcaagagcagcctcatcaatggcctggtgggcaggaaggtggtgtctgtgtccaggaccccaggccacacccgctacttccagacctacttcctgacccccagcgtgaagctgtgtgactgccccggcctcatcttccccagcctgctgccccggcagctgcaggtgctggccggcatctaccccatcgcccagatccaggagccctacacagctgtgggctacctggccagccgcatccctgtgcaggccctgctgcacctgcggcaccctgaggccgaggaccccagcgctgagcacccctggtgtgcctgggacatctgtgaggcctgggccgagaagaggggctacaagacagccaaggccgccagaaatgatgtgtacagagctgccaacagcctgctgcggctggccgtggatggccgcctgagcctgtgcttccaccccccaggctacagcgagcagaagggcacctgggagagccaccctgagaccacagagctggtggtgctgcagggccgggtgggccctgctggagatgaggaggaggaggaggaggaggagctgagcagcagctgtgaggaggagggggaggaggacagagatgctgatgaggagggggagggagatgaggagacccccaccagcgcccctggcagcagcctggccggcaggaacccctatgccctgctgggggaggatgagtgctag

SEQ ID NO: 154522 - DNA, 795 bp, Artificial Sequence
  derived and/or modified sequence
atgggagagcgggtgctgtggcccctgcgggccggccagcactggaggcaccggcccctgcctgctggcctgcaggacggcctgcggagcagcagcaacagccgcagcggcagccgggagcggcgggaggagcagacagacaccagtgatggagagagcgtgacccaccacatccggcggctgaaccagcagcccagccagggcctgggcccccggggctatgaccccaaccgctaccgcctgcactttgagcgggacagccgggaggaggtggagaggaggaagagagctgcccgggagcaggtgctgcagcctgtgtctgctgagctgctggagctggacatccgggaggtgtaccagcccggctctgtgctggacttccccaggaggcctccctggagctatgagatgagcaaggagcagctgatgagccaggaggagaggagcttccaggactacctgggcaagatccacggggcctacagcagcgagaagctgagctactttgagcacaacctggagacctggaggcagctgtggagggtgctggagatgtctgacatcgtgctgctgatcacagacatccgccaccctgtggtgaacttccccccagccctgtatgaatatgtgactggagagctgggcctggccctggtgctggtgctgaacaaggtggacctggcccccccagccctggtggtggcctggaagcactacttccaccagcactacccccagctgcacgtggtgctcttcaccagcttcccccgggaccccaggaccccccaggactag

SEQ ID NO: 154523 - DNA, 1290 bp, Artificial Sequence
  derived and/or modified sequence
atggaggccgctgtggtgctggagatgtctgacatcgtgctgctgatcacagacatccgccaccctgtggtgaacttccccccagccctgtatgaatatgtgactggagagctgggcctggccctggtgctggtgctgaacaaggtggacctggcccccccagccctggtggtggcctggaagcactacttccaccagcactacccccagctgcacgtggtgctcttcaccagcttcccccgggaccccaggaccccccaggaccccagctctgtgctgaagaagagcagaagaagaggccggggctggacccgggccctgggccctgagcagctgctgcgggcctgtgaggccatcaccgtgggcaaggtggacctgagctcctggagggagaagatcgccagagatgtggccggggccacctggggcaatggcagcggggaggaggaggaggaggaggatggccctgctgtgctggtggagcagcagacagacagcgccatggagcccaccggccccacccaggagcgctacaaggatggagtggtgaccatcggctgtgtgggcttccccaacgtgggcaagagcagcctcatcaatggcctggtgggcaggaaggtggtgtctgtgtccaggaccccaggccacacccgctacttccagacctacttcctgacccccagcgtgaagctgtgtgactgccccggcctcatcttccccagcctgctgccccggcagctgcaggtgctggccggcatctaccccatcgcccagatccaggagccctacacagctgtgggctacctggccagccgcatccctgtgcaggccctgctgcacctgcggcaccctgaggccgaggaccccagcgctgagcacccctggtgtgcctgggacatctgtgaggcctgggccgagaagaggggctacaagacagccaaggccgccagaaatgatgtgtacagagctgccaacagcctgctgcggctggccgtggatggccgcctgagcctgtgcttccaccccccaggctacagcgagcagaagggcacctgggagagccaccctgagaccacagagctggtggtgctgcagggccgggtgggccctgctggagatgaggaggaggaggaggaggaggagctgagcagcagctgtgaggaggagggggaggaggacagagatgctgatgaggagggggagggagatgaggagacccccaccagcgcccctggcagcagcctggccggcaggaacccctatgccctgctgggggaggatgagtgctag

SEQ ID NO: 154524 - DNA, 1215 bp, Artificial Sequence
  derived and/or modified sequence
atgagcaaggagcagctgatgagccaggaggagaggagcttccaggactacctgggcaagatccacggggcctacagcagcgagaagctgagctactttgagcacaacctggagacctggaggcagctgtggagggtgctggagatgtctgacatcgtgctgctgatcacagacatccgccaccctgtggtgaacttccccccagccctgtatgaatatgtgactggagagctgggcctggccctggtgctggtgctgaacaaggtggacctggcccccccagccctggtggtggcctggaagcactacttccaccagcactacccccagctgcacgtggtgctcttcaccagcttcccccgggaccccaggaccccccaggaccccagctctgtgctgaagaagagcagaagaagaggccggggctggacccgggccctgggccctgagcagctgctgcgggcctgtgaggccatcaccgtgggcaagggcttccccaacgtgggcaagagcagcctcatcaatggcctggtgggcaggaaggtggtgtctgtgtccaggaccccaggccacacccgctacttccagacctacttcctgaccccatctgtgaagctgtgtgactgccccggcctcatcttccccagcctgctgccccggcagctgcaggtgctggccggcatctaccccatcgcccagatccaggagccctacacagctgtgggctacctggccagccgcatccctgtgcaggccctgctgcacctgcggcaccctgaggccgaggaccccagcgctgagcacccctggtgtgcctgggacatctgtgaggcctgggccgagaagaggggctacaagacagccaaggccgccagaaatgatgtgtaccgggccgccaacagcctgctgcggctggccgtggatggccgcctgagcctgtgcttccaccccccaggctacagcgagcagaagggcacctgggagagccaccctgagaccacagagctggtggtgctgcagggccgggtgggccctgctggagatgaggaggaggaggaggaggaggagctgagcagcagctgtgaggaggagggggaggaggacagagatgctgatgaggagggggagggagatgaggagacccccaccagcgcccctggcagcagcctggccggcaggaacccctatgccctgctgggagaagatgaatgttag

SEQ ID NO: 154525 - DNA, 201 bp, Artificial Sequence
  derived and/or modified sequence
gtggtgaacttccccccagccctgtatgaatatgtgactggagagctgggcctggccctggtgctggtgctgaacaaggtggacctggcccccccagccctggtggtggcctggaagcactacttccaccagcactacccccagctgcacgtggtgctcttcaccagcttcccccgggaccccaggaccccccaggactag

SEQ ID NO: 154526 - DNA, 789 bp, Artificial Sequence
  derived and/or modified sequence
atggagcccaccggccccacccaggagcgctacaaggatggagtggtgaccatcggctgtgtgggcttccccaacgtgggcaagagcagcctcatcaatggcctggtgggcaggaaggtggtgtctgtgtccaggaccccaggccacacccgctacttccagacctacttcctgaccccatctgtgaagctgtgtgactgccccggcctcatcttccccagcctgctgccccggcagctgcaggtgctggccggcatctaccccatcgcccagatccaggagccctacacagctgtgggctacctggccagccgcatccctgtgcaggccctgctgcacctgcggcaccctgaggccgaggaccccagcgctgagcacccctggtgtgcctgggacatctgtgaggcctgggccgagaagaggggctacaagacagccaaggccgccagaaatgatgtgtaccgggccgccaacagcctgctgcggctggccgtggatggccgcctgagcctgtgcttccaccccccaggctacagcgagcagaagggcacctgggagagccaccctgagaccacagagctggtggtgctgcagggccgggtgggccctgctggagatgaggaggaggaggaggaggaggagctgagcagcagctgtgaggaggagggggaggaggacagagatgctgatgaggagggggagggagatgaggagacccccaccagcgcccctggcagcagcctggccggcaggaacccctatgccctgctgggagaagatgaatgttag

SEQ ID NO: 154527 - DNA, 1824 bp, Artificial Sequence
  derived and/or modified sequence
atgccccggaagaagcccttcagcgtgaagcagaagaagaagcagctgcaagacaagcgtgaaaggaaaagagggctccaagatgggctgaggagctcttccaatagcagatcaggcagccgggaaaggcgggaagagcagacagacaccagtgatggagagtccgttacccaccacatccgccggctgaaccaacagccatcacaggggctcgggccgcgcgggtacgatcccaatcgatatagattgcacttcgagcgcgactcacgggaggaggtcgagcggcggaaaagagctgccagagagcaggtgttacagccagtcagcgccgaactcttggagctcgatataagggaagtctaccagccgggttcagttctcgatttcccccgtcgcccgccttggtcctatgagatgtccaaagagcagctcatgtcccaggaggagagaagtttccaggattacctaggcaagatccatggcgcctattcatcggagaaattatcctatttcgaacacaacctggaaacatggaggcagctctggcgcgtgttagaaatgagtgatatcgtcctgctcatcactgatatccgtcacccagtggtcaactttccgcctgctctctacgagtacgtgaccggcgagctggggctggcactagttctcgttctcaataaagttgatctggcgccccctgccctcgtggtcgcgtggaaacactattttcaccagcactatccccagctgcatgtagtcctattcacttcctttcctagagatccaagaacaccccaggacccatcctctgttctgaaaaagtcccgccggaggggcaggggatggaccagagcactcgggccggaacagctgctgagggcgtgcgaagccattaccgtcgggaaggttgacttatcctcctggagggagaagatagcgcgggacgttgctggggccacatggggcaacgggagtggggaagaagaggaggaggaagacgggccagctgtgctggtggagcaacaaacggattcagctatggaacccacagggccgactcaggagaggtataaggacggggtggttacgattggatgcgtcgggtttcctaacgtgggcaagtctagcctgataaatggcctcgtgggtaggaaggtggtgtcagtttctagaacacctggccatacaaggtattttcagacgtactttctgactcctagcgttaaactctgtgattgtccagggctgatatttccctcattgcttccacgccagctgcaggtcctggcggggatctacccaattgcgcagattcaagagccatacaccgcagtggggtatctcgcgtcaaggattcccgtgcaagccctgctgcacctgcggcatcccgaagctgaagacccctcggctgaacatccttggtgcgcatgggacatctgtgaggcgtgggccgagaagagaggatacaaaacggccaaggccgccagaaacgatgtttaccgggccgctaatagtctgttgagacttgcagttgatggccgactgagcctgtgctttcatccccctggctactccgaacagaaaggcacctgggagagtcaccccgagaccacagagctggtggtgctccagggcagagtgggcccagccggtgacgaagaggaggaggaagaagaggagttgtccagttcctgcgaggaggagggcgaggaggatcgcgacgccgacgaggagggcgaaggtgacgaggagacccccaccagtgcccctgggtcctctctcgctggacggaacccatacgctctacttggtgaggacgagtgctag

SEQ ID NO: 154528 - DNA, 1224 bp, Artificial Sequence
  derived and/or modified sequence
gtggtgaacttcccccccgccctgtacgagtacgtgaccggcgagttgggtctggcccttgtcctagttcttaacaaggtggacttagcaccgcccgctctcgttgttgcctggaaacactattttcatcaacattaccctcaactgcatgtggtcctcttcaccagttttcctcgcgaccccagaactcctcaggatccaagctcggttctgaaaaaatcaagaaggcggggccgcggctggacgagggccctgggaccagaacagcttctcagggcgtgcgaggctatcaccgtggggaaggtcgatctaagctcatggagggaaaaaattgcgcgcgatgttgctggagcaacctggggaaatggtagtggagaggaagaggaggaggaggacggtcccgctgtactcgtagaacagcagacagattccgccatggagcctaccggcccgacccaggaacgttacaaggatggcgttgtgaccattggctgcgtgggcttccctaatgtgggtaagtcctccctaatcaacggcctggtggggcggaaggtcgtctcagtttcccgcacacctggccacacgcgatactttcaaacttacttcctgactccttctgtaaaactttgtgattgtcccggtttgatcttcccttccctgttacctagacaactacaggtgcttgcagggatctaccccatcgcccaaattcaggaaccctatactgctgtcggctatcttgcctcccggatccctgtgcaggccctgctgcacctgcgtcaccctgaggctgaggatccaagtgcagagcacccctggtgtgcctgggacatatgtgaggcatgggccgagaaacggggatacaaaactgcgaaagccgccaggaatgacgtgtaccgcgcggccaattcccttttacgcctggctgtggacggacgtctgagcctttgtttccaccctccaggttactccgagcaaaaaggcacctgggagagccaccctgagacaaccgagcttgtggtcctacagggcagggttggacccgctggggatgaggaggaagaggaggaggaggaattgtcatcttcttgcgaagaggaaggtgaggaagatcgcgatgccgatgaggagggcgaaggggatgaggagacaccaacatctgctcctggttccagcttggcgggccggaatccttacgctctcctaggggaagacgaatgttag

SEQ ID NO: 154529 - DNA, 1824 bp, Artificial Sequence
  derived and/or modified sequence
atgccccggaagaagcccttcagcgtgaagcagaagaagaagcagctgcaagataaaagggagcggaagcgcggcttacaggacgggctgagatcatctagcaattcccggtcgggcagtagggagaggcgggaggagcagactgacacgtcggacggcgaatcggtaactcaccacatccgccggctaaaccaacagccatcccaaggacttggacctagggggtacgatcccaaccggtaccgattgcacttcgagagagattctagagaggaagtggagagacggaagcgggcagccagggagcaggtgctacagcctgtgtctgctgaactgttggaacttgacatacgcgaggtctaccagcctgggtcagtcctggacttcccaaggcgcccgccctggtcttacgaaatgtccaaagagcaactgatgagtcaagaggagcgatcctttcaggactacctaggaaaaatccacggagcatattcttctgaaaagctgagctacttcgagcacaacctcgagacatggcgtcaactgtggagggtcctcgaaatgagcgatatcgttctgctcatcacagatatccgacaccctgtggtgaacttccctcctgctctctacgaatacgtaactggcgaactaggactagcgcttgtgctggtcctgaataaagtggacctagcgccacccgccctggttgtggcctggaaacactacttccatcagcactatccgcagctgcatgtcgtgctgttcacttccttccccagggacccacggactccccaagatccaagtagtgttctgaaaaagagccgccggaggggtaggggatggacacgcgccctgggccctgagcagttgttacgggcttgtgaagcaatcacggtcggtaaggtcgatctgagcagctggcgggaaaagatcgcaagagatgtggctggggctacttggggaaacggatccggcgaggaggaagaagaggaggatgggccagccgtgctggtcgagcaacagaccgactcggcaatggagcccactggaccaacccaagagcgctacaaagacggggtcgtgacgatcggatgcgtggggttccctaatgtgggcaaatctagtttgattaacggcctggttggtagaaaggtagtatccgttagtcgcacccccgggcacactcgctattttcagacgtactttctcacacctagtgttaagctgtgcgactgtccggggttgatttttccttcattgctcccgaggcagctccaggtgctcgctggaatataccctattgcacaaattcaggaaccatacacggcagtggggtatctggcctcgagaatccccgtccaagctctgctgcacttaaggcatcccgaggctgaggatccttctgctgaacacccatggtgtgcctgggatatctgcgaggcatgggccgagaaaaggggctacaaaaccgccaaagcagccaggaacgacgtctatagggccgctaacagtctgctacgattagccgtagacggtcggctgtcgttgtgctttcaccccccagggtatagcgaacagaagggcacctgggagagtcatcctgagaccacggaacttgtcgtccttcaaggaagggtgggtcctgccggcgacgaggaagaagaagaggaagaagaactctcctcctcgtgcgaagaagagggcgaggaagatcgggatgccgacgaggagggcgaaggcgatgaggagacacctacctccgcacccggcagttctctagctggccgcaatccatatgcactcctcggagaggacgagtgctag

SEQ ID NO: 154530 - DNA, 795 bp, Artificial Sequence
  derived and/or modified sequence
atgggcgagcgggtgctgtggcccctgcgggccggccagcactggcgacaccgcccacttcctgctggacttcaggacggactccgcagttccagcaatagcaggtccggatcccgagagagaagggaggagcagaccgatacaagtgatggggagtccgtcacccaccatatccggcgactgaatcagcagccatcacaagggctcggccctcgtgggtatgacccaaaccggtataggcttcacttcgaacgggacagccgcgaggaagtggaaaggcggaagcgcgctgcaagagagcaggtcctccaacccgtttctgcagaactgctggaactcgacattagagaagtgtaccagcctggtagcgtgctcgacttccctcgacgacccccttggagctacgagatgtcaaaggaacagctgatgagtcaggaagagcgctccttccaagattatcttggcaagattcacggagcctattcttcagaaaaactgtcatattttgaacacaacttggagacatggcggcagctctggcgagtgctcgaaatgtcagatattgtgctgctcattaccgacatcaggcacccagtcgtaaactttccacctgccctgtacgaatacgtgaccggcgaactcggactggccctggtgctggtccttaacaaagtcgatctggcgcctccagctttggttgttgcttggaagcattacttccaccagcactacccacagctccacgttgtactctttacaagcttccccagggatccgagaacgccgcaggattag

SEQ ID NO: 154531 - DNA, 1824 bp, Artificial Sequence
  derived and/or modified sequence
atgccccggaagaagcccttcagcgtgaagcagaagaagaagcagctgcaagacaagagggagcgcaagcgagggctccaggacggacttcgttcttcttccaactcccggtccggcagccgcgagaggcgggaggaacaaactgatactagtgatggtgaatcagtaactcatcacattagaaggctgaaccagcaaccttcacagggcctggggccacggggttatgacccaaatcgctatcgtctgcacttcgaaagggactctagggaagaagttgagagaaggaaacgggcagctagggagcaggttctccagcccgtgtccgcagaactgctcgagttggacataagagaggtctaccagcctggctcggtgttagacttcccgaggcggcctccgtggagctacgagatgagcaaggagcagctgatgtcccaggaagaaaggtccttccaggactacttaggtaagattcacggcgcctatagctcagagaagctaagctacttcgagcacaatctggagacctggaggcaactttggagggtcctggaaatgtcagatattgttttgctgataacagatatccgccacccggtggtgaactttcctccagccctgtatgagtacgtaaccggggagcttggactcgctttggtcctcgtcctgaacaaagtggatttagcccctcctgcgcttgttgtggcctggaagcactacttccaccagcattatccacagctgcacgtcgtgctgttcacctcctttcctcgggatcctcggacccctcaggatccctcctcagttctgaagaagtctcgccgacgaggccgcgggtggactcgggccttgggcccggagcagctgttacgcgcgtgtgaggctataactgtgggaaaggtcgatctgtcatcttggcgagagaagatcgccagggatgtggcgggcgccacttggggaaatggaagcggcgaagaagaggaggaggaggacgggccagccgtgttggtggagcaacagactgatagtgcaatggaaccaacagggccaacccaggaaagatacaaagatggcgtggtaaccataggatgtgtcggatttcctaatgttggcaaaagcagtctgatcaacgggctcgtggggcgcaaggtcgtgagcgttagccggactcccggacatacaaggtactttcagacctactttctgaccccctccgtgaaactgtgcgattgccccggcctaatatttccctccctcctgcctcgccagttacaagttctggctggcatttatccaatcgcacagattcaggaaccctatacggccgttggctacctggccagccgaattccggtgcaggccctacttcaccttagacaccccgaagcggaggacccctcggccgagcatccctggtgcgcgtgggacatctgcgaagcgtgggccgaaaagaggggatataagacggcgaaggctgcaaggaacgatgtgtatcgtgcggccaatagcttgttaagactggcagttgacgggaggctctctctctgttttcaccccccgggatactcagagcagaagggcacctgggagagtcaccctgagacgactgaactggtggtcctgcagggcagggtgggtccagccggagacgaggaagaagaggaggaggaagagctgtccagctcctgcgaagaagagggtgaggaggaccgtgacgctgacgaagagggcgaaggcgacgaggaaacacctacttccgctccaggttcctccctcgccgggcgcaacccatatgctctcctgggtgaagacgagtgttag

SEQ ID NO: 154532 - DNA, 1290 bp, Artificial Sequence
  derived and/or modified sequence
atggaggccgccgtggtgctggagatgagcgacatcgtgctgctgatcacagatattcggcatcccgtggttaattttcccccagcattatacgagtacgttactggcgaacttggattagccctggtattggtgctgaataaagtggatctggcccctccagccctggtcgtagcctggaagcactactttcatcagcattacccacaacttcacgtagtgctgttcacatctttcccaagagatcctcggacgccacaggatccttctagtgtgcttaaaaaatctaggaggcgggggagaggatggactcgcgcgcttggtcccgagcagttgctcagggcttgcgaagctattacagtgggaaaagttgaccttagttcttggcgagaaaaaatcgcaagggacgtagccggggctacctggggaaacggatccggcgaagaggaggaagaagaagacggcccagcagtactggtcgagcagcagacagactccgccatggagccaacaggaccaacccaagagaggtacaaggatggtgtcgtgactatagggtgtgttggcttcccaaatgtcgggaaaagcagcctcatcaacgggttggtgggcagaaaggttgtatccgtgagccgcacacctggacacactcgttacttccagacatatttcctaacaccctcggtcaagttgtgcgattgccctggacttatctttccttcactgttgcctagacagcttcaggtgctcgctggaatttatccgattgcccagattcaagaaccctataccgccgtgggctacctcgccagccgcatccctgtccaggccctgctccatctgcgccacccggaagctgaggacccttccgctgagcacccttggtgcgcatgggacatttgcgaagcttgggctgaaaagcgcgggtataagaccgccaaggctgccaggaacgacgtctaccgcgcggctaacagtttgttaaggctggccgtagacggccgcctctctctctgctttcaccctcctgggtactcagagcagaagggaacctgggaaagtcatcccgagacgactgagttggtggtgctccaggggagggtggggcctgccggcgacgaagaagaggaggaggaggaagagctctcaagctcttgtgaagaggaaggcgaagaagatagggatgctgacgaagagggagaaggcgacgaagaaacccctacctcagcccctgggtcctctctggccggccgaaacccgtacgccctcctgggcgaggatgagtgctag

SEQ ID NO: 154533 - DNA, 1824 bp, Artificial Sequence
  derived and/or modified sequence
atgccccggaagaagcccttcagcgtgaagcagaagaagaagcagctgcaggacaagagggagcgaaagcggggattgcaggatggactcaggagctctagtaactcacgctccgggagtcgagagaggagagaagagcagactgatacaagtgacggggagagcgtgactcaccatatccggagactcaatcaacagcctagtcagggactcggcccccgggggtacgacccaaacaggtatagactccactttgaacgcgattctcgagaggaggtggaacgcaggaagagagccgcgcgcgaacaagtgctacagcccgtgtccgccgagctgctcgaactagatattcgggaagtttaccagcccggctcagtactggacttcccaagaaggcctccctggtcttacgagatgtctaaggagcagctgatgagccaagaggagcggtccttccaagattatctcggcaagatccatggcgcttattcatcagaaaagctaagctacttcgaacataacttggagacatggcgccaattatggcgagtgctggaaatgagtgacatcgtgctcttaatcaccgacattaggcatccggtcgttaacttcccgcctgctctttatgaatacgttacaggcgagttgggcctggctctcgttctggtgttgaacaaagttgatcttgcaccccccgccctagtagtcgcatggaaacactactttcaccaacactaccctcagctgcacgtggtcctgttcacctctttccccagagatcccaggacgcctcaggatccctcatctgtcctgaaaaaatcgagacggagaggtcggggttggacaagggcactggggcccgagcaactgctccgggcgtgtgaagccatcaccgtgggaaaggtggatctgtcaagctggagagagaagatcgcccgagatgtggcaggtgccacttgggggaacgggagtggtgaggaggaggaggaggaggacgggccagcggtgctggtagaacagcaaactgactccgcaatggagccaactggccctacccaggagcggtataaggatggcgtggttactatcggatgcgtggggtttccaaacgtgggaaagtccagcttgattaacggcctggttggtcgcaaagtcgtcagcgtgtccaggacccctggacacacacgctactttcagacatatttcttaactccatctgtcaaattgtgcgactgtcccgggcttatctttccgtccctgctccctaggcagttgcaggtgctcgcaggcatttacccaatcgcccagattcaggaaccgtatactgccgtcgggtatctcgcctcaaggattcctgtccaggcactcctgcatctacggcatccagaggccgaggaccccagcgctgaacacccctggtgcgcttgggacatatgtgaagcgtgggccgagaaacgaggatacaagaccgcaaaagccgcacgcaacgacgtgtacagggccgccaactctctactccgactggccgtcgacggacgcttatctttatgtttccatcccccaggttactccgaacagaaggggacatgggagtcccaccctgaaacgaccgagctcgtggtccttcaagggagagtgggccccgctggtgacgaagaggaggaagaggaagaagagctgtcatcgagctgcgaagaagagggtgaagaagacagggacgcagacgaagaaggcgagggcgacgaagaaacacccacatccgcgccaggatcatccttagccggccgtaacccctatgctctgctgggagaggatgagtgttag

SEQ ID NO: 154534 - DNA, 1215 bp, Artificial Sequence
  derived and/or modified sequence
atgagcaaggagcagctgatgagccaggaggagcggagcttccaggattacctgggaaagatccatggagcgtactcatcagagaagctttcctatttcgaacataacctggagacatggcgacagttatggagggtgctggagatgtctgacatcgtgctgttaataaccgatatccggcaccctgtcgtgaattttccccctgccttgtacgaatatgtgaccggcgagctcgggctggccttagtgctcgtgttgaataaagtagatttagctccacccgccttggttgtcgcatggaagcattacttccatcagcactacccccagttacatgttgtcctctttacaagctttcccagggaccccagaacaccacaggaccccagtagcgtgctgaagaaatcaaggcgccgcggccgcggatggaccagagccctgggccccgaacaattgcttagagcctgtgaggcaatcactgtcgggaaggggtttcctaacgtgggtaagagtagcctcattaatggactcgttggcaggaaggtcgtgtctgtatcccgtacccctggccacactcgctactttcagacttacttcctgacgccctcagtaaagttgtgtgattgtcccggtctgatcttccctagcttgttgcccaggcagctgcaggtgctcgcaggtatctatccaatcgcacagatccaggaaccatatactgctgtggggtacctggctagccggatccccgtgcaggcattattacacttgaggcatcccgaagccgaagacccgagcgccgagcacccttggtgtgcatgggacatttgcgaggcctgggccgagaagcgggggtataaaacagctaaagccgcgaggaacgatgtctaccgcgctgctaacagccttctcagactggccgtcgacggtcgcctttccctgtgcttccaccctccaggctactctgagcaaaaaggaacgtgggaatctcacccggagacaaccgaacttgtggtccttcagggacgggtgggcccagccggagatgaggaggaggaggaggaggaagagttatcaagctcatgtgaagaagagggcgaggaagaccgggacgctgatgaggagggagaaggcgacgaagaaacgccaacttctgcgcccggaagctccctggccggtcggaatccttacgcactcttgggagaggatgagtgttag

SEQ ID NO: 154535 - DNA, 795 bp, Artificial Sequence
  derived and/or modified sequence
atgggcgagcgggtgctgtggcccctgcgggccggccagcactggcgccacagaccgctccctgcaggactgcaggatggactgagatcaagcagcaattctagatccggctcccgcgaacgtagggaggaacagactgatacatcagacggagagtccgtgactcaccacatacgcagactgaaccaacagcctagtcagggattaggaccaagagggtacgaccctaaccgctatagactgcacttcgaacgagatagcagggaagaggtcgagcgacgaaaacgggcagccagagaacaggtgttgcaaccggtgtctgccgagctgttggaattggacattcgcgaagtctaccaacccgggagcgtgctggatttcccaagacgtccaccctggagctacgaaatgagcaaagagcagctgatgtcccaggaggagcgcagcttccaagactacttggggaagattcacggcgcttacagcagcgagaagctttcctacttcgaacacaatctggagacatggagacagctgtggagggtgttggaaatgagcgatattgtgctcctgataaccgatatacgtcaccccgtggtgaatttcccacctgcattgtatgagtatgtcaccggggagctgggccttgccttggtcctcgtgctgaacaaggtggatttagccccacctgccctggtggttgcttggaagcactacttccaccagcactacccacagctgcacgttgtgctctttacctcttttccacgggatcctcggacaccgcaggactag

SEQ ID NO: 154536 - DNA, 795 bp, Artificial Sequence
  derived and/or modified sequence
atgggcgagcgggtgctgtggcccctgcgggccggccagcactggcgtcacagacccttaccagcaggccttcaggatggactgcgcagctcctcaaacagccgctccggatccagggaacggcgtgaggaacagacagatacttccgatggcgagtcagtgactcaccacattagacgcctcaatcagcagccatctcagggacttggtcccaggggatacgacccgaaccgatatagactgcacttcgagcgggactctagagaagaggtggagcgtagaaagagggccgctagagagcaggtgcttcagcccgtctctgctgagttgttggaacttgatataagggaggtctaccaaccaggaagcgtgctcgatttccctcgcagacccccttggtcctacgaaatgagcaaggaacagttaatgtcgcaagaagaacggtctttccaggactatctgggaaaaatacatggcgcctattcatccgaaaagctttcctattttgagcacaatctcgaaacgtggaggcagttatggcgagttctggaaatgtccgacatcgtgctactgatcaccgacataagacatccggtcgtcaattttcctcctgcattgtacgaatatgtgacgggtgaactgggtttggccctggtactcgtgctgaataaggtcgacttggcaccaccagctcttgtggtcgcttggaaacactacttccatcagcattacccgcagctgcacgtcgtgctgttcacgtcatttcccagggaccctcgcaccccccaggactag

SEQ ID NO: 154537 - DNA, 795 bp, Artificial Sequence
  derived and/or modified sequence
atgggcgagcgggtgctgtggcccctgcgggccggccagcactggcggcaccgtcccctccccgcgggcttacaggatgggttacggagctcatcaaattctagaagtgggagcagagagcgccgggaagagcagactgacactagtgatggagagtccgtcactcaccacataagacggctgaatcagcaacccagccagggactgggacctagagggtacgacccaaatcggtatcgcttgcacttcgaacgagacagcagagaagaggtggaaagacgaaaacgtgccgctagagaacaagtgctgcagcctgtcagtgccgaactgctcgagctcgatatccgcgaagtctaccagcccggtagcgtgcttgattttccacgccgcccaccctggagctacgaaatgtccaaggaacagctgatgagccaggaagaacggtcgttccaggattacttgggcaagattcacggcgcctatagctccgaaaagctgtcatatttcgaacataatttggagacttggagacagctttggcgagtgttagaaatgagcgacatcgtgctcctgatcacggatattcggcaccctgttgtgaatttccctccagcactttacgaatacgtgaccggcgaactgggcctggcgctggtgctcgtgcttaataaagtggacctggccccaccggccctggtggtagcctggaaacactattttcaccagcactatccacagctgcacgttgtacttttcacttccttcccaagagatccaaggaccccacaagattag

SEQ ID NO: 154538 - DNA, 1824 bp, Artificial Sequence
  derived and/or modified sequence
atgccccggaagaagcccttcagcgtgaagcagaagaagaagcagctgcaggataagagggagagaaaaaggggactgcaggacgggctgagatcctcatccaacagtcggagtgggtcgcgggagcggcgcgaggaacagaccgataccagtgatggtgaaagtgttacccaccacattcggagactgaaccaacaaccttcccagggcttagggcccagaggatacgaccccaatagatatcggctacactttgaacgagacagtcgggaagaagtagagaggcgtaaaagggcggctcgggagcaagtgttacaaccagtgagcgcagagctccttgagttagacatacgcgaagtctaccaacctgggtccgtcctggatttccctcgccgcccgccatggagctacgaaatgtctaaggagcaactaatgagtcaagaggagcggtcttttcaggactatctgggtaagatccatggagcttacagttctgagaagctctcttactttgagcacaatcttgaaacttggagacagctgtggagggttttggagatgagtgatatagtgttattaatcactgacataaggcaccccgtcgtgaactttcccccggccttatacgaatacgtcaccggggagctgggcttggcactggttctcgtgctgaataaggtggatttagccccgcccgcgctcgtggtggcctggaaacactacttccaccagcactaccctcagctgcacgttgtactctttacatcattcccacgggatccccgtacgccccaggatcctagtagcgttctgaaaaagagtaggaggagggggagagggtggacaagagccctggggcccgagcagctactgcgagcctgcgaggccataacggttggtaaggtggatctctcatcttggagggagaaaattgcaagagatgttgcgggagccacgtggggcaatggctccggcgaggaggaagaggaagaggacggacctgccgtgctggtggagcaacagaccgatagcgctatggaacctactggacctacacaggaacggtacaaggacggcgtggtgactattggttgtgtgggcttccctaatgtggggaagtccagtctcattaatggtctcgtcgggagaaaggtcgtcagcgtcagcagaactcccggtcacaccagatacttccagacatactttctaacaccctctgtaaaactgtgcgattgtcctggcttgatatttccgtctttgctacctcgccagcttcaggtgctggctggaatttatcctatcgctcagatccaggaaccttataccgcagtcggttaccttgcctcgcgtatccccgtacaagcactgctacaccttcgtcatcccgaagccgaggatcctagcgccgagcacccttggtgtgcttgggacatctgcgaggcttgggctgagaaaagggggtataagactgccaaagccgcccgcaatgatgtatatcgagcagctaactctcttctgcggctcgccgtagatggtcgcctgagcctgtgtttccacccgccaggctactcagagcaaaagggcacttgggagagccaccccgagactactgagctggtggtattgcaagggcgagtgggacccgccggggatgaagaagaagaagaggaggaggaactaagcagctcgtgtgaggaagaaggagaggaggaccgcgacgccgacgaagagggcgagggggacgaagagacgccaaccagtgcccctgggagtagtctcgcaggacgaaatccttacgccctgcttggcgaggacgaatgttag

SEQ ID NO: 154539 - DNA, 1824 bp, Artificial Sequence
  derived and/or modified sequence
atgccccggaagaagcccttcagcgtgaagcagaagaagaagcagctgcaggacaaacgcgagcgaaagagaggtctgcaggatggcctaagatccagctctaattctaggagtggatctcgggagcggagggaggaacagacagatacaagcgacggcgaatctgtgactcatcatatccgaagactgaaccagcagccctctcagggtctgggccccagagggtacgacccaaaccgctataggctccattttgaaagggattctagagaagaagttgaaagacggaaacgtgctgcccgtgaacaggtgttgcagccagtgagcgcggagctccttgaattagatataagggaagtctatcagccgggcagcgttctggacttcccacgacggccaccatggtcctatgaaatgagcaaagaacagttgatgtctcaggaggagcggagtttccaagactacttgggaaaaatccacggggcctattcctccgaaaagctttcatactttgagcataacctggaaacttggagacagctctggagggtgttggaaatgtctgatatcgtcctcttaattacagacattcggcaccccgtggtgaacttccccccagccctatatgagtatgtgacaggcgaactgggcctggctcttgtgctagtgttgaataaagtggacttagccccacctgctctggtcgttgcttggaaacactacttccatcagcactacccacagctgcatgtcgtcctgttcaccagcttcccgagagatcctcggacaccccaggacccatccagtgtgcttaaaaagagccgcagacgtggaagagggtggaccagggcacttgggccagaacagcttcttcgcgcctgcgaggcaatcaccgtcggcaaggtggatctgtcctcctggagagagaagatagctcgggatgtggccggggcaacctggggcaacggtagcggagaggaggaagaagaggaggacggacccgccgtccttgtggaacagcagaccgattccgctatggagcctactggtccgacacaggagagatataaggacggtgtcgtgactatcgggtgtgtggggtttccaaatgtcggcaagagttccctgatcaatggcctggtgggtcgcaaggtagtatccgtctctcggacacctggacacactaggtacttccagacctactttctcaccccttccgttaaactgtgtgattgtcctggactcatcttcccatccctgctgccgagacagttgcaggtcctcgcgggtatttatccaatagctcagatccaagagccttacacggcagtaggctacttggcgtccagaatcccggtgcaagctcttctacatcttcggcatccagaagccgaagacccctcagctgagcatccctggtgcgcatgggatatttgcgaagcttgggcagagaaacgagggtacaagacagccaaagccgctagaaatgatgtctaccgagccgctaattcactgctgaggctcgctgttgacgggcgcttgagcctgtgttttcatccaccaggttactccgagcagaagggcacctgggaatcccatcctgaaactactgagctggtggtcctccagggacgggttggcccagccggcgacgaggaagaggaggaagaagaggaactgagtagcagctgtgaagaagaaggcgaggaggaccgtgatgccgatgaggaaggggagggcgacgaggagacccctacttcagcccctggctctagcttagcgggccgtaatccatatgctctgctgggagaagatgagtgctag

SEQ ID NO: 154540 - DNA, 795 bp, Artificial Sequence
  derived and/or modified sequence
atgggcgagcgggtgctgtggcccctgcgggccggccagcactggcgacaccgaccattacccgctggcttgcaagacggactccggtctagctccaattcccgcagcgggtcgcgagaaaggcgcgaggaacagactgatacttccgacggcgaaagcgttacacaccatatcagacggctgaaccaacagccctcgcagggtctaggtccccggggttacgaccctaaccgctaccgcctgcacttcgaacgagattctcgagaggaggtcgagcggcgcaagcgtgccgctagagagcaggtactccagcccgtcagtgcagagttattggagctcgacatcagagaggtgtatcagcctggttctgtgctcgactttccgaggcgccccccctggtcctacgagatgtcaaaggaacagcttatgtcccaggaggagagatcatttcaagattatctcggcaaaattcatggagcctacagtagcgaaaagctgtcatacttcgagcataatttggagacctggcggcagctgtggcgggtgttagaaatgtctgatatagtcctgttaatcaccgatatcagacatccggtggtcaatttccctcctgccttgtacgagtatgtcactggcgagctgggcctcgcactcgtcctggtgcttaacaaagtggacttagcccctcctgccctcgtcgtggcctggaaacactactttcaccagcactacccccaattgcatgttgtcttgttcacaagcttcccccgcgacccaagaactccccaagactag

SEQ ID NO: 154541 - DNA, 795 bp, Artificial Sequence
  derived and/or modified sequence
atgggcgagcgggtgctgtggcccctgcgggccggccagcactggaggcatcggcccctacctgctggactccaggatgggttaaggtcatcatccaactccaggtcaggaagccgagagcggcgcgaggagcagactgatacttctgacggggaatcagtaacacatcatatccgaaggctgaatcagcaacctagccaaggcctggggcctagaggctatgatccgaatcgttacaggcttcatttcgagagagattccagggaagaggtagagagaagaaaaagagcagctcgcgaacaggtgctccagccagtctctgccgaactgctcgaactagatattagagaagtgtaccaaccgggatcggttcttgacttcccgcgcaggccaccatggtcttacgaaatgtcaaaagagcagctgatgagtcaggaggaaaggagctttcaggattacctgggtaagattcacggggcttattcatccgagaaactgagctattttgagcacaatctcgagacgtggaggcaactgtggcgcgtgctcgagatgtccgatatcgttctcttgattactgatattcgacatccggtagtaaattttccacctgctctctacgaatacgtgaccggggagctgggcctggccttggttctggtcctcaacaaagtcgatcttgcaccacctgcactcgtggtggcctggaagcattactttcatcagcactatccccagttgcatgtagtgctatttacatcctttcccagagatccaaggactccccaggactag

SEQ ID NO: 154542 - DNA, 1824 bp, Artificial Sequence
  derived and/or modified sequence
atgccccggaagaagcccttcagcgtgaagcagaagaagaagcagcttcaggataaaagggagcgcaagcgaggcctccaggacgggcttcggagttccagcaactcaaggtcaggctctcgcgagcgccgggaggagcagacagatacttccgatggagaatcagtaacgcatcatatccggagactgaaccaacagccctcgcagggcttaggacccaggggctatgatcccaataggtatcggttgcactttgagcgcgacagtcgagaggaggtcgaacgccgaaaacgggccgccagagagcaggtcctacagcctgtgagcgctgaactgctcgaacttgatatccgggaagtataccaacctggatcagttttggacttcccaaggagaccaccttggtcctatgaaatgagtaaggagcagctgatgtcccaagaagaacgcagctttcaggactatcttggcaaaattcatggagcctactcaagtgagaagctgagttacttcgaacacaatctggagacatggaggcagttgtggagagttctggaaatgagcgatattgtcctgctcattactgatatacgtcacccagttgttaatttcccaccagccttgtatgaatatgtaaccggagaactcgggctggccctcgtcttggtgctgaacaaagtggacctggctcctccggcgctagtcgtcgcatggaaacattacttccaccagcattacccacaactccacgtagtactcttcacaagcttcccgcgggaccccagaacaccacaggacccctcatctgtcctgaaaaagagccggcgccgcggtaggggctggaccagggctctaggccctgaacaattattgcgggcctgtgaagccatcacagtgggaaaagtggatctgtcctcctggcgggagaagatcgcccgcgacgttgccggcgcaacatgggggaacggatccggtgaggaggaagaagaggaagacgggccggccgtactcgtggagcagcagactgactctgctatggaaccaacaggccctactcaggaaagatacaaggacggagtcgtaactattggctgcgtcggtttccccaatgtcgggaagtcctcgctgataaatggactcgtaggccgtaaggtggtctccgtgagtagaacgcctggacatacccggtatttccaaacctactttcttacaccctccgtcaagctttgcgattgccccggactgatattcccctccctgctcccccgccaacttcaggtgctggcaggaatctaccctattgcacagatccaggagccgtacaccgccgttgggtacctcgcttctaggatcccagtccaagccctgcttcatctccgccatcccgaggccgaagacccaagcgctgaacacccttggtgcgcttgggacatttgcgaggcctgggctgaaaaacgcggctacaagacggcgaaggccgcgcgcaatgacgtgtatcgggcagccaattccctcctgcgcttggcagtcgatggtcgcctgagcctgtgctttcaccctcccggctacagcgaacaaaaaggaacttgggaatctcatccagagaccaccgaactggtggtcctgcaggggagagtcggcccagcaggggatgaggaggaggaagaagaagaggaactgtcttcatcttgcgaggaggagggcgaggaggatcgcgacgcagacgaggaaggcgagggcgatgaggagacacctactagcgctcccggcagttctttggccgggcggaatccctatgccctgcttggggaggacgaatgctag

SEQ ID NO: 154543 - DNA, 201 bp, Artificial Sequence
  derived and/or modified sequence
gtggtgaacttcccccccgccctgtacgagtacgtgaccggcgagctcggattggccctggtgctggtgctgaacaaggtggaccttgctcctccagcactggtcgtggcttggaagcattatttccaccagcactacccccagttgcacgtggtattgttcaccagttttccccgggaccccagaaccccccaggactag

SEQ ID NO: 154544 - DNA, 795 bp, Artificial Sequence
  derived and/or modified sequence
atgggcgagcgggtgctgtggcccctgcgggccggccagcactggcgccaccgacccttgccagccgggttgcaggatgggctgcggagctcttccaatagcaggagcggcagccgcgagcggcgagaggagcaaactgatacgagtgacggcgaaagtgtaacacaccatattcggcggttgaaccagcaaccgtctcaaggcctggggcccagaggctacgaccccaacaggtataggctccactttgaacgggactcccgggaggaggtggaacgacgtaaacgtgccgcccgcgaacaggtacttcagccggtctcagccgagctactagaactcgacatccgggaggtgtatcaacccggttccgttctggactttccccggcgaccgccttggagttacgaaatgagtaaagagcagctgatgtcccaagaagagagatcctttcaggactatctgggcaaaatacacggcgcatactcaagcgagaaactttcctactttgagcacaacctggaaacttggaggcagctttggagagtgctggagatgtcggatatagtcttattaatcactgatattaggcaccctgtcgtgaatttccccccggccctgtacgaatatgttacaggagaactgggtttggctctggttctggttctgaataaggtggacctggctccccctgcacttgtggtagcctggaagcactacttccatcagcattatcctcagctccatgtggtccttttcacatcctttccccgagacccgagaacaccccaggattag

SEQ ID NO: 154545 - DNA, 1215 bp, Artificial Sequence
  derived and/or modified sequence
atgagcaaggagcagctgatgagccaggaggagcggagcttccaggattatctggggaagatacacggtgcatactctagcgaaaagctgagttattttgagcataatctggagacctggcgtcaattgtggcgcgtcctggaaatgtcagatattgtcctgctcatcacagacatccggcatccagtggttaattttccgccggcactatatgaatacgtgactggcgaactgggcctcgcccttgttctagtgctcaataaagtcgatttggctccgcctgccctcgtagtcgcttggaaacattacttccaccagcattaccctcagcttcatgttgtgctttttacatcctttcctcgcgaccctcgcacccctcaagatccctcaagcgtcctgaagaagtcgcgcaggagaggcaggggctggactagagcattgggcccagaacaactcctccgggcctgcgaggctatcaccgtgggtaagggcttcccaaacgttggcaagtcaagccttatcaatggactggttgggcgtaaggtggtcagtgtctcccggacccctgggcacacccgatacttccagacctattttctgacgcctagtgttaaattatgcgattgccccggtctgatctttccatccctgttacctaggcagttgcaggtgctcgccggcatctatcccatagcccagatccaagagccgtacaccgctgttggttatttggcctctcgcatcccagttcaagcactcctgcacttaaggcacccagaggcagaagacccgtcggcggagcatccatggtgcgcctgggatatttgcgaggcttgggccgaaaagagaggctataagactgctaaagccgcccgcaacgatgtgtaccgggccgccaactccctgcttagacttgctgttgatggccgcctgagcctctgttttcatccacctggctattctgagcaaaaaggtacttgggagtcccatcccgaaactacagaactggtcgtgttgcaggggcgtgtcggacctgccggagatgaggaggaggaagaggaggaagaattatcctccagttgtgaagaggagggcgaggaagaccgcgatgccgacgaggagggcgagggcgatgaggagacgccaaccagcgctccaggtagctctcttgctggtaggaacccctatgcactgctgggagaagatgagtgctag

SEQ ID NO: 154546 - DNA, 789 bp, Artificial Sequence
  derived and/or modified sequence
atggagcccaccggccccacccaggagcggtacaaggacggcgtggttaccataggatgcgtcggctttcccaatgtcggcaagtctagcttgatcaatggactggtgggcagaaaagtcgtctccgtgtctcgtaccccgggccacaccagatactttcagacttacttcctgactcccagcgtcaagctttgtgattgccctggattaatcttcccttccctgcttccaagacagttacaagttctggccgggatttatccaattgcgcaaatccaggaaccatacacagccgtaggatatctcgcatccaggatcccagtgcaggccctgttgcaccttcggcacccggaggctgaggatccaagcgctgagcatccatggtgtgcctgggatatttgcgaggcatgggcagagaaaaggggatacaagacagcgaaggccgcaagaaacgatgtgtatagagccgctaattctctgctgaggctggcagtggacggtagactcagtttgtgctttcatccccccggatattcagaacagaaaggcacatgggagtcgcatccagagacgactgagctcgtggttctacaaggacgtgtcggacctgccggagatgaggaggaagaggaagaggaagaattaagcagctcctgtgaggaggaaggggaagaggatcgcgacgcggatgaagagggcgaaggcgacgaggagacccccaccagcgcccctggaagcagtctcgccggaaggaacccttacgcacttctcggagaggatgagtgctag

SEQ ID NO: 154547 - DNA, 789 bp, Artificial Sequence
  derived and/or modified sequence
atggagcccaccggccccacccaggagcggtacaaggacggcgtggtgactatagggtgcgtcgggttccccaacgtcggaaaatctagtctaatcaacggactcgtggggcgtaaagtggtctctgtgtctagaactccaggacacacacggtacttccagacctactttctgactccttccgtcaagctgtgtgactgcccaggactcatctttccttcgctgctgccacgccagctccaggtactcgccggaatataccctattgcacagatccaggagccgtacacggccgtcggttacctggcttctcgtatacctgtgcaagccttgttgcacctccgtcaccctgaagcagaggacccatccgcagaacacccttggtgcgcctgggacatctgtgaggcttgggccgagaagcgtggttataagaccgctaaggcagctagaaacgacgtctatcgagcagctaattctttactcagactcgcggtagacggacggctgtcactttgcttccacccgcccggttatagtgagcagaagggtacttgggaaagtcatccagaaaccacagagttggtcgtcttgcaggggcgcgtcggccctgccggggacgaggaggaggaggaagaggaggaactaagctcgtcttgcgaagaggagggggaagaagatagggatgcagacgaagagggcgaaggcgacgaggaaacacccaccagcgcacccgggagctctttagccggacggaacccatacgccctgcttggcgaagatgaatgctag

SEQ ID NO: 154548 - DNA, 1290 bp, Artificial Sequence
  derived and/or modified sequence
atggaggccgccgtggtgctggagatgagcgacatcgtgctgctgattaccgatatccggcatcccgtcgtgaactttccccccgcactctacgagtatgtgacaggcgaactgggcctcgcactggttcttgtgctgaataaagtggacctggcgccaccagctctggttgttgcatggaagcattacttccatcagcattatcctcaattgcacgtagtcctgtttacctcatttccgcgagacccccgaacaccccaggacccctccagcgtactaaaaaagagccgcagacgcggcagggggtggacaagagccctgggacctgaacagctactgagagcatgcgaagccatcaccgtcgggaaggtagatctgtcatcctggagagagaaaattgcacgggatgttgctggcgccacctggggtaatggatctggtgaggaggaggaggaagaggatggcccagcagtgctcgtagaacagcaaactgactcggccatggaaccaaccggaccgacccaggagcggtataaagatggcgtggtgacgatcggctgcgtgggttttccgaacgttggaaaatccagcctgatcaacggcctggtcggacggaaggtcgtgtctgtgtcacggacaccaggacacaccaggtattttcagacatacttccttacaccttccgtgaagctctgcgactgccctggactcatattcccatctctgctacccaggcaactccaggtgctcgctggtatttaccccattgctcagatccaagaaccttatacagctgttggatacctcgcaagccgtattccggtgcaggccctgctgcatctgaggcaccctgaggcagaggatcccagcgctgagcatccatggtgtgcgtgggacatctgtgaggcctgggcagagaagcggggctataagaccgcgaaggctgcacggaacgatgtgtacagggccgccaattccctcctgagacttgcagtggatggacggctttcactctgcttccacccacctgggtactcagagcagaagggcacatgggaaagccacccggagactactgagcttgtcgttctacagggacgagtgggtcccgcaggcgacgaggaggaggaagaggaggaggaactttccagctcatgcgaagaggaaggagaggaagatagagatgcagatgaggaaggtgaaggagacgaggaaaccccaacatccgcccctggaagctccctggctggtaggaacccatacgccctcctgggcgaagatgagtgctag

SEQ ID NO: 154549 - DNA, 1215 bp, Artificial Sequence
  derived and/or modified sequence
atgagcaaggagcagctgatgagccaggaggagcggagcttccaggactatctaggaaagatccacggcgcttattcttccgagaaactgtcctattttgaacataaccttgagacctggcggcaactctggagagtgttagagatgtccgatattgtcttgctgataactgacattcggcatcctgtcgtgaactttccacccgccctgtacgagtatgttaccggcgagttgggtttagctttagttctggttcttaataaagtcgacctcgctcctcctgcgctggtggtggcatggaaacactacttccatcagcattatcctcagctgcacgttgtgctgttcacttctttccctcgcgatcctcggaccccacaggatccttcctcagtgctgaaaaaatcccgacgacgcggccggggttggactagagcattaggacccgaacaacttctccgtgcgtgcgaagctataaccgtaggcaaggggtttccaaacgttggtaaaagtagtctgatcaatggacttgtcggaaggaaggttgtgagcgtgtccagaacgccaggtcataccaggtacttccaaacatacttcctgacgcccagtgtgaaactgtgtgactgtcctggcctgatctttccgtcgctgctaccaaggcaactgcaggtcttggctggaatctacccgatcgcgcagatacaggaaccttacactgccgtcggatatctggcatcccggattcccgttcaggctctcctacaccttcggcatcccgaggcagaggatccttctgccgaacacccatggtgcgcctgggacatctgtgaagcttgggccgagaaacggggttacaagacagctaaagcagcaaggaacgacgtgtatagggcagccaatagtctgcttcgtttggcagttgacgggcggcttagcctgtgcttccatcccccaggctattccgagcagaaaggcacctgggagtctcaccccgagaccacggagctggtcgtactgcaagggagagtgggccctgcaggggatgaagaggaggaggaagaggaggagctgtcttcatcttgcgaggaagaaggcgaagaggacagggatgccgatgaagaaggagagggagatgaagagacaccaaccagtgctcctggttcttctctcgccggcaggaatccttatgccctgctcggcgaagatgagtgttag

SEQ ID NO: 154550 - DNA, 1215 bp, Artificial Sequence
  derived and/or modified sequence
atgagcaaggagcagctgatgagccaggaggagcggagcttccaggactatctgggtaagatacatggcgcctattcctccgaaaaactttcatactttgagcataacctggagacctggcggcagctctggagggtgctcgaaatgtccgatatcgtcctgctgatcacagacattcgtcacccagtggtaaactttccccctgccctgtacgaatacgtgaccggggaactcggtctggctttggtgctggtgctgaacaaagttgatctggctccacccgcattagttgtggcctggaagcattactttcaccagcattacccacagttgcatgtggtcttgtttacgtctttccccagagacccccggactccacaggatcccagttcagtgctaaagaaatctcggaggcggggacgcggatggacacgcgctctgggtcccgagcaactgcttagggcatgcgaagcaattactgttggtaaagggtttccaaatgtcggtaagtcctccctgattaacgggctggtcggcagaaaagtggtttctgtgtcgcgaaccccggggcacacccgatatttccagacttattttttaacgccctccgtcaaactctgtgactgccccggcctgatctttccgtccctgttaccgcgtcagcttcaggtgctggccggaatctaccctatcgcccaaatccaagaaccttataccgcggtgggctatctggcctccaggatccccgtgcaagcattgctccacctcaggcatcctgaggcagaggaccccagcgctgagcacccttggtgcgcttgggatatctgtgaggcatgggccgaaaaacggggatacaagactgccaaggccgcccgaaacgatgtataccgagctgctaattcactccttcgcctcgcggtagatgggagattgtccctctgctttcacccgccaggctattcagagcagaaaggcacatgggagtcccacccggagacaaccgagctcgtggtgctgcagggccgcgtgggaccagccggagacgaggaagaggaggaagaggaggagctgtccagttcttgcgaggaagagggcgaagaggaccgagacgctgacgaggaaggagagggggatgaggagaccccaacgtcagctccaggtagctctctggcgggaagaaacccatacgccctactgggggaggacgaatgctag

SEQ ID NO: 154551 - DNA, 789 bp, Artificial Sequence
  derived and/or modified sequence
atggagcccaccggccccacccaggagcggtacaaggacggcgtggtgaccatcggttgtgtgggatttccaaacgtgggaaagtcatccctgatcaatgggctcgtcgggcggaaggtcgtctctgtgtctcgaactccagggcacactcgctacttccaaacttacttcttgactccatctgtgaaactctgcgactgtcccggcctcatcttcccgagtctgttgccccggcagctgcaggtgctggccgggatttaccctatcgcgcagattcaggagccatatacagcagttggatatctagcctccaggatacctgtgcaggccctgctgcacctgaggcaccccgaggctgaggaccctagtgccgaacacccatggtgtgcatgggatatctgcgaggcttgggcagagaagcgcggatacaaaaccgccaaagcggccagaaacgacgtttatagagctgcaaatagcttattacgtcttgcagtcgacggacgcctgagtctgtgttttcatcctcctggatatagcgagcagaagggcacgtgggagtcacacccggagacaaccgagctggtggtgcttcagggaagggtgggtccagcaggagacgaagaggaagaagaggaggaagagctgagctcaagctgcgaagaggaaggcgaagaggacagggatgcagatgaggagggcgaaggagacgaggaaacgcccacctccgctccagggtcgtcgctcgctggccggaacccttatgccctgctgggcgaggacgagtgctag

SEQ ID NO: 154552 - DNA, 1290 bp, Artificial Sequence
  derived and/or modified sequence
atggaggccgccgtggtgctggagatgagcgacatcgtgctgctgatcacggatatcagacaccccgtagtgaattttcctccggctttgtatgaatacgtgacaggagagctaggtctggcgctggtgctggtgctgaataaagtggacctcgccccgcctgctctcgtagtcgcgtggaaacactattttcaccagcactatccccaactgcatgtggtgttgtttacttcctttcccagagatccgcgcacgccccaagacccgagctccgtgcttaaaaaaagtagacggcggggccgcggctggaccagagcactgggtcccgaacagctccttagagcctgtgaagccattacagtggggaaggtggatctttctagctggagagaaaagatagcccgtgacgtggcaggcgcaacctgggggaacggatccggcgaggaagaggaggaggaagacggtccagcagtgctggtggaacagcaaactgactcagctatggagcctaccggtcccactcaggagcgctacaaagacggtgtcgtaacaattggatgcgtgggctttcccaatgtcggaaagtcaagcctgattaatgggttagtcggcagaaaagtggtgagcgtgtcaagaactccgggtcatacacggtactttcaaacttacttccttaccccttccgtgaaactgtgcgattgtcccggcctgatattcccatcactcttaccacggcagcttcaagtgttggccggtatctaccctatcgctcagattcaggagccgtacaccgctgtggggtacttagcgtctcgcattcccgtccaggctctgctgcacctgagacaccccgaagcggaggacccaagtgccgaacatccctggtgtgcttgggatatctgtgaggcatgggctgaaaaaaggggatataaaaccgccaaagctgcacgcaacgatgtgtaccgcgcagcaaattcactgctcagactcgctgtcgacgggcgcttgtctctctgctttcaccccccaggttactccgagcagaagggaacctgggaaagccatcccgagactacagaactggtggtgcttcagggcagagtcggacccgcaggagacgaggaggaggaagaggaagaggagctgtcgtcctcttgtgaggaggaaggcgaagaggatagagacgccgacgaagagggtgagggcgatgaggagacaccaacatcagcaccagggtcttcgctcgcgggtcgcaacccctacgccctcttgggagaggatgagtgctag

SEQ ID NO: 154553 - DNA, 1290 bp, Artificial Sequence
  derived and/or modified sequence
atggaggccgccgtggtgctggagatgagcgacatcgtgctgctgattactgatatcaggcatcctgtggtcaacttccctccagctttatacgaatatgtgaccggtgagctgggtttggcccttgtgctagtccttaataaggtcgacctggcgcctcctgcactggtggtggcctggaagcactactttcatcagcactacccccaattgcatgttgtcctcttcacttcattcccgagggatccgaggacacctcaagacccatcttctgtactgaagaagtctcgacggagagggcgcgggtggacacgggcgctcgggcctgaacaattactgagggcctgcgaggccataacagttgggaaagtcgaccttagttcctggagggaaaagatcgcccgggatgtggccggggctacttggggcaacgggtcgggagaagaggaggaggaagaggatggcccggcagttctcgtggagcagcagacagacagcgctatggaacctaccggccctacccaggaacgctacaaagatggagtggtgaccatcggatgtgtgggttttccaaatgtagggaagagtagcttgattaatggactggtgggtcggaaggttgtgtccgtctccaggactcccggacatactcgctattttcagacttattttctgacccccagtgtgaaactgtgcgactgcccggggctcatcttcccttctttattaccgcgtcaactgcaggtgctggccgggatctacccaatcgcacaaatccaggaaccttataccgccgtcggatacctggcttcgaggattcccgtgcaggcccttttacatctgcggcacccagaagcggaggaccctagtgcagagcatccatggtgcgcttgggacatatgtgaggcatgggcggaaaaacgggggtataagaccgccaaggccgctcggaatgatgtctacagggctgccaattctctgctccgcttagctgtggacggacgcctctctctgtgcttccaccctccgggctactcagaacagaagggtacttgggaaagccatcccgagactaccgagctcgtggttttacaaggcagggtgggacctgcaggcgacgaggaggaggaggaggaggaggagttgtcctcttcatgcgaagaagaaggcgaagaagatagggacgcagatgaagaaggggagggagatgaggagaccccaacctcggcccctgggagcagtctggctggaaggaacccctacgccttgctgggcgaggacgagtgttag

SEQ ID NO: 154554 - DNA, 789 bp, Artificial Sequence
  derived and/or modified sequence
atggagcccaccggccccacccaggagcggtacaaggacggcgtggtgaccatcggatgtgtgggatttcccaacgtcggaaagagctccttgattaacgggttggtcgggagaaaggtggtctcagtgtccagaacacctggacacacaagatactttcaaacctattttcttacccctagtgtgaagctttgtgactgtccaggactgatatttccaagcctcctgccgaggcagctacaggtgctggcggggatctaccctatcgcccaaatccaggaaccttacaccgcagtgggatacttggcatctagaattccagtgcaggctctgctccatctgagacacccagaggctgaagatccaagtgctgagcacccttggtgtgcctgggatatttgcgaagcttgggctgagaagcggggctataaaaccgcaaaagccgccagaaatgacgtttatcgggcagccaatagtctgttgagactggctgttgatgggcgtctgtcactctgcttccacccacccggatattccgaacagaaaggaacgtgggaatcccaccccgaaactacagagctcgttgtgctgcaggggagggtggggcctgcaggtgacgaggaggaagaggaggaggaggaactgtcttcctcctgtgaagaggaaggagaagaagatcgtgacgccgacgaggagggagaaggagacgaagagacccctaccagtgcccccgggtcttctttagctggacgcaacccatacgccttgctgggcgaagatgagtgctag

SEQ ID NO: 154555 - DNA, 1215 bp, Artificial Sequence
  derived and/or modified sequence
atgagcaaggagcagctgatgagccaggaggagcggagcttccaggattatctggggaagatccacggcgcttactcatccgaaaaattgtcttactttgaacacaatctggaaacctggcggcagctttggcgagtgctggagatgagtgacatcgtgttgctcattaccgacatcagacacccagtggtaaattttccacctgcactttacgagtatgtcacaggagagcttggcctggcacttgttcttgttctgaacaaggtggacctcgcaccccccgcattggttgtggcttggaagcattacttccaccagcactacccccagcttcacgtggttctgttcacaagctttccccgtgatcctcggacccctcaggaccctagctcggtgttgaagaaatcccgtagacggggccgggggtggactcgagctctgggaccagaacaactcctgcgagcctgtgaggccataaccgttggcaagggcttcccaaacgttgggaagtctagcctgattaatgggttggtgggcaggaaggtggtcagcgtgtcgcgtacaccagggcacactcggtacttccagacatatttcctcacaccaagcgtgaagctgtgcgactgcccaggtttgattttcccctcccttctacctcgtcagctgcaagtgctggccgggatctaccccatcgcccagatacaggagccatataccgccgtcggttatttagcttcccgtattcctgtccaggccctgttacaccttaggcatcccgaagcagaagacccctctgccgagcacccctggtgtgcctgggacatttgtgaagcatgggctgagaagcggggatacaaaacagccaaagctgcgagaaacgacgtctaccgtgctgctaactcactcctgagactcgccgtggatggccgattgtcactgtgtttccatccaccaggatatagtgagcagaagggcacatgggaaagtcatcctgagaccactgaactcgtcgtgctgcaaggcagggtaggacctgcaggtgacgaggaggaggaagaggaggaggagctttccagctcctgcgaggaagaaggcgaagaagatcgggatgccgacgaggagggcgagggagatgaggaaactccaaccagtgcccctggaagtagcctggccggaagaaatccatacgcactcttaggcgaagacgaatgctag

SEQ ID NO: 154556 - DNA, 1290 bp, Artificial Sequence
  derived and/or modified sequence
atggaggccgccgtggtgctggagatgagcgacatcgtgctgctgattacagacatacgccaccccgttgtgaacttcccaccagccctctatgagtatgtgaccggagagctaggcctggccctggtcctggtgctgaacaaagtggacctcgctccccctgccctcgtggtagcttggaaacattactttcatcagcattacccccaacttcacgtggtgttattcacctctttccccagggacccgaggactccccaagatcccagcagtgttctgaagaagtcccggcgaagaggccgcggatggactcgggctttaggtcccgagcaactacttcgggcttgtgaggccatcacggtgggaaaggtcgacctctcttcatggcgcgaaaaaattgctcgtgatgtggctggcgcaacatggggcaatggttcaggagaggaagaggaggaggaggatggtcctgccgtcctcgtggagcagcagacagactccgctatggagcctactggtccgacacaagagagatacaaagacggcgtggttactatcgggtgcgtcggatttcccaatgttgggaagagctcattgatcaacggattggtggggaggaaggtggtctccgtttcgcgtactccaggccacacgcgatattttcaaacttacttcctcacaccaagtgtaaagctctgcgactgtcctggcctgatatttccttccctccttccccggcagttgcaggttctggcagggatttaccccattgcccagatccaggagccatatacagccgtggggtatcttgcatcccgcatccctgttcaggcgttactgcacctgagacatcccgaggctgaggaccccagcgccgaacacccgtggtgcgcttgggacatatgcgaagcctgggccgagaagcgaggctacaagactgccaaagccgcgcgaaacgacgtatatagggcggcaaacagcttgcttcgactagctgtcgatggacggttgtccttgtgctttcatccccctggatactctgagcaaaaggggacatgggagagccaccctgaaactaccgagcttgtcgttctgcagggacgcgtcggccctgccggagacgaggaggaggaggaggaggaagaactatccagctcatgtgaagaggaaggtgaggaagatcgcgacgctgacgaggagggagagggggacgaggagacccctacatcagcccccggatctagtcttgccggccggaatccttatgctttactgggcgaggacgagtgttag

SEQ ID NO: 154557 - DNA, 1290 bp, Artificial Sequence
  derived and/or modified sequence
atggaggccgccgtggtgctggagatgagcgacatcgtgctgctgattactgacattaggcaccctgtggtcaacttcccaccagcactctacgagtatgtaacaggtgagctgggtctggcactggtactggtcctgaataaagtagatctggctccacccgcgctcgtagtggcgtggaaacactacttccaccaacactaccctcagctgcacgttgtgttgtttacttcgttcccacgtgatcccagaaccccccaggatcctagctctgtgctgaagaaatctcgacgtagagggaggggatggacaagagccttggggccagagcagcttcttcgtgcgtgtgaggctatcacagtgggaaaggtggatctgtcttcttggcgggagaaaattgcccgcgatgttgccggagccacctgggggaacggctctggtgaggaagaggaagaagaagatggacccgcggttctggtcgagcagcagaccgatagcgccatggagcccacaggcccgacccaggagcggtataaagacggggtggtgaccatcggatgcgtgggattccctaacgtggggaaatccagcctgatcaacggcctggtagggcgcaaggtggttagtgtcagcagaacccccgggcatacccggtattttcagacatactttcttacacccagcgtcaagctctgtgactgccccggtttgattttcccatcccttttacccagacaattacaagtcctagctggtatatatcccatcgcccagattcaagagccgtacacagcagtaggctatctcgcatctcgaattcccgtgcaggctctccttcacttacggcaccccgaggccgaagatccgtccgcggaacacccttggtgcgcttgggatatctgcgaagcttgggccgaaaagcggggctataagactgccaaggctgctaggaacgatgtgtacagggccgctaacagcctgcttcggctggccgtggacggaagattgtccttgtgttttcatccacctggctattctgagcagaagggtacctgggagtcccatcctgagaccactgagctcgttgtgcttcagggaagggttggcccagcaggagacgaggaggaggaagaggaagaagaactgtcttcaagctgcgaggaagagggagaagaggatcgagatgctgatgaggagggagagggtgacgaagagactcccacatcagcccccggctcctccctcgccggccggaacccttacgctctgttgggcgaagacgagtgctag

SEQ ID NO: 154558 - DNA, 789 bp, Artificial Sequence
  derived and/or modified sequence
atggagcccaccggccccacccaggagcggtacaaggacggcgtggtcacgataggatgcgtgggatttccaaatgtcggaaagtcttcccttatcaacggactagtgggtcgaaaggtggtttccgtgtcacgaaccccagggcacactcggtatttccagacttattttctgacaccctcggtcaagctttgtgactgtcccggtctgatctttccctcgcttctgccacgacaactgcaggtgcttgccggcatctatcccatcgctcagatccaagagccgtatacagcagtgggttacctggcgtcacgtattcctgtgcaggcattgcttcacctgagacacccggaagcagaggacccatcggccgagcacccttggtgcgcatgggacatttgtgaagcttgggctgaaaagcgcggttataaaactgctaaagctgctcgtaatgatgtataccgtgctgccaattccttgctgaggctggccgtggatggccgcctgtccctgtgtttccatccacccggttattctgagcaaaaaggtacttgggagtcgcaccctgaaacaactgaactggtggtactgcagggcagggttgggccagccggcgatgaagaggaagaggaagaagaggagctttctagttcctgcgaggaagagggggaggaagatcgggacgcggatgaggagggtgaaggcgacgaggaaaccccaacaagcgctccagggtcctcactcgccggtaggaatccctatgcccttttgggagaagatgaatgctag

SEQ ID NO: 154559 - DNA, 1290 bp, Artificial Sequence
  derived and/or modified sequence
atggaggccgccgtggtgctggagatgagcgacatcgtgctgctgatcacagatatccggcacccggtcgtgaacttcccgcctgccctctatgagtatgttactggagagctgggactggccctcgttttggtccttaataaggtggatctggcaccacctgctttagtggtagcctggaaacattattttcatcagcattacccccagctccacgtggtcctgttcacctcctttccaagggatcctagaacacctcaagacccctcgagcgtgcttaaaaagtcaagacgccgggggaggggttggacacgtgctctgggccctgagcagttattaagggcatgcgaggctatcaccgtgggaaaagttgacctgtcaagttggcgtgaaaagattgcacgcgatgtggccggagcgacttggggtaacggatcaggagaagaggaggaggaggaggatggtccagccgtgctcgttgagcaacagaccgactccgcaatggaacccaccggaccgacccaggagaggtataaagacggagtggtcaccataggctgtgtggggttcccaaatgtcggcaaatcatccctaattaatggactggtgggcaggaaggtggtttcagtcagccgcacacctggacacacaagatattttcagacttattttctcaccccctcggttaagctgtgtgattgtcccggactgatcttcccttcactgcttcctagacagctccaagtactggccggcatctaccctatagcccagattcaggagccctataccgctgtgggctatctcgcttcgagaattcccgtacaggcccttctgcacctcagacatcctgaagcagaggacccatctgccgaacatccttggtgcgcctgggatatctgcgaggcctgggccgaaaaacgcgggtacaagacagcgaaggcggctagaaatgatgtataccgagccgcgaattccctgctgcgccttgctgtggacggccggttgtcgctgtgttttcacccccctgggtacagcgaacaaaaaggcacatgggaatcccaccccgagacgaccgagctggtcgtactgcagggccgggtcggccctgccggagatgaagaggaagaggaagaggaggaattgagttcctcctgcgaagaagaaggtgaggaagatcgcgacgccgacgaagaaggtgagggagatgaggaaacccctactagtgctccaggctcaagtcttgccgggcgaaatccctacgcgctgctgggcgaggacgagtgctag

SEQ ID NO: 154560 - DNA, 1215 bp, Artificial Sequence
  derived and/or modified sequence
atgagcaaggagcagctgatgagccaggaggagcggagcttccaggattatttaggtaagatccatggggcatactcatccgaaaaactaagttatttcgaacacaacctagagacatggagacagttatggagggtgctcgagatgtctgatatcgtgctgctgatcactgatattcggcacccagtcgttaacttccctcctgctctttacgagtacgtgaccggtgagctggggctcgcccttgtcttggtgttaaacaaagtcgaccttgcaccaccagcgctggtggtcgcatggaagcattacttccaccaacactaccctcagctacacgtggtcttattcaccagcttcccccgggacccccggactccgcaagatccgtcatccgtgcttaagaagtctcgtcgacggggtagaggttggactcgcgccctggggcccgaacagttgcttcgagcatgtgaggctattacagtcggtaaggggttccccaacgtagggaaaagttccttgattaatggactggtggggcggaaggtcgtgtcggtgtctcggaccccgggtcacacacgctattttcagacttatttccttactcccagtgttaagctgtgcgattgccctgggctcatttttcctagtctgcttcctcggcagctgcaggtcctggccggaatctatccaatagcccagatccaggagccgtataccgctgttggatacctggccagtcgcattcctgttcaggccctcctgcacctacgccaccccgaggctgaggacccctccgcagagcatccatggtgcgcatgggacatctgcgaggcctgggccgagaagagggggtacaaaacagccaaggccgcacggaacgacgtatatagagccgcaaactccttactgcggctggcagtagacggaaggttgtctctgtgtttccaccccccgggctacagcgaacaaaagggcacatgggaaagtcatcctgaaacgactgagctcgtggtcttgcagggaagggtcggaccagccggcgatgaggaggaagaggaagaggaggaactgtcatccagttgtgaggaagaaggtgaagaggaccgggacgccgatgaagaaggagaaggagacgaagaaacccccacttcagctcccggctcgtcccttgctggacgtaatccctacgccctgttgggagaggacgagtgttag

SEQ ID NO: 154561 - DNA, 1215 bp, Artificial Sequence
  derived and/or modified sequence
atgagcaaggagcagctgatgagccaggaggagcggagcttccaggattatcttggaaagatccacggcgcgtactcctcagaaaagctgagttacttcgaacacaatctggaaacttggagacaactctggagagtgctcgagatgtctgatattgtcttgctaattactgacattcgccatccagtggtcaactttccacctgccctgtacgagtatgtgacgggtgaattgggcctggccctggtactcgtgctgaacaaagtcgatctggctccaccagctctggtggtagcctggaagcactatttccatcagcactaccctcagttacacgtggtacttttcacctcattccctagagacccacggacccctcaggaccccagctcagtgctcaagaaaagtcggagacgggggaggggatggacacgggctcttggacctgagcagctgcttcgggcttgtgaggcaatcaccgttgggaaaggcttcccaaatgtaggcaaatcctcactgataaacgggctggtgggacggaaggtagtgagtgttagtcggacccctggacacacgaggtactttcagacctattttttgacaccatccgttaagctgtgtgattgccccgggcttatattccctagcctgctgcctagacagcttcaagtgctggcaggaatatatccaattgctcagatacaggagccatacaccgcggtaggatatctcgccagccgcatccccgtgcaggccctactccacctacgccatccagaagcggaagacccttcagcagaacatccctggtgtgcttgggatatctgcgaagcttgggctgagaaaaggggatacaagacggcaaaagccgccaggaacgacgtgtatagggctgcaaatagtcttctgagactcgccgtggacgggcggctgtccctctgctttcacccgcctggctatagcgagcagaagggcacatgggaaagtcatcctgagacaacggaattggtggtgctccagggtcgcgtgggaccggccggggacgaggaagaagaggaggaggaagaactgtcaagctcatgcgaggaagaaggggaagaggaccgggacgccgatgaggagggggagggggatgaagaaactcccacatctgcacctggaagcagcttggccgggaggaacccatatgccctgctcggcgaggatgaatgctag

SEQ ID NO: 154562 - DNA, 789 bp, Artificial Sequence
  derived and/or modified sequence
atggagcccaccggccccacccaggagcggtacaaggacggcgtggttacaatcggctgcgtgggattcccaaatgtcggtaaatcctctctaatcaacggcttggtcgggagaaaagttgtctctgtgtctagaacaccaggacacacgcgatacttccagacctactttctgaccccctcagtaaaactttgcgactgcccagggttgatctttccatctctgcttccgcgccagctccaagtcctggccggcatatatccgatagctcaaatccaggaaccctatactgctgtcgggtaccttgcctctcgtatcccagtccaagcactacttcacttgcggcaccctgaagccgaggaccccagtgccgagcacccttggtgtgcttgggacatttgcgaggcctgggcggagaagcgtggctataagacagcgaaagctgctcggaatgacgtgtatcgagctgctaacagcttactgagactggccgttgacggtcggctatctttatgttttcacccacccggctatagtgagcagaagggcacttgggaatctcacccagagaccaccgaattggtcgtgctccagggcagagtcgggcccgcaggcgacgaagaggaggaagaggaggaggagctctctagctcatgtgaggaggaaggtgaagaggatagagacgctgatgaagagggcgaaggagatgaggaaacccccactagcgcgcccggttcatcccttgctggcaggaacccttatgctttgttaggcgaagacgagtgttag

SEQ ID NO: 154563 - DNA, 1824 bp, Artificial Sequence
  derived and/or modified sequence
atgccgaggaagaagcccttttcagttaagcagaaaaagaaacaattacaggacaaacgcgaaaggaagaggggccttcaggatggcctccggagctcctctaacagtcggagcgggagccgcgagcgacgggaagagcaaaccgacacttcagatggagaaagcgttacacatcatattcgcaggctgaaccaacagccctcccaggggctgggccctcggggatatgatccaaacaggtatcgcctacatttcgagcgcgactccagagaagaggtggaaagaaggaaacgggcagccagagagcaggtgctgcagccagtttctgccgagctgcttgaactggatattcgagaagtttaccagccgggaagtgttttggactttccgcgacgccctccttggtcctacgagatgtctaaggaacagctcatgagccaggaggaacgcagttttcaggattatctggggaaaatccatggggcttactccagtgagaaattgtcgtattttgagcataacctggaaacgtggaggcaactgtggagagtgctggagatgagtgacatcgtgctcctgattacggatattaggcaccccgttgtcaacttcccacccgctctgtacgagtatgtgactggagaacttggactagccctcgtcttggtgctgaacaaagtcgatctggcacccccagcgctggttgtagcctggaaacactatttccatcaacattacccccagttgcatgtggtgctgtttacctctttcccacgcgacccccgaacacctcaggatcctagttcggtccttaaaaagtctagaagacgaggccgtggctggacccgggctctcggcccagagcagttactcagagcttgtgaggccatcaccgtgggtaaggtggatctttcatcatggcgggaaaagatcgccagagacgtggccggagcgacttggggaaatggttccggtgaggaggaagaggaggaggacgggccagcagtgcttgttgagcagcaaactgattctgccatggagcccacggggcctacacaggagaggtacaaggatggggtagtgactattggctgtgtgggattccctaatgttggcaagagctcactgatcaacggactagtaggaagaaaggtagtgagtgtctcacgaacgcccggacatacccggtacttccagacctacttcctgacgcctagcgtcaagctctgtgattgtccaggccttatcttcccatcactgctgcctcgccagctacaggttctcgccggtatctatccaatcgcccagatccaggagccgtatactgccgtcggatacctggcttcacgcatcccagttcaggctttgctgcatctgcgtcaccccgaagccgaggatccatccgctgaacacccttggtgcgcatgggatatctgcgaagcctgggcggagaagcggggatataagaccgcgaaggctgctcgcaatgatgtgtaccgtgctgctaacagcctcctcagactggctgtcgatgggagactcagcttatgcttccacccaccaggctatagcgagcagaagggcacctgggagagtcatccagagactacagagctcgtggtactgcaggggagggtggggcctgccggagatgaggaagaggaggaggaggaagaactgtccagtagttgtgaggaggagggggaagaagacagggatgcagacgaagagggcgagggcgacgaggaaactcctacctctgctcctggctctagcctcgccggtcggaatccgtacgcactgctgggcgaagatgaatgttag

SEQ ID NO: 154564 - DNA, 1224 bp, Artificial Sequence
  derived and/or modified sequence
gtggtgaatttcccccctgctctgtatgagtatgttacaggcgaactcggcctcgctctcgtcctcgtgttgaataaagttgatctcgcccctcccgcactcgtggtcgcgtggaaacactacttccaccagcattacccccagctgcacgttgtgctcttcaccagctttccaagggacccccgtacacctcaggatccgagcagcgtgctgaaaaagtcacgcaggagagggaggggatggacgcgtgcactcggccctgaacaactcctaagggcatgtgaagccattactgtgggtaaggttgacctgtcatcatggcgggagaagattgctcgcgacgtggctggagctacctgggggaatggatctggggaagaagaggaagaagaagacgggccagccgtgttagtggagcagcagactgactcagcaatggagcccactggtcccactcaggagagatataaggacggggtggtgacaattgggtgcgtaggctttcccaacgtaggcaagagctctctgatcaatggactggtggggcgaaaagtagtatccgtctcgagaacaccaggtcacacaagatatttccagacctattttttgacaccgagtgtgaagctctgcgactgccccggattgatcttcccatcgttactgccacgccagttgcaagttttggcaggcatctaccccatcgcacaaatccaggaaccctacaccgccgtcggctacctggcatctcgcatacccgtacaggccctcctgcatcttaggcaccccgaagctgaggatccctctgctgagcacccatggtgcgcctgggacatctgcgaagcctgggccgaaaagcgcggatacaagactgcgaaagcagccaggaatgatgtataccgcgctgccaacagcctcctacgccttgccgtggacggccgtctgagtctgtgttttcaccctccgggttattccgaacagaaaggcacatgggaaagccaccccgagacgaccgagctagttgtcctgcagggtagagtgggcccagctggcgacgaggaagaggaggaagaagaggaattgtctagctcgtgcgaggaagaaggggaggaagatcgcgatgccgacgaagagggagagggggacgaggagactcctaccagtgcccctgggtcaagcctggcgggtaggaatccctacgccctgttaggagaggatgaatgctag

SEQ ID NO: 154565 - DNA, 1824 bp, Artificial Sequence
  derived and/or modified sequence
atgccccgaaaaaaacccttcagtgtgaagcagaagaaaaaacaactgcaagacaaaagggagcgcaaaagaggcttgcaagacggtctgcgatcatctagtaactctagatctggatcgcgagagaggcgcgaagagcagacggatactagcgacggtgaatccgtcacgcaccatatcaggagactcaaccagcagccctcacagggattgggaccgaggggatatgatccaaatcgctaccggctccacttcgaacgcgatagtcgcgaggaggtcgagcgtaggaagagggcagctcgggaacaagtgctgcaaccagtgtcagccgagctgctggagctcgacatccgagaagtgtatcaacccggtagcgtgctggattttccaaggagacctccatggtcctatgagatgtccaaggagcaactcatgtcgcaagaggagcgttcattccaggattacttaggaaagatccacggggcatattcctccgaaaaactgagttattttgaacacaatctggagacctggcgccaactttggagggtgttagagatgagcgatatcgttctcttgattacagacattagacatcctgtggtgaactttcccccagccctatatgaatatgttaccggcgagctaggcctcgctttagtactcgttttgaataaagtggacctcgctccacccgctttagtggtggcatggaaacactacttccaccagcactatccccagctccatgtggtactgttcaccagtttcccgagagacccacggacccctcaggaccccagctctgtccttaaaaaatctcggagacgagggagggggtggaccagagccctaggaccggaacagcttctgagggcatgcgaagcaataactgtgggaaaggtagacttgagctcctggcgcgaaaagatcgcacgggacgttgcgggtgccacctgggggaatggaagcggagaggaagaagaagaggaggatggaccagctgttctggtcgaacagcagactgattccgctatggagccaacaggtcccacacaggaacggtataaggacggggtcgtaaccattggatgcgtgggctttcccaacgtcggcaaaagttctctgatcaacgggttagtcggtcggaaagtagtttccgtgtccaggacccccggacatacccgttatttccaaacttacttcctgacaccctccgtaaaattatgtgattgtcctgggctaatttttcccagcctccttcccaggcagctgcaggttctcgccggtatctaccccatcgcccagatccaagaaccttacacagctgtaggatacctggccagccgaatccccgtccaggcacttctgcatctccgtcatcccgaagcagaggatccaagcgctgaacatccttggtgtgcttgggacatatgtgaggcgtgggcagagaaacggggttataaaaccgctaaagcggctagaaatgacgtgtaccgcgcagccaatagcttgctgcgattggcagtcgacggcaggctctccctgtgcttccatcccccaggatactctgagcagaaaggcacttgggaaagccatccggagacgacagaattggtggttctccaaggacgagttggtcctgcaggggatgaagaagaagaagaagaggaagagttatccagttcatgtgaggaggagggtgaggaggaccgggatgctgatgaagaaggtgaaggggacgaggaaacccctacatccgcaccgggatcttccctggccggacgcaacccatatgccctactgggggaagatgagtgctag

SEQ ID NO: 154566 - DNA, 795 bp, Artificial Sequence
  derived and/or modified sequence
atgggggagagagtgctgtggcccctgcgtgccggacagcactggaggcaccgaccattgcccgctggcctgcaggacggcctgcgctcatcaagcaattcacgatctggttcaagggaacggcgagaagaacagactgacaccagtgatggggagtccgtgacacatcatatacggcgtctgaatcaacagcctagccagggcttaggccctaggggatatgaccccaatcgctaccgcctgcatttcgaaagagactcacgtgaagaggtcgagcggaggaaaagggccgcacgtgaacaggtgctgcaaccagtaagtgcagaactgcttgaactggatattcgcgaggtgtaccagccaggctctgtgctagattttccacggagacccccttggagctacgagatgagcaaggagcagctgatgtcacaggaggagagatcctttcaggattacttgggtaagatccacggagcctattcatccgagaaattgtcgtatttcgaacataacttagaaacgtggagacagctctggcgggttctggagatgtctgacattgtattactcattacagatatacggcatcctgtcgtgaactttccccctgccctctacgagtatgtcaccggagagctgggactggcactggtgcttgtcctcaacaaggtagacttagctcctcctgctctcgtggttgcctggaagcactattttcatcagcattacccgcagctccacgtggtattattcaccagcttcccgagggaccccagaacaccccaagattag

SEQ ID NO: 154567 - DNA, 1824 bp, Artificial Sequence
  derived and/or modified sequence
atgcccaggaaaaagcccttctcagttaaacagaagaagaagcagttgcaagacaaacgggagaggaagcggggactgcaggacggcttgcgttctagttcaaattcaaggtccggaagccgggagcgacgcgaggagcagacggatacaagcgatggcgagagcgtaacacaccatattcggagactgaaccagcagcctagccagggactcggtccgagagggtacgacccaaatcgatacagattgcatttcgagcgggactctcgtgaagaagtggagagacgcaaacgcgctgcccgtgagcaggttttacagcctgtttctgctgaactcctcgaactggacatcagggaggtctatcagccaggcagcgtgttagatttcccgaggcgacctccatggtcctatgagatgtccaaggaacaactcatgtcacaggaggagaggagtttccaagattatctgggcaagattcacggtgcgtacagtagcgaaaagctctcttactttgaacacaatctcgaaacatggcgacagttgtggcgagtgctggagatgtccgacatcgtgttgctaataaccgatatacgccacccagtggtgaacttcccacctgcactctatgaatatgtaacaggagagctgggactggcccttgtgctagttctaaacaaagtggacctggctccacccgctcttgtagtggcttggaagcactatttccaccaacactatccccaactccatgttgtactttttacgagcttccctagagacccacggaccccccaggacccaagttccgtcctgaagaaatccagacgcagaggaagaggctggacgcgggcattgggcccagagcaactccttcgcgcttgcgaagcaatcacagtgggcaaggtggatttgtccagctggagggaaaagatcgcgagagatgtcgcgggtgccacatggggaaatggatccggagaggaggaagaagaggaagatggaccagcagtccttgtagaacagcaaacagattccgctatggagcccacgggacccacccaggagaggtacaaagacggcgtggtgaccatagggtgtgtggggtttccaaatgtgggaaagtcgtctttgatcaacggcctggtaggccgaaaggttgtcagtgttagtcggacacctggccacacacgttactttcaaacctacttcctaactccatcagttaaactctgcgattgtccaggccttattttcccttccttattaccacggcagctacaagtgctggctggtatctaccctattgctcaaattcaagaaccatacacagcagtggggtacctcgctagtcggatacccgtgcaggcactgctccatctacgacatcctgaggcggaagacccatcagcagagcacccctggtgtgcctgggacatatgcgaagcctgggctgaaaagcggggatacaaaaccgccaaagcagcgaggaacgacgtttaccgcgctgcgaattctcttctcaggttggcagtggacggcaggctctcgctctgcttccacccaccgggatattccgagcagaaaggcacttgggagtcccatcccgaaaccactgaactggttgtgctgcagggacgcgtcggcccagccggagatgaagaggaggaagaagaagaagagctgagttcctcatgcgaggaggaaggggaggaggaccgcgacgcagacgaagagggggaaggggatgaagaaacgcctacatcagcccctggatctagcctggccggtcgaaacccctacgcactgctgggtgaggatgaatgctag

SEQ ID NO: 154568 - DNA, 1290 bp, Artificial Sequence
  derived and/or modified sequence
atggaggcagcagtggtgctggaaatgtcggatatcgttttgttaattacagatattagacaccccgttgtgaatttcccccctgccctatacgagtacgtgaccggcgaactggggctggccctggtgctcgtgcttaacaaagtcgacctggcccctcccgctttagtagtggcctggaaacactacttccatcagcactacccacagttgcacgtagtgttattcacttccttcccaagggaccccagaacccctcaagacccctcctccgttctaaaaaagtcccggaggcggggacgaggctggaccagggccttgggccctgagcagcttttacgcgcttgcgaggcgataactgtcgggaaagtcgatctgagctcctggagagagaagatcgcacgggatgtggctggagcaacctggggaaacggctcgggggaggaggaggaggaagaggatggcccagctgttctcgtggaacagcagaccgactcagcaatggaaccaactggacccacccaggaaaggtataaggacggagtcgtgaccattggatgtgtggggttcccaaatgtgggcaaatccagtttgattaacggcctggttgggcgaaaggttgtctcagtgtcccgaacccccggtcacactcgctattttcagacatatttcctgacacccagtgtgaagctctgcgactgccccggtttgattttcccgagcctcttgcccaggcagctccaagtgttagcaggaatttatcccatcgcgcagattcaagagccttacaccgcagtggggtatctggcctctaggatcccggtgcaggccctgctccacctgcgccaccccgaggctgaggatccatctgcagagcacccttggtgcgcctgggacatatgtgaggcctgggctgagaaaagaggctacaaaactgctaaggccgctaggaatgacgtgtacagagctgcaaattccttgctgagactcgcagttgacggacgcctgtctctatgttttcatcctcctggatatagcgagcagaaaggaacctgggaaagtcaccccgaaactactgagctagtggtactgcagggtagagtcggacccgctggcgatgaagaagaggaggaagaagaggaactttcaagctcctgcgaggaggaaggtgaggaggaccgcgatgcagacgaagaaggagaaggtgatgaagagactcccacttcagctccgggtagctcacttgccggacgaaacccctacgcgctgctaggagaggatgagtgctag

SEQ ID NO: 154569 - DNA, 1824 bp, Artificial Sequence
  derived and/or modified sequence
atgcccagaaagaaaccattctcagtgaagcagaagaaaaagcagctgcaagacaagcgtgagagaaagcgaggactgcaagacggactacgcagttccagtaattcccgttctgggtcccgcgagcgaagagaggaacagactgacacaagcgatggcgaatccgtcacccaccacattcggcgactgaatcaacagcctagtcagggcctcggccctcgcggatatgacccaaacagatatagactgcacttcgagagggactcacgggaggaggtcgagaggaggaaaagagcagcacgagaacaagttttgcagcccgtgtccgccgagctgcttgagctggacattcgcgaagtttatcagccgggatctgtgctcgatttcccacgcagacctccatggtcttacgaaatgtctaaagaacagctcatgagtcaggaggaacggtctttccaagattatctgggtaaaattcacggggcttactctagtgaaaagctctcatacttcgagcacaatctggagacatggcggcagctgtggcgggtcctggaaatgtcagacatagtgctgttgataacagatatccggcaccctgtggtcaattttcctccagcgctgtacgaatacgtgaccggggagcttggcctggccctggttctcgtgttgaacaaagtcgacctggcacctcctgctcttgttgtcgcctggaagcactacttccatcagcactacccacagctgcacgtcgtgctcttcacatctttccccagagaccctcggacaccgcaagacccatcttcagtgttgaagaagtcacggcgtagaggaagaggatggacccgggcacttggtccagagcagttgttgagagcttgtgaggctattaccgtcggaaaggttgatctatcaagttggcgcgagaagatagcaagggatgtggccggtgctacctgggggaatgggtctggagaggaagaggaggaggaggatggccctgcagttctggtggaacagcagacggattctgccatggagcctacagggcctacacaggaacggtataaagacggggttgtcactatcggctgtgtgggatttcctaacgttggcaagagcagcttgattaatgggttagttggccgtaaagtagtcagtgtgtcaaggacgcccggtcacacccggtattttcagacttattttttaacccccagcgttaaactttgcgactgtccaggactgatattccccagcctcttacctaggcagttacaagtgctggctggtatctatcccatcgcccagatccaggagccttacaccgctgtgggctacttagcctcacgcattcctgttcaagctctactgcacctgcgtcatcctgaggccgaggatcctagcgcagaacacccctggtgcgcgtgggacatctgcgaagcctgggctgaaaagcggggatataaaaccgccaaggccgctagaaatgacgtctatcgcgctgctaactccctattgcgcctggctgtcgatgggcgattgagcctatgtttccacccacctgggtatagcgaacaaaaaggaacttgggaatctcaccccgagactactgaactcgtagtgctgcagggtcgggtgggacccgctggagatgaggaggaagaagaagaggaggagctgagtagcagctgcgaggaggagggcgaggaggatcgcgatgccgatgaggagggtgaaggcgatgaagagaccccaacatccgccccaggaagctcccttgccggaaggaacccctatgccctactcggggaggacgaatgctag

SEQ ID NO: 154570 - DNA, 1215 bp, Artificial Sequence
  derived and/or modified sequence
atgagtaaggaacagctaatgtcgcaggaggagcggtccttccaggattacttgggtaaaatccacggagcctattcgtctgagaagttgtcatatttcgaacataatctggaaacatggagacaactgtggcgggtcttggagatgtcagatatcgtgcttctgattaccgacataaggcaccccgtggtcaatttcccgccagccttgtatgagtacgtgaccggggaactgggacttgcactggtgttagtccttaacaaggtggatttggcccctcccgctttggtggtcgcctggaagcactatttccatcagcattatccccagttacatgtggttctgttcacgtcattcccaagggatccgagaacaccgcaggatccctcatctgttttaaaaaaatcccgcaggaggggcagaggttggaccagggcactgggaccagagcagctgctgagagcctgtgaggcaataaccgtaggaaaaggattcccaaatgttgggaagtcaagcttaattaacggcctggtcggcagaaaggtagtttctgtgtccaggacacccggtcacacacgctactttcagacatatttcttaaccccgtccgtgaaactctgtgattgtcctggcctgattttcccatccctcctacccaggcaattgcaagttttagccggtatataccctattgcccaaatccaggaaccctacacagccgtaggttacttggcaagcagaatcccggtgcaagccttgctccacctgcgacatccagaagccgaggacccatccgccgaacatccctggtgcgcttgggatatctgcgaagcatgggcagagaaacgtggatataagacagcgaaagcagccaggaacgatgtgtacagggccgctaactccttattgaggttggccgtcgacggtaggctctcactttgttttcacccccctgggtattctgagcagaaaggcacatgggagagccatccagaaaccactgagctggttgtcctgcaggggagggtgggccctgccggagacgaagaggaagaagaagaggaagaactgtcaagcagctgtgaagaggagggcgaggaagacagagatgcagatgaggagggagagggcgatgaggagaccccaacatcagccccaggctcatccctggcaggtcgcaacccttacgcactcctcggtgaggacgaatgctag

SEQ ID NO: 154571 - DNA, 795 bp, Artificial Sequence
  derived and/or modified sequence
atgggagaaagagtgctgtggccactgcgagccggacaacattggagacataggcccctgccagcaggattacaggacggcctccgcagctcatctaatagccggtctggatcacgcgagagaagagaggagcagacagatacttcagatggcgagtccgtgacacatcacatcagacggttgaaccagcagccttcccaaggcttgggtccacggggttacgaccctaataggtacagactgcattttgaacgggatagtagggaagaagtggagcggagaaagagggccgcaagggaacaagttcttcaacccgtgtccgccgaattactcgagctagatatcagggaggtctaccaacccggaagcgtgctggacttccccagaaggcctccttggagctacgaaatgtcaaaagagcagctgatgagtcaggaagagaggagctttcaggactacctgggcaaaatacacggcgcttatagttcagaaaaattatcttattttgagcacaacttagaaacctggagacaactatggcgagtgctcgagatgtccgatatagttctgctgattaccgacatacgtcacccagttgtgaatttcccacccgctctttatgagtacgttacgggcgagctggggctcgctctggttttggtcttgaacaaagtggacctggccccaccagccctggtggtggcctggaagcactactttcaccagcactatccgcaattgcacgtcgtcttgttcactagctttccacgcgatccaaggacaccccaggattag

SEQ ID NO: 154572 - DNA, 795 bp, Artificial Sequence
  derived and/or modified sequence
atgggcgaaagggtgctctggccactccgtgcagggcagcattggaggcaccgccctctacccgcaggactgcaggatggcctgagatcatcttctaactccagaagcggatctcgggagcggagagaagagcagactgatacctccgatggagagtctgtgacacaccacatacgaagactgaatcagcaaccctctcagggtctgggccctcgaggatacgaccccaacagatatcgtctgcacttcgaacgggactcgagagaagaggtggagagaaggaaacgtgccgctagagaacaagtcttacagcccgtctctgctgaactcctggaactcgacattcgcgaagtctaccagcccggtagcgtcctggattttccgcgacgtcccccttggagttatgaaatgagcaaggagcagctgatgtctcaggaagagcggtccttccaggattatctgggcaagattcacggagcatactcctccgagaagctgagctatttcgaacacaacctagaaacttggcgccaattgtggagggtgctggagatgtctgacatcgtcttattgatcactgacattcgacatcctgtggtgaattttcccccagcgctgtacgaatacgtgacgggggagctcggattagcgctggtgttggttcttaacaaagtcgacctggctcctccggctctagtggtagcttggaaacattacttccaccagcattatccgcagctgcacgtagttctgttcacaagctttccgagggacccacgcacaccccaggactag

SEQ ID NO: 154573 - DNA, 795 bp, Artificial Sequence
  derived and/or modified sequence
atgggagagcgagtcttatggccgctacgcgctggccagcactggagacaccgtcctctcccggcaggccttcaggatgggctgcgttcatcaagtaactcacgcagcggctcacgggaaaggagggaggagcagacagatacatccgatggcgagtccgtgacccatcatattagaaggttgaatcagcaaccctctcagggtctgggaccacgcggttatgaccctaatagatacagactccacttcgagagagattcacgcgaggaagtagaacgcaggaagcgcgctgctcgggaacaggtactccagccggtttccgctgagctcctggagctggacatcagggaagtgtaccagccgggatctgtcctcgatttcccaaggaggcctccctggtcctatgagatgagtaaggaacagctcatgtcgcaggaagagagaagctttcaggactatctgggcaagattcacggagcttattcaagtgaaaagctgagctacttcgagcataacttggagacctggagacagttgtggcgcgtcctggagatgtcggatatagtgttgctgataacagatattcggcatccagtcgtcaatttccctccagcactctatgaatacgtgaccggcgaactggggctggcactcgtactcgtcctgaacaaggtggatctggccccacccgctctggtagttgcctggaaacattatttccatcagcactaccctcagctgcatgttgtgttgtttacatccttcccacgcgatcccaggactccacaggactag

SEQ ID NO: 154574 - DNA, 1824 bp, Artificial Sequence
  derived and/or modified sequence
atgcccagaaagaaacctttcagtgtcaagcagaaaaagaagcagctgcaggacaagagggagagaaagcgtgggctgcaggatggcctgagaagctcttctaacagccgctcaggatctcgggaaagacgagaggagcagactgatacatctgatggggaatcagttactcaccacatccgaagactgaaccagcaaccttcacagggcttgggccctcgcggttacgacccaaaccggtatcgactacacttcgaaagggactcgcgtgaggaagtggagaggcgtaaacgggcagccagggaacaagttcttcagccggtctcggctgagctgctcgaactggacatacgcgaggtataccaacccggatctgtgctagacttcccacgcagacctccctggtcatacgaaatgtctaaggaacagctgatgtctcaagaggagcggtcttttcaggattatctcggaaagattcatggggcttacagctcagagaagctgtcatattttgagcacaacctcgagacctggcggcaactgtggagagtgctggaaatgtcagatattgtactactcattacggacattcggcaccccgtagtgaactttcccccagctctctacgagtatgtcacaggcgagttggggctggctcttgttctggtgctaaataaagtagacttggctcctcccgctctggtagtggcctggaagcattacttccaccagcattatccccaactgcatgtcgttctgtttacttcattcccaagagacccgaggacacctcaagatccaagctccgtcttgaagaagtcacggagaagggggaggggctggacccgggctcttgggcctgagcagctcttaagagcttgcgaggcaattaccgtaggcaaggtagaccttagcagttggcgggagaagatcgcccgagacgtggcaggggctacctggggcaatggctctggtgaggaggaagaggaggaggacggacctgccgtcctggtagaacagcagactgattcggccatggagcccactgggccaacccaagagcgatacaaggacggagtggtgacgatcggttgcgtggggttcccaaatgtgggcaagagctccttgattaatgggcttgtcggaaggaaggtggtttcagtgagcagaacccctggacatacccggtacttccagacatacttcctgaccccatctgtgaagctgtgtgactgccctgggctaattttcccatcacttcttccgcgtcagctgcaagttttggcaggaatttatcccattgcccagatccaggaaccttacacagcggtggggtatctggctagtaggataccggtccaagctcttctgcacctccgacaccccgaggccgaagacccatccgccgaacacccctggtgcgcatgggatatctgtgaggcctgggccgagaagagaggatataagacagctaaggccgcaaggaatgatgtgtacagagcagctaactcacttctgcggttggccgtcgatggcagactctcattgtgctttcatccgcctggatacagcgagcagaaggggacatgggagtcgcaccccgaaacgaccgagcttgtcgttctgcagggtcgagtcggccctgcaggcgatgaagaggaggaagaggaagaggaactatcgagctcctgcgaggaggaaggagaagaagacagggatgcagacgaagaaggtgagggggatgaggagacgccaaccagcgcgccagggtcatctctggctggtcggaacccttacgcgctgttgggggaagacgagtgctag

SEQ ID NO: 154575 - DNA, 1824 bp, Artificial Sequence
  derived and/or modified sequence
atgcccagaaagaagccatttagcgtgaagcagaaaaagaaacaacttcaggataagcgcgagagaaagcgcggtctacaggacggacttaggtcctcctcaaactctcggtcaggatcccgggagaggcgggaagaacagactgatacctcagatggcgaatccgtcacacaccatatccgaagattaaatcagcagccttctcagggcctgggccctagagggtacgaccctaatcgctacagacttcactttgaaagagactcccgtgaggaggtcgagaggcgaaaacgcgctgctcgggagcaggtcctgcagccggtctctgccgagctcctggagctggacatccgagaggtctatcaaccgggatcggttctggacttcccgagaagacctccctggtcttacgagatgagcaaagaacaactgatgtcgcaggaggaacggagcttccaggactacctgggaaagattcacggagcgtatagttccgagaagctgtcatatttcgaacacaatctggaaacctggcgccagctgtggcgtgttctcgaaatgagcgacatcgtactgctcatcactgatattcgtcaccccgttgtgaacttccctccggcactgtacgaatacgtaacgggggaactcgggcttgctttagttttggtgcttaataaggtggatctggcccctccagcccttgtagtcgcttggaagcactactttcaccaacattatccgcaacttcacgtcgtactcttcacatcgtttcccagggatcctcggacccctcaggacccctcatccgttttaaaaaagagccggaggcgcggtcgcggatggacacgtgccctcggaccagagcaacttttgcgagcttgtgaagccatcactgtagggaaggttgatctctcatcatggcgcgaaaaaattgcccgagatgtggcgggtgctacgtggggtaacggatcaggtgaggaagaggaagaagaggatgggcctgccgtgctggtggagcagcaaacagattcggccatggagccaaccggcccaactcaggagcgctataaagatggggtcgtgacgatcgggtgtgtcggatttccgaacgttggcaaaagctcacttataaatggccttgtcggtaggaaggtcgtgagcgtctcaagaactcctggacatactcgttattttcagacatattttcttacccctagtgttaaattgtgtgactgtcctgggctgatctttccttcattattaccacggcagctccaggtcctggctggcatatacccaatcgctcagatacaggagccttacacagccgtcgggtacctagcgagtaggattcctgtgcaggctctgttgcacctaagacaccctgaagcggaagacccctccgccgaacatccctggtgcgcctgggatatatgtgaagcttgggctgagaaacggggatataaaactgctaaagcggctaggaacgacgtctaccgtgccgctaattctcttttgcgtctcgctgtggacggcagattgtctctatgttttcacccacccggatacagcgagcagaaaggcacctgggaatctcatcccgagactaccgaactggtagtgctccagggccgagtgggtcccgctggggatgaggaggaagaagaggaagaggaactgtcctcctcttgtgaagaagagggtgaagaagaccgagatgcggatgaagagggagagggggatgaagagactcctacctctgccccaggatctagcctagccggaaggaacccctacgcgctgctgggtgaggatgaatgctag

SEQ ID NO: 154576 - DNA, 795 bp, Artificial Sequence
  derived and/or modified sequence
atgggagaacgcgttctatggcccctacgggctggccagcactggcggcatcgccctctgccagcaggcctacaggacggcttgcgctcctcgagcaattcaaggagcggctctcgtgagcgccgtgaggagcaaacggatacttcagacggtgagtccgtgactcaccatatcaggcgcctcaaccagcagccttcccaggggcttggccctagaggctacgatccaaacagataccgtctgcacttcgagagagatagtcgggaggaggtagagagaaggaagagagcagccagggaacaagtgttgcagcctgttagtgcagagttgctggaactggatattcgagaggtgtaccagccaggatctgtcctcgattttcctagacgtccaccctggagctacgagatgtccaaggaacagctcatgagccaggaggagagatctttccaggattacctggggaagatccacggggcttacagttcagagaaattatcctatttcgagcacaacctagagacttggcgccagttgtggagagtgctggagatgagtgatatcgtactactcattaccgacattagacaccccgtcgtcaacttcccacccgcactctacgaatacgtcaccggagaattgggtttggctttagtgctggtgctcaataaagtggacctcgctccgccagccttggtcgtggcttggaaacactacttccaccagcactaccctcagctgcacgtggtgctgtttacaagctttccacgggatcctcggacgcctcaggattag

SEQ ID NO: 154577 - DNA, 795 bp, Artificial Sequence
  derived and/or modified sequence
atgggagaacgagtgctgtggcccttgcgcgctggacagcactggagacatcgtccactcccagctggattacaggacggccttcgatctagttctaattctcgatccggatctcgagagaggagagaggagcagacagacacttcagacggggagagtgtaactcaccatatacgcagactcaaccagcagccaagccaagggctggggcctcgagggtatgatccaaaccgttatcggcttcattttgaaagggactcccgggaggaggtggagcgccgaaaacgagctgcacgtgagcaggtgctccaaccggtttctgccgagttattggagctagacattagggaggtctaccagcccggatcagtcctggactttcccaggaggcctccttggagctatgagatgtcaaaggagcagctgatgagccaggaggaacgctcattccaggattacctgggaaagattcatggggcatactccagcgaaaaactatcttatttcgaacataacctcgagacttggcgccaactctggagggtgctggaaatgtcagacattgttctgctcattacagacattagacacccagttgtgaactttccccctgctctctatgaatatgttaccggagagctcggactagctctggtcttagtcctcaataaggttgacctggcccctcctgccttggttgtggcatggaagcattacttccaccagcattacccccagctacacgtagtgctgttcacaagtttcccaagagacccacggacacctcaggactag

SEQ ID NO: 154578 - DNA, 1824 bp, Artificial Sequence
  derived and/or modified sequence
atgcctcgcaagaagccgttttcagtgaagcaaaagaaaaagcaactccaggacaaaagagagagaaagaggggcctccaggacggtctccgatctagttccaatagtagatcaggctctcgcgaaaggcgcgaagaacagactgatacgtctgacggtgaatcagtgactcaccatatccgtcggctcaaccagcagcctagccaggggctcggaccaaggggatatgatccaaatagatatcggcttcactttgaaagggacagccgcgaggaagtagaacgtcgcaagcgagccgcaagagaacaggtccttcagcctgtcagtgctgagctgttggaactggacatcagagaagtttaccagccgggttctgtgctggactttcctaggagacctccgtggagctacgagatgtcaaaagagcagttaatgtcgcaagaggaacggtccttccaagactacctaggaaagatccacggagcatacagtagcgagaagctgtcctatttcgagcacaatctggagacttggagacagctgtggagggtccttgagatgtctgacattgtgctgctgatcacagatatccgacatccagtggtgaacttcccccctgccctgtatgaatacgtgacgggcgagcttggtcttgccctcgtgctggtcttgaacaaggtagacctggcacctccagccctggttgtggcttggaaacattatttccatcagcactaccctcaactccacgtggtgctttttacgagcttccccagggatcctagaactccacaggatccctcttcggttctaaagaaatccagaagacggggacggggttggactagagcgttaggaccagaacagctcctgcgggcttgtgaagcgataacggtgggcaaagtcgatttgtcttcctggagggaaaagatcgcgagggatgtggccggtgccacctgggggaatggttctggtgaagaggaggaggaagaggatgggcctgctgtccttgtagaacagcagacagactctgcgatggagcccaccggccctacacaagagcggtacaaggacggggtagtcacgatagggtgcgttggattcccaaacgtggggaaatcgtccttaatcaatggcctggtggggagaaaagtagtgtcggtgagccgcacccccggacatactagatattttcagacatatttcctgaccccctccgtgaaactctgcgactgccctggactgattttcccctccctgttaccgaggcaactgcaagtccttgctggaatctacccaatcgcgcagatccaggaaccctatacggctgtcggatacctcgcctcacgaatccctgtccaggcacttctgcatctacgacatcctgaggccgaagatccgtcagctgagcacccgtggtgcgcatgggacatatgtgaagcttgggccgagaagcgtggatacaagacagccaaggccgcaaggaatgacgtgtacagagccgctaatagtctactgcggctcgccgtggacggcagactatcactttgctttcacccccctggatatagtgaacagaagggtacctgggaaagtcaccccgagaccactgaacttgtggttctccagggcagagttggaccagctggcgatgaagaggaggaggaggaggaggagttgagctcctcatgtgaagaagagggcgaggaagaccgagacgcagatgaggagggtgagggggacgaggaaacccccacctcggcacctggctcttccctggctggacgaaatccttacgctctgctgggggaggacgaatgctag

SEQ ID NO: 154579 - DNA, 201 bp, Artificial Sequence
  derived and/or modified sequence
gtggtgaactttccgcctgccctgtacgagtacgtgaccggtgagctgggcttggcactggttttagtactgaacaaggtggacctagccccaccagctctggtggttgcttggaagcactattttcatcagcattatccacagctacacgtcgtgctattcacgtccttccctagggaccctcgcactccacaagattag

SEQ ID NO: 154580 - DNA, 795 bp, Artificial Sequence
  derived and/or modified sequence
atgggggagcgcgtgctgtggcccctgagggccggtcagcactggaggcaccggccattgcctgcaggcctccaggatggactccgtagcagtagtaattcccgctctggctctcgggagaggagagaggagcaaacggatacgagcgatggcgagtcggtgacccaccacatcagacgtctcaatcagcagcctagccagggcctgggtccaaggggttacgatcccaaccggtatagactgcactttgaacgtgattcaagagaagaagtggagcgacggaagcgcgcagccagagagcaggtgctccagcctgttagtgcggagctactggaattggatattcgcgaggtatatcagccaggaagcgtcctggactttcccaggaggcccccttggagctacgaaatgtcaaaggagcaattaatgagtcaggaggagagaagcttccaggactacctcggcaaaattcatggcgcttactcgagcgagaaattaagttactttgagcataacctcgagacctggaggcagctctggcgagtgctggagatgtccgatatcgtactgctcatcaccgacatccgtcatcccgtcgttaatttcccgcctgctctatacgaatacgtcaccggggaattgggccttgccctcgtgctcgtgctgaataaggttgatctggcaccacccgcactcgtggtagcatggaagcattatttccatcagcactatccccaacttcatgtagtactgttcacctcctttccccgagatccccgaacgccacaagactag

SEQ ID NO: 154581 - DNA, 1215 bp, Artificial Sequence
  derived and/or modified sequence
atgagtaaggagcagttgatgtcacaggaggagcgcagcttccaggattatctggggaaaattcacggtgcctattcctctgaaaagctatcctatttcgagcataatttggagacatggcgccagttatggagggtgctcgagatgtccgacattgttctccttatcaccgacatccgacatcccgtggtgaatttccctcccgctctgtacgagtacgtcacaggcgaactgggccttgccttggtgctcgtgctgaataaggtggatctggccccacccgctctcgtggtcgcctggaaacattacttccatcagcactatccacaactgcacgtagtgcttttcacatccttccccagggaccctaggacccctcaagaccccagttccgtcctgaagaagagccgtagaagagggaggggctggacgcgcgctttgggtccagagcaactactgcgagcctgcgaggccattacagtcggaaaaggttttcccaacgttggcaagtcatcactgatcaacgggctcgttggccgtaaggtggtcagcgtttcccgcacaccaggccacacaagatacttccagacctatttcctgacaccgtccgtcaaactatgtgattgtcccggtctcatcttcccctcactgctgcctagacaacttcaggtgctggcgggaatctaccctattgctcaaatccaggagccatatacagccgtcggatacctggcctctcggattccagtgcaggctttactgcatctgagacacccagaggctgaagatccatccgccgaacacccctggtgcgcctgggacatttgtgaggcctgggcagagaagcgaggttacaagaccgctaaggccgctcggaatgacgtgtaccgggctgcaaacagtctcctgaggctcgctgtggacgggagacttagcctgtgctttcaccccccagggtactctgagcagaaaggcacatgggaaagccaccccgaaactaccgagttggttgttttgcaggggagggtgggcccagctggagatgaggaggaagaggaagaagaggagctttccagttcctgcgaggaggagggagaagaggatcgtgatgcagatgaggaaggggagggcgacgaagagacacccacctcggctccgggttccagcttggccggtcggaacccatacgcactccttggcgaggacgaatgttag

SEQ ID NO: 154582 - DNA, 789 bp, Artificial Sequence
  derived and/or modified sequence
atggagccgactgggcctacccaggaacgctataaggacggcgtagttacaattggctgtgtgggcttcccgaacgtcggaaagtcaagtctaatcaacggccttgtgggtcgcaaagtggtcagcgtttccaggaccccaggtcatactagatatttccagacatacttcctcacaccaagtgttaaactctgtgactgcccgggtctgatcttcccctcacttttgcccagacagctgcaggtcctggcagggatttatcccattgcacagatccaggaaccatatacagcagtagggtacctggcgagccgtatacccgtgcaggctctgctccacctgaggcatccggaagccgaggatccaagtgctgaacacccgtggtgcgcgtgggacatctgcgaggcttgggccgaaaaacggggatataaaaccgctaaggcagcaaggaatgatgtctaccgggcagcgaactcgcttctgcgcctcgctgtggatggcagactgtcactgtgcttccaccccccagggtactcagagcaaaaggggacttgggaatcccacccagagacaaccgagttagttgtgttacaggggagagtaggaccagccggagatgaagaagaggaagaggaggaagagctgagctcgagttgcgaagaagaaggagaagaagatagagatgcagacgaggaaggcgagggagatgaggaaacacctacttccgcacccggaagctccctcgctggccgaaatccatacgcactgctgggagaagacgagtgttag

SEQ ID NO: 154583 - DNA, 789 bp, Artificial Sequence
  derived and/or modified sequence
atggagcctaccggaccaacacaagagcgctacaaagacggcgtggtgactattggatgcgtaggcttcccgaatgtggggaagtcctcccttatcaacgggctcgtggggagaaaggtggtttcagtgagtcgtactccaggccacacaagatactttcaaacatactttttgaccccatcagttaaattgtgcgactgtcccggactgatctttcccagcctgcttcctaggcagctgcaagtgctcgccggaatttaccccatcgcacagatccaagagccttataccgctgtggggtaccttgccagcaggatcccagtgcaggcccttctgcacctgcgacatcctgaggcagaggatccctcagcagagcatccctggtgcgcctgggatatctgcgaagcatgggcagagaagaggggttataagactgcaaaagctgcaaggaatgatgtctatcgcgcagccaattcgctgctgcgccttgcagtcgacggacgccttagtctgtgcttccatccacccggttactctgaacagaagggaacctgggagtctcacccagaaacaacagaacttgtcgtgttacaggggagagttggaccagctggcgacgaagaagaggaagaggaagaagagttaagttcgtcctgtgaagaagaaggagaagaggatcgggacgccgacgaggaaggggaaggcgatgaagaaacaccaacgtcagctcccggaagtagcctggctgggagaaatccttacgctctgcttggggaggatgaatgctag

SEQ ID NO: 154584 - DNA, 1290 bp, Artificial Sequence
  derived and/or modified sequence
atggaagccgcagtggtgctggagatgagcgacatagtcctgttgatcacggatatccggcaccccgttgtgaattttcctccagctctgtatgagtacgttacaggcgagttggggctggcattggtgctagtgctaaacaaggtagatctggctcctcctgcccttgttgttgcatggaagcattactttcatcaacactaccctcaactgcacgtggtactgttcacatcgtttccgcgtgatccacgcactcctcaggatccctcatctgttttgaaaaagtctaggcgcagggggcgaggctggaccagagcgctgggcccagagcagctgttgagggcttgcgaggcaattactgtcggtaaggtggacctctcttcctggagagagaagatcgcaagagacgtcgctggcgcaacctggggcaacgggagcggcgaagaagaagaggaggaggacggacccgctgtgctggtcgagcagcaaaccgactccgccatggagcccactggacccactcaggaacgctacaaagatggggtcgtgacgataggctgcgtagggttcccaaatgtcggaaaaagtagtctcatcaacgggctcgtgggccgaaaggtggtcagcgtgtcccgtacgcccggacacactcgctactttcagacatactttctcaccccctccgtcaaattgtgcgactgtccaggactcattttcccaagcctactgcctcgacagctgcaagtacttgccggtatatatcctatcgcccagatccaagagccatacacagccgtcggttacctggcctcgagaatccccgtgcaggctttactgcatctgagacaccccgaggcagaagacccctccgccgagcatccttggtgtgcatgggacatctgcgaagcctgggctgagaagcgcggatataaaaccgccaaagcagccaggaacgatgtatatcgggctgccaatagcttgttgcggctggccgtggacggacggctgagcttgtgcttccatcctccagggtactctgagcagaagggaacgtgggaatcgcacccagagaccaccgaattagtggtgctgcagggcagggtagggcctgcgggagatgaggaggaagaggaagaggaggaactgagtagcagctgtgaggaggaaggggaggaggaccgggacgctgacgaagagggagaaggagacgaggagacacctacatctgccccaggaagcagcctggccggtcgcaacccgtacgccctgctcggagaagacgagtgctag

SEQ ID NO: 154585 - DNA, 1215 bp, Artificial Sequence
  derived and/or modified sequence
atgagtaaagaacagctgatgtctcaggaggaacgcagcttccaagattacctggggaaaatccacggggcttactccagtgagaagctgtcatattttgagcataacttggaaacatggagacagctgtggcgtgtccttgaaatgagcgatatcgtgctgctgatcacagacatacggcatccagttgtaaattttccgcctgccctttatgagtacgtgacaggagagttgggcctggcacttgtgttggtcctgaacaaggttgacctggcccctcccgcactggtggtcgcctggaaacactactttcaccagcactacccacaactccatgtcgtactttttacttcttttccgcgtgaccctcggaccccccaagatccttcctctgttttgaaaaagtcccggcgaagggggaggggatggaccagagcacttggccctgagcaactcctgcgagcctgtgaggctatcacagtgggcaagggattccccaacgttgggaaatccagcctgattaatggcctggtcggaaggaaagtcgtgtctgtctcaagaactcccggacatactagatatttccaaacatatttcctcacacctagcgtaaagctctgcgactgcccaggacttatctttccaagcctgctgcccagacagctgcaggtgctggccggtatataccctatagctcagatccaagaaccctataccgctgtggggtatttagccagcagaatccctgtacaggccctcctccacctacggcacccagaggccgaggacccatccgctgagcacccttggtgtgcttgggacatatgcgaggcctgggccgaaaaacgtgggtacaaaacggcaaaagccgcacgcaatgacgtctaccgcgcagctaattccttgctccgcctggcggttgatggcaggttgtctctgtgtttccaccctcccggttactccgagcagaagggaacatgggaatcccatcccgaaaccaccgaactggtggtgctgcaaggacgcgtgggtcccgctggtgatgaggaggaggaggaagaagaggagctctcttccagttgtgaagaggagggcgaggaagaccgcgatgccgacgaagagggcgagggcgacgaggaaacaccaacctccgctccgggtagtagcctcgcagggagaaacccctacgcgttactcggggaggacgagtgctag

SEQ ID NO: 154586 - DNA, 1215 bp, Artificial Sequence
  derived and/or modified sequence
atgtcaaaagagcagctgatgtctcaggaggaaagatcgttccaggactacctgggcaagattcacggagcctatagcagcgagaaactttcttacttcgagcataaccttgagacatggaggcagctgtggagggtgctcgaaatgagcgacatcgtgctgctgattactgacatcagacatcctgtggttaattttcctcctgctctttacgagtacgtgaccggggagctcggtctggctttagtgctggtattaaataaagttgatctggccccacccgcactggtagtggcttggaagcattatttccatcagcactatcctcagttgcacgttgtgcttttcactagcttcccaagggacccaagaactcctcaggatcccagcagcgtcctgaagaagtctcggcgtcggggacgaggatggaccagggcgttgggccctgagcagctgctgagggcatgcgaagccatcacagtcgggaaggggttccctaacgtgggtaaatcctctctgatcaacggtctggtgggtcgcaaagtggtgtctgtaagccgcactccaggacacaccaggtacttccagacctattttttaacaccctccgtcaagctctgtgactgcccgggactgatattcccctcactcttgccaaggcagttgcaggtcctcgccggaatctacccgatcgcgcagattcaggagccatacacggccgtggggtatttggcatccagaattcctgtgcaggcacttcttcacctaagacatcctgaagccgaggacccttctgctgaacatccatggtgcgcgtgggacatctgcgaagcctgggccgagaagagaggttataaaacagctaaagccgctagaaatgatgtataccgcgcagctaactctctactgaggctcgccgtcgacggcaggctgagtctgtgtttccatccacctggttactccgagcagaagggcacctgggaatctcaccccgaaaccacagagctggtggttttacaggggcgagtgggtccagctggcgacgaggaggaggaggaagaggaagagttaagctcttcttgtgaagaggaaggcgaagaggaccgggatgcagatgaggagggggaaggcgatgaggaaactcccacatccgctccagggtcctctttagcagggaggaacccctatgccctactgggcgaggatgagtgttag

SEQ ID NO: 154587 - DNA, 789 bp, Artificial Sequence
  derived and/or modified sequence
atggagcctactggaccgacacaagagaggtacaaggatggagtagttacaatcggatgtgttggctttcctaacgtaggaaagagctctctgattaacggtctcgtcgggcgtaaggtagtctctgtgtcacgcacacccggacataccagatacttccagacttactttttaacaccaagtgtgaagctctgtgactgccctggactgatctttccctcattactaccacggcagctgcaagttttggcgggaatctatcccatcgcgcagatccaggaaccgtatactgccgtgggatatctagcctcccggattcccgtccaggcactgctccacctgcgccatcctgaagctgaagatccaagcgcagagcacccgtggtgcgcctgggatatttgcgaggcttgggctgaaaaacgcggttataaaactgctaaggcagcccgtaatgatgtgtatcgggctgctaactcactgttgaggctcgccgtggacggtaggctcagcctttgcttccaccctcccggttactctgagcaaaagggcacttgggagagccaccctgaaacaacagaactagttgtgctacagggtcgggttgggcctgccggtgacgaagaggaggaagaagaggaggaattgagttcttcttgtgaggaggagggggaagaagatcgggacgcggacgaggagggggaaggagatgaggagacaccaacttcggcccctgggtcatcactcgccggtaggaatccctacgcactgcttggcgaggatgagtgctag

SEQ ID NO: 154588 - DNA, 1290 bp, Artificial Sequence
  derived and/or modified sequence
atggaagccgctgttgtgctggaaatgagcgatatcgttttgctgattaccgatatccggcatccagtcgtgaacttcccaccagccttgtatgagtatgtgaccggggaactgggccttgccctagtacttgtcctcaacaaagttgacttggcccctccagcgctggtggtggcttggaaacactacttccaccagcattatcctcaacttcacgtggtcttgttcacttcctttccgagagaccccaggacccctcaggacccctccagcgtgctgaagaagtcacgtcgccgaggcagggggtggaccagagccctcgggccagagcagctcctgcgagcttgtgaagccatcacagtgggaaaagttgacctgtcttcatggcgggaaaaaatcgctcgggatgtggctggagctacgtggggaaatggaagtggagaagaggaagaggaagaggacggccctgctgtgctggtggagcagcagacagattctgcaatggagcctacagggccaacccaggagaggtacaaggacggcgtagtaacaatcgggtgtgtgggattccccaatgttggcaaaagcagtctgatcaacggcttagtggggcgaaaggtcgtgtctgtttcccgaacacctggccacacgcgctactttcaaacatacttcctaaccccatctgttaagctttgcgattgcccgggtctgatcttcccctccctactgcccaggcagctgcaagtgctggctggcatatatccaatcgcccagatacaggaaccatacaccgcagtcggttaccttgcctcccggattccagttcaagctcttctccatctccggcaccctgaggcggaagacccgagcgccgagcatccatggtgcgcctgggatatctgcgaagcatgggccgaaaaacgtggatataaaaccgctaaggcagccagaaatgacgtgtatagagccgcaaattcgctgctacgcttagccgttgacggcagactttccctctgcttccacccaccagggtactccgaacagaagggaacctgggagagccaccccgagacaactgaattggttgtcctccaaggaagagtcggcccagccggagacgaagaagaagaggaggaagaagagctgagctcatcttgcgaggaagagggcgaagaggaccgcgacgccgacgaagaaggcgaaggcgacgaggagactcccacttctgcaccaggaagctctctagccggtcgaaacccctatgccctgctgggggaggacgaatgctag

SEQ ID NO: 154589 - DNA, 1290 bp, Artificial Sequence
  derived and/or modified sequence
atggaggctgccgtcgttctggaaatgtctgatatagtgcttctgatcaccgacatccgtcacccagttgtgaatttccccccagccctctacgagtacgtgaccggggaattgggacttgcgttggtgctagttctgaacaaggtggatttagcgcctcccgcactagtcgtggcctggaagcattattttcaccagcattatcctcagcttcacgtggtcttattcaccagtttccctcgtgacccccgaacacctcaggacccctcctctgtacttaagaagtcgcgtagacgaggaagaggctggacgcgcgctttaggacctgagcagctgctccgcgcatgtgaggccattacggttggcaaggtggacctgtcctcatggcgggagaaaatcgcgagagatgtcgccggagctacctggggaaatgggagcggagaggaagaagaagaggaagacggtcccgctgtcctagtggagcaacagacggactccgcgatggaacccaccggtccgacacaagaacggtataaggacggtgtggtgacaatagggtgtgttggcttcccaaacgtagggaaaagctcattaatcaacggactcgtgggcagaaaggtcgtcagtgtttctcgcacacccggacacaccaggtattttcagacctacttcctgacaccgagtgtcaagttgtgtgattgccctggactgatattcccttctctgctgcccagacagcttcaagtattggcaggcatctaccctatcgcacagatccaagaaccctacactgccgtgggctatctggccagtcgcattccagtccaggccttgctacatctgcgacaccccgaagccgaagatccttccgctgagcatccctggtgtgcttgggatatatgcgaagcctgggctgaaaagagaggttacaaaacagctaaagctgctaggaacgacgtttatcgcgctgccaactccctgcttcgcctggcagtggatggcaggctcagcctgtgcttccatccccctggatactccgaacaaaagggcacttgggagtctcaccccgagacaaccgagctcgttgtgctccagggcagagtgggtcctgccggtgatgaggaagaggaggaggaagaagagctgagctcaagctgtgaagaagagggcgaggaagacagagacgcagatgaggagggagagggggacgaagaaactcccactagcgcccctggatcttccctggccggtaggaacccatacgccctcctcggtgaagacgagtgctag

SEQ ID NO: 154590 - DNA, 789 bp, Artificial Sequence
  derived and/or modified sequence
atggaaccaacgggccctacccaagaaaggtataaagacggggtagtgactataggttgcgtgggctttcccaacgtgggaaagtccagtttgattaatggcctcgtgggacgcaaagtggtgtctgtgtcgagaacccctggacacactaggtacttccaaacatatttccttaccccctcggtgaagttgtgtgactgccccggacttatatttccgtccttactgcccagacaactacaagtgttggcaggaatatatcccatagcacagatccaagaaccttataccgctgtcggctatttggctagccgaatcccagtccaggcactgctccatttgcggcatcctgaagccgaggaccccagcgccgagcacccatggtgtgcatgggacatctgcgaagcgtgggctgaaaaacgcggatacaaaacagctaaggccgctaggaatgatgtttatagggccgctaattctctccttcgcctagcggtagatgggaggctctcgctttgtttccatcctccaggatattccgaacagaaaggaacttgggaatcacacccagaaaccacggagttggtcgtactgcaaggacgtgtaggaccagcaggggatgaggaggaagaggaggaggaagaactgagctcttcttgtgaggaggaaggagaggaagatagagatgcagatgaagagggggagggggacgaggagacccccacctcagctcctgggtcatccctggcaggcagaaacccatacgcactcttaggggaagatgagtgttag

SEQ ID NO: 154591 - DNA, 1215 bp, Artificial Sequence
  derived and/or modified sequence
atgtctaaagagcagctgatgtcccaagaagaacgcagcttccaggactatctcggcaagatccatggtgcttacagttctgagaagctttcctactttgaacacaacttggaaacatggaggcagctgtggagagttttagagatgtcagacatcgtgcttctgattactgatatccgccatccggtcgtgaatttcccacccgcactatacgagtatgtgactggcgaactgggactggcgttagtgttggtgcttaacaaagtcgacttagcgccacccgctctcgtggtcgcttggaaacactactttcaccagcattatccgcagctccacgttgtgctatttacgtctttccccagagaccctcgcacaccacaagacccctcatccgttctgaagaaatcgcggagaaggggcaggggctggacccgggcactgggcccagaacagctgttgcgagcctgtgaggcaataaccgtgggtaagggcttccctaatgtcggcaagagcagcctgattaatgggctcgtgggcagaaaggtagtcagtgtatcccggacccccggtcatactcgttactttcagacctatttcctgactccctctgtgaaactatgcgactgtccaggactgatcttcccctcactgctgccacgacagctgcaggtcctggctggcatttatccgattgctcagatccaagagccctatacggccgtggggtacctggcatctaggatcccggtgcaggcactcctccatctgagacatccagaagcagaagacccatccgccgaacatccatggtgcgcctgggacatctgtgaggcctgggctgagaagagaggctacaaaactgctaaggcggctcgcaacgatgtgtacagagccgctaactctctgctgcggctcgccgtcgatggacggctatccctttgcttccatcctccaggctattctgagcagaagggcacctgggaaagtcatcctgaaaccacagaattggtggtgctacagggccgagtcggtccagccggagacgaagaggaagaagaggaggaagaattaagttcttcatgtgaagaggagggcgaagaggacagggatgcagatgaggagggagagggagatgaagaaacccccacttctgcaccgggttccagcctggctggaagaaacccatacgcattactgggcgaagatgagtgctag

SEQ ID NO: 154592 - DNA, 1290 bp, Artificial Sequence
  derived and/or modified sequence
atggaggcagctgtagtgctggaaatgagtgatattgttttgctgataacagacatccgtcatcctgttgtgaactttcccccagcattgtacgagtacgtgaccggagagcttggtctcgctcttgttttagttctcaataaggtggatctagcgcctcctgcgttagtggtggcatggaagcactacttccatcagcactacccccaattgcatgtggtgctgttcacgagcttccctcgggaccccagaaccccccaggatccttcgagcgtgctgaaaaaaagtcgccgacgcggaaggggctggacgagggccctcgggcctgaacaactccttcgggcttgtgaagcaatcactgtcggcaaggttgatcttagttcctggcgggagaaaattgcccgtgacgtagcgggagccacatgggggaatggcagtggcgaggaggaggaggaggaggatggacctgccgtacttgtggagcagcagacagattccgctatggagcccaccggacccacccaggagaggtacaaggacggggtggttacaatcggttgtgtgggtttccccaacgttggcaagtcatctcttatcaacggcctcgtggggaggaaagtcgttagcgtgtcacgcacgcccggtcataccaggtacttccagacgtattttctgaccccgagcgtgaagctatgtgactgcccgggtttgatcttcccatccctgctgccaagacaacttcaggtcttggctggcatttaccctatcgcccagatccaggaaccctatactgcggtggggtatctggcatcccgaatacctgttcaagcactcctgcatctcagacatcctgaagctgaagaccctagtgcagagcacccttggtgcgcgtgggatatctgcgaagcttgggccgaaaagcgcggatataagaccgctaaagccgcaagaaatgacgtgtatcgagcagcaaacagcctgctaaggctggcggtggatgggagactgtcactgtgtttccatcctcccggttattctgaacagaaaggaacttgggagagccacccagagactacagagttggttgtgcttcagggcagagttggaccggctggtgatgaggaggaggaggaagaagaagagcttagtagttcatgcgaggaggaaggtgaagaagaccgtgacgccgatgaggaaggggagggcgatgaagaaacacccacgtcggcccctggctcgtcgctggcaggccgtaatccttacgccctcctcggagaggatgagtgttag

SEQ ID NO: 154593 - DNA, 1290 bp, Artificial Sequence
  derived and/or modified sequence
atggaggcagccgtcgtgctggagatgtctgatattgtgctgctcatcacggacataagacacccagttgtcaactttcccccagccctctacgagtacgtcaccggagagctaggcttagcactggtgctcgtgctgaataaggttgatctcgctccccctgctctggtggtggcctggaagcactacttccaccagcactacccacagctgcatgtcgtgctcttcacctcatttccacgagacccaaggactcctcaggatcctagttcagtgctcaaaaaatctcgtcgtcgcggacgcggttggactcgcgcactgggtccagaacagctgttgcgagcctgtgaggccattacggtaggcaaagtcgacctcagttcctggagggagaagatcgctcgggatgtagcgggtgccacttggggaaacggctccggcgaggaagaagaggaagaagatggtcccgcagtactggtcgagcagcagaccgactccgctatggagccgaccggccctacccaggagagatataaggacggagtggtcacaatagggtgcgtaggcttcccaaatgtgggtaaatcatctctgattaacggacttgtggggaggaaggtagtgtccgtgtctcgcactcccggtcacacaaggtacttccaaacttattttctcacaccttctgtgaagctgtgtgactgtcctgggctgattttccctagtctcctcccaagacagcttcaagttctcgccggtatttatccaatagcgcaaatccaggaaccctacactgctgtgggctacttagccagtagaatacccgtccaagcactgctgcacctgcgacaccccgaggccgaggacccatcagcagaacatccatggtgcgcgtgggacatttgcgaggcctgggccgagaaaagaggatacaaaactgctaaggcggctaggaacgacgtttatcgcgctgccaacagcttgctccgcttggccgtggatgggcgactttctctatgctttcatccgcctggctatagtgaacagaaaggtacctgggagtctcaccctgagacaacagagctggtggtcctgcagggaagggtgggcccagcaggggacgaagaggaagaagaggaggaggagctgtccagcagttgtgaggaggagggcgaagaggatcgagatgcagacgaagagggcgagggcgacgaggagaccccaacgagtgcccctggctcaagtttggcagggaggaatccctacgcactcctcggggaagacgagtgctag

SEQ ID NO: 154594 - DNA, 789 bp, Artificial Sequence
  derived and/or modified sequence
atggaacctacggggcctacacaggagcgttacaaggacggcgtcgttacaatcggctgtgtcgggttcccaaatgttggcaaatcaagcctcatcaatgggctggttggaaggaaggtggtgtctgtgagccgcactccagggcacacccgctatttccagacgtacttcctgaccccctctgttaaactgtgtgattgtcctggtcttattttcccttcgctgctgccaagacagctgcaggtgttggctggtatctatccgattgcacagattcaagaaccatacactgcggtggggtacctcgcgagtaggattccagtccaggcactgctgcacttgcgacatcctgaggctgaggacccatctgctgagcacccctggtgtgcctgggatatctgtgaagcatgggccgaaaagcgcggttataagaccgctaaggccgcaagaaacgatgtttacagagccgctaacagtttacttcgcttagccgtcgatgggcgattatccctgtgttttcatccgccaggctactccgaacagaaaggcacctgggaatcacaccccgagaccacggagctagtggtgctacaaggtcgggttggccctgctggcgatgaggaagaggaggaggaggaagagttgtcaagcagctgcgaggaagaaggagaagaggatcgggacgccgacgaggaaggggagggcgacgaggagacacctaccagcgcccctggaagctcactcgcagggaggaatccatatgctctcctgggagaggatgagtgttag

SEQ ID NO: 154595 - DNA, 1290 bp, Artificial Sequence
  derived and/or modified sequence
atggaagccgctgtggtcctggagatgagcgatatcgtgctgctgatcaccgacataaggcatccagtagttaactttccacccgctctgtatgagtacgttaccggggagcttggcctggctttggttctggtgttaaacaaggtggatctcgccccaccggcactggtcgtggcctggaagcactacttccaccagcattacccccagctccatgtcgtgctgtttacatcatttccacgcgatccgaggactccccaggacccctcctcagtgttgaaaaaaagcaggcgcaggggtcggggatggacacgagctcttggtccagagcaattgttacgcgcatgtgaagcaatcaccgtaggcaaggtcgaccttagctcatggcgtgagaaaattgcacgcgacgtggcaggtgcgacctggggaaatggtagcggggaggaggaagaggaagaggatgggccagcggttttagtggagcagcagactgactccgccatggagccaaccggcccaacccaggagagatataaagacggcgtggtgactattggttgtgtaggatttccaaatgtagggaagagtagccttataaatggcctggtaggacgtaaggtggtttcagtgagtcgaacccccggtcacactagatacttccagacctattttttgacccccagcgtgaaactttgcgattgtcctggcctgattttccctagtctgctcccacgccagctccaggtgcttgctgggatttacccaattgcccagatccaggaaccctatacagccgtggggtatctcgcgtctaggatacctgtacaagcccttcttcatcttagacatccagaggccgaggacccttctgcggaacacccatggtgcgcgtgggatatttgtgaagcttgggcagaaaagagaggatataagacagccaaggcagccaggaacgacgtctaccgagctgctaactccttattaagactggccgtggacggacgcctgagcctgtgctttcatcctcctgggtattcggaacagaagggaacatgggagagtcatcctgagacaacagaattagtggttctgcaggggcgagtgggaccagcaggtgatgaagaggaggaggaggaggaagagttgtcatctagctgcgaggaagagggggaagaggaccgcgatgctgatgaagaaggtgaaggcgacgaagagaccccaacctctgccccaggctcaagtctcgcgggtcgaaatccatatgctctgctcggtgaagatgagtgttag

SEQ ID NO: 154596 - DNA, 1215 bp, Artificial Sequence
  derived and/or modified sequence
atgagtaaagagcagctcatgagccaggaagaacggagcttccaagattaccttggcaagatccatggggcttactcttctgaaaagctatcctatttcgagcataacctggaaacatggcggcaactctggcgtgtactggagatgtctgacatagtactgttgatcaccgatatacgtcatccggtagtgaactttccccctgccctctatgagtatgtcaccggcgaacttggcctggcactcgtgcttgtgctgaataaagtggatcttgcccctcccgcactggtcgttgcatggaagcactactttcaccagcactatcctcaactccatgtggttctgtttacatcatttcctcgtgaccctcggaccccgcaggacccttcatctgtcttgaaaaaatctcggaggcgcggaagaggatggactcgggctttgggcccagaacagctgctccgcgcttgtgaggcaatcactgtggggaaaggtttccctaacgttggaaagtcatcattaattaatggtctagtcgggaggaaagtggtatctgtgagccggactcccggtcatacaaggtactttcagacctacttcctgacaccaagcgtcaagctgtgcgactgcccgggactgatttttccttccctgctgccccgacagttgcaagttctggcgggaatatatcctatagcccagattcaggaaccttacaccgctgtcggctatctcgcaagccgtatccccgtgcaggctctcctgcacttgcgacatcccgaggctgaggatccctctgcggagcacccttggtgtgcctgggacatctgcgaggcctgggccgagaagaggggctacaagacagcaaaagccgctaggaacgacgtataccgcgcagcgaatagcctcctgagactggcggtagacgggagactgagtctttgctttcacccacctggatactcagagcaaaagggaacttgggaaagccaccccgaaactactgagctcgtcgttctgcagggtagagtgggcccagcaggtgacgaggaagaagaggaggaagaggagcttagctcatcctgtgaggaggagggggaagaggatagggatgccgatgaggagggcgagggagatgaggagactccaactagcgccccagggtcatccctcgctggcaggaacccctacgcgctgctgggcgaagatgaatgctag

SEQ ID NO: 154597 - DNA, 1215 bp, Artificial Sequence
  derived and/or modified sequence
atgtccaaagagcagcttatgtcacaggaagaacgcagttttcaggactacttaggaaaaattcacggtgcctactcttcagaaaaactctcatacttcgaacacaacctggagacctggcgccagctgtggcgcgttctggaaatgagcgatattgtcttattaataacagatattcggcaccccgtggtcaattttcctcccgctctatatgagtacgttacaggggagcttggattggcactagtgttggtcttgaacaaggtagatctggcccctccagctcttgtggttgcatggaagcactattttcaccagcactatccccagttgcacgtcgtgcttttcacaagtttcccccgagatccacggaccccccaggacccctcctcagttctgaaaaagagcaggcggaggggacggggttggacccgagcgttgggtcccgaacagcttctcagagcttgcgaggccattactgtgggtaaaggctttccaaacgtcggaaagagttcgttaatcaacggccttgtcggtcggaaagtcgtgtccgtgagccgcactccgggacatacccggtatttccagacttattttctgacccccagtgtaaagctgtgtgattgtccagggctcatcttcccctccctgttgcccagacagctgcaggtgcttgccggaatctaccctatagctcagatccaggagccctacactgccgtggggtatctggcttcccgaatccctgtgcaggcactcctgcacctcaggcaccccgaggccgaggaccccagtgctgagcatccatggtgcgcatgggacatctgcgaggcttgggcagagaaaagggggtacaagacagcaaaggccgctagaaacgacgtgtatcgtgcagcaaactccctgcttagactggccgtcgatgggagactttctctgtgctttcaccccccaggttattctgaacaaaagggcacttgggaaagccatcctgagacgaccgaattggtggtcctacaagggagagtcgggcctgcaggtgatgaagaggaagaggaagaggaggaactgagctcaagctgcgaggaggagggggaggaggatcgagacgccgacgaagagggcgaaggagacgaagaaaccccgacttctgctcctggatcttccctcgccggacgaaatccctacgcgttattaggggaagacgaatgttag

SEQ ID NO: 154598 - DNA, 789 bp, Artificial Sequence
  derived and/or modified sequence
atggaacctaccggtccaactcaggaacggtataaagatggagtagtgaccatcggctgcgtcggctttccgaatgttggcaagtctagcctgatcaatgggttggtgggcagaaaggtggtgtcagtgtctcggactccagggcacacgagatacttccaaacatatttcctcaccccctccgtgaaactgtgtgactgtcctggcctcatcttcccttcactactcccgagacaactccaagtcctggcgggaatatatcccatcgcacagatccaggagccttacacagcggtgggatatctggctagtcggattcctgtccaagccctactccatctccgccatcccgaagccgaggaccccagcgcagaacatccttggtgcgcttgggatatctgcgaagcgtgggcggagaaaagaggttacaagactgcaaaagctgctagaaatgatgtgtatagagcggcaaatagcttgttaaggctggccgtggacggacggctctcattgtgctttcacccaccgggatattctgagcagaaaggaacgtgggaaagtcaccctgagacaaccgaacttgtcgttctgcagggtcgagtgggccctgcaggcgacgaagaggaggaagaagaggaggaactttccagcagctgcgaggaggagggcgaagaagaccgggacgcggatgaggagggcgagggtgacgaggagaccccaacaagcgcccctggcagttctctggcgggacgaaacccctacgcacttctcggagaagatgagtgttag

SEQ ID NO: 154599 - DNA, 1824 bp, Artificial Sequence
  derived and/or modified sequence
atgcccagaaagaagcccttcagcgtgaagcagaagaagaagcagctgcaggacaagagagagagaaagagaggcctgcaggacggcctgagaagcagcagcaacagcagaagcggcagcagagagagaagagaggagcagaccgacaccagcgacggcgagagcgtgacccaccacatcagaagactgaaccagcagcccagccagggcctgggccccagaggctacgaccccaacagatacagactgcacttcgagagagacagcagagaggaggtggagagaagaaagagagccgccagagagcaggtgctgcagcccgtgagcgccgagctgctggagctggacatcagagaggtgtaccagcccggcagcgtgctggacttccccagaagacccccctggagctacgagatgagcaaggagcagctgatgagccaggaggagagaagcttccaggactacctgggcaagatccacggcgcctacagcagcgagaagctgagctacttcgagcacaacctggagacctggagacagctgtggagagtgctggagatgagcgacatcgtgctgctgatcaccgacatcagacaccccgtggtgaacttcccccccgccctgtacgagtacgtgaccggcgagctgggcctggccctggtgctggtgctgaacaaggtggacctggccccccccgccctggtggtggcctggaagcactacttccaccagcactacccccagctgcacgtggtgctgttcaccagcttccccagagaccccagaaccccccaggaccccagcagcgtgctgaagaagagcagaagaagaggcagaggctggaccagagccctgggccccgagcagctgctgagagcctgcgaggccatcaccgtgggcaaggtggacctgagcagctggagagagaagatcgccagagacgtggccggcgccacctggggcaacggcagcggcgaggaggaggaggaggaggacggccccgccgtgctggtggagcagcagaccgacagcgccatggagcccaccggccccacccaggagagatacaaggacggcgtggtgaccatcggctgcgtgggcttccccaacgtgggcaagagcagcctgatcaacggcctggtgggcagaaaggtggtgagcgtgagcagaacccccggccacaccagatacttccagacctacttcctgacccccagcgtgaagctgtgcgactgccccggcctgatcttccccagcctgctgcccagacagctgcaggtgctggccggcatctaccccatcgcccagatccaggagccctacaccgccgtgggctacctggccagcagaatccccgtgcaggccctgctgcacctgagacaccccgaggccgaggaccccagcgccgagcacccctggtgcgcctgggacatctgcgaggcctgggccgagaagagaggctacaagaccgccaaggccgccagaaacgacgtgtacagagccgccaacagcctgctgagactggccgtggacggcagactgagcctgtgcttccacccccccggctacagcgagcagaagggcacctgggagagccaccccgagaccaccgagctggtggtgctgcagggcagagtgggccccgccggcgacgaggaggaggaggaggaggaggagctgagcagcagctgcgaggaggagggcgaggaggacagagacgccgacgaggagggcgagggcgacgaggagacccccaccagcgcccccggcagcagcctggccggcagaaacccctacgccctgctgggcgaggacgagtgctag

SEQ ID NO: 154600 - DNA, 1224 bp, Artificial Sequence
  derived and/or modified sequence
gtggtgaacttcccccccgccctgtacgagtacgtgaccggcgagctgggcctggccctggtgctggtgctgaacaaggtggacctggccccccccgccctggtggtggcctggaagcactacttccaccagcactacccccagctgcacgtggtgctgttcaccagcttccccagagaccccagaaccccccaggaccccagcagcgtgctgaagaagagcagaagaagaggcagaggctggaccagagccctgggccccgagcagctgctgagagcctgcgaggccatcaccgtgggcaaggtggacctgagcagctggagagagaagatcgccagagacgtggccggcgccacctggggcaacggcagcggcgaggaggaggaggaggaggacggccccgccgtgctggtggagcagcagaccgacagcgccatggagcccaccggccccacccaggagagatacaaggacggcgtggtgaccatcggctgcgtgggcttccccaacgtgggcaagagcagcctgatcaacggcctggtgggcagaaaggtggtgagcgtgagcagaacccccggccacaccagatacttccagacctacttcctgacccccagcgtgaagctgtgcgactgccccggcctgatcttccccagcctgctgcccagacagctgcaggtgctggccggcatctaccccatcgcccagatccaggagccctacaccgccgtgggctacctggccagcagaatccccgtgcaggccctgctgcacctgagacaccccgaggccgaggaccccagcgccgagcacccctggtgcgcctgggacatctgcgaggcctgggccgagaagagaggctacaagaccgccaaggccgccagaaacgacgtgtacagagccgccaacagcctgctgagactggccgtggacggcagactgagcctgtgcttccacccccccggctacagcgagcagaagggcacctgggagagccaccccgagaccaccgagctggtggtgctgcagggcagagtgggccccgccggcgacgaggaggaggaggaggaggaggagctgagcagcagctgcgaggaggagggcgaggaggacagagacgccgacgaggagggcgagggcgacgaggagacccccaccagcgcccccggcagcagcctggccggcagaaacccctacgccctgctgggcgaggacgagtgctag

SEQ ID NO: 154601 - DNA, 795 bp, Artificial Sequence
  derived and/or modified sequence
atgggcgagagagtgctgtggcccctgagagccggccagcactggagacacagacccctgcccgccggcctgcaggacggcctgagaagcagcagcaacagcagaagcggcagcagagagagaagagaggagcagaccgacaccagcgacggcgagagcgtgacccaccacatcagaagactgaaccagcagcccagccagggcctgggccccagaggctacgaccccaacagatacagactgcacttcgagagagacagcagagaggaggtggagagaagaaagagagccgccagagagcaggtgctgcagcccgtgagcgccgagctgctggagctggacatcagagaggtgtaccagcccggcagcgtgctggacttccccagaagacccccctggagctacgagatgagcaaggagcagctgatgagccaggaggagagaagcttccaggactacctgggcaagatccacggcgcctacagcagcgagaagctgagctacttcgagcacaacctggagacctggagacagctgtggagagtgctggagatgagcgacatcgtgctgctgatcaccgacatcagacaccccgtggtgaacttcccccccgccctgtacgagtacgtgaccggcgagctgggcctggccctggtgctggtgctgaacaaggtggacctggccccccccgccctggtggtggcctggaagcactacttccaccagcactacccccagctgcacgtggtgctgttcaccagcttccccagagaccccagaaccccccaggactag

SEQ ID NO: 154602 - DNA, 1290 bp, Artificial Sequence
  derived and/or modified sequence
atggaggccgccgtggtgctggagatgagcgacatcgtgctgctgatcaccgacatcagacaccccgtggtgaacttcccccccgccctgtacgagtacgtgaccggcgagctgggcctggccctggtgctggtgctgaacaaggtggacctggccccccccgccctggtggtggcctggaagcactacttccaccagcactacccccagctgcacgtggtgctgttcaccagcttccccagagaccccagaaccccccaggaccccagcagcgtgctgaagaagagcagaagaagaggcagaggctggaccagagccctgggccccgagcagctgctgagagcctgcgaggccatcaccgtgggcaaggtggacctgagcagctggagagagaagatcgccagagacgtggccggcgccacctggggcaacggcagcggcgaggaggaggaggaggaggacggccccgccgtgctggtggagcagcagaccgacagcgccatggagcccaccggccccacccaggagagatacaaggacggcgtggtgaccatcggctgcgtgggcttccccaacgtgggcaagagcagcctgatcaacggcctggtgggcagaaaggtggtgagcgtgagcagaacccccggccacaccagatacttccagacctacttcctgacccccagcgtgaagctgtgcgactgccccggcctgatcttccccagcctgctgcccagacagctgcaggtgctggccggcatctaccccatcgcccagatccaggagccctacaccgccgtgggctacctggccagcagaatccccgtgcaggccctgctgcacctgagacaccccgaggccgaggaccccagcgccgagcacccctggtgcgcctgggacatctgcgaggcctgggccgagaagagaggctacaagaccgccaaggccgccagaaacgacgtgtacagagccgccaacagcctgctgagactggccgtggacggcagactgagcctgtgcttccacccccccggctacagcgagcagaagggcacctgggagagccaccccgagaccaccgagctggtggtgctgcagggcagagtgggccccgccggcgacgaggaggaggaggaggaggaggagctgagcagcagctgcgaggaggagggcgaggaggacagagacgccgacgaggagggcgagggcgacgaggagacccccaccagcgcccccggcagcagcctggccggcagaaacccctacgccctgctgggcgaggacgagtgctag

SEQ ID NO: 154603 - DNA, 1215 bp, Artificial Sequence
  derived and/or modified sequence
atgagcaaggagcagctgatgagccaggaggagagaagcttccaggactacctgggcaagatccacggcgcctacagcagcgagaagctgagctacttcgagcacaacctggagacctggagacagctgtggagagtgctggagatgagcgacatcgtgctgctgatcaccgacatcagacaccccgtggtgaacttcccccccgccctgtacgagtacgtgaccggcgagctgggcctggccctggtgctggtgctgaacaaggtggacctggccccccccgccctggtggtggcctggaagcactacttccaccagcactacccccagctgcacgtggtgctgttcaccagcttccccagagaccccagaaccccccaggaccccagcagcgtgctgaagaagagcagaagaagaggcagaggctggaccagagccctgggccccgagcagctgctgagagcctgcgaggccatcaccgtgggcaagggcttccccaacgtgggcaagagcagcctgatcaacggcctggtgggcagaaaggtggtgagcgtgagcagaacccccggccacaccagatacttccagacctacttcctgacccccagcgtgaagctgtgcgactgccccggcctgatcttccccagcctgctgcccagacagctgcaggtgctggccggcatctaccccatcgcccagatccaggagccctacaccgccgtgggctacctggccagcagaatccccgtgcaggccctgctgcacctgagacaccccgaggccgaggaccccagcgccgagcacccctggtgcgcctgggacatctgcgaggcctgggccgagaagagaggctacaagaccgccaaggccgccagaaacgacgtgtacagagccgccaacagcctgctgagactggccgtggacggcagactgagcctgtgcttccacccccccggctacagcgagcagaagggcacctgggagagccaccccgagaccaccgagctggtggtgctgcagggcagagtgggccccgccggcgacgaggaggaggaggaggaggaggagctgagcagcagctgcgaggaggagggcgaggaggacagagacgccgacgaggagggcgagggcgacgaggagacccccaccagcgcccccggcagcagcctggccggcagaaacccctacgccctgctgggcgaggacgagtgctag

SEQ ID NO: 154604 - DNA, 201 bp, Artificial Sequence
  derived and/or modified sequence
gtggtgaacttcccccccgccctgtacgagtacgtgaccggcgagctgggcctggccctggtgctggtgctgaacaaggtggacctggccccccccgccctggtggtggcctggaagcactacttccaccagcactacccccagctgcacgtggtgctgttcaccagcttccccagagaccccagaaccccccaggactag

SEQ ID NO: 154605 - DNA, 789 bp, Artificial Sequence
  derived and/or modified sequence
atggagcccaccggccccacccaggagagatacaaggacggcgtggtgaccatcggctgcgtgggcttccccaacgtgggcaagagcagcctgatcaacggcctggtgggcagaaaggtggtgagcgtgagcagaacccccggccacaccagatacttccagacctacttcctgacccccagcgtgaagctgtgcgactgccccggcctgatcttccccagcctgctgcccagacagctgcaggtgctggccggcatctaccccatcgcccagatccaggagccctacaccgccgtgggctacctggccagcagaatccccgtgcaggccctgctgcacctgagacaccccgaggccgaggaccccagcgccgagcacccctggtgcgcctgggacatctgcgaggcctgggccgagaagagaggctacaagaccgccaaggccgccagaaacgacgtgtacagagccgccaacagcctgctgagactggccgtggacggcagactgagcctgtgcttccacccccccggctacagcgagcagaagggcacctgggagagccaccccgagaccaccgagctggtggtgctgcagggcagagtgggccccgccggcgacgaggaggaggaggaggaggaggagctgagcagcagctgcgaggaggagggcgaggaggacagagacgccgacgaggagggcgagggcgacgaggagacccccaccagcgcccccggcagcagcctggccggcagaaacccctacgccctgctgggcgaggacgagtgctag

SEQ ID NO: 154606 - protein, 349 aa, Artificial Sequence
  derived and/or modified sequence
MASKKVCIVGSGNWGSAIAKIVGGNAAQLAQFDPRVTMWVFEEDIGGKKLTEIINTQHENVKYLPGHKLPPNVVAVPDVVQAAEDADILIFVVPHQFIGKICDQLKGHLKANATGISLIKGVDEGPNGLKLISEVIGERLGIPMSVLMGANIASEVADEKFCETTIGCKDPAQGQLLKELMQTPNFRITVVQEVDTVEICGALKNVVAVGAGFCDGLGFGDNTKAAVIRLGLMEMIAFAKLFCSGPVSSATFLESCGVADLITTCYGGRNRKVAEAFARTGKSIEQLEKELLNGQKLQGPETARELYSILQHKGLVDKFPLFMAVYKVCYEGQPVGEFIHCLQNHPEHM

SEQ ID NO: 154607 - protein, 326 aa, Artificial Sequence
  derived and/or modified sequence
MQTPNFRITVVQEVDTVEICGALKVRGAQRQLWGEEKAPKEVWLSSARLQVLQALTIEQWFPFPTMSHAYRRSCRSKARAIQADYSSSDRGPPCSCPILAPCGTPHPLAPGGQGDKEMPRLMGDKTSLTPRQTNGQNYGSWTAVDGLYNGMVRWEDQLERRVVFRKCPRGGSMGQGLRKGVQQGGKPRGGSRLLKGHTLYLSSAVGVTADEMSMRGLHMGPIGGGLFTYDLHSFKNVVAVGAGFCDGLGFGDNTKAAVIRLGLMEMIAFAKLFCSGPVSSATFLESCGVADLITTCYGGRNRKVAEAFARTGKVGPGRRENRGAAL

SEQ ID NO: 154608 - DNA, 1050 bp, Artificial Sequence
  derived and/or modified sequence
atggcaagtaaaaaggtctgtatcgttggaagcggaaattgggggtccgcaattgctaaaattgtgggcggtaatgccgcacaactggcccagttcgacccaagggtaacgatgtgggtgttcgaggaagacattggtgggaaaaagctcacagaaatcatcaatacacaacatgaaaacgtaaaatatttacccggtcacaagctgccgcccaacgtcgtggctgtacccgatgtggttcaggccgcagaagacgccgatattctaatttttgtggtcccgcatcagtttattggaaagatctgcgatcagctaaaaggacacctgaaggcaaacgctaccggcatctccctgattaaaggagtcgatgagggtcccaatgggctaaagctgatatcagaggttatcggcgagagactgggcatccctatgtctgttttgatgggcgccaatatagccagtgaagtcgccgacgagaaattctgtgagactactatcggctgtaaggatccagcccagggacaactcctcaaagagctcatgcagacccccaacttccggattaccgtggtccaggaagtcgatactgtagagatttgcggagcactaaaaaatgtagtggctgttggcgccggattctgtgatggactggggttcggcgacaacacaaaagccgctgtgattagattggggctgatggagatgattgccttcgccaaactgttctgtagcggtcccgtgagctcggctacatttctagagagttgcggtgtggcagatttaatcaccacttgttatggaggccgcaatcgaaaagtggctgaggccttcgcaagaaccggtaagagtattgagcagttggagaaagaattactgaacggacagaagctccagggccctgagactgcaagggagttgtacagcatcctgcagcataaaggccttgttgataagtttcctctgtttatggcagtgtataaggtttgctacgagggccaacccgtaggagaattcatccactgtcttcagaatcaccccgagcacatgtag

SEQ ID NO: 154609 - DNA, 3082 bp, Artificial Sequence
  derived and/or modified sequence
agaaaaagctgggcctagtctctgccccattcctgttccacacctgtctgtacccctgtctctcctttccctggctctgccagactctctatctccctgggcgccagcctccccacccacccctggagggcggggcttggctgcacccacgtgtggtggagttaaatgctcctagccggcagaggagctagggagtgtggcactgagccggctcaggcagagacgcggcaccatggctagcaagaaagtctgcattgtaggctccgggaactggggctcagccatcgccaagatcgtgggtggcaatgcagcccagctggcacagtttgacccacgggtgaccatgtgggtatttgaggaagacattggaggcaaaaagctgactgagatcatcaacacgcagcatgagaatgtcaaatacctgccagggcacaagttgcccccaaatgtggtggctgtcccagatgtggtccaggctgcagaggatgctgacatcctgatctttgtggtgccccatcagttcatcggcaagatctgtgaccagctcaagggccatctgaaggcaaacgccactggcatatctcttattaagggggtagacgagggccccaatgggctgaagctcatctcggaagtgattggggagcgcctcggcatccccatgagtgtgctgatgggggccaacattgccagcgaggtggctgatgagaagttctgtgagacaaccattggctgcaaggacccggcccagggacaactcctgaaagagctgatgcagacaccaaacttccgtatcacagtggtgcaagaggtggacacagtagagatctgtggagccttaaagaatgtagtggccgtgggggctggcttctgtgatggcctgggctttggcgacaacaccaaggcggcagtgatccggctgggactcatggagatgatagccttcgccaagctcttctgcagtggccctgtgtcctctgccaccttcttggagagctgtggtgttgctgacctgatcactacctgctatggagggcggaaccggaaagtggctgaggcctttgcgcgtacaggaaagtccattgagcagctggagaaagagttgctgaatgggcagaaactgcaggggcccgagacagcccgggagctatacagcatcctccagcacaagggcctggtagacaagtttcccttgttcatggctgtgtacaaggtgtgctacgagggccagccagtgggtgaattcatccactgcctgcagaatcatccagaacatatgtgagtggggccagggcccaggccaggccgcttttttaccccagtggagaccagcagaagcctggggtacctagtcaccaggatctccaggactcccagggagcagagtcttctcatcttttcactggaggacaggaggctatggggcccagctacgcacctggagatcctgaactgtcaagccactggcagcctcatgccaccacatttgccagaaatgcagttgccctgtccctctccagatgtggggctttctccatatcctctgggaggggtggaatcaagccccagtgctgcctgcttggtggcgggggtgatgtatgtggagaagggttgggggagaggccggtagggcaggggctgctagtggctgtctcacatacaccagtaatcctgttaaagggctgaagaagtatcttagccacaggagcgatgaggcaaggattgtcagggaggggtctgggcttctgagctgatgcaggccccaaggacccctttgctgacctctgccaggacccacacagcttcgatggatctcagtgtttgttaacaaaatacaaagatctcaaacaaaccccttttagcttctcctagcaacatctgtgtcctcagaaacctctggttctcccccttccccctcccccaggctgccctggcacccaaattgctgccatgctggcatctgtagctcggtggcttgacattctccccagggacttcccggttcctagttctttgccagctcctccccactctgtgcgacctttccaagccttccctcaccctccccgccagcaccctctttggggagcaggaacttaatctgctgacagagctacacctttcataacaggctcagatcactcagctccctgtgacctttgtattcacccaggcttccttctcagtagctctagctgggggaggtgtcagctgggcccctcctgtgctatctccccagaggacatccctgactccacccctttcttcctcccaaactctgcacctcttcctcagctgctccagaccggccagggtaaccagctaaccatgcctggcatctggaagccagcaggccagagggtggcccaaaggctgatgaacggtagggaagggtgagcagattcctatgttggtgggcaccaatattccaagggcagctctctttgctgaatgagggccttctcgtgaggtactgacaacaccagcaactcgagagctgggaaactcaaggaggaggaagaaaatcaaaaccaccctactccctggggtgaggaaagaacaggaggggaggaggaggagtgtgctctgcacttgccttgctccaggatggggtggcagcagaggaatgtcacaggtcagcagcctaggcctccagctataaatagtccggagggcccgagaggctcccgcccgtccagcagggctgtcagcttcctgtgtggcagcacctggcacactggctctggccagcattatgctaaaaccctgttactctccaatgaaccagggaggcgggctcctctctgcgcctatcccttgagaattctgtcttaccagtgaagggtggggctgcccagatcaggcagcaggagtgaggggcacagtcaccccaggccttgctgagcccaggtctgggtactgagtgtccagagctgcctccccaggaggttaaggtgggggcaaaggggaagcttcaagcactttgcctacttttgttcactccccagtgcactgtgactcaggccttcccatcaggcctatttgtctacccaataaagcgtgttttttccagaaacaagaa

SEQ ID NO: 154610 - DNA, 1050 bp, Artificial Sequence
  derived and/or modified sequence
atggccagcaagaaggtgtgcatcgtgggcagcggcaactggggcagcgccatcgccaagatcgtgggcggcaatgctgcccagctggcccagtttgacccccgggtgaccatgtgggtgtttgaagaagatattggaggcaagaagctgacagagatcatcaacacccagcatgaaaatgtgaagtacctgcccggccacaagctgccccccaacgtggtggccgtgcctgatgtggtgcaggccgcagaagatgctgacatcctgatctttgtggtgccccaccagttcatcggcaagatctgtgaccagctgaagggccacctgaaggccaatgccaccggcatcagcctcatcaagggcgtggatgagggccccaacggcctgaagctgatcagcgaggtgattggagagcggctgggcatccccatgtctgtgctgatgggcgccaacatcgccagcgaggtggctgatgagaagttctgtgagaccaccatcggctgcaaggaccctgcccagggccagctgctgaaggagctgatgcagacccccaacttccgcatcaccgtggtgcaggaggtggacacagtggagatctgtggggccctgaagaatgtggtggccgtgggcgccggcttctgtgatggcctgggctttggagacaacaccaaggccgccgtcatccggctgggcctgatggagatgattgcctttgccaagctgttctgcagcggccctgtgtcctctgccaccttcctggagagctgtggggtggccgacctgatcaccacctgctacggcggcaggaacaggaaggtggccgaggcctttgccaggacaggcaagagcattgagcagctggagaaggagctgctgaatggccagaagctgcagggccctgagacagcccgggagctgtacagcatcctgcagcacaagggcctggtggacaagttccccctcttcatggctgtgtacaaggtgtgctatgagggccagcctgtgggggagttcatccactgcctgcagaaccaccctgagcacatgtag

SEQ ID NO: 154611 - DNA, 1050 bp, Artificial Sequence
  derived and/or modified sequence
atggccagcaagaaggtgtgcatcgtgggcagcggcaactggggctcggccattgctaagattgtaggcgggaacgccgcgcaactggcacaattcgatcccagggtcactatgtgggtcttcgaggaggacattggtggaaagaagttgactgagataatcaatactcagcacgagaacgtgaaatacctgccaggccacaagctgcctccaaatgtcgttgccgtgcctgacgttgtccaagcggcagaagacgctgatatactaatctttgtggtaccccaccagttcatcggcaagatttgcgaccagcttaagggccatctgaaggcaaatgctactggtattagtttaataaagggcgtggatgagggtcctaacggcctcaaactgatatctgaggttataggagaaaggctgggcatccctatgagcgtcctcatgggggccaacatcgcatctgaagttgctgatgagaaattctgtgaaaccacaatcgggtgtaaagacccggcgcagggacagctactgaaggaactcatgcagacaccaaattttcgcattacagtggtccaggaagtggataccgttgaaatttgtggcgcccttaagaatgtagtagccgttggcgccggattctgtgacggcctcgggtttggcgataacacgaaggccgccgtgattcggctgggattaatggagatgatagctttcgcgaagctcttttgcagcggaccagtgagctctgccacgttcctggagagctgtggggtggccgatctcatcactacatgctacggagggcgcaatcgtaaggtcgctgaagcgttcgccaggactggcaaaagcattgagcagttggaaaaggaactcctgaacgggcaaaagctgcagggccccgagaccgctcgggagttatatagcatcttacagcataaggggttagtagacaagttccctctgttcatggcagtgtataaggtatgttatgagggccagcccgtgggggagttcatccattgtcttcagaaccatcctgagcatatgtag

SEQ ID NO: 154612 - DNA, 1050 bp, Artificial Sequence
  derived and/or modified sequence
atggcctcaaagaaggtgtgcatcgtgggtagcggaaattggggttctgccattgctaaaattgtgggcggaaacgctgcgcagctcgcccagtttgacccccgagttactatgtgggtgttcgaggaagacataggaggtaaaaaactcaccgaaatcattaatactcagcatgagaatgtaaaatacctgccgggtcacaaattaccccctaacgttgtggccgtgcctgacgtggtgcaggctgcggaggacgccgatattttgatcttcgtggtaccgcaccagtttataggaaagatctgcgaccagctcaaaggccacctcaaggcaaacgcaactggtatctccctgatcaaaggggtggacgagggacccaacggcctaaaacttatttcagaagtcatcggtgagcggcttggaatacccatgtcagtgcttatgggcgcaaacattgcctccgaagtggcggatgaaaaattttgtgagacgaccatcggatgtaaagatccagctcaggggcagttgcttaaagagctcatgcagacacctaattttaggattacagtggtgcaggaagttgacactgtagagatttgcggagccctcaagaacgtggtggctgtcggcgctgggttttgtgacggactcggattcggcgataacaccaaagcagccgtcatcagattgggactgatggaaatgatcgcattcgcaaaactcttttgctcaggcccagtgagttcagctacgtttctggagagctgtggagttgccgatctgatcactacctgctacgggggacgcaatcgtaaggtcgccgaagctttcgccaggaccgggaaatcaatcgaacagctcgagaaggagctgctcaacgggcagaaactgcaaggcccagagaccgctcgggagctttactccattctgcagcataagggactcgtagacaagttccctctgtttatggccgtgtataaagtgtgttatgagggtcaaccagtgggtgagtttattcactgcctccagaatcatcctgagcacatgtag

SEQ ID NO: 154613 - DNA, 1050 bp, Artificial Sequence
  derived and/or modified sequence
atggccagcaagaaggtgtgcatcgtgggcagcggcaactggggcagcgccatcgccaagatcgtgggcggcaacgccgcccagctggcccagttcgaccccagagtgaccatgtgggtgttcgaggaggacatcggcggcaagaagctgaccgagatcatcaacacccagcacgagaacgtgaagtacctgcccggccacaagctgccccccaacgtggtggccgtgcccgacgtggtgcaggccgccgaggacgccgacatcctgatcttcgtggtgccccaccagttcatcggcaagatctgcgaccagctgaagggccacctgaaggccaacgccaccggcatcagcctgatcaagggcgtggacgagggccccaacggcctgaagctgatcagcgaggtgatcggcgagagactgggcatccccatgagcgtgctgatgggcgccaacatcgccagcgaggtggccgacgagaagttctgcgagaccaccatcggctgcaaggaccccgcccagggccagctgctgaaggagctgatgcagacccccaacttcagaatcaccgtggtgcaggaggtggacaccgtggagatctgcggcgccctgaagaacgtggtggccgtgggcgccggcttctgcgacggcctgggcttcggcgacaacaccaaggccgccgtgatcagactgggcctgatggagatgatcgccttcgccaagctgttctgcagcggccccgtgagcagcgccaccttcctggagagctgcggcgtggccgacctgatcaccacctgctacggcggcagaaacagaaaggtggccgaggccttcgccagaaccggcaagagcatcgagcagctggagaaggagctgctgaacggccagaagctgcagggccccgagaccgccagagagctgtacagcatcctgcagcacaagggcctggtggacaagttccccctgttcatggccgtgtacaaggtgtgctacgagggccagcccgtgggcgagttcatccactgcctgcagaaccaccccgagcacatgtag

SEQ ID NO: 154614 - protein, 265 aa, Artificial Sequence
  derived and/or modified sequence
MKPAMETAAEENTEQSQERKGCFECCIKCLGGVPYASLVATILCFSGVALFCGCGHVALAGTVAILEQHFSTNASDHALLSEVIQLMQYVIYGIASFFFLYGIILLAEGFYTTSAVKELHGEFKTTACGRCISGMFVFLTYVLGVAWLGVFGFSAVPVFMFYNIWSTCEVIKSPQTNGTTGVEQICVDIRQYGIIPWNAFPGKICGSALENICNTNEFYMSYHLFIVACAGAGATVIALLIYMMATTYNYAVLKFKSREDCCTKF

SEQ ID NO: 154615 - protein, 179 aa, Artificial Sequence
  derived and/or modified sequence
MQYVIYGIASFFFLYGIILLAEGFYTTSAVKELHGEFKTTACGRCISGMFVFLTYVLGVAWLGVFGFSAVPVFMFYNIWSTCEVIKSPQTNGTTGVEQICVDIRQYGIIPWNAFPGKICGSALENICNTNEFYMSYHLFIVACAGAGATVIALLIYMMATTYNYAVLKFKSREDCCTKF

SEQ ID NO: 154616 - DNA, 798 bp, Artificial Sequence
  derived and/or modified sequence
atgaagcctgctatggagaccgccgcagaagagaacacagaacaatcccaggagagaaagggctgtttcgaatgttgcataaagtgtctgggcggtgtgccgtacgcatcgctcgtggcgaccattctgtgtttcagcggggtggctctgttttgcggttgcgggcatgtagccctggcagggaccgtggcgattctcgagcaacatttcagtaccaatgcgtccgatcacgccctactgagcgaggtgatacagctcatgcagtacgtgatctacggaattgcctcattcttttttctatacggaatcatcttactggctgaaggtttctacaccacctcagcagttaaagaactccacggcgagttcaaaaccacagcatgcggtagatgcatttccggcatgttcgtctttctcacatacgtcctcggcgtcgcttggttgggagtattcgggttcagtgccgtgcccgtgttcatgttctacaatatatggtcaacatgtgaggtgataaagtcacctcagacaaatggaactaccggagtcgagcagatctgcgtggatattaggcagtacggaattataccatggaatgcctttcctgggaagatttgtggctccgccttggagaacatatgtaacaccaatgagttctacatgagttatcatctctttattgttgcttgcgctggcgccggcgccaccgtgattgctctgctgatatacatgatggcaaccacctataactatgcggttttgaaatttaaatctcgagaggactgttgtacaaagttttag

SEQ ID NO: 154617 - DNA, 324 bp, Artificial Sequence
  derived and/or modified sequence
atgaagcctgctatggagactgccgcggaagaaaacaccgaacaatcgcaggaacgcaaaggatgttttgagtgttgtatcaagtgtcttggtggggtgccgtacgcctcactggtggcgactatcttgtgttttagcggcgtggctctgttttgtggatgcggccacgtcgctctggcaggtactgtggcaatcttggagcagcatttctccactaacgctagtgatcacgcactcctgtccgaagtcatccaactaatgcagtacgttatttacggaattgcttcatttttcttcctatatggtatcatactacttgcctag

SEQ ID NO: 154618 - DNA, 1830 bp, Artificial Sequence
  derived and/or modified sequence
ggctagaagaaatgaggtggggagaaagagagagagagagagagatcgagattgagatcttaagaaagagagcaaggaggaagagcccggtggggagcaggtccttctcccccacccccctacccccaactcccactggagccgcattgagactgtaggcaccaccgggcgccgaatggctgttttctaactgggatcctcggtgacgtatggctgcctgccccttggcagctgtctttatggaccagtaggcagagcgaaattgacgctgacaagacttttgcatcttggaagggactgtaatctactgtagtgaagaacagagcctctcaatcagacgggtgtaaataagagacggaggggagtccaaaagaaaaggaagaggaggaaaaacaagtgtgtgttggggggaacagggggaaaagcatttttggtggatggtatgaagccagccatggaaactgcagccgaggaaaatactgaacaaagccaagagagaaaaggctgctttgaatgctgcatcaagtgtctgggaggagtcccctacgcctccctggtggccaccatcctctgcttctccggggtggccttattctgcggctgtgggcatgtggctctcgcaggcaccgtggcgattcttgagcaacacttctccaccaacgccagtgaccatgccttgctgagcgaggtgatacaactgatgcagtatgtcatctatggaattgcgtcctttttcttcttgtatgggatcattctgttggcagaaggcttttacaccacaagtgcagtgaaagaactgcacggtgagtttaaaacaaccgcttgtggccgatgcatcagtggaatgttcgttttcctcacctatgtgcttggagtggcctggctgggtgtgtttggtttctcagcggtgcccgtgtttatgttctacaacatatggtcaacttgtgaagtcatcaagtcaccgcagaccaacgggaccacgggtgtggagcagatctgtgtggatatccgacaatacggtatcattccttggaatgctttccccggaaaaatatgtggctctgccctggagaacatctgcaacacaaacgagttctacatgtcctatcacctgttcattgtggcctgtgcaggagctggtgccaccgtcattgccctgctgatctacatgatggctactacatataactatgcggttttgaagtttaagagtcgggaagattgctgcactaaattctaaattgcataaggagttttagagagctatgctctgtagcatgaaatatcactgacactccagactaaagcagagtctaggtttctgcaattttgttacagtaatttgtaaatagctttagtaaactcaccttgcatggtagattaataagatgacttactgtacatgaattacacaataatgagatctggtggctatttccacattttgaaaaggattcagttatttactgacagtggtgagcatcctttttaaaataatgttctcatacttaaacattagagagcagtatctttaaatgaattattaacactttggaatacttacattttctgttatttttgattgcctgataaccagtttcaatgatgaaaatgaaaacaagtgctgaagatgaaatggaagagaaccgttttaatctggattttgttttgtcacacctggaaaatactttgcaaatatgttctaaattgaaaacaatttttttatgatcacatggttcactaccaaatgaccctcaaataagccagatgaaaatttgaagaaaaaggtcacccagttctctggaaaaaaaaaaaaaaaaaaaaaaaaaa

SEQ ID NO: 154619 - DNA, 1033 bp, Artificial Sequence
  derived and/or modified sequence
gctcaggtggcgcctcctcggccacctctgcgacgaagccgggacgctggaggtgggaggggcgcggcgcaggtgtccggaacgcccaggctgctttgaatgctgcatcaagtgtctgggaggagtcccctacgcctccctggtggccaccatcctctgcttctccggggtggccttattctgcggctgtgggcatgtggctctcgcaggcaccgtggcgattcttgagcaacacttctccaccaacgccagtgaccatgccttgctgagcgaggtgatacaactgatgcagtatgtcatctatggaattgcgtcctttttcttcttgtatgggatcattctgttggcagaaggcttttacaccacaagtgcagtgaaagaactgcacggtgagtttaaaacaaccgcttgtggccgatgcatcagtggaatgttcgttttcctcacctatgtgcttggagtggcctggctgggtgtgtttggtttctcagcggtgcccgtgtttatgttctacaacatatggtcaacttgtgaagtcatcaagtcaccgcagaccaacgggaccacgggtgtggagcagatctgtgtggatatccgacaatacggtatcattccttggaatgctttccccggaaaaatatgtggctctgccctggagaacatctgcaacacaaacgagttctacatgtcctatcacctgttcattgtggcctgtgcaggagctggtgccaccgtcattgccctgctgatctacatgatggctactacatataactatgcggttttgaagtttaagagtcgggaagattgctgcactaaattctaaattgcataaggagttttagagagctatgctctgtagcatgaaatatcactgacactccagactaaagcagagtctaggtttctgcaattttgttacagtaatttgtaaatagctttagtaaactcaccttgcatggtagattaataagatgacttactgtacatgaattacacaataatgagatctggtggctatttccacattttg

SEQ ID NO: 154620 - DNA, 678 bp, Artificial Sequence
  derived and/or modified sequence
gaaagagagagagagagagagatcgagattgagatcttaagaaagagagcaaggaggaagagcccgactgtaggcaccaccgggcgccgaatggctgttttctaactgggatcctcggtgacgtatggctgcctgccccttggcagctgtctttatggaccagtaggcagagcgaaattgacgctgacaagacttttgcatcttggaagggactgtaatctactgtagtgaagaacagagcctctcaatcagacgggtgtaaataagagacggaggggagtccaaaagaaaaggaagaggaggaaaaacaagtgtgtgttggggggaacagggggaaaagcatttttggtggatggtatgaagccagccatggaaactgcagccgaggaaaatactgaacaaagccaagagagaaaaggctgctttgaatgctgcatcaagtgtctgggaggagtcccctacgcctccctggtggccaccatcctctgcttctccggggtggccttattctgcggctgtgggcatgtggctctcgcaggcaccgtggcgattcttgagcaacacttctccaccaacgccagtgaccatgccttgctgagcgaggtgatacaactgatgcagtatgtcatctatggaattgcgtcctttttcttcttgtatgggatcattctgttggca

SEQ ID NO: 154621 - DNA, 798 bp, Artificial Sequence
  derived and/or modified sequence
atgaagccagccatggagacagctgctgaagaaaatacagagcagagccaggagaggaagggctgctttgagtgctgcatcaagtgcctgggcggcgtgccctatgccagcctggtggccaccatcctgtgcttcagcggcgtggccctcttctgtggctgcggccacgtggccctggccggcaccgtggccatcctggagcagcacttcagcaccaatgccagtgaccacgccctgctgtctgaggtgatccagctgatgcagtatgtgatctacggcatcgccagcttcttcttcctgtatggcatcatcctgctggccgagggcttctacaccaccagcgctgtgaaggagctgcacggggagttcaagaccacagcctgtggccgctgcatcagcggcatgtttgtgttcctgacctacgtgctgggcgtggcctggctgggcgtgtttggcttctctgctgtgcctgtgttcatgttctacaacatctggagcacctgtgaggtgatcaagagcccccagaccaacggcaccaccggggtggagcagatctgtgtggacatccggcagtatggcatcatcccctggaatgccttccctgggaagatctgtggcagcgccctggagaacatctgcaacaccaatgagttctacatgagctaccacctgttcatcgtggcctgtgccggggccggggccaccgtgattgccctgctgatctacatgatggccaccacctacaactatgctgtgctgaagttcaagagccgggaggactgctgcaccaagttctag

SEQ ID NO: 154622 - DNA, 324 bp, Artificial Sequence
  derived and/or modified sequence
atgaagccagccatggagacagctgctgaagaaaatacagagcagagccaggagaggaagggctgctttgagtgctgcatcaagtgcctgggcggcgtgccctatgccagcctggtggccaccatcctgtgcttcagcggcgtggccctcttctgtggctgcggccacgtggccctggccggcaccgtggccatcctggagcagcacttcagcaccaatgccagtgaccacgccctgctgtctgaggtgatccagctgatgcagtatgtgatctacggcatcgccagcttcttcttcctgtatggcatcatcctgctggcctag

SEQ ID NO: 154623 - DNA, 798 bp, Artificial Sequence
  derived and/or modified sequence
atgaagcccgccatggagaccgccgccgaggagaacaccgagcagagccaggagcgtaaaggatgtttcgagtgttgtattaaatgtctggggggggtgccttacgcttccctcgtggcaactattctgtgcttctctggagtggcgcttttctgcgggtgcggccatgttgccttggctggcacggtagccatccttgaacagcacttttctaccaacgcatcagatcacgctttgctctcagaagtgatacagctaatgcagtacgttatctatgggattgcctccttcttttttctgtacggtattatccttctcgcagaggggttttatactacttccgcagtgaaagaattgcacggagaatttaaaactacagcctgcggtcgatgcatcagtggaatgtttgtctttctgacgtacgtgctcggggttgcttggctgggtgtgtttggctttagtgctgtgccggtgttcatgttctacaacatctggtcaacctgtgaggtcattaaatcaccacaaacaaatggcaccaccggtgtggaacagatctgtgtcgatattagacagtacggaatcattccctggaacgccttccctggtaaaatctgcggctctgccctggagaatatatgcaacaccaatgagttttacatgagttatcacctgttcattgtggcttgtgcaggagccggagctacagtgatagcattgctgatttatatgatggctactacgtacaattatgcggttcttaaattcaaatcccgggaggactgctgcactaaattctag

SEQ ID NO: 154624 - DNA, 324 bp, Artificial Sequence
  derived and/or modified sequence
atgaagcccgccatggagaccgccgccgaggagaacaccgagcagagccaagagagaaaaggatgtttcgagtgttgtatcaaatgcctcgggggagtcccatacgcctcgttggtcgccacgattctttgcttttccggcgtggcactcttctgtggctgtgggcacgttgccctagccggaacagtggccatcttagagcagcatttttctaccaatgccagcgatcacgctctcctgtccgaggtgatccagctgatgcagtatgttatctacggaatcgcaagcttcttctttctctatggcattatcctactcgcttag

SEQ ID NO: 154625 - DNA, 798 bp, Artificial Sequence
  derived and/or modified sequence
atgaaacccgctatggagactgcagcggaagaaaatacagagcaatcgcaggaaaggaagggctgctttgagtgttgtattaaatgcttaggaggtgtgccatatgcctcactcgttgcaaccattttatgttttagcggcgtagccctcttctgcggttgcggccatgtcgcactcgccggtactgtggctatcctagagcagcacttttcgactaacgcgtccgatcacgcgcttctgtctgaggtgatccagctgatgcaatatgtaatatacggcattgcctccttcttcttcctgtacggcataattttactggctgagggcttttataccacatccgctgtcaaggaacttcacggggagtttaaaacaactgcgtgcggaaggtgtatctctgggatgttcgtcttcctcacctacgtgttgggagtggcatggcttggtgtgttcggttttagcgctgtgccagtgttcatgttttataacatttggtcgacatgtgaagtgattaagagtccccagacaaacgggaccactggggtggaacagatatgtgtggatatcaggcagtatgggattatcccatggaatgcctttcctggcaagatctgtggtagcgcacttgagaatatctgcaatacaaacgaattttatatgagttaccatctctttatagtcgcttgcgccggagccggagcaactgttatagcgttactcatctacatgatggcaaccacatataattacgccgtgctgaaatttaagtcaagggaagattgttgtaccaaattttag

SEQ ID NO: 154626 - DNA, 324 bp, Artificial Sequence
  derived and/or modified sequence
atgaagcccgcaatggagaccgccgctgaggagaataccgagcagtcgcaggaacggaaaggatgctttgagtgctgcatcaagtgtctcggtggcgtaccatatgcctcccttgtcgctaccatcctgtgcttttccggtgtcgctctcttttgcggatgtggacacgtagccctcgccggtaccgtggcgattctggagcagcacttctcgactaacgcctccgatcacgccttgctatctgaggttatccagctgatgcagtatgtgatctacggaatcgcctcctttttcttcctctacggcatcattctgctcgcatag

SEQ ID NO: 154627 - DNA, 798 bp, Artificial Sequence
  derived and/or modified sequence
atgaagcccgccatggagaccgccgccgaggagaacaccgagcagagccaggagagaaagggctgcttcgagtgctgcatcaagtgcctgggcggcgtgccctacgccagcctggtggccaccatcctgtgcttcagcggcgtggccctgttctgcggctgcggccacgtggccctggccggcaccgtggccatcctggagcagcacttcagcaccaacgccagcgaccacgccctgctgagcgaggtgatccagctgatgcagtacgtgatctacggcatcgccagcttcttcttcctgtacggcatcatcctgctggccgagggcttctacaccaccagcgccgtgaaggagctgcacggcgagttcaagaccaccgcctgcggcagatgcatcagcggcatgttcgtgttcctgacctacgtgctgggcgtggcctggctgggcgtgttcggcttcagcgccgtgcccgtgttcatgttctacaacatctggagcacctgcgaggtgatcaagagcccccagaccaacggcaccaccggcgtggagcagatctgcgtggacatcagacagtacggcatcatcccctggaacgccttccccggcaagatctgcggcagcgccctggagaacatctgcaacaccaacgagttctacatgagctaccacctgttcatcgtggcctgcgccggcgccggcgccaccgtgatcgccctgctgatctacatgatggccaccacctacaactacgccgtgctgaagttcaagagcagagaggactgctgcaccaagttctag

SEQ ID NO: 154628 - DNA, 324 bp, Artificial Sequence
  derived and/or modified sequence
atgaagcccgccatggagaccgccgccgaggagaacaccgagcagagccaggagagaaagggctgcttcgagtgctgcatcaagtgcctgggcggcgtgccctacgccagcctggtggccaccatcctgtgcttcagcggcgtggccctgttctgcggctgcggccacgtggccctggccggcaccgtggccatcctggagcagcacttcagcaccaacgccagcgaccacgccctgctgagcgaggtgatccagctgatgcagtacgtgatctacggcatcgccagcttcttcttcctgtacggcatcatcctgctggcctag

SEQ ID NO: 154629 - protein, 362 aa, Artificial Sequence
  derived and/or modified sequence
MGNHTWEGCHVDSRVDHLFPPSLYIFVIGVGLPTNCLALWAAYRQVQQRNELGVYLMNLSIADLLYICTLPLWVDYFLHHDNWIHGPGSCKLFGFIFYTNIYISIAFLCCISVDRYLAVAHPLRFARLRRVKTAVAVSSVVWATELGANSAPLFHDELFRDRYNHTFCFEKFPMEGWVAWMNLYRVFVGFLFPWALMLLSYRGILRAVRGSVSTERQEKAKIKRLALSLIAIVLVCFAPYHVLLLSRSAIYLGRPWDCGFEERVFSAYHSSLAFTSLNCVADPILYCLVNEGARSDVAKALHNLLRFLASDKPQEMANASLTLETPLTSKRNSTAKAMTGSWAATPPSQGDQVQLKMLPPAQ

SEQ ID NO: 154630 - DNA, 3045 bp, Artificial Sequence
  derived and/or modified sequence
gctgttctgccccgcgggggcatccgctgggtccccgcgccgttgtcaagaccggggacctggacgcagcggagagaggtgccgccgcccgccccgtccagtcgccgcgcgcaggcactgcagtcagcggtgaactgacttcatcccaatccctcagcccccaccaggaccagtctggagtccctcccctgcccccattgaaatttcccttccgtccccaaacttacctctgatctagaccttactcacctccttcctgtttcctaagactccttcctgccgtccacagaccgagccttttatctttgtccaccctgtgccagacacctccttttccagaaccttctccttactggtgaccttacttatctctgttgctttctggggtcctaggaaatgccagcactcccacccacattgcctgaactttccaacactccctaactgcgctgtgtcctatctcaacactttctcatgtatttcttgtgtcttctagaacattcccccgccattattacttcaatatggctacacatacttcctaattgccctgcaaaccatctccttctcaccattgcccagcgatgctttcgtctcctccataaacactcccggagaccaatttttgtgtcacccccatactccctcgttgacacactgactccatacataacctccttgaaaaacctctttattaatctcaccatcctccagacttccctcctgtcataattccatccctcctccaacttttccctctcaagctctgcccttcccagcccagcccagcctacccaacctcatctcttccctgtagaccacatcccaccatgttcccctgagcctccaaggaaggggctcagggggccccatggcctcccgctccctgtggccccacagcccccgtgggccaggggaagcgccccagaagccgaagtgcccaccatgggcaaccacacgtgggagggctgccacgtggactcgcgcgtggaccacctctttccgccatccctctacatctttgtcatcggcgtggggctgcccaccaactgcctggctctgtgggcggcctaccgccaggtgcaacagcgcaacgagctgggcgtctacctgatgaacctcagcatcgccgacctgctgtacatctgcacgctgccgctgtgggtggactacttcctgcaccacgacaactggatccacggccccgggtcctgcaagctctttgggttcatcttctacaccaatatctacatcagcatcgccttcctgtgctgcatctcggtggaccgctacctggctgtggcccacccactccgcttcgcccgcctgcgccgcgtcaagaccgccgtggccgtgagctccgtggtctgggccacggagctgggcgccaactcggcgcccctgttccatgacgagctcttccgagaccgctacaaccacaccttctgctttgagaagttccccatggaaggctgggtggcctggatgaacctctatcgggtgttcgtgggcttcctcttcccgtgggcgctcatgctgctgtcgtaccggggcatcctgcgggccgtgcggggcagcgtgtccaccgagcgccaggagaaggccaagatcaagcggctggccctcagcctcatcgccatcgtgctggtctgctttgcgccctatcacgtgctcttgctgtcccgcagcgccatctacctgggccgcccctgggactgcggcttcgaggagcgcgtcttttctgcataccacagctcactggctttcaccagcctcaactgtgtggcggaccccatcctctactgcctggtcaacgagggcgcccgcagcgatgtggccaaggccctgcacaacctgctccgctttctggccagcgacaagccccaggagatggccaatgcctcgctcaccctggagaccccactcacctccaagaggaacagcacagccaaagccatgactggcagctgggcggccactccgccctcccagggggaccaggtgcagctgaagatgctgccgccagcacaatgaaccccgagtggcacagaatccccagttttcccctctcatcccacagtcccttctctcctggtctggtgtatgcaaattgtatggaaaaagggctgtgttaatattcataagaatacaagaacttaggaagagtgaggttggtgtgtcactggtcaacctttgtgctcccagatcccatcacagtttggcgattgtggagggcctcctgaaggaggagatgagtaaatatatttttttggagacagggtctcactgtgttgcccaggctggagtgcagtagtgcagtcgtggctcactgcagcctccacctcctgggctctccagcgatcttcccacatcagcctcccgagtagctgggaccacaaatgtgagccaccatgcctggctaatttttgtactttttgtagaaatggagtctcactatgtttcccaggctgatcttgaactcctgggctcaagagatcctcctgccttggcctcccaaagtgctcagattagagatgtgagccgccatgtctggccagataaattaagtcaaacatttggtttccagaaaataaagacaaatagagaaggttagatttttttttttccaacaagtggataaaagtctgtgactcgggggaaagtggaaggagaaatgcagccgatatagagtcattatgtttgcaaagcccctggtcatacaggccagggaacataagaccgcaattctaagtttctagataaacagcgatctccaagtcaagactgaggatgaagagggagaatgtcagaactcaagtgaagggcaatcagggcagactgcctggaggagtgatgccagaaggtttgggaagaaggtgtgggacaagaagaaagggtatttattcattcattcaacagaggtttatgtagggcactgtgctgggtggggctggggacacaacaatgactgaggcagcctggccttgccttcacagggctcaccatacacaagtaaataaaaaatatgtaatgtttggaattgct

SEQ ID NO: 154631 - DNA, 1089 bp, Artificial Sequence
  derived and/or modified sequence
atgggcaaccatacatgggaaggctgccatgtggactcccgcgtggaccaccttttcccaccaagtctgtatatctttgtcatcggcgtcgggctgcccactaactgcctggccctttgggctgcttatcgacaagtccagcagagaaacgaactgggggtttatctgatgaatctgagtatcgccgatttattatatatttgcaccctccccctgtgggtcgactacttcctccaccatgacaactggatccacggtcctgggtcctgtaaattgttcgggtttatcttctatacaaacatttatatctctatcgcatttctatgttgtatttcggtggaccgctacctagctgtggctcatcccctccggttcgctaggctgaggagagtgaaaacggccgtcgccgtgtcttccgtggtgtgggcgactgagttgggcgccaattccgcgcccctctttcatgacgagctatttagagacaggtacaaccatactttttgctttgagaaattcccgatggagggttgggtggcttggatgaacttgtaccgcgtgttcgtggggtttttgtttccttgggctctgatgctgctcagctaccggggaatccttagagctgtcaggggatcggtgagtaccgagcgacaggaaaaggccaaaattaaaagattggcgctgagcctcatcgcgatagtcttagtgtgttttgctccatatcacgtgttattactgtctcgatccgctatctatctaggccgtccctgggactgtggattcgaggaacgagtgttttctgcatatcatagctctctggccttcacatctttgaactgtgtggctgatcctattttgtattgtctggtgaatgaaggcgcccgtagcgacgtcgctaaggctcttcacaacctgcttcgtttcctggcctctgataagccccaggaaatggccaatgcaagtctcaccctggagacgccactcaccagtaagaggaactcaaccgctaaagccatgaccggatcttgggcagcaacccccccatctcagggcgatcaggtacagttgaaaatgctccctccagcccaatag

SEQ ID NO: 154632 - DNA, 1089 bp, Artificial Sequence
  derived and/or modified sequence
atgggcaaccacacctgggagggctgccacgtggacagccgggtggaccacctgttcccccccagcctgtacatcttcgtcatcggcgtgggcctgcccaccaactgcctggccctgtgggccgcctaccggcaggtgcagcagagaaatgagctgggcgtgtacctgatgaacctgagcattgctgacctgctgtacatctgcaccctgcccctgtgggtggactacttcctgcaccacgacaactggattcatggccctggcagctgcaagctgtttggcttcatcttctacaccaacatctacatcagcatcgccttcctgtgctgcatctctgtggaccgctacctggccgtggcccaccccctgcgctttgcccggctgcggcgggtgaagacagctgtggccgtgtcctctgtggtgtgggccacagagctgggcgccaacagcgcccccctcttccatgatgagctgttccgggaccgctacaaccacaccttctgctttgagaagttccccatggagggctgggtggcctggatgaacctgtacagagtgtttgtgggcttcctgttcccctgggccctgatgctgctgagctaccggggcatcctgcgggctgtgcggggctctgtgtccacagagcggcaggagaaggccaagatcaagaggctggccctgagcctcatcgccatcgtgctggtgtgctttgccccctaccacgtgctgctgctgagccgcagcgccatctacctgggccggccctgggactgtggctttgaggagagggtcttcagcgcctaccacagcagcctggccttcaccagcctgaactgtgtggccgaccccatcctgtactgcctggtgaatgaaggagcccggagtgatgtggccaaggccctgcacaacctgctgcgcttcctggccagtgacaagccccaggagatggccaatgccagcctgaccctggagacccccctgaccagcaagaggaacagcacagccaaggccatgacaggctcctgggccgccaccccacccagccagggcgaccaggtgcagctgaagatgctgcccccagcccagtag

SEQ ID NO: 154633 - DNA, 1089 bp, Artificial Sequence
  derived and/or modified sequence
atgggcaaccacacctgggagggctgccacgtggacagccgggtggatcatctgttcccaccctctttgtacatcttcgtgattggtgtgggactgccgacgaattgtctggctctctgggctgcttatcggcaggtccagcagagaaatgaattaggtgtgtacctgatgaatctttccattgcagacttgctttatatttgtaccctgcccctgtgggtcgactattttctgcaccatgataattggattcacggtcctggaagctgcaaactctttggctttatcttctatacaaacatatacatcagcatcgctttcttatgttgcatttcagtagaccgctacttagccgtggcccaccctctccgctttgcccgcctgcgccgtgtcaaaacagctgttgccgtgtctagcgtggtatgggctaccgaactgggggccaactctgcccccctgtttcatgatgagctatttcgggacagatataatcataccttttgttttgagaagttcccaatggaagggtgggtggcttggatgaacctctaccgcgtgtttgtgggcttcctgtttccctgggccctgatgctgctctcttacaggggtattctgcgcgccgtgaggggatcagtcagtacggagcggcaggagaaggctaaaataaaacggctagccctgagtctgattgcaattgttctcgtttgcttcgcgccttaccacgtgctcctcctgtcccgctcagctatctaccttggacggccctgggactgtggattcgaggagagggtgtttagtgcttaccacagtagcttggccttcacctccctcaattgcgttgccgatccgatcctgtattgtctggtaaacgaaggcgcacggagcgacgtcgccaaagctctgcataacttgctgcgtttccttgcttccgacaaaccacaggagatggccaatgcatcactcacgctcgaaacccctcttacgagcaagagaaacagtaccgccaaggccatgaccggctcctgggccgctactcccccaagccagggtgaccaagtacaactcaagatgcttccacctgcccaatag

SEQ ID NO: 154634 - DNA, 1089 bp, Artificial Sequence
  derived and/or modified sequence
atgggcaaccatacctgggagggctgccacgttgactcaagggtggaccatctttttcccccttccttgtatatcttcgtaattggagtagggctgcctaccaactgcttggctctctgggccgcatatcggcaggtgcagcagcgaaacgagctcggcgtttaccttatgaatttgtccatagctgacctactgtatatatgcaccctccccttgtgggtcgattatttcctgcaccatgataactggatccatggtccaggcagttgtaagctgttcgggtttattttttatacaaacatctacatctccatcgcgttcctctgctgcataagtgtcgatcgctatctggctgtggcacatccactccgcttcgccagactgcggagagtaaagaccgcagtggcggtttctagcgttgtgtgggccactgagctcggggctaattcagctcctttgttccacgatgagctctttagggacagatacaaccacactttctgcttcgaaaagttcccaatggagggctgggtcgcctggatgaatctgtatagggttttcgtagggtttctgtttccttgggctctgatgctgctgtcctaccggggaatcctgcgggcagttcggggaagcgtttcaacggagagacaggagaaggcgaaaattaagagattggctctgtcactgattgcgatcgtattggtgtgttttgccccatatcacgtgttgctgctgagtaggtctgctatttatctgggccgtccatgggattgcggcttcgaagagcgggttttctctgcttaccacagtagcctagctttcacatccctgaactgtgtagctgaccctattctgtattgcttggtaaacgagggagcacgttccgacgttgcaaaagcccttcacaaccttctgcgttttttggcctccgataagccgcaggaaatggccaacgcctccctcaccctggaaacccccttgacctccaaacgcaatagcacagccaaggccatgaccgggagctgggcagccactccgccttctcagggggaccaggtccagcttaagatgcttcccccagcccaatag

SEQ ID NO: 154635 - DNA, 1089 bp, Artificial Sequence
  derived and/or modified sequence
atgggcaaccacacctgggagggctgccacgtggacagcagagtggaccacctgttcccccccagcctgtacatcttcgtgatcggcgtgggcctgcccaccaactgcctggccctgtgggccgcctacagacaggtgcagcagagaaacgagctgggcgtgtacctgatgaacctgagcatcgccgacctgctgtacatctgcaccctgcccctgtgggtggactacttcctgcaccacgacaactggatccacggccccggcagctgcaagctgttcggcttcatcttctacaccaacatctacatcagcatcgccttcctgtgctgcatcagcgtggacagatacctggccgtggcccaccccctgagattcgccagactgagaagagtgaagaccgccgtggccgtgagcagcgtggtgtgggccaccgagctgggcgccaacagcgcccccctgttccacgacgagctgttcagagacagatacaaccacaccttctgcttcgagaagttccccatggagggctgggtggcctggatgaacctgtacagagtgttcgtgggcttcctgttcccctgggccctgatgctgctgagctacagaggcatcctgagagccgtgagaggcagcgtgagcaccgagagacaggagaaggccaagatcaagagactggccctgagcctgatcgccatcgtgctggtgtgcttcgccccctaccacgtgctgctgctgagcagaagcgccatctacctgggcagaccctgggactgcggcttcgaggagagagtgttcagcgcctaccacagcagcctggccttcaccagcctgaactgcgtggccgaccccatcctgtactgcctggtgaacgagggcgccagaagcgacgtggccaaggccctgcacaacctgctgagattcctggccagcgacaagccccaggagatggccaacgccagcctgaccctggagacccccctgaccagcaagagaaacagcaccgccaaggccatgaccggcagctgggccgccaccccccccagccagggcgaccaggtgcagctgaagatgctgccccccgcccagtag

SEQ ID NO: 154636 - protein, 340 aa, Artificial Sequence
  derived and/or modified sequence
MNASAASLNDSQVVVVAAEGAAAAATAAGGPDTGEWGPPAAAALGAGGGANGSLELSSQLSAGPPGLLLPAVNPWDVLLCVSGTVIAGENALVVALIASTPALRTPMFVLVGSLATADLLAGCGLILHFVFQYLVPSETVSLLTVGFLVASFAASVSSLLAITVDRYLSLYNALTYYSRRTLLGVHLLLAATWTVSLGLGLLPVLGWNCLAERAACSVVRPLARSHVALLSAAFFMVFGIMLHLYVRICQVVWRHAHQIALQQHCLAPPHLAATRKGVGTLAVVLGTFGASWLPFATYNSMINPIIYAFRNQEIQRALWLLLCGCFQSKVPFRSRSPSEV

SEQ ID NO: 154637 - DNA, 1624 bp, Artificial Sequence
  derived and/or modified sequence
ggtgcaaatccggccgcgatgaacgcgagcgccgcctcgctcaacgactcccaggtggtggtagtggcggccgaaggagcggcggcggcggccacagcagcaggggggccggacacgggcgaatggggaccccctgctgcggcggctctaggagccggcggcggagctaatgggtctctggagctgtcctcgcagctgtcggctgggccaccgggactcctgctgccagcggtgaatccgtgggacgtgctcctgtgcgtgtcggggacagtgatcgctggagaaaacgcgctggtggtggcgctcatcgcgtccactccggcgctgcgcacgcccatgttcgtgctggtaggcagcctggccaccgctgacctgttggcgggctgtggcctcatcttgcactttgtgttccagtacttggtgccctcggagactgtgagtctgctcacggtgggcttcctcgtggcctccttcgccgcctctgtcagcagcctgctggccattacggtggaccgctacctgtccctgtataacgcgctcacctattactcgcgccggaccctgttgggcgtgcacctcctgcttgccgccacttggaccgtgtccctaggcctggggctgctgcccgtgctgggctggaactgcctggcagagcgcgccgcctgcagcgtggtgcgcccgctggcgcgcagccacgtggctctgctctccgccgccttcttcatggtcttcggcatcatgctgcacctgtacgtgcgcatctgccaggtggtctggcgccacgcgcaccagatcgcgctgcagcagcactgcctggcgccaccccatctcgctgccaccagaaagggtgtgggtacactggctgtggtgctgggcactttcggcgccagctggctgcccttcgccatctattgcgtggtgggcagccatgaggacccggcggtctacacttacgccaccctgctgcccgccacctacaactccatgatcaatcccatcatctatgccttccgcaaccaggagatccagcgcgccctgtggctcctgctctgtggctgtttccagtccaaagtgccctttcgttccaggtctcccagcgaggtctgaagggctcgccccgtgtcctctcaccaacaccacaccccaacaagccagcctttggtaagctcggtgcctgctgacgaactctgagatcccaatggtgtgagtctgactttggaaagaaaaagggactaaagagaaatgtaacaaacttacaaggacaaagaggcttgttggcactttacatatacagtgtatacatgtgtacatatatatacaaatatttgtatcttctggaggtgttcaggatgtggagcttcctattctgtgaaaaaccaagaaaaagatatggttgtatactcaaattgtacatcacgtttgtcaaacgaagacattccaatactgcttaattatagcactttatttttagctgctgaactgccaaaacagtgttgccattttcaagggcagggaaaagggagtaaaaggtgtatttttgtcgtatgtgatagaatattttgctgcacatgcatcaacaaattacaacatgttttgtacacgaataaacccattacaagaatgt

SEQ ID NO: 154638 - DNA, 1259 bp, Artificial Sequence
  derived and/or modified sequence
ctctcactcgcggagccggcacagcgacaggcgccccgcgcttgcctcctccccggcccggccgcctcctgcaggcagctgctctgtttgcgcggggagctcagcccggcgccccgcctcggcgcccatgaccagcgacttccagaagtcctgacgccccagggtgcaaatccggccgcgatgaacgcgagcgccgcctcgctcaacgactcccaggtggtggtagtggcggccgaaggagcggcggcggcggccacagcagcaggggggccggacacgggcgaatggggaccccctgctgcggcggctctaggagccggcggcggagctaatgggtctctggagctgtcctcgcagctgtcggctgggccaccgggactcctgctgccagcggtgaatccgtgggacgtgctcctgtgcgtgtcggggacagtgatcgctggagaaaacgcgctggtggtggcgctcatcgcgtccactccggcgctgcgcacgcccatgttcgtgctggtaggcagcctggccaccgctgacctgttggcgggctgtggcctcatcttgcactttgtgttccagtacttggtgccctcggagactgtgagtctgctcacggtgggcttcctcgtggcctccttcgccgcctctgtcagcagcctgctggccattacggtggaccgctacctgtccctgtataacgcgctcacctattactcgcgccggaccctgttgggcgtgcacctcctgcttgccgccacttggaccgtgtccctaggcctggggctgctgcccgtgctgggctggaactgcctggcagagcgcgccgcctgcagcgtggtgcgcccgctggcgcgcagccacgtggctctgctctccgccgccttcttcatggtcttcggcatcatgctgcacctgtacgtgcgcatctgccaggtggtctggcgccacgcgcaccagatcgcgctgcagcagcactgcctggcgccaccccatctcgctgccaccagaaagggtgtgggtacactggctgtggtgctgggcactttcggcgccagctggctgcccttcgccacctacaactccatgatcaatcccatcatctatgccttccgcaaccaggagatccagcgcgccctgtggctcctgctctgtggctgtttccagtccaaagtgccctttcgttccaggtctcccagcgaggtctgaagggctcgccccgtgtcctctcaccaacaccacaccccaacaagccagcctttggt

SEQ ID NO: 154639 - DNA, 1089 bp, Artificial Sequence
  derived and/or modified sequence
atgaatgccagcgccgcatcgcttaatgattcccaggtggtggtcgtcgctgcagagggggcagcagccgcagcaactgcggcaggaggtccagacacaggagagtggggtccaccagctgctgcggcactcggagctggtggaggagccaacggcagcctggaactcagcagccagctttccgccgggcctcccggtctcctgctgcctgcggtcaatccctgggacgttctgctgtgcgtctctgggaccgttatcgctggggagaatgcattggttgtggcgcttatcgcgtctactcctgccctccgaaccccgatgttcgtactggttggatccctggctaccgccgatcttctggctgggtgcggacttatcttgcatttcgtttttcagtatttagtgccatctgagacagtgtctctcctgaccgtgggatttttggtggcttcattcgcagcttctgtcagttccctgctggctatcaccgtggataggtacttgtccctgtacaacgcactcacatattattcccggaggactctcctcggcgtgcacctgctgctggcagctacatggacagtcagcctgggcctgggcttactgcccgtcttgggatggaactgcctggcagagcgggccgcatgctccgtagtacgtcccctagccaggtcccatgtggccttattgagtgcggctttttttatggtcttcgggatcatgttgcacttgtatgtccgcatttgccaggtggtgtggcgacacgcccatcagatcgcattgcagcagcactgcctggcgccccctcatctggccgccacaaggaaaggcgttggaacactcgccgtggtcttgggcacatttggcgcttcatggctgccgtttgctatttactgcgtggtcggcagtcacgaggaccctgctgtttatacctatgcaaccctgctgccagctacttacaatagcatgattaatcccattatctatgcgttccgaaaccaggaaattcagcgcgctctctggctcctgctatgcggctgctttcagagtaaagtgccctttaggagccgcagtccgtctgaggtctag

SEQ ID NO: 154640 - DNA, 1023 bp, Artificial Sequence
  derived and/or modified sequence
atgaacgcttcagcagcctcgttaaacgactcccaggtagtcgtagtcgctgcagagggggctgctgctgctgctacagctgctggtggaccagacacaggagagtggggcccaccagcggctgcggccctaggggccggaggcggagccaatgggagcttggagctttccagccagctgagcgccggtccccccggactgcttctgccggccgtgaatccttgggacgtgttgttgtgcgttagcggtaccgtgattgccggcgaaaacgccctcgtggtcgctctgatcgctagcactcctgcacttcgcacgccaatgtttgtactcgttggcagtttagctactgcagatctgttagctggatgcggcttgatattgcactttgtcttccaatatctcgtgcccagtgagactgtctcattgctgaccgtggggtttcttgtagcatccttcgccgccagtgtgtcatctctgctggctattaccgtagatagatacctttcactttacaacgcgctcacatactactccaggcgcactttgctcggtgtgcaccttcttctcgctgctacttggactgttagcctcggcctgggactgctccctgtgctcggttggaactgcctggcggagcgggccgcatgcagtgtggtgcgtccactcgctcgatctcacgtggccctgctttccgcagcctttttcatggtgttcgggatcatgcttcacttgtatgtaaggatttgtcaggtggtttggcgccatgctcaccagatcgccctgcagcagcactgtttagctccaccccatcttgccgcgacgaggaagggggtcggaaccctggccgtggttttgggaacctttggtgcgagttggctgccgtttgctacctacaattcgatgataaatcccatcatctacgctttcagaaaccaagaaatccaacgcgccctatggctgcttctgtgcgggtgctttcagtccaaggtgcccttcagatcccggagcccctccgaagtgtag

SEQ ID NO: 154641 - DNA, 1089 bp, Artificial Sequence
  derived and/or modified sequence
atgaatgccagcgctgccagcctgaatgacagccaggtggtggtggtggccgctgagggcgctgctgctgctgccacagctgctgggggccctgacacaggagagtggggccccccagctgctgctgccctgggcgctgggggcggggccaacggcagcctggagctgagcagccagctgtctgctggccccccaggcctgctgctgcctgctgtgaacccctgggatgtgctgctgtgtgtgtctggcaccgtgattgctggagaaaatgccctggtggtggccctgattgccagcaccccagccctgcggacccccatgtttgtgctggtgggcagcctggccacagctgacctgctggccggctgcggcctcatcctgcactttgtgttccagtacctggtgcccagcgagaccgtgtccctgctgactgtgggcttcctggtggccagctttgctgcctctgtgagcagcctgctggccatcaccgtggaccgctacctgagcctgtacaatgccctgacctactacagcaggaggaccctgctgggcgtgcacctgctgctggccgccacctggacagtgtccctgggcctgggcctgctgcctgtgctgggctggaactgcctggccgagcgggccgcctgcagcgtggtgcggcccctggcccggagccacgtggccctgctgtctgctgccttcttcatggtgtttggcatcatgctgcacctgtatgtgcgcatctgccaggtggtgtggaggcatgcccaccagatcgccctgcagcagcactgcctggccccaccccacctggccgccaccaggaagggcgtgggcaccctggccgtggtgctgggcaccttcggggcctcctggctgccctttgccatctactgtgtggtgggcagccatgaagatcctgctgtgtacacctacgccaccctgctgcctgccacctacaacagcatgatcaaccccatcatctatgccttcaggaaccaggagatccagagggccctgtggctgctgctgtgtggctgcttccagagcaaggtgcccttccgcagccgcagccccagcgaggtgtag

SEQ ID NO: 154642 - DNA, 1023 bp, Artificial Sequence
  derived and/or modified sequence
atgaatgccagcgctgccagcctgaatgacagccaggtggtggtggtggccgctgagggcgctgctgctgctgccacagctgctgggggccctgacacaggagagtggggccccccagctgctgctgccctgggcgctgggggcggggccaacggcagcctggagctgagcagccagctgtctgctggccccccaggcctgctgctgcctgctgtgaacccctgggatgtgctgctgtgtgtgtctggcaccgtgattgctggagaaaatgccctggtggtggccctgattgccagcaccccagccctgcggacccccatgtttgtgctggtgggcagcctggccacagctgacctgctggccggctgcggcctcatcctgcactttgtgttccagtacctggtgcccagcgagaccgtgtccctgctgactgtgggcttcctggtggccagctttgctgcctctgtgagcagcctgctggccatcaccgtggaccgctacctgagcctgtacaatgccctgacctactacagcaggaggaccctgctgggcgtgcacctgctgctggccgccacctggacagtgtccctgggcctgggcctgctgcctgtgctgggctggaactgcctggccgagcgggccgcctgcagcgtggtgcggcccctggcccggagccacgtggccctgctgtctgctgccttcttcatggtgtttggcatcatgctgcacctgtatgtgcgcatctgccaggtggtgtggaggcatgcccaccagatcgccctgcagcagcactgcctggccccaccccacctggccgccaccaggaagggcgtgggcaccctggccgtggtgctgggcaccttcggggcctcctggctgccctttgccacctacaacagcatgatcaaccccatcatctatgccttcaggaaccaggagatccagagggccctgtggctgctgctgtgtggctgcttccagagcaaggtgcccttccgcagccgcagccccagcgaggtgtag

SEQ ID NO: 154643 - DNA, 1089 bp, Artificial Sequence
  derived and/or modified sequence
atgaacgccagcgccgccagcctgaacgacagccaggtggtggtggtggccgccgagggagccgccgccgctgctactgcagcaggaggtcccgacacaggcgagtggggcccccctgctgccgcagccctcggcgcaggcggaggagcaaatggctcccttgagctcagctcgcagttgagtgctggcccccctgggctgctgttgcctgcagtgaatccctgggacgtgttgctttgcgtgtccggcaccgttatagccggcgaaaacgccctggtcgtggccttaatcgcttctactccagctctgcggactcctatgttcgtgttggtgggcagtctagctacggccgatctgctggcaggctgcgggttgattctacattttgtgtttcagtacctcgtcccctccgagactgttagcctgctcacagtggggttcctcgtggcctcgttcgccgcctccgtaagcagcctgttagcgataaccgtggacagatacctctccctgtataacgccctgacgtactacagtagacggacactgctgggcgtccatttgctgttggccgccacctggacagtgtcactgggtctggggcttctccccgtgctggggtggaactgtttggctgagcgcgctgcctgctccgttgtaaggccactcgcacgaagtcacgtggccctgctaagcgctgctttctttatggtgtttggtatcatgctgcatctgtatgtgcgcatctgccaggtcgtgtggagacacgcccaccagattgcccttcaacaacattgcttagctcccccacatttggctgcgactcgcaaaggcgtgggcaccctggccgtagtcctggggactttcggggcatcctggctgccttttgcaatctactgcgtagtgggatcacacgaagaccctgccgtctatacctacgcaacccttctaccagccacatataattcgatgattaacccaataatctatgcctttagaaatcaggaaattcagcgcgcactatggctgttactgtgcggctgtttccagagcaaagttccttttcgatctcgctcaccgagcgaagtttag

SEQ ID NO: 154644 - DNA, 1023 bp, Artificial Sequence
  derived and/or modified sequence
atgaacgccagcgccgccagcctgaacgacagccaggtggtggtggttgctgccgaaggcgctgctgcagcggcgactgcggccggggggcccgatacaggcgaatggggcccacccgcagccgcggccctaggcgctggtggtggtgcgaacggatcactcgagttaagctcacagctatccgccggaccccccggcctgctgttgccagctgtcaatccatgggacgtcctgctgtgcgtgtctggcaccgttatcgctggagagaacgctctggtggtggctctcattgcctcaactcccgccctgagaacacccatgttcgtcctggtgggaagtctggcaactgccgatctgttagcgggctgtggcctaattctccattttgtgtttcagtacctcgtgccttcagagaccgtgagcttactgacagtggggtttctggttgcctcattcgcagcctcagtcagttcactcctcgccatcacagttgataggtacttgtcgctgtataatgccctgacctattacagtagacgtactctgctcggggttcatttactcctggccgccacttggacggtgtcactcggcctcggcctcttacccgttctgggatggaattgcctcgcagaacgggccgcatgttcagtggttcggcccctcgcacgctctcacgttgcactgctcagtgccgcctttttcatggtgtttgggatcatgttgcatctgtatgtccgaatatgccaggtggtctggcgacacgcacaccagattgccctgcagcagcactgcctcgcacctccgcatttggcagcgactcgcaagggagtcggcacccttgccgtggtattgggaacatttggcgcgtcgtggttgccctttgccacgtacaactctatgataaaccccatcatttatgccttccgcaatcaggagattcagcgcgcgctctggttgctgttatgcgggtgcttccaaagcaaggttcccttccgatccaggtctcctagtgaggtgtag

SEQ ID NO: 154645 - DNA, 1089 bp, Artificial Sequence
  derived and/or modified sequence
atgaacgcgtctgccgcttcattgaacgacagccaggtggtggtcgtggctgctgaaggcgctgcggcagcagccactgccgcaggaggtcccgacacgggtgagtggggccctcccgcagctgccgcactcggcgctgggggaggggcaaacggttccctggaactgagctctcagctgtccgcaggaccccctggactgctgcttccagcggtcaacccttgggacgtccttctgtgtgtgtcgggcactgtaatcgcgggagagaatgccctggtggtcgctctgatagcttccacacctgccctgagaaccccaatgttcgttctggtgggatctcttgcgaccgccgatctcttggccggatgcggcctcattctgcatttcgtatttcagtacctcgtaccaagcgaaacagtatcccttctgaccgtggggtttcttgtggcttccttcgccgcatctgtttccagcttactggccatcaccgttgacagatatttgtccctctacaatgctctaacgtattatagcaggcgaactcttctgggcgtgcatctcctgctcgcagccacctggactgtgtctttgggcttaggcttgttgccagtattgggctggaactgcttggcggaaagggccgcatgttccgtcgtgcggccattggccagaagccacgtggccctgctaagcgctgcattctttatggtctttggaatcatgcttcacctatacgtcaggatatgccaagtggtctggagacacgcccaccagatcgcactccaacagcattgtctcgcacctccccatttagccgcaactagaaaaggagtcggtactttggcagtggtcctgggaacatttggcgctagttggttacctttcgccatctactgcgtcgtgggctcacacgaggatccggcagtctatacttatgctacactgctccccgcaacgtacaactctatgataaaccccatcatctatgcatttagaaaccaggaaatccaacgtgcactctggctcttgctgtgtggatgttttcagtccaaagtccctttccgatcacgctcaccctccgaagtctag

SEQ ID NO: 154646 - DNA, 1023 bp, Artificial Sequence
  derived and/or modified sequence
atgaacgcctctgcagcctctctcaatgactcccaagttgtggttgtggctgctgagggagccgcagccgctgcaacagcggcagggggtccagatacaggagaatggggccctcccgcagctgctgccctcggagcagggggtggtgcaaacgggagtctcgagctgtcatcacagctcagcgccggacctccaggcctgctgcttcccgcagtcaacccctgggacgtgctgctttgtgtcagcggaactgttatagccggagaaaatgcgctcgtagtagccctcatagcaagcacccccgcactgagaacccctatgttcgtcctggtcggatctctggctactgccgacctcctggctggttgcggactgatcctgcatttcgtatttcagtacctggtgccatctgagaccgtatcactgttgaccgtaggctttcttgtcgcaagcttcgcagcatccgtcagcagtctgctggcaataaccgtggaccgttacttgtccttgtataatgctctgacctactactctcggaggactttgttgggcgtgcacctcttattggccgctacgtggaccgtcagcctgggactcggactgctccccgtcctaggatggaactgtctcgctgagcgggctgcttgttctgtcgtgaggccgttggcgagatcacatgttgccttgcttagtgccgcattcttcatggtttttggtataatgctgcacttgtatgtgagaatctgccaggtagtgtggcgccacgcacatcagatagcactacagcagcattgcttggccccaccccatcttgcggcaacacggaagggagtggggactctcgcagtggtgctggggaccttcggggcttcgtggctgcctttcgcaacatataacagcatgattaaccccattatttacgctttcaggaaccaggaaattcaacgagctctttggctcctgctgtgtgggtgtttccaatccaaggttccattccgctcccggagccccagcgaggtgtag

SEQ ID NO: 154647 - DNA, 1089 bp, Artificial Sequence
  derived and/or modified sequence
atgaacgccagcgccgccagcctgaacgacagccaggtggtggtggtggccgccgagggcgccgccgccgccgccaccgccgccggcggccccgacaccggcgagtggggcccccccgccgccgccgccctgggcgccggcggcggcgccaacggcagcctggagctgagcagccagctgagcgccggcccccccggcctgctgctgcccgccgtgaacccctgggacgtgctgctgtgcgtgagcggcaccgtgatcgccggcgagaacgccctggtggtggccctgatcgccagcacccccgccctgagaacccccatgttcgtgctggtgggcagcctggccaccgccgacctgctggccggctgcggcctgatcctgcacttcgtgttccagtacctggtgcccagcgagaccgtgagcctgctgaccgtgggcttcctggtggccagcttcgccgccagcgtgagcagcctgctggccatcaccgtggacagatacctgagcctgtacaacgccctgacctactacagcagaagaaccctgctgggcgtgcacctgctgctggccgccacctggaccgtgagcctgggcctgggcctgctgcccgtgctgggctggaactgcctggccgagagagccgcctgcagcgtggtgagacccctggccagaagccacgtggccctgctgagcgccgccttcttcatggtgttcggcatcatgctgcacctgtacgtgagaatctgccaggtggtgtggagacacgcccaccagatcgccctgcagcagcactgcctggcccccccccacctggccgccaccagaaagggcgtgggcaccctggccgtggtgctgggcaccttcggcgccagctggctgcccttcgccatctactgcgtggtgggcagccacgaggaccccgccgtgtacacctacgccaccctgctgcccgccacctacaacagcatgatcaaccccatcatctacgccttcagaaaccaggagatccagagagccctgtggctgctgctgtgcggctgcttccagagcaaggtgcccttcagaagcagaagccccagcgaggtgtag

SEQ ID NO: 154648 - DNA, 1023 bp, Artificial Sequence
  derived and/or modified sequence
atgaacgccagcgccgccagcctgaacgacagccaggtggtggtggtggccgccgagggcgccgccgccgccgccaccgccgccggcggccccgacaccggcgagtggggcccccccgccgccgccgccctgggcgccggcggcggcgccaacggcagcctggagctgagcagccagctgagcgccggcccccccggcctgctgctgcccgccgtgaacccctgggacgtgctgctgtgcgtgagcggcaccgtgatcgccggcgagaacgccctggtggtggccctgatcgccagcacccccgccctgagaacccccatgttcgtgctggtgggcagcctggccaccgccgacctgctggccggctgcggcctgatcctgcacttcgtgttccagtacctggtgcccagcgagaccgtgagcctgctgaccgtgggcttcctggtggccagcttcgccgccagcgtgagcagcctgctggccatcaccgtggacagatacctgagcctgtacaacgccctgacctactacagcagaagaaccctgctgggcgtgcacctgctgctggccgccacctggaccgtgagcctgggcctgggcctgctgcccgtgctgggctggaactgcctggccgagagagccgcctgcagcgtggtgagacccctggccagaagccacgtggccctgctgagcgccgccttcttcatggtgttcggcatcatgctgcacctgtacgtgagaatctgccaggtggtgtggagacacgcccaccagatcgccctgcagcagcactgcctggcccccccccacctggccgccaccagaaagggcgtgggcaccctggccgtggtgctgggcaccttcggcgccagctggctgcccttcgccacctacaacagcatgatcaaccccatcatctacgccttcagaaaccaggagatccagagagccctgtggctgctgctgtgcggctgcttccagagcaaggtgcccttcagaagcagaagccccagcgaggtgtag

SEQ ID NO: 154649 - protein, 328 aa, Artificial Sequence
  derived and/or modified sequence
MDNASFSEPWPANASGPDPALSCSNASTLAPLPAPLAVAVPVVYAVICAVGLAGNSAVLYVLLRAPRMKTVTNLFILNLAIADELFTLVLPINIADFLLRQWPFGELMCKLIVAIDQYNTFSSLYFLTVMSADRYLVVLATAESRRVAGRTYSAARAVSLAVWGIVTLVVLPFAVFARLDDEQGRRQCVLVFPQPEAFWWRASRLYTLVLGFAIPVSTICVLYTTLLCRLHAMRLDSHAKALERAKKRVTFLVVAILAVCLLCWTPYHLSTVVALTTDLPQTPLVIAISYFITSLSYANSCLNPFLYAFLDASFRRNLRQLITCRAAA

SEQ ID NO: 154650 - DNA, 987 bp, Artificial Sequence
  derived and/or modified sequence
atggataacgcttccttttctgaaccgtggccggccaacgcttctggcccagacccggctctttcatgttcgaatgcctcgactcttgcacctctgcctgcacctttagcagttgccgtccctgttgtatatgccgtgatctgcgctgtggggcttgctggcaattcagctgtgctatacgttctgttgagggccccacggatgaagacagtcaccaatttgtttatactgaatctggcaatcgccgatgagctgttcacactggtgttgcccattaacatcgccgatttcctgctcagacagtggcctttcggggaactgatgtgcaaactcattgtggccattgaccagtacaacaccttctcttcattgtacttcctgacggtcatgtccgccgatcgatatctagtcgtgttagctacagcagaatccagacgagttgcaggaagaacctacagcgccgctcgcgctgtgtcactggcagtgtggggtattgtgacccttgtcgtactcccatttgctgtattcgccaggctcgatgatgagcagggccgccgccaatgtgtgctcgtgtttccacagcctgaagctttctggtggcgagcctcacggctttatacattggtgcttggctttgcgattccagttagtacaatctgcgtcctctatactaccctgctctgccggttgcacgctatgcgcctggattcccatgctaaagctttggaaagggccaagaagcgggtcacctttttggtcgtggcaattctggcagtgtgtcttctgtgctggacaccttatcatctctcaactgtagtagcattaactaccgatctgcctcaaactcccctggtgattgccatctcttactttattacaagcctcagctacgctaacagctgtctgaacccctttttgtatgcttttctggatgcatcattcagaagaaacctcaggcagctgatcacatgcagggctgcagcctag

SEQ ID NO: 154651 - DNA, 987 bp, Artificial Sequence
  derived and/or modified sequence
atggacaatgccagcttcagcgagccctggccagccaatgccagcggccctgaccctgccctgagctgcagcaatgccagcaccctggcccccctgcctgcccccctggccgtggccgtgcctgtggtgtatgctgtgatctgtgctgtgggcctggccggcaacagcgctgtgctgtatgtgctgctgcgggcccccaggatgaagacagtgaccaacctcttcatcctgaacctggccatcgcagatgagctgttcaccctggtgctgcccatcaacattgctgacttcctgctgcggcagtggccctttggagagctgatgtgcaagctgattgtggccatcgaccagtacaacaccttcagcagcctgtacttcctgactgtgatgtctgctgaccgctacctggtggtgctggccacagctgagagcagaagagtggccggccgcacctacagcgctgcccgggctgtgtccctggccgtgtggggcatcgtgaccctggtggtgctgccctttgctgtgtttgcccggctggatgatgagcagggccggcggcagtgtgtgctggtgttcccccagcctgaggccttctggtggagggccagccggctgtacaccctggtgctgggctttgccatccctgtgtccaccatctgtgtgctgtacaccaccctgctgtgccgcctgcacgccatgaggctggacagccacgccaaggccctggagcgggccaagaagagggtgaccttcctggtggtggccatcctggccgtgtgcctgctgtgctggaccccctaccacctgagcacagtggtggccctgaccacagacctgccccagacccccctggtgattgccatctcctacttcatcaccagcctgtcctatgccaacagctgcctgaaccccttcctgtatgccttcctggatgccagcttcagaagaaacctgcggcagctgatcacctgcagagctgctgcctag

SEQ ID NO: 154652 - DNA, 987 bp, Artificial Sequence
  derived and/or modified sequence
atggacaacgccagcttcagcgagccctggcccgccaacgccagcggcccagaccctgcactgtcctgttccaacgcatccaccctggctcccttacctgccccactcgcggtggcagtacccgtggtgtatgcagtcatatgcgcggtgggtctagccgggaacagcgctgtgttatacgtgctcttacgcgcccctcgcatgaaaactgtcaccaacctcttcatcttaaatctggccatcgccgatgagctctttactctggtcttgcctatcaacatcgctgacttcttgttgagacagtggcctttcggggaactgatgtgtaagctcatagtcgcgatcgaccagtataatactttcagttctctctacttccttaccgtgatgagcgccgacaggtacctggtcgtcctggccaccgcagaaagtaggagggtcgcgggaaggacctactccgcggctagagccgtgtcgctggccgtctggggtatcgtgaccttagtggttctgcccttcgcagtctttgcccgcttagacgatgagcagggaagacgccagtgcgtcttggtgtttcctcaacccgaagccttctggtggcgcgcttctaggctgtacaccctggtcctcggatttgccattcctgtctctactatatgcgtgctctatactacactcttgtgccgtctgcacgccatgcgcctcgacagtcacgctaaggcgctcgagcgagccaagaaacgggtgacgtttctagtcgtggctatactcgccgtgtgcctcctctgctggactccttatcacttgtcgaccgtggtcgctctgaccacagatctgccccagaccccccttgtgatcgctatctcttattttatcacatccctgtcttacgccaatagctgcttgaatccctttctctatgccttccttgacgctagctttcgtagaaatctaaggcagttaattacctgtcgcgctgcggcgtag

SEQ ID NO: 154653 - DNA, 2687 bp, Artificial Sequence
  derived and/or modified sequence
ttggaaataaccaatatttagtttatttcattcgattcttaggggaactggtgaggagcctaagatgattttcccttcctagagaaagaatccaaagtccagggaaatagcgacaggggagttcaagactgcccctgctagtccttccttggctactctccgctgcgatcgcaggatagctctcattagcaggagaatcgggcaagtgtgtggataagtagagagtgtgttgaacaacttgtaacgttttatgaaatacgcattgtcatggttccctaaaaggctttgcggaagccgtttgtctttactaatcaagtctttacttacacaaaagtagaagtagaagtagttttagaaaacatactaacaatcttctatccccttgaagaccagagtagcagaaaacaggtgatttgcattataaaattgcactcactttttcctcctttcagatttcacattacattagcctatttgtgttacggtgtataaaaaatggaacaggcgcctccactacattgttctcctttaaaaatagatcacttacaccctaactttgttttccttaaattcgattcttaacaggagagctttctattatttcagatggagtgaggttgcacgactgggatggaagaaaggaatcccttaaatttgggggaatttctgttctctgttctaagaccattttacttggggtgtgggggtgggcgcggcggtcagggcagtggaacgcagtcgcggctgcgccatccctgcacttccaggcgcgcgggagggaccggcggggacgcgagctgcggactctggcgaactcgggggaggcagacagggggaggcggacacccagccggcaggcgtctcagcctccccgcagccggcgggcttttctcctgacagctccaggaaaggcagaccccttccccagccagccaggtaaggtaaagactgctgttgagcttgctgttactgagggcgcacagaccctggggagaccgaagcttgccactgcgggattctgtggggtaacctgggtctacggaagtttcctgaaagaggggagaagggtttgcatttttcctatggaggattcttctctctctagcatttcgtttgatgtattcaactggtagaagtgagatttcaacaggtagcagagagcgctcacgtggaggaggtttggggcgccgcggcgccacccccacccctcctcgggaccgcgcctatttctaaagttacacgtcgacgaactaacctatgctttaaattcctctttccagccccgtgagtccgcggcgacattgggccgtggggtggctgggaacggtcccctcctccggaaaaaccagagaacggcttggagagctgaaacgagcgtccgcgagcaggtccgtgcagaaccgggcttcaggaccgctgagctccgtagggcgtccttgggggacgccaggtcgccggctcctctgccctcgttgagatggacaacgcctcgttctcggagccctggcccgccaacgcatcgggcccggacccggcgctgagctgctccaacgcgtcgactctggcgccgctgccggcgccgctggcggtggctgtaccagttgtctacgcggtgatctgcgccgtgggtctggcgggcaactccgccgtgctgtacgtgttgctgcgggcgccccgcatgaagaccgtcaccaacctgttcatcctcaacctggccatcgccgacgagctcttcacgctggtgctgcccatcaacatcgccgacttcctgctgcggcagtggcccttcggggagctcatgtgcaagctcatcgtggctatcgaccagtacaacaccttctccagcctctacttcctcaccgtcatgagcgccgaccgctacctggtggtgttggccactgcggagtcgcgccgggtggccggccgcacctacagcgccgcgcgcgcggtgagcctggccgtgtgggggatcgtcacactcgtcgtgctgcccttcgcagtcttcgcccggctagacgacgagcagggccggcgccagtgcgtgctagtctttccgcagcccgaggccttctggtggcgcgcgagccgcctctacacgctcgtgctgggcttcgccatccccgtgtccaccatctgtgtcctctataccaccctgctgtgccggctgcatgccatgcggctggacagccacgccaaggccctggagcgcgccaagaagcgggtgaccttcctggtggtggcaatcctggcggtgtgcctcctctgctggacgccctaccacctgagcaccgtggtggcgctcaccaccgacctcccgcagacgccgctggtcatcgctatctcctacttcatcaccagcctgagctacgccaacagctgcctcaaccccttcctctacgccttcctggacgccagcttccgcaggaacctccgccagctgataacttgccgcgcggcagcctgactcccccagcgtccggctccgcaactgcccgccactcctggccagcgagggaggagccggcgccagagtgcgggaccagacaggccgcctaggcctcctggggaaaccgactcgcgccccatacccgacctagcagatcggaagcgctgcgactgtgcccgcaggttgaccttgccaagccctccaggtgatgcgcggccatgccgggtgaggagaactgagg

SEQ ID NO: 154654 - DNA, 987 bp, Artificial Sequence
  derived and/or modified sequence
atggataatgccagtttttcagagccctggcccgctaacgcatctggccctgacccagccctcagttgttccaatgccagcaccctggcccctttgccagcaccactggccgtagccgtgccagtggtgtatgccgtgatctgcgccgtcggcctcgccggaaattcagcagttctctacgtcctgctgagagccccaaggatgaagacagtcactaacctgtttattttgaatctcgcgatagcggatgagctcttcacactggtactccccattaacatcgcggattttctgctgcggcagtggcccttcggggagcttatgtgcaagctcattgtcgctattgatcagtacaatacattcagtagcctgtattttttgactgtcatgtcagccgaccgatacctggtcgtactggctactgcggagtcaaggagagtggcaggaagaacgtactccgcagctcgcgctgtctccttagcagtgtgggggatagtcaccttggtggttttgccttttgccgtgtttgctaggctcgatgacgaacagggaaggaggcagtgcgtactggtgttcccccaaccagaagcattttggtggagagcaagcagactgtatactctggttctcggatttgccatccctgtatctaccatatgcgtgctgtataccactctactctgccgactgcatgccatgcggttagattctcatgctaaggccctggagagagccaagaaaagggtcacctttctggtggtcgcgattctggctgtgtgcctgctgtgttggactccgtaccaccttagcactgttgtcgcactaacgaccgacttgcctcagaccccgttagtgatcgcgatcagctatttcatcacttccctgtcttacgccaacagttgccttaacccattcctttatgcattcctggacgccagctttcggaggaatctgcggcagctgatcacctgccgggcagcagcatag

SEQ ID NO: 154655 - DNA, 987 bp, Artificial Sequence
  derived and/or modified sequence
atggacaacgccagcttcagcgagccctggcccgccaacgccagcggccccgaccccgccctgagctgcagcaacgccagcaccctggcccccctgcccgcccccctggccgtggccgtgcccgtggtgtacgccgtgatctgcgccgtgggcctggccggcaacagcgccgtgctgtacgtgctgctgagagcccccagaatgaagaccgtgaccaacctgttcatcctgaacctggccatcgccgacgagctgttcaccctggtgctgcccatcaacatcgccgacttcctgctgagacagtggcccttcggcgagctgatgtgcaagctgatcgtggccatcgaccagtacaacaccttcagcagcctgtacttcctgaccgtgatgagcgccgacagatacctggtggtgctggccaccgccgagagcagaagagtggccggcagaacctacagcgccgccagagccgtgagcctggccgtgtggggcatcgtgaccctggtggtgctgcccttcgccgtgttcgccagactggacgacgagcagggcagaagacagtgcgtgctggtgttcccccagcccgaggccttctggtggagagccagcagactgtacaccctggtgctgggcttcgccatccccgtgagcaccatctgcgtgctgtacaccaccctgctgtgcagactgcacgccatgagactggacagccacgccaaggccctggagagagccaagaagagagtgaccttcctggtggtggccatcctggccgtgtgcctgctgtgctggaccccctaccacctgagcaccgtggtggccctgaccaccgacctgccccagacccccctggtgatcgccatcagctacttcatcaccagcctgagctacgccaacagctgcctgaaccccttcctgtacgccttcctggacgccagcttcagaagaaacctgagacagctgatcacctgcagagccgccgcctag

SEQ ID NO: 154656 - protein, 334 aa, Artificial Sequence
  derived and/or modified sequence
MNEDLKVNLSGLPRDYLDAAAAENISAAVSSRVPAVEPEPELVVNPWDIVLCTSGTLISCENAIVVLIIFHNPSLRAPMFLLIGSLALADLLAGIGLITNFVFAYLLQSEATKLVTIGLIVASFSASVCSLLAITVDRYLSLYYALTYHSERTVTFTYVMLVMLWGTSICLGLLPVMGWNCLRDESTCSVVRPLTKNNAAILSVSFLFMFALMLQLYIQICKIVMRHAHQIALQHHFLATSHYVTTRKGVSTLAIILGTFAACWMPFTLYSLIADYTYPSIYTYATLLPATYNSIINPVIYAFRNQEIQKALCLICCGCIPSSLAQRARSPSDV

SEQ ID NO: 154657 - DNA, 1981 bp, Artificial Sequence
  derived and/or modified sequence
ggaaataggcgatttaaatattccatcgaggatggcggcccctggctcgagacctgccgctgccgcgtggttttctcggcagcagcccagatgtcaaacagttgttcgttttcagcatgcaagatgtgattttccaatgtgcattcccagcgctgttgcaaacagaccgccgcgagtccgtgtgtgcctgcctcgctcacgctggtgttttgaagtcctaccctgtgttttccccaatgccaaacggcatttttgttgtggggtttaaaccacagagactttggcttttgtttcatttcccaacagttcctcattcccgaagcttgtggcatttggtactggtatctgagcaggggctggctttctgtttgtctgtgtgttttttgcatgatcttggattgtcaccctgctgtatttaaacattaaaaagcctgtcttttcgttgaagaggacaggggttaaaatgaatgaagacctgaaggtcaatttaagcgggctgcctcgggattatttagatgccgctgctgcggagaacatctcggctgctgtctcctcccgggttcctgccgtagagccagagcctgagctcgtagtcaacccctgggacattgtcttgtgtacctcgggaaccctcatctcctgtgaaaatgccattgtggtccttatcatcttccacaaccccagcctgcgagcacccatgttcctgctaataggcagcctggctcttgcagacctgctggccggcattggactcatcaccaattttgtttttgcctacctgcttcagtcagaagccaccaagctggtcacgatcggcctcattgtcgcctctttctctgcctctgtctgcagcttgctggctatcactgttgaccgctacctctcactgtactacgctctgacgtaccattcggagaggacggtcacgtttacctatgtcatgctcgtcatgctctgggggacctccatctgcctggggctgctgcccgtcatgggctggaactgcctccgagacgagtccacctgcagcgtggtcagaccgctcaccaagaacaacgcggccatcctctcggtgtccttcctcttcatgtttgcgctcatgcttcagctctacatccagatctgtaagattgtgatgaggcacgcccatcagatagccctgcagcaccacttcctggccacgtcgcactatgtgaccacccggaaaggggtctccaccctggctatcatcctggggacgtttgctgcttgctggatgcctttcaccctctattccttgatagcggattacacctacccctccatctatacctacgccaccctcctgcccgccacctacaattccatcatcaaccctgtcatatatgctttcagaaaccaagagatccagaaagcgctctgtctcatttgctgcggctgcatcccgtccagtctcgcccagagagcgcgctcgcccagtgatgtgtagcacccttgcacccaggaggactctgcatttaccaagcacttccactgcctggccaaggtttgagatgcttcccttgaattccttgcattggattccctctcaagccacaggagcacttagcattcgtgaaacaatgacatcgttcagatgagttaagtgattgaagtgaaaataatgttaccagtgttttcaccattaaaaaaaattgttgagctctccactcaacattattttgttttgcttgggggcaagggtttccttttatactttgtttggagggctgactgggggtaggaaaggaagggatatgatacgcccatgatgttattagaagtaaatgagtttcagagtttttacctggactttaaaataaatttgagtgattgaggaaaattgagaaagacttactttttccagactattttttttttttacatgatggtagattttttaatgctgcatgtatgtaacagaatatgacccctttcaatccaatacaaatagtttacataa

SEQ ID NO: 154658 - DNA, 4846 bp, Artificial Sequence
  derived and/or modified sequence
aaagctgggcgcgcgagccgaggctgctgctcacctgcagccgcgccgctcacctgccgcggagtgcgcgccccgcgccctcccggcccgctccggagcccggccgccccccccttgccacagcgggcaactgcgccgacatgcgacacgagtagcccacgcgcttcggaagcaccggaggagccccctcggcctgggcgagccaagaggacaggggttaaaatgaatgaagacctgaaggtcaatttaagcgggctgcctcgggattatttagatgccgctgctgcggagaacatctcggctgctgtctcctcccgggttcctgccgtagagccagagcctgagctcgtagtcaacccctgggacattgtcttgtgtacctcgggaaccctcatctcctgtgaaaatgccattgtggtccttatcatcttccacaaccccagcctgcgagcacccatgttcctgctaataggcagcctggctcttgcagacctgctggccggcattggactcatcaccaattttgtttttgcctacctgcttcagtcagaagccaccaagctggtcacgatcggcctcattgtcgcctctttctctgcctctgtctgcagcttgctggctatcactgttgaccgctacctctcactgtactacgctctgacgtaccattcggagaggacggtcacgtttacctatgtcatgctcgtcatgctctgggggacctccatctgcctggggctgctgcccgtcatgggctggaactgcctccgagacgagtccacctgcagcgtggtcagaccgctcaccaagaacaacgcggccatcctctcggtgtccttcctcttcatgtttgcgctcatgcttcagctctacatccagatctgtaagattgtgatgaggcacgcccatcagatagccctgcagcaccacttcctggccacgtcgcactatgtgaccacccggaaaggggtctccaccctggctatcatcctggggacgtttgctgcttgctggatgcctttcaccctctattccttgatagcggattacacctacccctccatctatacctacgccaccctcctgcccgccacctacaattccatcatcaaccctgtcatatatgctttcagaaaccaagagatccagaaagcgctctgtctcatttgctgcggctgcatcccgtccagtctcgcccagagagcgcgctcgcccagtgatgtgtagcacccttgcacccaggaggactctgcatttaccaagcacttccactgcctggccaaggtttgagatgcttcccttgaattccttgcattggattccctctcaagccacaggagcacttagcattcgtgaaacaatgacatcgttcagatgagttaagtgattgaagtgaaaataatgttaccagtgttttcaccattaaaaaaaattgttgagctctccactcaacattattttgttttgcttgggggcaagggtttccttttatactttgtttggagggctgactgggggtaggaaaggaagggatatgatacgcccatgatgttattagaagtaaatgagtttcagagtttttacctggactttaaaataaatttgagtgattgaggaaaattgagaaagacttactttttccagactattttttttttttacatgatggtagattttttaatgctgcatgtatgtaacagaatatgacccctttcaatccaatacaaatagtttacataattgtgtttggaagggacctgattttgctaacatgaactcagtaatgtcaccgacactgaaaccgtgaacccattcttatccattctttctttcctttcggcaattactgttcacgagaattccttcggtatttctataaatgttgcaactccttctgcatggtcgactgtgttagctagaccacttgtttcaaatgttgccatgtcaatctagattccaacgggtcatttttcaatatagttttccaatatgtactttctaaaatgaatcctgaagtaggttttgatcttcatatgaagtaggattgattagatccaccattgtagtttcttaagctattgtctgattgttttcagaaaacaaaaggaaaaaatattagcaattgagagtagattaaatttattttaatatattctgaaaaaaactaatgtgacattatcatgaaatgaaaaaaatcacctttcctctctctctgagaatatactaatggttattcttgattgagataattagaataaatattataggccaagtttttctggttcatactgtctgtggtgcataatgcatttgaaacaggcagtcccctattttaatgattaggtttgtttgtcagtgcacagcgtccatctatgactgtgacatataccagctatatcctgtaaggtcataaacagaatgaccattggctgttgatgaaaagttaagtttgaaatcttttaactccttttcaccaaaaaccaatttatacacaataaaaatcacattgcctgttttcagagaacaagaatgtagtcaggaaattgcaaagaagaattcactttaaacacattgtaaaatcgatgtgtctcaggtttcttttctgttcatgcagacaaatgtagacgcaggtaccttccctccatttgcaatggatttatagttatgtctatataatcagtggaaaaaattcttggcagcacattaattgagcccattcagatggcagcaaaagcagtatttcagggtcattggggaatcatttgtaataaattaacctcatcggtttgtcccagatgtgatgcccagggtgctctcaagaccattctgggagcctgcatgctgatgccttctctccagagcatcttctaatgtagcacacgtgtgaaaaaatcctctacttgaatctgtgtctcctccctgaggttacttatggaagcaggagagggactgaaatacttaagaagtgggaaagaattttcaatacataccactgtatgatcaatctaataaaactgatgcctttaaaacatttcttttgaacatttgatggagttagtaggttgaacatgatgagtctgttcgtttttaattaattaaaattgaatagcaccaccataggagacttgacaaaggtaagttggttttgagaggggctaggaaatatccgtaatgaggttttaaaggaataaatgatgattttataaaaatagtggctccatttgcatatctccaatagtcagaattataaagagaataatatgtacttgttgtgaccacatgtgtgccaggccccatgctgcgtgttttactataatcacaaaactactacttttataggtgagaaaactaagactaagagaggcgaggataaaaaatgtgcccgaggccacaaagcacaaggatagagtcagaatttgaagccagcttttccaaagtctaagtcttgctccttccctgtaccttgcaagctttcatccctcagtggataccagggctgaggaaactgatttgtaacacgttcctgtcacagagttttggctctacatttaagacataaaacttggcctggcgcagtggctcacgcctgtaatcccagcactttggggggccaaggcaggtggatcacctgaggtcaggagttcgaaaccagcctgaccaatatggcaaaaccctgtctctactaaaaataaaatttagccgggcgtggtggcgggtgcctgtaatcccagctactcaggaggctgaggcaggagaactgcttgaagacaggaggcagaggtagcagtgaacaaagatcgcaccactgcactccagcctgggtgacagagcaagactccatctcaaaaaaaaaaggacataaaatttcctgtttaaagttacactagttacgtggttgcttttggcccatgtttttaaaacatatagtttcagctaagagatttttcagttcaactaacaacatgcctttaccgtttaaattgtgaaaaatgttggatatttatgtggttttctacaaggtttcttttttcctgtggagctaattatttttaaatgtgcacacatctcaatgtacatatgtgtatgtatgtatttatgcatacgtatacccaataatattaactttgcaacaggaccaaagacctcatggaaaactgtcttatttccaacagtcctgaggtagcagataatcttttactccacataattaaaatttctagctaccaaggaattgatatttttccagtagaaacagttatccttgtaactaggacagttccattactttaccagaatcctgaattagtcaaaactagtcatcgaagttatgactatctagggttttgtttccttttattcctttaactctgtatttctttctatcagtgaagtttgtttttaaaggtacctggggcagggaagcagggtggagatagagcccctccttgcctggagcctacagtaaggagccaggttcaggaggagtggattccttggttgacttggccatgcagaaatagtcttagactcccccaggatttaaaataggattgaaacaagaagtttaaaagagcagaggaggaatagagatacttagtgccaataaaaatatcatggagacttcttcggctttttaaaaaaaatgcttaatccattattaaaataatgattgactttattttatagtaatatgtgataatatgaagttaggatgacttgccatttcagatttaaaatacatattaattaagtgactactatgttgtgattttgaataatgtttaagtttctatattgattgtatgcctggtataataaaggaaaagactgccttattgtccccttt

SEQ ID NO: 154659 - DNA, 1005 bp, Artificial Sequence
  derived and/or modified sequence
atgaacgaggatctgaaggtcaatctctccggactgcccagagactatttggacgctgccgccgcagagaacatatccgctgccgtcagttcccgagtgcccgccgtcgagcccgagccagaactcgtggtgaacccttgggatattgttctgtgcactagtggcactctgatttcttgtgagaacgctattgtcgtcctgatcatctttcacaatccttcgctacgcgcacctatgtttctgctgatcggtagcctggcgcttgccgaccttctggcagggatcggtttgatcactaatttcgtattcgcctatctgttacaatcagaggccacaaagctggtgaccatcgggctcatagtcgcaagtttcagtgcgtctgtatgtagcctgctggcaataacagtggatcggtatctcagcctttattatgcactcacctaccactccgagcgaactgtgaccttcacttacgtgatgctggttatgctgtggggcacttcaatatgtttagggctgttgccagttatgggttggaattgcctcagagatgagtcaacctgttccgtggtgcggcccctaacgaaaaacaatgcagctatactgtccgtatcattcctgtttatgttcgccctgatgctgcagctgtacatccagatctgcaaaatagtaatgcgccatgcacaccagattgcactccagcaccatttcctggctacctcccactatgtcactactcgcaaaggcgtaagtactctcgctattattctaggtacgtttgctgcatgttggatgccctttactctgtactccctcatcgctgactatacatatcctagtatttacacatacgctacacttctgcccgcgacttataatagcatcatcaacccagtgatctacgccttcagaaatcaggagattcagaaagcactgtgtctgatctgctgtggttgcatcccctcctcacttgcccagcgcgcccggtcgccctcggatgtctag

SEQ ID NO: 154660 - DNA, 1005 bp, Artificial Sequence
  derived and/or modified sequence
atgaacgaagatcttaaagtcaacctttccggtttgccacgtgattacctggatgccgcagctgctgaaaatataagtgccgctgtttcctcaagagtacctgccgtcgagcccgagccagaactggttgtaaatccctgggacattgtgctgtgcacatccggtacactaatcagttgcgagaacgctatcgtggtcctgatcattttccataatcccagccttcgggccccaatgtttcttcttatcggtagtctcgctctcgccgatctgttggcagggatcggccttattaccaacttcgtgtttgcatatttactccagtctgaggccacaaaactagtgacgattggactgatcgtggctagtttctccgccagcgtgtgttctctcttggcaattaccgtcgatcgctatctgtcgctatattacgctttgacctaccactcagaacgtacagtaacgttcacatacgtgatgctagttatgctgtggggaacctctatctgcctgggacttttgccggtgatgggctggaattgcttgagagacgaatctacgtgttccgtcgttaggcctctgaccaagaacaacgctgcgattctcagcgtatccttcttgtttatgtttgcactcatgctgcaactgtatatccagatttgcaagattgtaatgcggcatgcccaccagatcgctctccaacatcactttctcgccacctcccactacgtaacaaccagaaagggggtgtccaccctggctattattctcggtacattcgcagcttgctggatgccgtttactctctactctttgatcgccgactacacatacccttccatatacacatacgccaccctcctccctgctacatacaactcaataatcaatccagtgatttatgctttcaggaaccaggagatccagaaggccctatgtcttatctgctgtggatgcatcccgtcttctttggcccaacgagcccgcagcccctcagatgtctag

SEQ ID NO: 154661 - DNA, 1005 bp, Artificial Sequence
  derived and/or modified sequence
atgaatgaagacctgaaggtgaacctgagcggcctgccccgggactacctggatgctgctgctgctgagaacatctctgctgctgtgagcagccgggtgcctgctgtggagcctgagcctgagctggtggtgaacccctgggacatcgtgctgtgcaccagcggcaccctcatcagctgtgaaaatgccatcgtggtgctgatcatcttccacaaccccagcctgcgggcccccatgttcctgctgattggcagcctggccctggccgacctgctggccggcatcggcctcatcaccaactttgtgtttgcctacctgctgcagagcgaggccaccaagctggtgaccatcggcctcatcgtggccagcttcagcgcctctgtgtgcagcctgctggccatcaccgtggaccgctacctgagcctgtactatgccctgacctaccacagcgagaggacagtgaccttcacctacgtgatgctggtgatgctgtggggcaccagcatctgcctgggcctgctgcctgtgatgggctggaactgcctgagagatgagagcacctgcagcgtggtgcggcccctgaccaagaacaatgctgccatcctgtctgtgtccttcctgttcatgtttgccctgatgctgcagctgtacatccagatctgcaagatcgtgatgagacatgcccaccagatcgccctgcagcaccacttcctggccaccagccactacgtgaccaccaggaagggcgtgtccaccctggccatcatcctgggcacctttgctgcctgctggatgcccttcaccctgtacagcctgattgctgactacacctaccccagcatctacacctacgccaccctgctgcctgccacctacaacagcatcatcaaccctgtgatctatgccttcaggaaccaggagatccagaaggccctgtgcctgatctgctgcggctgcatccccagcagcctggcccagagggcccggagccccagtgatgtgtag

SEQ ID NO: 154662 - DNA, 1005 bp, Artificial Sequence
  derived and/or modified sequence
atgaacgaggacctgaaggtgaacctgagcggcctgccccgggactatctggatgcggccgccgccgagaacatctctgcggcagtgtcatcccgcgtgcctgctgttgaacccgagccggaacttgtggtcaacccttgggatatcgtgctctgcacttccggcaccttgatcagttgcgaaaacgcaatagtggtactgatcatcttccacaacccctcccttagagcccccatgttcctgcttattggcagcctcgcgcttgccgatctgttggcaggtatagggttaattacgaatttcgtctttgcctatttgctgcaatctgaggcaacaaaactagtcaccattgggttaatagtcgcgagtttcagcgcctccgtctgtagcctccttgcaatcacggtcgaccggtacctctccctctattacgccctaacatatcattccgagaggactgtcacattcacttacgtgatgctggtaatgctttgggggacaagcatatgcctcgggttgctgcccgtgatgggttggaactgcctgcgagacgagtctacatgctctgtcgtgaggccactgacaaagaataacgctgccatacttagtgtcagttttctgtttatgtttgcgcttatgcttcaactgtatatacaaatttgcaaaattgtgatgcgacatgcacaccaaatcgcccttcaacaccacttccttgccacatcccattatgttacaacccgaaagggtgtcagtactctggcgattatactggggacctttgccgcgtgctggatgcctttcacactgtattctctcattgcagactatacatacccatccatttacacttatgccacgctgctgcctgccacttacaactctatcattaatccagtaatctacgccttcaggaaccaggagatacagaaggctctctgcctgatatgttgcggatgtatcccttcctctctcgctcagagggcccgcagcccctccgatgtctag

SEQ ID NO: 154663 - DNA, 1005 bp, Artificial Sequence
  derived and/or modified sequence
atgaacgaggacctgaaggtgaacctgagcggcctgccccgggactacctggacgcggcagctgccgagaacatctccgccgctgtctcttctagggtgcccgccgttgagcccgaaccagagctggtagtgaacccctgggatattgtgttgtgtaccagtgggactctcatctcatgtgagaacgccattgttgtgctcattatctttcataatccatccctcagggcaccaatgtttttgctgatcggctcactcgcattggccgacttgctagcaggtatcggacttatcaccaacttcgtttttgcgtacttgctgcagtcagaagctactaaactggtgacaatcggactcatcgtcgcgtcattttctgcttctgtatgttccctgcttgcaatcacagtggaccgctatctgtccctgtactacgccttaacataccactcagaacgcaccgtgaccttcacttacgtcatgcttgtaatgctgtggggcacctctatctgtcttggtcttctaccagtgatgggatggaactgcctcagagacgaatccacttgttccgtggttagacccctgaccaagaacaatgcagctatcctctctgtctccttcctgttcatgttcgccctgatgctgcagttgtatatccagatctgtaagatagtgatgcgccacgcacatcaaatcgcactgcagcatcatttcctggcgacatcacattacgttacaacccgaaaaggagtctccaccctagccatcattttggggacatttgcagcttgttggatgccgttcactttgtattctctgatagccgactacacatacccctctatttatacatatgccacattgctgccagccacgtacaattccatcatcaacccagttatttatgccttcaggaatcaagaaattcagaaggccctttgtctcatctgttgtggctgcatcccgtcatcacttgctcagcgagccaggagcccttcagacgtgtag

SEQ ID NO: 154664 - DNA, 1005 bp, Artificial Sequence
  derived and/or modified sequence
atgaacgaggatctgaaagtgaatctgtctggcctcccacgcgactacctagacgccgcagccgcagaaaacatctcagcggctgtttcctctcgggtcccggctgtcgagcctgagccagaactggtggtgaatccctgggacatcgttctgtgcacttctggcacactcatctcctgtgagaatgccattgtcgtgctaatcatctttcacaatcctagcctgcgggctcctatgttcttgctgattgggtcgcttgctctcgctgacttacttgctgggatcgggttgataaccaatttcgtgtttgcttacttgctgcagagtgaagctactaaactggtcacaattggcttaattgtggccagcttctccgcatcagtctgttctttactcgcaattacggtagataggtatctgtctctctactatgctttgacctaccactccgagcgcactgtgacttttacctatgtgatgctggttatgttatggggaacaagtatctgcctgggtttgctgcccgtgatgggctggaattgcttgcgcgatgagagtacatgctctgtagtccgccctcttaccaaaaataacgcagcgattttgtcagtgtcatttttgtttatgttcgccttaatgctacagctctacattcagatctgtaagatcgttatgagacatgctcatcagatcgccttgcagcatcactttctggctacctcccattacgtcaccaccaggaagggggtttccaccttggctattatcctggggactttcgctgcctgctggatgccctttacattatactcccttatcgccgattacacttatcccagtatatatacttacgctaccctgctgccagccacatataatagcattattaatcctgtcatatacgcttttcggaaccaggagatccagaaggctttgtgcttgatctgttgtggatgtatcccttcatctttggcccagagagcgaggagcccatctgatgtgtag

SEQ ID NO: 154665 - DNA, 1005 bp, Artificial Sequence
  derived and/or modified sequence
atgaatgaggacttgaaggtgaacctcagcggacttcctagagattatctggacgcagctgcagccgagaatattagtgctgccgtgtcatcaagagttccagccgtggaaccagagcctgagctggtagtcaatccctgggatattgtcctctgcacctctggcaccctaatttcttgcgaaaacgcaattgtcgtgctcatcattttccacaacccatcactccgcgctccgatgttcttgctgataggcagcctcgcactggcggatcttctggccggtatcgggctgatcacgaactttgttttcgcctacctcctccaatcagaggcgactaagctcgtgacaatagggctgatcgtggcatccttttccgcaagcgtatgctccctcctggctatcaccgtggataggtacttgagtctgtactatgcactgacctaccattcagaacgcaccgttacattcacatacgttatgcttgtcatgctctggggcacctcgatttgcctgggccttcttcctgtgatggggtggaactgcctacgtgacgaatctacatgttccgtggtgcgaccgttaactaagaacaacgcggcaatcctgtctgtatcatttctgttcatgtttgccctgatgctgcaactctatattcagatctgcaagatcgtcatgagacatgcacatcaaatcgctttgcagcatcacttcctggccacatcccattacgtcaccactcgcaagggcgtgagcaccctcgccatcatcctgggcaccttcgccgcatgttggatgccttttaccctgtactccctcatagccgactatacctacccctccatctacacctacgctacattacttcctgccacctacaactctatcattaaccctgtgatttacgccttccgcaaccaagaaattcagaaagccctgtgtcttatttgctgtggctgcattccgtcgagcctcgcacagcgggctagaagtccttctgatgtatag

SEQ ID NO: 154666 - DNA, 1005 bp, Artificial Sequence
  derived and/or modified sequence
atgaacgaggacctgaaggtgaacctgagcggcctgcccagagactacctggacgccgccgccgccgagaacatcagcgccgccgtgagcagcagagtgcccgccgtggagcccgagcccgagctggtggtgaacccctgggacatcgtgctgtgcaccagcggcaccctgatcagctgcgagaacgccatcgtggtgctgatcatcttccacaaccccagcctgagagcccccatgttcctgctgatcggcagcctggccctggccgacctgctggccggcatcggcctgatcaccaacttcgtgttcgcctacctgctgcagagcgaggccaccaagctggtgaccatcggcctgatcgtggccagcttcagcgccagcgtgtgcagcctgctggccatcaccgtggacagatacctgagcctgtactacgccctgacctaccacagcgagagaaccgtgaccttcacctacgtgatgctggtgatgctgtggggcaccagcatctgcctgggcctgctgcccgtgatgggctggaactgcctgagagacgagagcacctgcagcgtggtgagacccctgaccaagaacaacgccgccatcctgagcgtgagcttcctgttcatgttcgccctgatgctgcagctgtacatccagatctgcaagatcgtgatgagacacgcccaccagatcgccctgcagcaccacttcctggccaccagccactacgtgaccaccagaaagggcgtgagcaccctggccatcatcctgggcaccttcgccgcctgctggatgcccttcaccctgtacagcctgatcgccgactacacctaccccagcatctacacctacgccaccctgctgcccgccacctacaacagcatcatcaaccccgtgatctacgccttcagaaaccaggagatccagaaggccctgtgcctgatctgctgcggctgcatccccagcagcctggcccagagagccagaagccccagcgacgtgtag

SEQ ID NO: 154667 - protein, 360 aa, Artificial Sequence
  derived and/or modified sequence
MDPEETSVYLDYYYATSPNSDIRETHSHVPYTSVFLPVFYTAVFLTGVLGNLVLMGALHFKPGSRRLIDIFIINLAASDFIFLVTLPLWVDKEASLGLWRTGSFLCKGSSYMISVNMHCSVLLLTCMSVDRYLAIVWPVVSRKFRRTDCAYVVCASIWFISCLLGLPTLLSRELTLIDDKPYCAEKKATPIKLIWSLVALIFTFFVPLLSIVTCYCCIARKLCAHYQQSGKHNKKLKKSIKIIFIVVAAFLVSWLPFNTFKFLAIVSGLRQEHYLPSAILQLGMEVSGPLAFANSCVNPFIYYIFDSYIRRAIVHCLCPCLKNYDFGSSTETSDSHLTKALSTFIHAEDFARRRKRSVSL

SEQ ID NO: 154668 - DNA, 1218 bp, Artificial Sequence
  derived and/or modified sequence
gatctttaaagggaggggaaaaaagagagagagaggcaggcactgtataaaagaagcttccttgaggtttctaaaatttatacaaaaacatcatatgtaagtaaactcaccagatttggcatctgctctttggtgatggacccagaagaaacttcagtttatttggattattactatgctacgagcccaaactctgacatcagggagacccactcccatgttccttacacctctgtcttccttccagtcttttacacagctgtgttcctgactggagtgctggggaaccttgttctcatgggagcgttgcatttcaaacccggcagccgaagactgatcgacatctttatcatcaatctggctgcctctgacttcatttttcttgtcacattgcctctctgggtggataaagaagcatctctaggactgtggaggacgggctccttcctgtgcaaagggagctcctacatgatctccgtcaatatgcactgcagtgtcctcctgctcacttgcatgagtgttgaccgctacctggccattgtgtggccagtcgtatccaggaaattcagaaggacagactgtgcatatgtagtctgtgccagcatctggtttatctcctgcctgctggggttgcctactcttctgtccagggagctcacgctgattgatgataagccatactgtgcagagaaaaaggcaactccaattaaactcatatggtccctggtggccttaattttcaccttttttgtccctttgttgagcattgtgacctgctactgttgcattgcaaggaagctgtgtgcccattaccagcaatcaggaaagcacaacaaaaagctgaagaaatctataaagatcatctttattgtcgtggcagcctttcttgtctcctggctgcccttcaatactttcaagttcctggccattgtctctgggttgcggcaagaacactatttaccctcagctattcttcagcttggtatggaggtgagtggacccttggcatttgccaacagctgtgtcaaccctttcatttactatatcttcgacagctacatccgccgggccattgtccactgcttgtgcccttgcctgaaaaactatgactttgggagtagcactgagacatcagatagtcacctcactaaggctctctccaccttcattcatgcagaagattttgccaggaggaggaagaggtctgtgtcactctaa

SEQ ID NO: 154669 - DNA, 1083 bp, Artificial Sequence
  derived and/or modified sequence
atggacccagaggagacatccgtgtatctcgactattattatgcgacgtcacctaatagcgacatccgagagactcactcgcatgtcccatatacttctgtgttcctgcccgtgttttacacagcagtatttttaactggagttctggggaacctggtgcttatgggggccctgcactttaagccaggatcgagacgactaattgacattttcataatcaatcttgcagcatccgattttatatttctcgtgactctgcccctctgggtcgacaaagaagcttccctcggactgtggcgcacaggttcctttctgtgcaaaggatcttcctacatgatctctgtcaacatgcactgttccgtcctcctgctaacgtgtatgtctgtcgataggtatctcgccatcgtttggcccgtggtgtcacgaaagtttcggagaacagactgcgcctacgtagtgtgcgccagcatttggtttatttcctgcctcctgggtctgcccacactgctctctcgagagctgacattgatcgatgataagccctattgcgcagaaaagaaagccaccccaattaagctcatatggtctctggtagcgctgatattcaccttctttgtccccttgttatcaattgtgacatgttattgttgcattgcgcggaagctgtgcgcccactaccagcagtcaggaaaacataacaaaaagctaaaaaaatcgatcaagattatctttatcgtggtggccgcttttttggtgtcttggctccctttcaatacctttaagtttcttgccattgtttccggcctccgccaagaacactacttgccgagtgcaatcctgcagctagggatggaggtgagtggtccactggcttttgccaattcatgcgtgaatccgttcatctattacatctttgatagctatatccgccgcgcgattgtgcactgcctttgtccatgtctaaaaaactacgacttcggatccagtaccgaaacctccgactcccatctcaccaaagctctgagcactttcatacatgcagaagatttcgcccggaggcgcaagcgatccgtttcgctgtag

SEQ ID NO: 154670 - DNA, 1083 bp, Artificial Sequence
  derived and/or modified sequence
atggaccctgaggagacctctgtgtacctggactactactatgccaccagccccaacagcgacatccgggagacccacagccacgtgccctacacctctgtgttcctgcctgtgttctacacagctgtgttcctgactggagtgctgggcaacctggtgctgatgggcgccctgcacttcaagccaggcagccggcggctgattgacatcttcatcatcaacctggccgccagtgacttcatcttcctggtgaccctgcccctgtgggtggacaaggaggccagcctgggcctgtggaggacaggcagcttcctgtgcaagggcagcagctacatgatctctgtgaacatgcactgcagcgtgctgctgctgacctgcatgtctgtggaccgctacctggccatcgtgtggcctgtggtgtccaggaagttcagaagaacagactgtgcctacgtggtgtgtgccagcatctggttcatcagctgcctgctgggcctgcccaccctgctgagccgggagctgaccctgattgatgacaagccctactgtgccgagaagaaggccacccccatcaagctgatctggagcctggtggccctgatcttcaccttctttgtgcccctgctgagcatcgtgacctgctactgctgcatcgccaggaagctgtgtgcccactaccagcagagcggcaagcacaacaagaagctgaagaagagcatcaagatcatcttcatcgtggtggccgccttcctggtgtcctggctgcccttcaacaccttcaagttcctggccatcgtgtctggcctgcggcaggagcactacctgcccagcgccatcctgcagctgggcatggaggtgtctggccccctggcctttgccaacagctgtgtgaaccccttcatctactacatctttgacagctacatccggcgggccatcgtgcactgcctgtgcccctgcctgaagaactatgactttggcagcagcacagagaccagtgacagccacctgaccaaggccctgagcaccttcatccatgctgaggactttgcccggcggaggaagaggtctgtgtccctgtag

SEQ ID NO: 154671 - DNA, 1083 bp, Artificial Sequence
  derived and/or modified sequence
atggaccccgaggagaccagcgtgtacctggactactactacgccacttctccgaatagcgacatcagggaaacacattcccacgtgccctacacatccgtctttttacctgtgttttataccgccgtctttctaaccggagttctaggtaatctggtgctgatgggcgccctgcactttaagcctgggagccggagacttatagacatcttcataatcaatctcgctgcttctgattttatcttcctcgtgaccctgcctctttgggtggataaagaggcgtcactcggcctctggcggactggatctttcctctgcaagggttcatcttacatgatttcagtaaatatgcattgctccgtcctgttgctgacatgtatgtcggtggatagataccttgccattgtttggccagttgtcagtagaaaatttcgccgcacagactgtgcatacgtggtttgcgcgtctatttggttcatttcctgcctgctcggtttaccgacgctcctgagtagagagttaaccctgatcgatgataaaccctattgcgcggagaagaaggctacacctattaagctgatctggagcctagtggctcttatttttactttctttgtgccactactgtctattgtgacctgctactgttgtattgctagaaaattgtgtgcccactaccagcagagtggtaagcataacaaaaaactgaaaaagtcaatcaagatcatatttattgtggtggcagcttttctcgttagctggctcccctttaatacatttaaattcctggctatcgtatctggactgcgccaggaacattatctcccctccgccatcctccagcttgggatggaggtttccggccctttggcatttgccaattcttgtgtgaacccatttatctattacattttcgactcctacatcaggcgggcaatagtgcattgcctgtgcccttgtctgaaaaattatgactttggcagcagcaccgagacgtctgactctcacctgaccaaagccctgtcaacatttattcatgcagaagacttcgcacgccggaggaagcgttccgtttctctgtag

SEQ ID NO: 154672 - DNA, 1083 bp, Artificial Sequence
  derived and/or modified sequence
atggaccccgaggaaacaagtgtatatttggattattattatgccacctcccccaattccgacataagggagacgcactcccacgtgccctatacctccgtgtttttacccgtgttctatacagctgtgttcttgacgggtgtgctgggaaatctggtgctcatgggagccctgcactttaaaccgggatctcgcagacttattgatatttttatcatcaacctggccgcaagcgacttcatctttctggttacattaccactgtgggtagataaggaagctagtttaggcctgtggcgcactggtagtttcctctgtaaggggtccagctacatgattagtgttaatatgcattgcagtgtattgttacttacgtgcatgtccgtggatcggtatctcgcaattgtgtggccagtcgtttctcggaaattccggagaacagactgcgcctatgtcgtatgtgctagcatctggtttatctcctgcctgctgggacttcccaccctgctgtcaagagaactgacgctgattgatgataaaccttattgcgccgagaaaaaggctacccctatcaagcttatctggagcttagtggcactgatttttacattctttgtacccctgctaagtattgttacttgctattgttgcatcgccaggaaactgtgcgcgcactatcagcagagcggcaagcacaataaaaagctcaagaagtcaattaagattatcttcatagtcgttgctgccttcctggtgagttggctgccattcaatacattcaagtttctggccatagtgagtggtctacgacaggagcactacctgccaagcgccattctccagctggggatggaggtgtctggcccattagcttttgccaactcatgcgtaaatccctttatctactacattttcgattcctatatccgtagagcaatcgtgcactgcttgtgcccatgcctcaagaattacgattttgggtctagcacagagacaagcgattctcatttgaccaaagctctgagcacttttatacacgccgaagactttgccaggagaaggaaacggagcgtaagtctttag

SEQ ID NO: 154673 - DNA, 1083 bp, Artificial Sequence
  derived and/or modified sequence
atggaccccgaggagaccagcgtgtacctggactactactacgccaccagccccaacagcgacatcagagagacccacagccacgtgccctacaccagcgtgttcctgcccgtgttctacaccgccgtgttcctgaccggcgtgctgggcaacctggtgctgatgggcgccctgcacttcaagcccggcagcagaagactgatcgacatcttcatcatcaacctggccgccagcgacttcatcttcctggtgaccctgcccctgtgggtggacaaggaggccagcctgggcctgtggagaaccggcagcttcctgtgcaagggcagcagctacatgatcagcgtgaacatgcactgcagcgtgctgctgctgacctgcatgagcgtggacagatacctggccatcgtgtggcccgtggtgagcagaaagttcagaagaaccgactgcgcctacgtggtgtgcgccagcatctggttcatcagctgcctgctgggcctgcccaccctgctgagcagagagctgaccctgatcgacgacaagccctactgcgccgagaagaaggccacccccatcaagctgatctggagcctggtggccctgatcttcaccttcttcgtgcccctgctgagcatcgtgacctgctactgctgcatcgccagaaagctgtgcgcccactaccagcagagcggcaagcacaacaagaagctgaagaagagcatcaagatcatcttcatcgtggtggccgccttcctggtgagctggctgcccttcaacaccttcaagttcctggccatcgtgagcggcctgagacaggagcactacctgcccagcgccatcctgcagctgggcatggaggtgagcggccccctggccttcgccaacagctgcgtgaaccccttcatctactacatcttcgacagctacatcagaagagccatcgtgcactgcctgtgcccctgcctgaagaactacgacttcggcagcagcaccgagaccagcgacagccacctgaccaaggccctgagcaccttcatccacgccgaggacttcgccagaagaagaaagagaagcgtgagcctgtag

SEQ ID NO: 154674 - protein, 367 aa, Artificial Sequence
  derived and/or modified sequence
MSKRSWWAGSRKPPREMLKLSGSDSSQSMNGLEVAPPGLITNFSLATAEQCGQETPLENMLFASFYLLDFILALVGNTLALWLFIRDHKSGTPANVFLMHLAVADLSCVLVLPTRLVYHFSGNHWPFGEIACRLTGFLFYLNMYASIYFLTCISADRFLAIVHPVKSLKLRRPLYAHLACAFLWVVVAVAMAPLLVSPQTVQTNHTVVCLQLYREKASHHALVSLAVAFTFPFITTVTCYLLIIRSLRQGLRVEKRLKTKAVRMIAIVLAIFLVCFVPYHVNRSVYVLHYRSHGASCATQRILALANRITSCLTSLNGALDPIMYFFVAEKFRHALCNLLCGKRLKGPPPSFEGKTNESSLSAKSEL

SEQ ID NO: 154675 - protein, 136 aa, Artificial Sequence
  derived and/or modified sequence
MSKRSWWAGSRKPPREMLKLSGSDSSQSMNGLEVAPPGLITNFSLATAEQCGQETPLENMLFASFYLLDFILALVGNTLALWLFIRDHKSGTPANVFLMHLAVADLSCVLVLPTRLVYHFSGNHWPFGEIACRLTG

SEQ ID NO: 154676 - DNA, 2062 bp, Artificial Sequence
  derived and/or modified sequence
ccgacacccacgggcggagatcacctgctgccccgcagacccctgtcccttcctcccggaccagcagctagaggatgtccaaacggagttggtgggctggatccagaaagcccccaagagagatgctgaaactctcaggctctgactccagccaaagcatgaatggccttgaagtggctcccccaggtctgatcaccaacttctccctggccacggcagagcaatgtggccaggagacgccactggagaacatgctgttcgcctccttctaccttctggattttatcctggctttagttggcaataccctggctctgtggcttttcatccgagaccacaagtccgggaccccggccaacgtgttcctgatgcatctggccgtggccgacttgtcgtgcgtgctggtcctgcccacccgcctggtctaccacttctctgggaaccactggccatttggggaaatcgcatgccgtctcaccggcttcctcttctacctcaacatgtacgccagcatctacttcctcacctgcatcagcgccgaccgtttcctggccattgtgcacccggtcaagtccctcaagctccgcaggcccctctacgcacacctggcctgtgccttcctgtgggtggtggtggctgtggccatggccccgctgctggtgagcccacagaccgtgcagaccaaccacacggtggtctgcctgcagctgtaccgggagaaggcctcccaccatgccctggtgtccctggcagtggccttcaccttcccgttcatcaccacggtcacctgctacctgctgatcatccgcagcctgcggcagggcctgcgtgtggagaagcgcctcaagaccaaggcagtgcgcatgatcgccatagtgctggccatcttcctggtctgcttcgtgccctaccacgtcaaccgctccgtctacgtgctgcactaccgcagccatggggcctcctgcgccacccagcgcatcctggccctggcaaaccgcatcacctcctgcctcaccagcctcaacggggcactcgaccccatcatgtatttcttcgtggctgagaagttccgccacgccctgtgcaacttgctctgtggcaaaaggctcaagggcccgccccccagcttcgaagggaaaaccaacgagagctcgctgagtgccaagtcagagctgtgagcggggggcgccgtccaggccgagcgcagactgtttaggactcagcagacccagcaagaggcatctgccctttccccagccacctccccagcaagcaacctgaaatctcagcagatgcccaccatttctctagatcgcctagtctcaacccataaaaaggaagaactgacaaaggggatccatcggccacccctctgcaggggcttgtgatggctacaatggctcctagacactcaacgacttcatctgtggcagggagagaggaggccggaagaacaacccctgaacaatggaggcctttctttcccgctaggctcccagcctccttcccgctacagaatcgctcatcggcgaggctcagcagaaagaccctgaaggcaggctgcaaatgacccagaagagggacctgggagtcctggtggggacggggagggagtctcaatactcctttgcagtgcaaggtactctgagtcccctctgtagtgcctctgccagacacacactgcctgagttgaagagacacaggccacacatttcaggctggttgccagcggacgtcagcactcacggcctgcagggactcagcacagctctggattctggatctctcctgctgtaaccccacgcacaagcctgcaacccccagagctctttgacaggctcccaggcctcccagtcctggacaagcatgtgcagtcacgggagctcagctcaggccagggctgggctgtgcacctgcctcccactgacccagacccacttcctccagagaggcctctctccgcctgagctatttcccttgctagtgtgcagatatttccctaacatgtccttttttgtatttgtttgtacggaccataaatataactgtagctttaagacta

SEQ ID NO: 154677 - DNA, 1727 bp, Artificial Sequence
  derived and/or modified sequence
gacacaacaagggacccctcaggaatgaagcagcctttcagggccagaggggctgtggtctcccttcctctccttaaatagccagcgttccacccacagcggcaaggagccccctgccaccaccgacacccacgggcggagatcacctgctgccccgcagacccctgtcccttcctcccggaccagcagctagaggctctgactccagccaaagcatgaatggccttgaagtggctcccccaggtctgatcaccaacttctccctggccacggcagagcaatgtggccaggagacgccactggagaacatgctgttcgcctccttctacctcccacttcccaggcagcccaggatgtgtactgtcaccggccttaccgcaggatccacagcacggagcaaacagcatttggaagtcgtgttcgcagtacttccggccttcaaactgcaaaggggtcgcagagagaggacaagcaaaccacctatcatccccatgagcagcccaggcccttgttgggtcaggacctgacagcaggggatgaggcactgaggcaggggcatgccgggctgaggctggagcagtgggtcccaggcctggccagagaggacactggcccttttgggatggtggggtgcaaagggaggtgcccccgtggaagctggagaggtccgtgaggccacctgtcaaagggccactggtgtctactgaggatctggaccctgttggtccggagaacaggctgggggcgaggcggttttaagccaggagggatgagatccagtctgaagtgtagtgtcacttggtcctatttcgtataccttctctgtgggagtatccagctctctcagaggccatgaagacccgggtataggagacagaaggaagggaacgcaggaagggcctgggcacggggaagtgggaagagctcagggctgcggccagcaggagccagtgtgcacaccctccaggcggcagctgccagcgagggcccctgtgctggccacaagcggggccaaagcctgcctctgctttcctctaacaattgtattttctgttttttaattggtttttccctgttctctaaaatgagtgtcttattagactaaactggatatagccctacccagtgacctgtagagtcaggaagggcttaaactctttcagcaatgaaaatcttctgggcacctgctgtgtgtgagagagagaggctttgttctgggcatatggccacccctcctagagctttgcccacccctcccgctgcctctacacttagacagcattcctcaggaggctgaagacactgtgaggaacagcggctcttgctctgccaggcggaccacaggccccacatccatccaccagccagtcccatcagctctaccttgaaacagagccagcatctgacccctggccaccaccgccaccacaagcacaagtgatgttctggtaaatgctcaacagccagctctctggggcgcagaggcaggccctgctgtggggcgtttgccagtgtccatggtgtgaatattcccgtcatggccaactcctggctgccaacatgacatcgatgtggacttgaggggagatgtgcagtggccacaccagcacaatggacagaaataaccccatcagcatagacgatagtaaagtggaacaaaataattagcaagtggtatgctttgagtatttgttacctttgtttttaataaaattgtatcccattgt

SEQ ID NO: 154678 - DNA, 1177 bp, Artificial Sequence
  derived and/or modified sequence
gagaaaatactcccagctggcctgatacccaggcacaggcttctcctaaacacaggtctccccacctgtcaggatgtccaaacggagttggtgggctggatccagaaagcccccaagagagatgctgaaactctcaggctctgactccagccaaagcatgaatggccttgaagtggctcccccaggtctgatcaccaacttctccctggccacggcagagcaatgtggccaggagacgccactggagaacatgctgttcgcctccttctaccttctggattttatcctggctttagttggcaataccctggctctgtggcttttcatccgagaccacaagtccgggaccccggccaacgtgttcctgatgcatctggccgtggccgacttgtcgtgcgtgctggtcctgcccacccgcctggtctaccacttctctgggaaccactggccatttggggaaatcgcatgccgtctcaccggcttcctcttctacctcaacatgtacgccagcatctacttcctcacctgcatcagcgccgaccgtttcctggccattgtgcacccggtcaagtccctcaagctccgcaggcccctctacgcacacctggcctgtgccttcctgtgggtggtggtggctgtggccatggccccgctgctggtgagcccacagaccgtgcagaccaaccacacggtggtctgcctgcagctgtaccgggagaaggcctcccaccatgccctggtgtccctggcagtggccttcaccttcccgttcatcaccacggtcacctgctacctgctgatcatccgcagcctgcggcagggcctgcgtgtggagaagcgcctcaagaccaaggcagtgcgcatgatcgccatagtgctggccatcttcctggtctgcttcgtgccctaccacgtcaaccgctccgtctacgtgctgcactaccgcagccatggggcctcctgcgccacccagcgcatcctggccctggcaaaccgcatcacctcctgcctcaccagcctcaacggggcactcgaccccatcatgtatttcttcgtggctgagaagttccgccacgccctgtgcaacttgctctgtggcaaaaggctcaagggcccgccccccagcttcgaagggaaaaccaacgagagctcgctgagtgccaagtcagagctgtga

SEQ ID NO: 154679 - DNA, 581 bp, Artificial Sequence
  derived and/or modified sequence
gaccaagtcagagtactgtggaacctggattcctggggaatggggtccccatgaggaactccacattggactaagaacagaccctgttcctggaagcagcaggaaaccatctctggtgttagaacttcaggcatcttgaaacactctgaagccgggggcaatcttttcaggatgtccaaacggagttggtgggctggatccagaaagcccccaagagagatgctgaaactctcaggctctgactccagccaaagcatgaatggccttgaagtggctcccccaggtctgatcaccaacttctccctggccacggcagagcaatgtggccaggagacgccactggagaacatgctgttcgcctccttctaccttctggattttatcctggctttagttggcaataccctggctctgtggcttttcatccgagaccacaagtccgggaccccggccaacgtgttcctgatgcatctggccgtggccgacttgtcgtgcgtgctggtcctgcccacccgcctggtctaccacttctctgggaaccactggccatttggggaaatcgcatgccgtctcaccggctt

SEQ ID NO: 154680 - DNA, 2598 bp, Artificial Sequence
  derived and/or modified sequence
aaacgtcctgttgtgtccctcagctccagcccaagccccccacccagcccccgcctgctctgagtctctgagacagtcacacactcagactatgtggccaagctgggggcggggggcatgggctagggacacactagaatattcacgctccggtggcagcagcagcagcagccagaggagcagcccgacacaacaagggacccctcaggaatgaagcagcctttcagggccagaggggctgtggtctcccttcctctccttaaatagccagcgttccacccacagcggcaaggagccccctgccaccaccgacacccacgggcggagatcacctgctgccccgcagacccctgtcccttcctcccggaccagcagctagagctctccgccctcaccgtggttttagcagtcctagggaaagtgccagccgagaccagccagaccaagtcagagtactgtggaacctggattcctggggaatggggtccccatgaggaactccacattggactaagaacagaccctgttcctggaagcagcaggaaaccatctctggtgttagaacttcaggcatcttgaaacactctgaagccgggggcaatcttttcaggatgtccaaacggagttggtgggctggatccagaaagcccccaagagagatgctgaaactctcaggctctgactccagccaaagcatgaatggccttgaagtggctcccccaggtctgatcaccaacttctccctggccacggcagagcaatgtggccaggagacgccactggagaacatgctgttcgcctccttctaccttctggattttatcctggctttagttggcaataccctggctctgtggcttttcatccgagaccacaagtccgggaccccggccaacgtgttcctgatgcatctggccgtggccgacttgtcgtgcgtgctggtcctgcccacccgcctggtctaccacttctctgggaaccactggccatttggggaaatcgcatgccgtctcaccggcttcctcttctacctcaacatgtacgccagcatctacttcctcacctgcatcagcgccgaccgtttcctggccattgtgcacccggtcaagtccctcaagctccgcaggcccctctacgcacacctggcctgtgccttcctgtgggtggtggtggctgtggccatggccccgctgctggtgagcccacagaccgtgcagaccaaccacacggtggtctgcctgcagctgtaccgggagaaggcctcccaccatgccctggtgtccctggcagtggccttcaccttcccgttcatcaccacggtcacctgctacctgctgatcatccgcagcctgcggcagggcctgcgtgtggagaagcgcctcaagaccaaggcagtgcgcatgatcgccatagtgctggccatcttcctggtctgcttcgtgccctaccacgtcaaccgctccgtctacgtgctgcactaccgcagccatggggcctcctgcgccacccagcgcatcctggccctggcaaaccgcatcacctcctgcctcaccagcctcaacggggcactcgaccccatcatgtatttcttcgtggctgagaagttccgccacgccctgtgcaacttgctctgtggcaaaaggctcaagggcccgccccccagcttcgaagggaaaaccaacgagagctcgctgagtgccaagtcagagctgtgagcggggggcgccgtccaggccgagcgcagactgtttaggactcagcagacccagcaagaggcatctgccctttccccagccacctccccagcaagcaacctgaaatctcagcagatgcccaccatttctctagatcgcctagtctcaacccataaaaaggaagaactgacaaaggggatccatcggccacccctctgcaggggcttgtgatggctacaatggctcctagacactcaacgacttcatctgtggcagggagagaggaggccggaagaacaacccctgaacaatggaggcctttctttcccgctaggctcccagcctccttcccgctacagaatcgctcatcggcgaggctcagcagaaagaccctgaaggcaggctgcaaatgacccagaagagggacctgggagtcctggtggggacggggagggagtctcaatactcctttgcagtgcaaggtactctgagtcccctctgtagtgcctctgccagacacacactgcctgagttgaagagacacaggccacacatttcaggctggttgccagcggacgtcagcactcacggcctgcagggactcagcacagctctggattctggatctctcctgctgtaaccccacgcacaagcctgcaacccccagagctctttgacaggctcccaggcctcccagtcctggacaagcatgtgcagtcacgggagctcagctcaggccagggctgggctgtgcacctgcctcccactgacccagacccacttcctccagagaggcctctctccgcctgagctatttcccttgctagtgtgcagatatttccctaacatgtccttttttgtatttgtttgtacggaccataaatataactgtagctttaagact

SEQ ID NO: 154681 - DNA, 1104 bp, Artificial Sequence
  derived and/or modified sequence
atgtctaaacgctcttggtgggcagggagccggaaacctcctcgcgagatgctgaagctgagtgggagcgacagctctcagagtatgaatggactcgaagttgctcccccaggtcttatcacaaacttctctctggcgaccgccgaacaatgtggacaggagacccccctcgaaaacatgttattcgcaagcttttatctgcttgatttcatcctggctctggtcgggaatacactggccttatggctgtttatccgggaccacaaaagcgggacacccgcaaacgtatttctaatgcatctagctgttgctgatctctcttgtgtactagtgcttcccacacgtctagtctatcactttagcgggaaccactggccctttggagagatcgcttgtcggctgacaggcttcctgttctacctcaacatgtacgcaagtatctacttcctgacgtgcattagcgctgatagattcttagcgatagtccatccagtgaagtctttaaaactgcggagacctttatatgcccatctggcatgtgcgtttctgtgggtggtggtggcagtcgccatggcacccctcttagtaagtcctcaaaccgtccagaccaaccacactgtggtatgtcttcaactgtatcgggagaaggcctcccaccacgccctggtgagcctggccgtagcatttactttcccatttatcaccactgtcacctgctatctgcttataatccgtagcttgagacagggactcagggtggagaaacgattaaaaaccaaagccgtcagaatgatcgctattgttcttgctatatttctggtgtgtttcgtgccctaccacgtcaataggtccgtgtatgtactgcactatagaagccatggcgcctcatgtgccacacagcgcatcttggccttggccaacagaattacttcctgcttgacatccctcaatggcgccttggatccaatcatgtacttttttgttgccgagaagtttcgtcacgctctctgtaacttgctatgcggcaagaggcttaaaggccctccaccgtctttcgagggaaagactaatgaatcgtccctctcagccaagtctgaactgtag

SEQ ID NO: 154682 - DNA, 1104 bp, Artificial Sequence
  derived and/or modified sequence
atgagtaagcggtcctggtgggcggggtcaagaaagccccccagagaaatgctgaagctcagcggttcggactcttcccagagcatgaacggtctggaggtagccccaccaggcctgatcacaaatttctccttggccaccgccgagcaatgcggacaggaaacccccctcgagaatatgcttttcgcaagcttctatctgctggacttcattctggccttagttggcaacaccctagcactatggctctttatcagggaccacaaatccgggactcccgccaatgtctttttaatgcatctggccgtggctgacctgtcctgtgtgctcgttctgcctacccgcctcgtgtaccacttttctgggaaccattggccgttcggagagatagcctgtcgcctcactggctttctcttttacctcaacatgtacgcttccatctacttcttaacctgtataagcgccgacagattccttgccatcgtccatcctgtgaagagcttaaaattacgaaggcccttgtacgcgcatttggcttgcgccttcttgtgggtcgtagttgccgtcgcgatggctcccttgctggtttccccgcagactgtgcagactaaccatacagtggtctgtcttcaactgtatagagaaaaagcctcccaccatgccctcgtatccctggctgtggcctttacattcccgtttatcaccacagtgacctgctacctcctgattatccgtagtctcaggcagggacttcgggtcgaaaagcgtctcaaaactaaggcggtcagaatgatcgcaatcgtgctggcaattttcttggtgtgcttcgtcccctaccatgtgaaccggtccgtttacgttcttcactacagatcacacggggcctcctgcgcaacgcagagaatactcgccttggctaaccgtatcacctcttgtcttactagtctgaatggagcactcgatcccataatgtattttttcgtggcggaaaaatttaggcacgccctctgtaatctgctttgcggtaagagattaaaaggcccacctccatcatttgaaggcaaaaccaatgagtccagcctgagcgctaaaagtgaactttag

SEQ ID NO: 154683 - DNA, 411 bp, Artificial Sequence
  derived and/or modified sequence
atgtcaaaacggagctggtgggctggctccagaaagccaccccgagaaatgttgaaactttccggatcagacagttcgcagtcaatgaatggcctggaggtggccccgcctggtctgatcacaaacttctcattggccactgccgagcagtgtgggcaagagacccctctggaaaacatgctgtttgcgtctttctacttactggattttatcctggcactcgtgggcaacacgctggcactgtggctgtttattcgggaccacaaatctgggaccccagcaaacgtgttcctgatgcacctggcagtggccgaccttagctgtgtcctggtcctcccaacccgtcttgtgtatcatttctcagggaatcattggcccttcggcgagatcgcttgtaggttgaccgggtag

SEQ ID NO: 154684 - DNA, 1104 bp, Artificial Sequence
  derived and/or modified sequence
atgagtaaaaggtcatggtgggccggctcacggaaaccgccccgggagatgctgaagttatcggggtctgactcttcccagagtatgaacggactggaggttgctccaccagggcttatcactaacttctctttggccacagccgagcaatgtgggcaggaaacccctctcgaaaacatgttatttgctagcttttacctcctcgatttcatcctggccctggtcgggaacactcttgcgctctggttgtttatcagagatcacaagagcgggactcccgcaaacgtgtttctgatgcacctggcagtcgccgacttgagttgtgtcctggtccttcctacacggctggtctatcatttcagtgggaatcactggccattcggcgaaatcgcatgtagacttacaggtttcctgttttaccttaatatgtatgctagtatttattttctgacctgcatttcagccgaccggttccttgcgatcgtgcatcctgtgaagtccttaaaactccgtagacctctgtacgctcacttagcttgtgcttttctgtgggttgtggttgcggtggccatggcccctctcttggtgtctcctcagacagtacagaccaatcatacagtcgtttgcctccagctctacagggagaaggctagccatcatgcactggtgtctctcgctgtggcgtttacctttccttttataactactgtgacatgctaccttcttattatcaggtcattgaggcagggactcagggtagagaagaggctgaaaacaaaggccgttaggatgattgccattgttctcgccatttttctggtctgctttgttccttatcatgtaaacaggagcgtgtatgtactgcactatcgctcccacggggcatcctgcgctacacaaaggatcctggcattagccaatcgaattacctcttgcctgaccagtctgaacggagcactcgatccaatcatgtactttttcgtcgcagaaaaatttaggcacgcactgtgcaatcttctgtgtgggaagcgcctgaagggaccccctccctcgttcgaggggaagacaaacgaaagcagcctttctgccaaatcagagctgtag

SEQ ID NO: 154685 - DNA, 1104 bp, Artificial Sequence
  derived and/or modified sequence
atgagcaagaggtcctggtgggccggcagcaggaagccaccccgggagatgctgaagctgagcggcagtgacagcagccagagcatgaatggcctggaggtggcccctcctggcctcatcaccaacttcagcctggccacagctgagcagtgtggccaggagacccccctggagaacatgctgtttgccagcttctacctgctggacttcatcctggccctggtgggcaacaccctggccctgtggctgttcatccgggaccacaagagcggcaccccagccaacgtgttcctgatgcacctggccgtggccgacctgagctgtgtgctggtgctgcccacccggctggtgtaccacttcagcggcaaccactggccctttggagagatcgcctgccgcctgaccggcttcctgttctacctgaacatgtatgccagcatctacttcctgacctgcatctctgctgaccgcttcctggccatcgtgcaccctgtgaagagcctgaagctgcggcggcccctgtatgcccacctggcctgtgccttcctgtgggtggtggtggccgtggccatggcccccctgctggtgagcccccagacagtgcagaccaaccacacagtggtgtgcctgcagctgtaccgggagaaggccagccaccacgccctggtgtccctggccgtggccttcaccttccccttcatcaccaccgtgacctgctacctgctgatcatccgcagcctgcggcagggcctgcgggtggagaagaggctgaagaccaaggctgtgaggatgattgccatcgtgctggccatcttcctggtgtgctttgtgccctaccacgtgaacagatctgtgtatgtgctgcactaccgcagccatggagccagctgtgccacccagaggatcctggccctggccaaccgcatcaccagctgcctgaccagcctgaatggagccctggaccccatcatgtacttctttgtggccgagaagttcagacatgccctgtgcaacctgctgtgtgggaagaggctgaagggccccccacccagctttgagggcaagaccaatgaaagcagcctgagcgccaagtctgagctgtag

SEQ ID NO: 154686 - DNA, 411 bp, Artificial Sequence
  derived and/or modified sequence
atgagcaagaggtcctggtgggccggcagcaggaagccaccccgggagatgctgaagctgagcggcagtgacagcagccagagcatgaatggcctggaggtggcccctcctggcctcatcaccaacttcagcctggccacagctgagcagtgtggccaggagacccccctggagaacatgctgtttgccagcttctacctgctggacttcatcctggccctggtgggcaacaccctggccctgtggctgttcatccgggaccacaagagcggcaccccagccaacgtgttcctgatgcacctggccgtggccgacctgagctgtgtgctggtgctgcccacccggctggtgtaccacttcagcggcaaccactggccctttggagagatcgcctgccgcctgactggatag

SEQ ID NO: 154687 - DNA, 1104 bp, Artificial Sequence
  derived and/or modified sequence
atgagcaagcggagctggtgggccggcagccggaagcccccccgggagatgctgaagcttagtggatctgacagttcccagagcatgaacggcctcgaggtggcgccgcctggacttatcacaaatttctccctggccacagccgaacagtgtggacaggagactccacttgagaacatgctattcgcctccttttacttgttggacttcattctggcgctggtcgggaacaccttggctttgtggcttttcattcgggaccacaagtccggaacccccgccaatgtatttctgatgcacctcgctgtcgctgatctttcgtgcgtcctggtacttccgacccgcctcgtataccacttttcgggaaaccactggccattcggcgagattgcgtgccggctcaccggcttcctgttctacctcaatatgtatgcctccatctatttcctaacctgcatcagtgccgatcggttcctggccatcgtgcacccggtgaagtctctgaagctgcgcagacctctgtacgcgcatctggcttgtgctttcctgtgggtcgttgtggctgtcgctatggctcctctgcttgtgagtccccaaaccgtacaaactaaccacacagtggtgtgcctgcaactgtaccgagaaaaggcatcccaccacgctctcgtcagtctggccgtggcctttactttcccttttattacaaccgttacttgttaccttttgatcattcgaagtcttagacaaggcctgagggtggagaaacggcttaaaacaaaagccgtgcggatgattgcaatcgtcctggctatcttcctcgtatgcttcgtgccgtaccacgtgaacaggtccgtctacgtcctccattatcgatcccacggcgccagctgtgctactcaacgtatcctcgcactggcaaaccggattacgagctgccttactagtctgaacggagccctggatccaatcatgtatttttttgtcgccgaaaaatttaggcacgcactatgcaacctgctgtgtggcaagcgattaaaggggccaccaccgagttttgaggggaaaaccaacgagtcctccctgtccgccaagagcgagctctag

SEQ ID NO: 154688 - DNA, 1104 bp, Artificial Sequence
  derived and/or modified sequence
atgagcaagcggagctggtgggccggcagccggaagcccccccgggaaatgttgaaactgtctgggtcagattctagtcagtcaatgaacggactagaagtggctccaccggggctgattaccaactttagtctcgcaaccgcagaacaatgcggccaggagacccccctggaaaatatgttgttcgcgtccttctacctgctggacttcatcttggcgctagtggggaacactctagccctgtggctcttcatacgggatcacaaaagcggaactcccgcgaacgtgtttcttatgcacttggctgtcgccgatctgagctgcgtactggttcttccgacgcggctagtgtaccatttcagtgggaatcattggcctttcggggagatcgcctgtaggctgaccgggttccttttctacctgaatatgtacgcgtctatttattttctcacatgcatcagcgcggacaggtttctggccatcgtgcaccctgtgaaaagcctcaagcttagaaggcctctttacgcgcatctcgcttgcgccttcctgtgggtggttgtcgcggtcgcaatggcgcccttgttggttagcccccaaacagtccagaccaatcacaccgtagtgtgtctgcagttgtaccgggagaaagcgagccaccatgctttagtgtctctcgctgtcgcctttactttcccctttatcacgaccgtaacctgttacttgctgataattcgtagtttacgccaaggactgagagtggagaagcgactgaagacgaaagctgtcagaatgattgctatcgtgcttgcaatcttcctggtctgtttcgtgccgtaccacgtgaaccgatctgtatacgttttgcattacagatcgcatggtgccagctgcgcaacccaaagaatcctggctctcgccaatcgaataacaagctgtctgactagcctcaacggagcactcgaccctattatgtatttttttgtcgccgagaaatttagacatgcgctgtgtaatctgctgtgtgggaagcgtctcaagggccctcctccaagctttgaagggaaaacgaatgagagctcgctcagcgctaagtccgagttgtag

SEQ ID NO: 154689 - DNA, 411 bp, Artificial Sequence
  derived and/or modified sequence
atgagcaagcggagctggtgggccggcagccggaagcccccccgggagatgctcaagctgagtggttcggatagttcccagtcaatgaacggccttgaggtggccccgcccggtttgataacgaacttctccctggcaacagccgaacagtgcggccaagaaactccactggaaaacatgcttttcgcttcattctatctgctagacttcatcctggccttggtgggcaatactcttgctctgtggctgttcattagggaccacaaaagtgggacgcctgcaaacgtatttctgatgcacctggccgtcgcagacttgagttgtgtactggtgctccccaccaggctggtgtaccatttctcaggcaaccactggcctttcggtgagatcgcttgccgtcttacaggttag

SEQ ID NO: 154690 - DNA, 1104 bp, Artificial Sequence
  derived and/or modified sequence
atgagcaagcggagctggtgggccggcagccggaagcccccccgggagatgctcaaactgtcagggtccgatagcagccagagtatgaacggcttagaagtcgcacctccaggcctgataaccaatttttcgttagccacagctgaacagtgcgggcaagagacgccacttgaaaatatgttgtttgcgtccttctatctcctggacttcatcctggcgcttgtggggaacaccttggctctctggttattcattcgggaccataaatcaggtacccctgccaacgtgttccttatgcacctcgcagttgctgacttatcatgtgtgctggttttgccaactagactcgtgtaccactttagcgggaatcattggcccttcggggaaatcgcttgccggctcacaggcttcttgttctacctaaatatgtacgcatccatctactttctgacctgcatctccgcggacaggttcttggcgatcgttcaccccgtaaagagtctgaagctccgtcgtcctctatacgcccacctggcctgtgcattcctatgggtcgtcgtggctgtggccatggccccactgctcgtcagtccacagactgtccagaccaatcacacagtggtttgtttacagctataccgggagaaagcctcccaccacgccctcgtaagccttgccgtggcgtttacctttccatttattaccacagttacatgttacttactaatcatcagaagtctgcggcagggcctgcgtgtggagaagcgcttaaagacaaaagccgttcgaatgattgctatcgtgttggccatctttcttgtctgctttgtcccttatcatgtgaaccggagtgtctatgtattgcactaccgctcgcatggcgcatcatgtgcaacacaacgaatactcgcactggcaaacagaattaccagctgccttaccagtttgaatggggcactggatcctatcatgtacttctttgtggccgagaagttccgccatgcactctgcaacctcctatgtggcaagcgcctcaagggtcctcctccgtccttcgaaggaaaaacaaacgagtcgtcacttagcgctaagtcagagttgtag

SEQ ID NO: 154691 - DNA, 1104 bp, Artificial Sequence
  derived and/or modified sequence
atgtccaaacgcagttggtgggctgggagtaggaaacctccacgggagatgctgaagctttccgggtccgactcctcacagagcatgaatggcttggaagtggcacccccaggtctgatcaccaatttcagcctcgcgacagctgagcagtgtgggcaggagactccactggaaaatatgctgttcgcaagcttttatttactcgactttatactggcgctggtgggcaacaccctggctctgtggttgtttatccgtgaccacaaatcgggtacccccgctaacgtgttcctgatgcatctggctgtggccgacctgagctgtgtgctggtattgccaactcgacttgtgtaccattttagcggaaaccattggccattcggtgaaatcgcgtgccggttaaccgggtttttgttctacctgaatatgtacgcaagcatatattttttaacctgtatatcagcggaccggttcctcgccatcgtccatcctgtaaaatcgctaaagctgcgtcggcctctctacgctcatctggcctgtgcattcctgtgggtggtagtggccgtagctatggcccctctactggtgagcccgcagacagtgcagacgaatcataccgtagtgtgtctccagctgtaccgagagaaagcatctcaccacgcactggtctccctggccgtggcgttcacattccctttcatcactactgtcacctgttacctgttaatcattcgttccttgcgccagggcttgagagtcgaaaagagactgaagactaaggccgtgcgaatgatcgctattgtgctggccatattcctcgtgtgcttcgttccatatcacgttaatcgttctgtgtatgtgctccattatagaagccacggcgcaagttgtgcaacccagcggattctggctcttgctaaccgcatcacctcttgcctcactagcctgaatggtgctctggaccctattatgtactttttcgttgctgagaagtttcggcatgccctttgtaacttattgtgtggaaagcggttgaagggccctccccctagctttgagggaaagacaaatgagagttccttaagcgctaaaagcgaactgtag

SEQ ID NO: 154692 - DNA, 1104 bp, Artificial Sequence
  derived and/or modified sequence
atgagtaagaggagctggtgggccggatctcggaaaccaccaagagaaatgctaaaactgtccggtagcgacagcagtcagtcgatgaatggcttagaagtggctcctccgggactgattactaacttctcgctggctaccgccgagcagtgtggacaggagaccccactggaaaatatgctctttgccagcttctacctcctggactttattctggctctggtagggaacacactggcactgtggctgtttattcgcgaccacaagtctgggacccccgctaacgtgttccttatgcatctggccgtggccgatctatcctgtgtgctcgtgctgccaacgcgcctagtgtatcacttctcgggcaatcactggcctttcggagaaatagcctgtaggctaacaggcttcctgttttatctcaacatgtatgctagcatatacttcctgacttgtatttccgcggacagatttctggcgatcgtgcatcccgtcaaatccctcaagctgaggaggccactgtatgcccatctggcctgcgcctttttatgggtggtcgttgcagtggccatggccccactgctggtaagtccccaaacagtgcaaaccaaccacactgttgtatgcttgcagttatatagggaaaaagcctcccatcatgccctagtttcgctggcagtggcattcacatttccctttattaccactgtaacttgctatctgttgattattaggtccctgcgacagggcttacgcgtcgaaaagcgactgaaaacaaaagcagtccgtatgatcgcaattgtcctggcgatctttctcgtgtgtttcgtgccgtatcatgtcaatcgatctgtgtacgtgctacattaccgttcccacggcgcatcttgcgcaacgcagcggatcttggctctcgccaacagaatcactagctgtctgacatcgctgaacggggctctggaccctatcatgtacttttttgtcgccgagaagttccgacacgccctgtgcaacttgctgtgcggcaaaagactcaagggaccaccgccttcattcgaaggcaaaacaaacgagtcaagtctctctgctaagagcgaattgtag

SEQ ID NO: 154693 - DNA, 411 bp, Artificial Sequence
  derived and/or modified sequence
atgagtaagaggagctggtgggccggttccaggaagccgccaagagagatgctgaagctctcaggaagtgacagcagccagtccatgaatggactggaggttgctcccccaggtctcattactaacttctcattggcaactgctgagcagtgcggacaggagactccactggagaatatgttgtttgccagcttctatctgctggactttatcctagccctcgtgggcaatacccttgccctttggctgtttattagggatcataagagtggcaccccagcgaacgtcttcctgatgcacctggctgtggctgacttgtcctgcgtgctggtgcttcccactagattagtctatcactttagtggaaatcactggccattcggtgaaatcgcatgtaggctgacgggctag

SEQ ID NO: 154694 - DNA, 1104 bp, Artificial Sequence
  derived and/or modified sequence
atgtctaaacgttcatggtgggcaggttccagaaaacctcctcgcgagatgctaaaactctccggatctgattcaagtcaatccatgaacggcctggaagtggcccctccaggcttgattactaatttttctctggctaccgccgagcagtgcgggcaggagacaccactggagaacatgctcttcgcctcattctatctattggactttattcttgccctggtcgggaataccctcgcactgtggctgttcattcgggaccacaaaagcggtacgccagctaatgtgttcctaatgcacctcgctgtggcagacctgtcgtgtgtcttagtgctgcccacccggctcgtgtaccatttcagcggtaatcactggccattcggtgagattgcctgcagacttacagggttcctgttctatctcaacatgtacgcttccatttacttcttaacctgcatatcggccgatcgatttctggccatcgttcatcctgtgaagagtttgaagctgagacgtccgttgtatgcgcacttggcctgcgctttcttgtgggtggtagtggctgtcgctatggcccctctgctggtaagcccccaaaccgtgcagaccaatcacacagtggtgtgtttacagctatatcgcgagaaagcgtctcatcacgccctagtgtcgcttgccgtagccttcacttttcctttcatcactacggtgacgtgctacctccttattattcggagcctgaggcaagggctgcgcgtcgagaagcgcctaaaaaccaaggctgtgaggatgatcgccattgtcttggcaatattcctggtgtgtttcgtcccgtatcacgttaaccgatccgtttatgtcttgcattacagaagtcatggcgcatcctgtgctacacagagaattttagcattagcaaaccgaatcacgtcatgccttacatctctcaatggtgctctggaccctataatgtacttctttgtcgctgaaaagttccggcacgctctatgtaacctcttatgtggaaaacgcctgaagggaccacctccatcattcgagggcaagaccaatgagagctccctgagtgccaagtcagagctgtag

SEQ ID NO: 154695 - DNA, 1104 bp, Artificial Sequence
  derived and/or modified sequence
atgagcaagagaagctggtgggccggcagcagaaagccccccagagagatgctgaagctgagcggcagcgacagcagccagagcatgaacggcctggaggtggccccccccggcctgatcaccaacttcagcctggccaccgccgagcagtgcggccaggagacccccctggagaacatgctgttcgccagcttctacctgctggacttcatcctggccctggtgggcaacaccctggccctgtggctgttcatcagagaccacaagagcggcacccccgccaacgtgttcctgatgcacctggccgtggccgacctgagctgcgtgctggtgctgcccaccagactggtgtaccacttcagcggcaaccactggcccttcggcgagatcgcctgcagactgaccggcttcctgttctacctgaacatgtacgccagcatctacttcctgacctgcatcagcgccgacagattcctggccatcgtgcaccccgtgaagagcctgaagctgagaagacccctgtacgcccacctggcctgcgccttcctgtgggtggtggtggccgtggccatggcccccctgctggtgagcccccagaccgtgcagaccaaccacaccgtggtgtgcctgcagctgtacagagagaaggccagccaccacgccctggtgagcctggccgtggccttcaccttccccttcatcaccaccgtgacctgctacctgctgatcatcagaagcctgagacagggcctgagagtggagaagagactgaagaccaaggccgtgagaatgatcgccatcgtgctggccatcttcctggtgtgcttcgtgccctaccacgtgaacagaagcgtgtacgtgctgcactacagaagccacggcgccagctgcgccacccagagaatcctggccctggccaacagaatcaccagctgcctgaccagcctgaacggcgccctggaccccatcatgtacttcttcgtggccgagaagttcagacacgccctgtgcaacctgctgtgcggcaagagactgaagggccccccccccagcttcgagggcaagaccaacgagagcagcctgagcgccaagagcgagctgtag

SEQ ID NO: 154696 - DNA, 411 bp, Artificial Sequence
  derived and/or modified sequence
atgagcaagagaagctggtgggccggcagcagaaagccccccagagagatgctgaagctgagcggcagcgacagcagccagagcatgaacggcctggaggtggccccccccggcctgatcaccaacttcagcctggccaccgccgagcagtgcggccaggagacccccctggagaacatgctgttcgccagcttctacctgctggacttcatcctggccctggtgggcaacaccctggccctgtggctgttcatcagagaccacaagagcggcacccccgccaacgtgttcctgatgcacctggccgtggccgacctgagctgcgtgctggtgctgcccaccagactggtgtaccacttcagcggcaaccactggcccttcggcgagatcgcctgcagactgaccggctag

SEQ ID NO: 154697 - protein, 358 aa, Artificial Sequence
  derived and/or modified sequence
MPSVSPAGPSAGAVPNATAVTTVRTNASGLEVPLFHLFARLDEELHGTFPGLWLALMAVHGAIFLAGLVLNGLALYVFCCRTRAKTPSVIYTINLVVTDLLVGLSLPTRFAVYYGARGCLRCAFPHVLGYFLNMHCSILFLTCICVDRYLAIVRPEGSRRCRQPACARAVCAFVWLAAGAVTLSVLGVTGSRPCCRVFALTVLEFLLPLLVISVFTGRIMCALSRPGLLHQGRQRRVRAMQLLLTVLIIFLVCFTPFHARQVAVALWPDMPHHTSLVVYHVAVTLSSLNSCMDPIVYCFVTSGFQATVRGLFGQHGEREPSSGDVVSMHRSSKGSGRHHILSAGPHALTQALANGPEA

SEQ ID NO: 154698 - DNA, 1515 bp, Artificial Sequence
  derived and/or modified sequence
aggtccgggctgcatgcagagctgagagctgaggactcccatctccagcctgcccgggtgaagcgcggcctggggtgtgctggctgccgtcatgccctctgtgtctccagcggggccctcggccggggcagtccccaatgccaccgcagtgacaacagtgcggaccaatgccagcgggctggaggtgcccctgttccacctgtttgcccggctggacgaggagctgcatggcaccttcccaggcctgtggctggcgctgatggcggtgcacggagccatcttcctggcagggctggtgctcaacgggctggcgctgtacgtcttctgctgccgcacccgggccaagacaccctcagtcatctacaccatcaacctggtggtgaccgatctactggtagggctgtccctgcccacgcgcttcgctgtgtactacggcgccaggggctgcctgcgctgtgccttcccgcacgtcctcggttacttcctcaacatgcactgctccatcctcttcctcacctgcatctgcgtggaccgctacctggccatcgtgcggcccgaaggctcccgccgctgccgccagcctgcctgtgccagggccgtgtgcgccttcgtgtggctggccgccggtgccgtcaccctgtcggtgctgggcgtgacaggcagccggccctgctgccgtgtctttgcgctgactgtcctggagttcctgctgcccctgctggtcatcagcgtgtttaccggccgcatcatgtgtgcactgtcgcggccgggtctgctccaccagggtcgccagcgccgcgtgcgggccatgcagctcctgctcacggtgctcatcatctttctcgtctgcttcacgcccttccacgcccgccaagtggccgtggcgctgtggcccgacatgccacaccacacgagcctcgtggtctaccacgtggccgtgaccctcagcagcctcaacagctgcatggaccccatcgtctactgcttcgtcaccagtggcttccaggccaccgtccgaggcctcttcggccagcacggagagcgtgagcccagcagcggtgacgtggtcagcatgcacaggagctccaagggctcaggccgtcatcacatcctcagtgccggccctcacgccctcacccaggccctggctaatgggcccgaggcttagtcagcagggctctgccaggggccgaaggtcaggactcatctgggcatgccagcgtggacacccaccatgccaggggtggcaatcggttccatctcgattgattggtgatggctacccagagcaccgcattgagcgtctaaggccactgtgctgtggttgattagcaatgtctgccactggctccgatgggatgtggtggcctgaatgccggtgatttgctgttcctggggtatagcacgtccactgaaaactcacaggggtagccgggagctgctcctcactttggccagtttgtctccagaaggagttcctcagaaaaaagggcacagtggattccattgattaga

SEQ ID NO: 154699 - DNA, 1077 bp, Artificial Sequence
  derived and/or modified sequence
atgccatctgtgtctcctgcagggccctccgctggcgccgttcccaatgctactgcagtcacaactgtacggacgaatgcttccggactcgaggtcccgctattccatcttttcgccaggctggatgaagaattgcatgggacgtttcccggcctgtggctagcgctaatggccgtacacggggctatcttcttggctggcctagtcctcaatggcctggccctgtacgtcttctgttgtagaactagggcaaagacgcccagtgtgatttatacgataaacctggtcgtaactgacctgctggtgggcctttctttgcccacacgcttcgcagtatattacggcgccagggggtgcctgcgttgcgccttccctcatgtcctcgggtacttcctgaacatgcactgcagcatcctttttctgacctgcatatgcgtggatagatacctagccatcgtgcgcccggaggggtccaggcgttgcaggcaaccagcctgcgcccgggcagtatgcgctttcgtttggcttgcagccggtgccgtcactctctccgtcttgggtgtcaccggctctcgaccttgctgcagagtttttgccctgaccgttctagaattccttctgccgcttttggtcatctccgtgtttacgggccgaatcatgtgcgccctgtcccgccctgggctactacatcaaggcagacagcgcagggtccgggccatgcagttgctgctaacggtcctgattattttccttgtgtgttttacccctttccatgctcgccaagtggcagtggcgctgtggccggacatgcctcaccacacttcactcgtagtctaccacgtggccgtgaccctgagtagcctgaattcttgcatggacccaattgtgtattgcttcgtcacgagtggctttcaggctacagtgagggggctgtttggccaacatggggagcgtgagccctcgagcggggacgtggtctccatgcatagatcaagcaaagggtccggcaggcatcatatcctcagcgcaggaccgcatgctctgacccaggctcttgctaatggccccgaggcatag

SEQ ID NO: 154700 - DNA, 1077 bp, Artificial Sequence
  derived and/or modified sequence
atgcccagcgtgtccccagctggccccagcgctggagctgtgcccaatgccacagctgtgaccaccgtgaggaccaatgccagcggcctggaggtgcccctcttccacctgtttgcccggctggatgaggagctgcacggcaccttccctggcctgtggctggccctgatggctgtgcacggggccatcttcctggccggcctggtgctgaatggcctggccctgtatgtgttctgctgcaggacccgggccaagacccccagcgtcatctacaccatcaacctggtggtgacagacctgctggtgggcctgagcctgcccaccaggtttgctgtgtactacggggcccggggctgcctgcgctgtgccttcccccacgtgctgggctacttcctgaacatgcactgcagcatcctcttcctgacctgcatctgtgtggaccgctacctggccatcgtgcggcctgagggcagccgccgctgccggcagcctgcctgtgcccgggctgtgtgtgcctttgtgtggctggccgccggggctgtgaccctgtctgtgctgggcgtgacaggcagccggccctgctgccgggtgtttgccctgactgtgctggagttcctgctgcccctgctggtgatctctgtgttcaccggccgcatcatgtgtgccctgagccggcccggcctgctgcaccagggccggcagaggagagtgcgggccatgcagctgctgctgactgtgctgatcatcttcctggtgtgcttcacccccttccacgcccggcaggtggccgtggccctgtggccagacatgccccaccacaccagcctggtggtgtaccacgtggccgtgaccctgagcagcctgaacagctgcatggaccccatcgtgtactgctttgtgaccagcggcttccaggccaccgtgcggggcctgtttggccagcacggggagcgggagcccagcagtggagatgtggtgtccatgcacaggagcagcaaaggaagtggccgccaccacatcctgtctgctggcccccacgccctgacccaggccctggccaacggccctgaggcctag

SEQ ID NO: 154701 - DNA, 1077 bp, Artificial Sequence
  derived and/or modified sequence
atgcccagcgtgagccccgccggccccagcgccggcgccgtgcccaacgccaccgccgtcactactgtgcggacaaacgcatctggcttggaagtacctttgttccatttgttcgcgcggctggacgaggaacttcatggcacttttcctgggctgtggctggcgctgatggctgttcacggcgccatcttccttgcaggactggtgctgaacggactcgccctgtatgtgttttgttgccgtacaagggcgaagactccatccgtcatctacacaatcaacctggtggtgacagatctgctggttggcctgtctctccctactaggtttgctgtatattacggtgccaggggctgtttgcgatgtgccttcccgcatgttctgggctacttcctcaacatgcattgttccattctctttctaacctgcatctgcgtggacaggtacctggcaatcgtgcggcctgagggtagccgaagatgccgacagcctgcttgcgccagagcagtgtgcgcttttgtgtggctcgcagctggcgccgttaccctgtccgtgctgggagtcaccggcagcagaccctgttgccgcgttttcgccctgactgtgctcgagtttctgcttccactacttgttataagcgtgttcacgggcaggattatgtgcgccctgagtagacccggtttactccaccaggggcgtcaacgacgagttagagccatgcagctgctgctgactgttctcattattttcctggtgtgttttaccccttttcacgctagacaagtggccgtggccctgtggcccgacatgccacaccatacttctctcgtggtgtatcacgtagctgttactctgtcttcactaaactcctgcatggatcctatcgtatactgcttcgtgaccagcggatttcaggccaccgtcagagggctgttcgggcagcatggggagcgcgaaccgagttctggggacgtggtcagcatgcaccggagttcaaagggctcaggtcgacaccacatcctctccgcaggcccccacgcactgacacaggctctagccaatggccccgaagcatag

SEQ ID NO: 154702 - DNA, 1077 bp, Artificial Sequence
  derived and/or modified sequence
atgccctccgtgtctcctgctgggccttctgcaggtgctgttccgaacgccactgccgtgaccaccgtgaggacaaacgcctctggactggaggttcctctgtttcatttgtttgcccgactggatgaggagctgcacggcacttttcccggactgtggctggcacttatggctgtgcacggggctatcttcctggcgggactggttctgaatggcctggccctgtacgtgttctgttgccgcactcgcgcaaaaaccccctcagttatttacaccatcaatcttgtggtgacagaccttcttgtcgggttgagcctcccaacaagatttgcagtatattacggagcacggggatgcctacgctgtgcatttccacacgtcctgggttacttcctcaacatgcattgcagcatcttgttcctcacctgcatttgcgtcgacagatacctggccattgtgcgccctgagggatcccgcaggtgcaggcagcccgcatgcgcacgggctgtatgcgccttcgtttggctcgcggcaggagcagtgacgctgagcgtactgggagtaacaggcagccggccttgttgccgtgtgtttgctttaactgtcctggagtttctcttgccactgttagttatttccgtgtttacaggcagaattatgtgcgctttatcccgcccaggtctgctccatcagggcagacaaaggagagtacgagccatgcagttactgctgacagtgctgatcattttcctggtgtgcttcaccccctttcacgcacgacaagtcgccgtagcactctggcccgacatgcctcaccacacctcactagtagtgtaccacgtggccgtcactctttccagtctgaattcctgtatggaccctatagtatattgttttgttacctctggatttcaagccacagtgagagggctcttcggccagcacggcgaaagggaaccctcctccggggatgttgtcagcatgcaccgctcatcaaaaggtagcggacgacaccatatcctttctgctggccctcacgctctaacacaggccctggctaacggccctgaggcctag

SEQ ID NO: 154703 - DNA, 1077 bp, Artificial Sequence
  derived and/or modified sequence
atgcccagcgtgagccccgccggccccagcgccggcgccgtgcccaacgccaccgccgtgaccaccgtgagaaccaacgccagcggcctggaggtgcccctgttccacctgttcgccagactggacgaggagctgcacggcaccttccccggcctgtggctggccctgatggccgtgcacggcgccatcttcctggccggcctggtgctgaacggcctggccctgtacgtgttctgctgcagaaccagagccaagacccccagcgtgatctacaccatcaacctggtggtgaccgacctgctggtgggcctgagcctgcccaccagattcgccgtgtactacggcgccagaggctgcctgagatgcgccttcccccacgtgctgggctacttcctgaacatgcactgcagcatcctgttcctgacctgcatctgcgtggacagatacctggccatcgtgagacccgagggcagcagaagatgcagacagcccgcctgcgccagagccgtgtgcgccttcgtgtggctggccgccggcgccgtgaccctgagcgtgctgggcgtgaccggcagcagaccctgctgcagagtgttcgccctgaccgtgctggagttcctgctgcccctgctggtgatcagcgtgttcaccggcagaatcatgtgcgccctgagcagacccggcctgctgcaccagggcagacagagaagagtgagagccatgcagctgctgctgaccgtgctgatcatcttcctggtgtgcttcacccccttccacgccagacaggtggccgtggccctgtggcccgacatgccccaccacaccagcctggtggtgtaccacgtggccgtgaccctgagcagcctgaacagctgcatggaccccatcgtgtactgcttcgtgaccagcggcttccaggccaccgtgagaggcctgttcggccagcacggcgagagagagcccagcagcggcgacgtggtgagcatgcacagaagcagcaagggcagcggcagacaccacatcctgagcgccggcccccacgccctgacccaggccctggccaacggccccgaggcctag

SEQ ID NO: 154704 - protein, 422 aa, Artificial Sequence
  derived and/or modified sequence
MSVGAMKKGVGRAVGLGGGSGCQATEEDPLPNCGACAPGQGGRRWRLPQPAWVEGSSARLWEQATGTGWMDLEASLLPTGPNASNTSDGPDNLTSAGSPPRTGSISYINIIMPSVFGTICLLGIIGNSTVIFAVVKKSKLHWCNNVPDIFIINLSVVDLLFLLGMPFMIHQLMGNGVWHFGETMCTLITAMDANSQFTSTYILTAMAIDRYLATVHPISSTKFRKPSVATLVICLLWALSFISITPVWLYARLIPFPGGAVGCGIRLPNPDTDLYWFTLYQFFLAFALPFVVITAAYVRILQRMTSSVAPASQRSIRLRTKRVTRTAIAICLVFFVCWAPYYVLQLTQLSISRPTLTFVYLYNAAISLGYANSCLNPFVYIVLCETFRKRLVLSVKPAAQGQLRAVSNAQTADEERTESKGT

SEQ ID NO: 154705 - protein, 296 aa, Artificial Sequence
  derived and/or modified sequence
MSVGAMKKGVGRAVGLGGGSGCQATEEDPLPNCGACAPGQGGRRWRLPQPAWVEGSSARLWEQATGTGWMDLEASLLPTGPNASNTSDGPDNLTSAGSPPRTGSISYINIIMPSVFGTICLLGIIGNSTVIFAVVKKSKLHWCNNVPDIFIINLSFFLAFALPFVVITAAYVRILQRMTSSVAPASQRSIRLRTKRVTRTAIAICLVFFVCWAPYYVLQLTQLSISRPTLTFVYLYNAAISLGYANSCLNPFVYIVLCETFRKRLVLSVKPAAQGQLRAVSNAQTADEERTESKGT

SEQ ID NO: 154706 - DNA, 1269 bp, Artificial Sequence
  derived and/or modified sequence
atgagcgtgggtgccatgaaaaagggcgtcggaagagctgtaggcctcggggggggcagcggctgccaggctactgaggaggaccctctccccaactgtggcgcttgcgcccccggacagggcggtaggcgatggaggctcccccagccagcttgggtggaaggatcctctgctcggctgtgggaacaagccacaggtactgggtggatggacctggaagcctcccttctgcccaccgggccaaacgccagtaacacatccgatggtccggacaacctcactagcgccggaagcccacctaggactggcagtattagttatatcaacatcatcatgccatcagtgtttggaactatctgcctgctgggtatcatcggcaatagcactgtgatttttgcggtggtgaaaaaatcaaaactacactggtgtaataatgtgccagacatcttcatcattaatctgagcgttgtagacctgcttttcctgctgggcatgcctttcatgattcaccagctgatggggaacggggtatggcactttggcgaaacaatgtgcaccttgataacagccatggatgctaatagccaatttacgtccacttacatactcacagccatggccatagaccgttatctggccacggtgcatccgattagcagtacaaagttcaggaagccctcggtagccaccctggtgatctgcctcctgtgggctctttcctttatatctattacccctgtctggctctatgctaggttgataccttttccaggtggtgccgtgggctgtggcattaggctccccaatccagacacggatttgtattggtttacactgtatcagttctttctggccttcgctttacccttcgtcgtgattactgccgcttatgtacggatccttcagagaatgactagcagcgtggccccagccagccaaaggtcaattaggttgaggaccaagagggtgaccaggacagccatcgcaatctgtcttgtgttttttgtatgttgggctccctactacgtgcttcaactgacgcagctgtccatttccagacccactctgacatttgtgtatctttataacgcagctatcagcctcggatacgcgaactcctgcctgaatcccttcgtgtacattgtactctgcgaaacattcagaaagaggttagttctttcagtgaagcccgctgcccagggacaactacgagctgtgtccaatgcccagaccgcagatgaggaacgtacggagtccaagggaacatag

SEQ ID NO: 154707 - DNA, 891 bp, Artificial Sequence
  derived and/or modified sequence
atgagcgttggggccatgaaaaaaggagtcggacgagcagtaggcttaggaggggggagtggctgccaggctacagaggaggatccactcccaaattgtggggcatgcgcaccaggccaaggagggagaagatggaggttaccacagccagcctgggtggagggctcaagcgcgcggttgtgggagcaggctaccggtaccggttggatggatttggaagccagcctgctccccacaggtcctaatgctagtaacacttctgacgggcctgataatctgacgtccgccggctctccacccaggaccggatctataagctacatcaacataattatgcctagcgtgttcggtacaatctgcctgctggggatcattgggaactctaccgtgatcttcgcagtcgtcaagaaatctaagctgcactggtgtaacaatgtaccagatatcttcatcatcaatctgagctttttccttgcatttgccctaccatttgttgtgataaccgctgcttacgtgcggatcttacagcggatgacaagttcagtggcgcccgcaagtcagaggagcatcagactgagaaccaaacgggttacacgaaccgctatcgcaatctgcctggtgttttttgtctgttgggccccatactatgtactgcagttgacacagctcagtatctcccgccctaccttgacctttgtgtatctctataacgctgctatttctctgggctatgcaaattcctgtctgaaccctttcgtgtacatcgtactgtgcgaaacatttcggaagaggttagttctctctgtgaagcctgccgcgcaggggcaattgcgtgcggtttcaaatgctcagacagccgacgaggagcgcacggagagcaaggggacttag

SEQ ID NO: 154708 - DNA, 1269 bp, Artificial Sequence
  derived and/or modified sequence
atgtctgtgggcgccatgaagaagggcgtgggccgggctgtgggcctgggcggcggcagcggctgccaggccacagaggaggaccccctgcccaactgtggggcctgtgcccctggccagggcggccgccgctggaggctgccccagcctgcctgggtggagggcagcagcgcccggctgtgggagcaggccactggaacaggctggatggacctggaggccagcctgctgcccaccggccccaatgccagcaacaccagtgatggccctgacaacctgaccagcgctggcagcccccccaggacaggcagcatctcctacatcaacatcatcatgcccagcgtgtttggcaccatctgcctgctgggcatcatcggcaacagcaccgtcatctttgctgtggtgaagaagagcaagctgcactggtgcaacaacgtgcctgacatcttcatcatcaacctgtctgtggtggacctgctcttcctgctgggcatgcccttcatgatccaccagctgatgggaaatggagtgtggcactttggagagaccatgtgcaccctcatcacagccatggatgccaacagccagttcaccagcacctacatcctgacagccatggccatcgaccgctacctggccaccgtgcaccccatcagcagcaccaagttcaggaagcccagcgtggccaccctggtgatctgcctgctgtgggccctgtccttcatcagcatcacccctgtgtggctgtatgcccggctcatccccttccctggaggagctgtgggctgcggcatccggctgcccaacccagacacagacctgtactggttcaccctgtaccagttcttcctggcctttgccctgccctttgtggtgatcacagctgcctacgtgcgcatcctgcagaggatgaccagctctgtggccccagccagccagaggagcatccggctgcggaccaagagggtgaccaggacagccatcgccatctgcctggtgttctttgtgtgctgggccccctactacgtgctgcagctgacccagctgagcatcagccggcccaccctgacctttgtgtacctgtacaatgctgccatcagcctgggctacgccaacagctgcctgaacccctttgtgtacatcgtgctgtgtgagaccttcaggaagaggctggtgctgtctgtgaagccagctgcccagggccagctgcgggctgtgtccaatgcccagacagcagatgaggagaggacagagagcaagggcacctag

SEQ ID NO: 154709 - DNA, 891 bp, Artificial Sequence
  derived and/or modified sequence
atgtctgtgggcgccatgaagaagggcgtgggccgggctgtgggcctgggcggcggcagcggctgccaggccacagaggaggaccccctgcccaactgtggggcctgtgcccctggccagggcggccgccgctggaggctgccccagcctgcctgggtggagggcagcagcgcccggctgtgggagcaggccactggaacaggctggatggacctggaggccagcctgctgcccaccggccccaatgccagcaacaccagtgatggccctgacaacctgaccagcgctggcagcccccccaggacaggcagcatctcctacatcaacatcatcatgcccagcgtgtttggcaccatctgcctgctgggcatcatcggcaacagcaccgtcatctttgctgtggtgaagaagagcaagctgcactggtgcaacaacgtgcctgacatcttcatcatcaacctgtccttcttcctggcctttgccctgccctttgtggtgatcacagctgcctacgtgcgcatcctgcagaggatgaccagctctgtggccccagccagccagaggagcatccggctgcggaccaagagggtgaccaggacagccatcgccatctgcctggtgttctttgtgtgctgggccccctactacgtgctgcagctgacccagctgagcatcagccggcccaccctgacctttgtgtacctgtacaatgctgccatcagcctgggctacgccaacagctgcctgaacccctttgtgtacatcgtgctgtgtgagaccttcaggaagaggctggtgctgtctgtgaagccagctgcccagggccagctgcgggctgtgtccaatgcccagacagcagatgaggagaggacagagagcaagggcacctag

SEQ ID NO: 154710 - DNA, 189 bp, Artificial Sequence
  derived and/or modified sequence
tgaggctaccactgcctgcctgcccccaacagagcccagggcgaggtgggcggagatggcggctctgtgcagtttggaggctctgtgaagaccagcagcgccctgcgggaggagcaggaggcccagtgggagaactggcccaagtctggagtgctgaccacagcccctggcttcttcctgggccgctag

SEQ ID NO: 154711 - DNA, 2851 bp, Artificial Sequence
  derived and/or modified sequence
cagatatttgtctcaaagagtcccaggccaaacctcagggacctcagagcgtttagaaaaataacacctctgtgagcttggtccaggcagatcccatgcagagaggagtttgtccccttccagtccccgaggtcctggctattgccagcatggagtgacctgtgtcacctctgagtgccaggcaagggttcagcagctgacgactcagcttctgcaggatgctggcagcatagccagcgagatagttggaagccgtcagggcacagggaaggggccgagggtgccctgagtgtgcatggggggcagccctgctgcagtccaagcctttgattcccaagctatgtgcacagtttcctctggactctgccatgtggcccagccacccatacctggaataggggctaagccaagctgctctctcctccaaagggaggcagcctgtgtgctttgtccgtttgcctttgcagagacctcgatcttcacgcaaggcaagcagcagcccctgtaagcacacgagacaatcccaagtgtcagtgggaaggagatccctttcctgatggggctgcctgtgtccagtccctcccagcttccccagggccctggggctctgcaggcattcagaagtggaagccagccacagcctgggactgaagaggttaatgtgcatctgcctccgaatgttaatgtgtctaggtgatgtcagtgggagccatgaagaagggagtggggagggcagttgggcttggaggcggcagcggctgccaggctacggaggaagacccccttcccaactgcggggcttgcgctccgggacaaggtggcaggcgctggaggctgccgcagcctgcgtgggtggaggggagctcagctcggttgtgggagcaggcgaccggcactggctggatggacctggaagcctcgctgctgcccactggtcccaacgccagcaacacctctgatggccccgataacctcacttcggcaggatcacctcctcgcacggggagcatctcctacatcaacatcatcatgccttcggtgttcggcaccatctgcctcctgggcatcatcgggaactccacggtcatcttcgcggtcgtgaagaagtccaagctgcactggtgcaacaacgtccccgacatcttcatcatcaacctctcggtagtagatctcctctttctcctgggcatgcccttcatgatccaccagctcatgggcaatggggtgtggcactttggggagaccatgtgcaccctcatcacggccatggatgccaatagtcagttcaccagcacctacatcctgaccgccatggccattgaccgctacctggccactgtccaccccatctcttccacgaagttccggaagccctctgtggccaccctggtgatctgcctcctgtgggccctctccttcatcagcatcacccctgtgtggctgtatgccagactcatccccttcccaggaggtgcagtgggctgcggcatacgcctgcccaacccagacactgacctctactggttcaccctgtaccagtttttcctggcctttgccctgccttttgtggtcatcacagccgcatacgtgaggatcctgcagcgcatgacgtcctcagtggcccccgcctcccagcgcagcatccggctgcggacaaagagggtgacccgcacagccatcgccatctgtctggtcttctttgtgtgctgggcaccctactatgtgctacagctgacccagttgtccatcagccgcccgaccctcacctttgtctacttatacaatgcggccatcagcttgggctatgccaacagctgcctcaacccctttgtgtacatcgtgctctgtgagacgttccgcaaacgcttggtcctgtcggtgaagcctgcagcccaggggcagcttcgcgctgtcagcaacgctcagacggctgacgaggagaggacagaaagcaaaggcacctgatacttcccctgccaccctgcacacctccaagtcagggcaccacaacacgccaccgggagagatgctgagaaaaacccaagaccgctcgggaaatgcaggaaggccgggttgtgaggggttgttgcaatgaaataaatacattccatggggctcacacgttgctggggaggcctggagtcaggtttggggttttcagatatcagaaatccccttgggggagcaggatgagacctttggatagaacagaagctgagcaagagaacatgttggtttggataaccggttgcactatatctgtgagctctcaaatgtcttcttcccaaggcaagaggtggaagggtactgactgggtttgtttaaagtcaggcagggctggagtgagcagccagggccatgttgcacaaggcctgagagacgggaaagggcccgatcgctctttcccgcctctcactggtgcgatggaaggtggcctttctcccaagctggtggataatgaaaaataaagcatcccatctctcggcgttccagcatcctgtcaatttcccttttgctctagaggatgcatgtttatttgaggggatgtggcactgagcccacaggagtaaaagcccagtttgctaggaggtctgcttactgaaaacaaggagacctggggtgggtgtggttgggggtcttaaaactaataaaagctggggtcggggggcttttgcagctctggtgacattctctccacggggcacatttgctcagtcactaatccagcttgagtgtccgtgtgttctgcatgtgcaggggtcattctagtgcccggtgtgttggcatcatctttttgctctagcccttcctctccaaaataaaatcaaataaaggaaaatctccacccaca

SEQ ID NO: 154712 - DNA, 1219 bp, Artificial Sequence
  derived and/or modified sequence
ccaagtgtcagtgggaaggagatccctttcctgatggggctgcctgtgtccagtccctcccagcttccccagggccctggggctctgcaggcattcagaagtggaagccagccacagcctgggactgaagaggttaatgtgcatctgcctccgaatgttaatgtgtctaggtgatgtcagtgggagccatgaagaagggagtggggagggcagttgggcttggaggcggcagcggctgccaggctacggaggaagacccccttcccaactgcggggcttgcgctccgggacaaggtggcaggcgctggaggctgccgcagcctgcgtgggtggaggggagctcagctcggttgtgggagcaggcgaccggcactggctggatggacctggaagcctcgctgctgcccactggtcccaacgccagcaacacctctgatggccccgataacctcacttcggcaggatcacctcctcgcacggggagcatctcctacatcaacatcatcatgccttcggtgttcggcaccatctgcctcctgggcatcatcgggaactccacggtcatcttcgcggtcgtgaagaagtccaagctgcactggtgcaacaacgtccccgacatcttcatcatcaacctctcgtttttcctggcctttgccctgccttttgtggtcatcacagccgcatacgtgaggatcctgcagcgcatgacgtcctcagtggcccccgcctcccagcgcagcatccggctgcggacaaagagggtgacccgcacagccatcgccatctgtctggtcttctttgtgtgctgggcaccctactatgtgctacagctgacccagttgtccatcagccgcccgaccctcacctttgtctacttatacaatgcggccatcagcttgggctatgccaacagctgcctcaacccctttgtgtacatcgtgctctgtgagacgttccgcaaacgcttggtcctgtcggtgaagcctgcagcccaggggcagcttcgcgctgtcagcaacgctcagacggctgacgaggagaggacagaaagcaaaggcacctgatacttcccctgccaccctgcacacctccaagtcagggcaccacaacacgccaccgggagagatgctgagaaaaacccaagaccgctcgggaaatgcaggaaggccgggttgtgaggggttgttgcaatgaaataaatacattccatggggctcac

SEQ ID NO: 154713 - DNA, 1269 bp, Artificial Sequence
  derived and/or modified sequence
atgagcgtgggcgccatgaagaagggcgtgggccgggccgtgggcctaggcggaggctctggttgtcaggcgacagaagaggatccactacctaactgcggagcatgcgctcccggacagggcggcaggcgatggagactgccccagcccgcttgggtcgaaggttccagtgcccgcctttgggaacaggcgacagggacaggctggatggacctcgaagcgagtttactgcctactggtcccaatgctagcaatactagtgatggacccgataatttgaccagtgctggttccccaccaagaacaggtagtatttcttacatcaatatcatcatgccgagtgtctttgggacgatttgtctactgggaatcatcggcaattcaaccgtcatttttgcagtggttaagaagtctaaactgcactggtgcaataacgtgcccgatatctttattatcaatctaagcgtcgtcgacctcctgttcctccttggcatgccctttatgatccaccagcttatgggcaatggagtctggcactttggcgaaactatgtgcactctgattaccgccatggacgcgaactcccagtttacaagcacttacatcctcacagcgatggctattgatcgctacttggccacagttcaccccatttcttctacgaagttcaggaagccatccgtggcgacgcttgtgatctgtcttctatgggccctgtctttcatttccatcactccagtatggttgtacgcccggttgatcccctttccgggtggcgccgtgggctgcggaatacgactgcctaatcccgatacagatctctattggttcaccctgtaccaatttttcttggcgttcgcattgccatttgtcgttatcacggccgcgtacgttcgaatcttgcagcgaatgaccagctctgttgctccagcctcccaacgaagcatcaggttgcggacaaagagggtgactcgcaccgccatcgccatttgtttagtctttttcgtctgttgggctccgtactacgtcctacaactaacccagctgtccattagtcggcccacattaacgtttgtctacctctataatgctgctatcagtttaggatatgccaattcttgtctgaatccctttgtttatatcgtgctttgcgaaacttttcggaagaggctggtcctttcagtcaaacctgcggctcaaggccagttgcgggccgtctcgaatgcccaaactgctgacgaagagaggacagagtctaagggaacatag

SEQ ID NO: 154714 - DNA, 891 bp, Artificial Sequence
  derived and/or modified sequence
atgagcgtgggcgccatgaagaagggcgtgggccgggccgtgggcttgggtgggggaagcgggtgtcaagctaccgaggaggacccgcttcctaactgcggggcctgtgctcctggtcaggggggaagacgctggagactgccccagcccgcatgggttgaaggcagctcagcgaggctgtgggagcaagccaccggaactggctggatggatctagaggcctcactgctgccaacaggtccaaatgcaagtaatacttccgacggccctgacaacttgacgtccgcaggttccccaccaagaacaggctctattagttatattaacattataatgccttccgtctttggcaccatttgccttctgggaatcattggaaactccacagtcatcttcgccgtggtcaaaaaatctaaattacactggtgcaataatgtgcccgacatctttatcatcaatctgagtttctttttggcttttgccctgcccttcgtggttattactgcagcctacgtgcgcatcttgcagcggatgacatcaagcgtcgcgcctgccagccagaggagcatcaggctgcgcaccaagagggtcaccagaacggccatcgctatctgcttggttttttttgtttgttgggcaccttactacgtgttgcagctcacacagttaagcataagccgaccgactctcaccttcgtctacctgtataacgcggccatctcgctcggatatgccaacagctgcctgaacccatttgtttatatcgtcctgtgtgaaacatttcggaagcgattggtgctgtccgtcaagcccgctgcacagggacaactcagggcggtgtctaatgcgcagacagcggatgaggagaggaccgagtctaaaggaacatag

SEQ ID NO: 154715 - DNA, 1269 bp, Artificial Sequence
  derived and/or modified sequence
atgtccgtgggcgctatgaaaaagggtgttggcagagcagttggactgggaggcggatccggatgccaggcgacagaggaagaccccctcccaaactgtggagcatgcgccccaggtcaagggggaagacggtggaggctcccacaacctgcatgggtggaagggtcaagcgctcgcctctgggagcaggcaacaggcacaggctggatggacctggaggcaagcctgctgcccacggggcctaatgctagtaatacttccgatggacccgataacctaacatctgccggatctcccccacggacaggctctatttcctatattaacattataatgccttctgtgttcggcacaatatgcctactaggtattataggcaattcgacagtcatcttcgccgtcgtgaaaaagtccaaactgcactggtgtaacaacgtgccagacatctttatcattaacctgagtgtggtggatctgctatttctcctgggcatgccatttatgatacatcagctcatgggaaatggtgtctggcatttcggcgaaactatgtgtacactcatcaccgccatggatgctaactcacagtttacatccacatatatactgacggccatggcgatcgaccgctatctggccaccgtgcaccctatctcttccaccaagtttcgtaagccttccgttgctacactcgtgatctgcctgctgtgggcgctctcttttattagcattacacccgtttggctgtatgcacgtctcattcctttccccggaggagctgtcggctgtggcatcagattaccgaatcctgacacagacctatattggtttaccctatatcagttctttttagccttcgccctccctttcgtggtgattaccgctgcatacgtcaggatcctccagaggatgacatcctccgttgctcctgcatcccagcggtctatccgtctcaggactaagcgggtgacccgaactgctatcgctatctgtctggtcttctttgtgtgctgggccccatactatgttctacagctcactcagctcagtatctctagaccaacgctgacttttgtctatctttataacgctgctattagcctggggtacgccaacagctgcctgaaccctttcgtgtacatcgtgctgtgcgaaacatttagaaagcgcctcgtactatcagttaagcccgcagcccagggccagcttcgggcagtgagcaatgcacagacagctgacgaagaaaggacagaatctaaaggaacctag

SEQ ID NO: 154716 - DNA, 891 bp, Artificial Sequence
  derived and/or modified sequence
atgagtgttggggctatgaagaagggggttggacgcgcagtgggcttgggaggcggttctgggtgccaggcaaccgaggaagatcccctgcccaattgcggcgcatgtgccccaggacagggcggacggcgatggcggctgccccagccagcttgggtggagggcagctccgcaagactctgggagcaggccaccgggaccggatggatggaccttgaggcaagcctgcttccgacgggccctaatgctagcaacacgagtgacggtcccgacaatctgacctccgcaggatctccacctcgcacgggctccatcagctatattaacatcatcatgccctccgtgtttggaaccatttgcttgctgggaattattggaaatagcaccgtgatctttgccgtggtgaaaaagtctaagctccactggtgcaataacgtgcctgacatcttcatcataaatctgtccttcttcctggcttttgcattacccttcgtggtcataacagctgcctatgttcggatcctacagagaatgacctccagcgtggcccctgcttcgcagaggtcaatccggctccggactaagagggtcacacgcaccgctatcgcaatttgcctcgtcttttttgtgtgctgggctccttactacgtgcttcagcttacccagttgtcgattagtaggcctacattgaccttcgtctacttgtataacgccgctatttccctgggatacgccaactcgtgccttaatcctttcgtctacattgtgctatgtgaaacttttaggaaaagacttgtactctctgttaaaccagcagcccaagggcagctgagagccgtgagcaatgcacagacggccgacgaagagcggaccgagtctaagggtacctag

SEQ ID NO: 154717 - DNA, 1269 bp, Artificial Sequence
  derived and/or modified sequence
atgagcgtgggcgccatgaagaagggcgtgggcagagccgtgggcctgggcggcggcagcggctgccaggccaccgaggaggaccccctgcccaactgcggcgcctgcgcccccggccagggcggcagaagatggagactgccccagcccgcctgggtggagggcagcagcgccagactgtgggagcaggccaccggcaccggctggatggacctggaggccagcctgctgcccaccggccccaacgccagcaacaccagcgacggccccgacaacctgaccagcgccggcagcccccccagaaccggcagcatcagctacatcaacatcatcatgcccagcgtgttcggcaccatctgcctgctgggcatcatcggcaacagcaccgtgatcttcgccgtggtgaagaagagcaagctgcactggtgcaacaacgtgcccgacatcttcatcatcaacctgagcgtggtggacctgctgttcctgctgggcatgcccttcatgatccaccagctgatgggcaacggcgtgtggcacttcggcgagaccatgtgcaccctgatcaccgccatggacgccaacagccagttcaccagcacctacatcctgaccgccatggccatcgacagatacctggccaccgtgcaccccatcagcagcaccaagttcagaaagcccagcgtggccaccctggtgatctgcctgctgtgggccctgagcttcatcagcatcacccccgtgtggctgtacgccagactgatccccttccccggcggcgccgtgggctgcggcatcagactgcccaaccccgacaccgacctgtactggttcaccctgtaccagttcttcctggccttcgccctgcccttcgtggtgatcaccgccgcctacgtgagaatcctgcagagaatgaccagcagcgtggcccccgccagccagagaagcatcagactgagaaccaagagagtgaccagaaccgccatcgccatctgcctggtgttcttcgtgtgctgggccccctactacgtgctgcagctgacccagctgagcatcagcagacccaccctgaccttcgtgtacctgtacaacgccgccatcagcctgggctacgccaacagctgcctgaaccccttcgtgtacatcgtgctgtgcgagaccttcagaaagagactggtgctgagcgtgaagcccgccgcccagggccagctgagagccgtgagcaacgcccagaccgccgacgaggagagaaccgagagcaagggcacctag

SEQ ID NO: 154718 - DNA, 891 bp, Artificial Sequence
  derived and/or modified sequence
atgagcgtgggcgccatgaagaagggcgtgggcagagccgtgggcctgggcggcggcagcggctgccaggccaccgaggaggaccccctgcccaactgcggcgcctgcgcccccggccagggcggcagaagatggagactgccccagcccgcctgggtggagggcagcagcgccagactgtgggagcaggccaccggcaccggctggatggacctggaggccagcctgctgcccaccggccccaacgccagcaacaccagcgacggccccgacaacctgaccagcgccggcagcccccccagaaccggcagcatcagctacatcaacatcatcatgcccagcgtgttcggcaccatctgcctgctgggcatcatcggcaacagcaccgtgatcttcgccgtggtgaagaagagcaagctgcactggtgcaacaacgtgcccgacatcttcatcatcaacctgagcttcttcctggccttcgccctgcccttcgtggtgatcaccgccgcctacgtgagaatcctgcagagaatgaccagcagcgtggcccccgccagccagagaagcatcagactgagaaccaagagagtgaccagaaccgccatcgccatctgcctggtgttcttcgtgtgctgggccccctactacgtgctgcagctgacccagctgagcatcagcagacccaccctgaccttcgtgtacctgtacaacgccgccatcagcctgggctacgccaacagctgcctgaaccccttcgtgtacatcgtgctgtgcgagaccttcagaaagagactggtgctgagcgtgaagcccgccgcccagggccagctgagagccgtgagcaacgcccagaccgccgacgaggagagaaccgagagcaagggcacctag

SEQ ID NO: 154719 - DNA, 930 bp, Artificial Sequence
  derived and/or modified sequence
atgaatggtacttataacacctgtggttcaagtgatctgacctggccaccggccataaagctggggttttatgcctacctgggggtgttactggtgctcggcttgctgctcaattcactggcactgtgggtgttttgttgcagaatgcagcagtggacagagacacgcatctacatgacgaatctggccgtggcggacctctgcctactgtgcacactgccattcgttctgcacagtttgagagacacttctgatacaccgctgtgccaactgtcacaaggcatttacttgactaatagatatatgtccatctcactggtgactgccatcgctgtggatcggtacgtggccgtccggcatcctttgagagcgcgtggcttgcgcagtccccgccaagccgctgcagtgtgcgctgtgctttgggtactcgtgattggatcacttgttgctcgctggctcctggggattcaggaaggcgggttctgcttcagatcaactcgccataacttcaactcgatggcttttccactcctgggcttctacctgccactggccgtagtggtattctgttccctcaaggtggttactgcgctggcgcagaggccgcccactgatgtcgggcaggccgaggccaccaggaaagccgccaggatggtctgggcgaacctgctcgtctttgttgtgtgttttttacccttgcatgtggggttaaccgtgcggctcgccgtgggttggaacgcatgcgctttactagagaccattagacgagcactctacattacctccaagctgagtgacgccaactgttgtctggacgccatctgttactattatatggcaaaggaattccaggaggcctccgccctcgccgttgcgccatctgcaaaggcgcataagtcgcaggacagcttatgcgtgactcttgcatag

SEQ ID NO: 154720 - DNA, 930 bp, Artificial Sequence
  derived and/or modified sequence
atgaatgggacttataatacatgtggaagcagcgacctcacctggccccctgcaattaagctggggttttacgcgtatctgggtgtgctgctggtgctgggtttactgctaaattccctagcattgtgggttttctgctgtaggatgcaacagtggaccgagacccgtatttatatgaccaacctggctgtcgcggacctgtgtttgctatgtacgttaccgttcgtgctccatagcctcagagacacatctgacacgcccctgtgtcagctctcccaggggatatacctaaccaatcggtacatgagtatctctctcgtaacagccatcgccgtagaccggtacgttgcagtcaggcatccactccgagctagggggctgaggtccccccgccaggcagctgctgtttgtgcagtgctctgggtactggtgatcgggtctttggtcgctcgatggctgctggggattcaggaaggaggcttctgttttaggtccacaagacataacttcaattcaatggcctttcccttgttaggcttttatctccctctggccgtggtggtcttctgttcactgaaggtagtgacggcattagcacaaaggccacctaccgacgtgggccaagccgaggccactaggaaggccgcacggatggtgtgggcaaacctgttggtattcgtggtctgctttttaccactgcacgttgggttaacggttcgattagctgtgggatggaatgcatgcgccctccttgagaccatcagacgagccttatacattactagcaaattatctgacgccaactgttgtctagacgctatctgctactactatatggccaaggagtttcaggaagcgtccgctctggcagtggctccttctgctaaggctcataaatctcaagacagcctttgcgtgacgctggcttag

SEQ ID NO: 154721 - DNA, 930 bp, Artificial Sequence
  derived and/or modified sequence
atgaacggcacctacaatacttgtggcagtagcgatctcacttggccacccgcaatcaaactcggcttttatgcttaccttggagtccttctagtgctcggactcctgttgaactcattggcactctgggtcttttgctgccggatgcagcagtggacggagaccaggatatatatgacgaatcttgccgtcgcagatctatgtctgctgtgcacccttcctttcgttctccacagtctccgcgacacaagcgacacacccctgtgtcagctatctcaggggatttacctaaccaataggtatatgagcataagcttagtgaccgcgattgcggtggaccggtatgtggctgttcgacatcccctacgggctcgcggtttgcgttcccctcgccaggctgccgcggtgtgtgcagtactgtgggtcctcgtcatcggcagccttgtcgccaggtggctcctcggcattcaggagggaggcttttgtttcagaagcacccggcacaacttcaacagtatggccttccccctcctgggcttctaccttccgctcgcagtggttgtgttttgctccctgaaggtggttaccgccctcgcgcaaaggcccccaacggacgtcggccaggcggaagccacgcggaaagccgcaaggatggtgtgggccaacttactagtgtttgtggtgtgctttttacccttgcatgtcggacttaccgtaagacttgccgttggctggaacgcgtgcgccctgctggagacaattagacgagcgttatacattacttcaaagctaagtgatgccaattgttgcctcgatgccatctgctattattatatggctaaggaatttcaagaggccagtgcgcttgccgtggcaccgtcagccaaggcccataaatctcaggactccttgtgcgtgacactggcttag

SEQ ID NO: 154722 - DNA, 930 bp, Artificial Sequence
  derived and/or modified sequence
atgaacggtacctacaacacgtgcggttcaagcgacctcacatggcccccggccataaagctgggattttatgcatacttgggcgtacttctcgtgctaggccttctcctgaatagtctggcactgtgggtcttctgctgccgcatgcaacaatggactgagacacgtatctatatgacaaacctggcggtcgccgatttgtgccttctatgcacactacccttcgttcttcactccctgcgagacacctccgatacaccgctatgtcagctctctcagggtatctacttaaccaatcgctacatgtcaatctcattagtcaccgctattgcagtggataggtatgtagcagtgcgccacccgctgcgcgcccgtggactgagatcccctcgccaagccgcggcggtatgcgccgtcctgtgggtgctggtgattgggtcgctggttgcccggtggttacttggtatacaggaaggtggtttttgttttcgtagcactcgacacaatttcaacagcatggctttccctctgctcggcttctatttaccactcgcggtcgtggttttttgttcattgaaggtcgtgacagccttggctcaacgcccgccaaccgacgtggggcaggccgaggccacacggaaggctgccaggatggtctgggcaaatctgctggtattcgtcgtgtgcttcctgcctttgcacgttgggctgaccgtacggctcgccgtcggctggaacgcatgcgctcttttagagactatccgccgggccctttatatcacaagcaagctgagcgatgcaaactgttgtctcgacgctatctgctattactatatggcaaaggaattccaggaggcctcagctctggcggtggccccatccgcaaaggcgcacaaatctcaagactctctatgtgttacattggcctag

SEQ ID NO: 154723 - DNA, 930 bp, Artificial Sequence
  derived and/or modified sequence
atgaatggcacctacaacacctgtggcagcagtgacctgacctggcccccagccatcaagctgggcttctacgcctacctgggcgtgctgctggtgctgggcctgctgctgaacagcctggccctgtgggtgttctgctgcaggatgcagcagtggacagagacccgcatctacatgaccaacctggccgtggccgacctgtgcctgctgtgcaccctgccctttgtgctgcacagcctgcgggacaccagtgacacccccctgtgccagctgagccagggcatctacctgaccaaccgctacatgagcatcagcctggtgacagccatcgctgtggacagatatgtggccgtgcgccaccccctgcgggcccggggcctgcggagcccccggcaggccgctgctgtgtgtgctgtgctgtgggtgctggtgattggcagcctggtggcccgctggctgctgggcatccaggagggcggcttctgcttccgcagcaccaggcacaacttcaacagcatggccttccccctgctgggcttctacctgcccctggccgtggtggtgttctgcagcctgaaggtggtgacagccctggcccagaggcctcccacagatgtgggccaggccgaggccaccaggaaggccgccaggatggtgtgggccaacctgctggtgtttgtggtgtgcttcctgcccctgcacgtgggcctgactgtgcggctggccgtgggctggaatgcctgtgccctgctggagaccatcagaagagccctgtacatcaccagcaagctgagtgatgccaactgctgcctggatgccatctgctactactacatggccaaggagttccaggaggccagcgccctggccgtggcccccagcgccaaggcccacaagagccaggacagcctgtgtgtgaccctggcctag

SEQ ID NO: 154724 - DNA, 930 bp, Artificial Sequence
  derived and/or modified sequence
atgaacggcacctacaacacctgcggcagcagcgacctgacctggccccccgccatcaaactcggcttttacgcatacctgggcgtgctgctggtgctgggactgttgctgaactctctcgcactctgggtcttctgctgtagaatgcaacagtggaccgagactcgtatttatatgacaaatcttgcagtcgccgatctgtgtttgctgtgcaccctcccctttgttttgcattccttacgtgacacaagcgatacaccactctgccagctgtcccagggaatttaccttaccaaccggtatatgagtataagcctcgtgacagcaatcgcagtggaccggtacgtagcagtgaggcatcctcttcgggcaaggggcttacgctccccccgtcaggccgctgccgtgtgtgcagtgctgtgggtgttagtgataggcagcctcgttgctcgctggctactggggatccaggaggggggcttttgttttaggagcactaggcataattttaattcgatggcgtttcccctacttggcttttatctgcccctggccgttgtagtcttctgttcacttaaggtcgtcacagctctggctcaacgaccgccaacagatgttggccaggcagaagctactaggaaagccgctagaatggtctgggccaacctgcttgtctttgtggtatgcttcctgccactccatgtgggactaaccgtaaggctggctgtgggttggaacgcatgcgctctgctcgaaacgattaggagagctctttacattacatctaaattgagcgatgctaactgctgtctagatgctatctgttactactatatggcaaaggaatttcaggaggcgtctgcgctagccgttgctccttccgctaaagcacataagtcacaggattccctctgcgtaaccctggcctag

SEQ ID NO: 154725 - DNA, 930 bp, Artificial Sequence
  derived and/or modified sequence
atgaacggcacctacaacacctgcggcagcagcgacctgacctggccacctgctatcaagctgggtttctatgcctatctgggcgtgttactggtgctggggctgctgcttaactcactagcgttatgggtattttgctgccgaatgcagcagtggacggagaccaggatttacatgactaaccttgccgtagccgatctgtgtctcctgtgtaccttgcctttcgttctccattccctccgcgatacatctgatactcccctgtgtcaactaagccagggcatatacctgacgaaccgttacatgagcattagtctagtcactgcgatcgctgtggatcgatacgtggcagtccggcatcctcttagggcacgcggattgcgcagtcctagacaggccgccgccgtgtgtgccgtcctgtgggtgctggtgattggtagcctcgtcgctcgatggctgttaggaattcaggaaggcggattttgttttcggtccacaaggcataactttaactccatggcattccccctgctcgggttctatctccctctggctgtggtggttttttgctccctgaaggtggtcaccgctttggctcaaaggcctcctactgatgtgggtcaggccgaggcaaccagaaaagctgcacggatggtctgggctaatttgctggttttcgtggtctgcttccttccgttgcatgttggcctaacagtgcggttggcagtcgggtggaacgcctgcgcgctgctggaaacaatccggagagctctttatatcacctccaagctctcagatgccaattgttgcctggacgcaatctgttattattatatggctaaggaatttcaggaggcaagtgctctagccgtcgcaccgtctgccaaggcgcacaagagccaggatagcttatgcgtcactcttgcttag

SEQ ID NO: 154726 - DNA, 930 bp, Artificial Sequence
  derived and/or modified sequence
atgaacggcacctacaacacctgcggcagcagcgacctgacctggccccccgcaatcaagcttggcttctacgcctatctcggggtcctgctcgtgctgggcctgttgctaaacagccttgcactgtgggtgttttgctgccgcatgcagcagtggaccgagaccaggatctacatgacaaatttggctgttgctgatctgtgcttactatgcacattgcccttcgtattgcacagcctacgggatacatccgacacacccctttgccagctgtcccagggaatttacctgaccaacagatatatgagcatctccctagtgaccgctatcgctgtggaccgatacgtggctgtgcgacatcctttgcgcgccagaggattaaggtcccccagacaggccgctgctgtttgtgctgtgctctgggtgctggtgatcggctccctcgtagcgaggtggttgctcgggattcaggagggcggcttctgttttaggtctacacggcacaacttcaattcaatggcattcccactcctgggtttctatttacccctagcagtagtagtattttgcagcctaaaagtggtgaccgccctcgctcagcgaccacctacggacgtgggccaggccgaagctactcgtaaagctgcccggatggtgtgggccaatttactggtcttcgtcgtgtgctttctgcccctacatgtcggcctcacagtgcgtctcgccgtaggttggaacgcctgcgcgttgctcgaaaccattagaagagccttgtatatcacttccaaactatcggatgcaaactgttgccttgatgccatttgttattactacatggctaaagagtttcaggaggccagtgcattggccgtggccccatctgccaaggcacataaatctcaggactctctgtgtgtgacactggcatag

SEQ ID NO: 154727 - DNA, 930 bp, Artificial Sequence
  derived and/or modified sequence
atgaacggcacctacaacacctgcggcagcagcgacctgacctggccacctgcgataaagctggggttttacgcatatctgggcgtactgctggtcttggggctgctgctgaattccctggctctgtgggtcttttgttgccggatgcaacagtggaccgaaactagaatttacatgacaaacctggctgtagctgacctttgcctgctatgtacgcttccttttgtcctgcattccctacgcgacacctctgatactcccctctgtcagctcagccagggcatctacttaacaaatcgctacatgtccatttctctggtgactgccattgcagtggataggtacgtcgcagtgcgccacccattaagagccaggggtttgcggtctccacgccaggcagctgcggtgtgcgcagtgctctgggtgctagtcattgggtccctagtcgcacgttggcttctgggcatccaagagggcggattctgttttcgctctacaaggcacaattttaattcaatggcctttcctcttctcggattctacctccctctagcggtcgtagtcttttgtagtctgaaggtggtaaccgctctcgcacaacgacctccaaccgacgtggggcaggccgaggcaacaagaaaagcggcccgcatggtgtgggccaaccttctagtgttcgtggtgtgtttcctcccactccacgtcggcctgactgtcaggctggccgtgggctggaatgcatgcgccctgctggagacaatcaggcgcgccctctacattacctctaagttatcagacgctaactgctgcctggacgcaatatgctattactacatggctaaagagtttcaggaggcctccgccttggccgtggcaccaagcgccaaagctcataaatcccaggacagtctatgcgtgacactggcctag

SEQ ID NO: 154728 - DNA, 930 bp, Artificial Sequence
  derived and/or modified sequence
atgaatgggacatataatacctgcgggagttctgatctgacatggcccccagcaataaagctagggttctacgcttatctcggcgtacttctggtgttgggcctcctgctcaacagtctggccctctgggtgttctgttgcagaatgcagcaatggacagagacacgaatctacatgaccaacttggccgtagcagacctctgcctcctctgcacccttcctttcgttctccatagcttacgcgacacatccgacacacctttatgtcagctcagccaaggtatctacctgaccaaccgttacatgtctattagtctggtcacggccatcgccgttgaccggtatgtcgcagtgaggcatccgttgcgcgcaaggggattgaggagccccaggcaagcagcagctgtgtgtgcagtcctgtgggtgctagttataggatctctggtggccaggtggcttctcgggattcaggaaggagggttttgttttcgcagcacgagacataacttcaactccatggcttttcctttactaggcttctacctgcccctcgccgttgtggttttctgctccttgaaggtggttaccgcccttgctcagagaccgcctaccgatgttggacaggccgaagccacacgcaaggctgcacggatggtctgggccaatcttctggtatttgttgtctgtttcttgcccttgcacgtgggtttgaccgtgagactcgccgtgggttggaacgcttgcgccttgctcgagactatacgccgtgccttgtacatcacatccaagctttcagatgctaattgttgccttgacgccatttgctattactatatggccaaggaattccaggaagcgtccgcactggcggtggctccctcagcaaaagcacacaagagtcaggatagtttgtgtgtgacactggcatag

SEQ ID NO: 154729 - DNA, 930 bp, Artificial Sequence
  derived and/or modified sequence
atgaatggaacctataatacatgtggcagctccgacctgacttggccaccagcgattaaattaggtttctacgcctatcttggggtgctgctggtgttgggtctgctgcttaacagcctggccctgtgggttttctgctgtcgtatgcagcagtggaccgaaacccgaatttatatgaccaatctggccgtcgctgacctgtgcttactatgtacgctaccatttgtgctccacagccttcgggatacttcagataccccactctgtcagctctctcagggaatctatctgaccaaccgctacatgagcatatccctcgttacagcaattgctgtcgacaggtatgtggccgtgaggcaccctctcagggccaggggactacgtagccccagacaggctgcagctgtatgcgcagtactgtgggttcttgtcattggtagccttgtggccaggtggctcttaggcattcaagagggcggtttttgttttcggtctaccagacacaacttcaattcaatggcgttccccctgttgggattttacctgcctttggctgtcgtggtgttctgcagtctgaaggtcgtcaccgccctagcccagaggccacccaccgacgtggggcaagctgaagccactcggaaagcagccagaatggtctgggctaatctgctggtgttcgtagtgtgcttcctgccactgcacgtcggcctgacagtccgcttagccgtgggatggaacgcatgcgccctgctggagaccatcagacgcgctctgtatatcacaagcaaattatccgatgcgaattgttgtctcgacgcaatttgctactattacatggccaaggagttccaagaggcctccgccctcgcagtggcacctagcgcaaaggcacataagagtcaggactctctgtgcgtcacgttagcatag

SEQ ID NO: 154730 - DNA, 930 bp, Artificial Sequence
  derived and/or modified sequence
atgaacgggacatataacacatgtgggtcatctgacctgacatggcccccagccatcaaattagggttctatgcctacttgggtgtactgctcgtactgggcctgttgctgaattcactggccttgtgggtattttgttgtcggatgcagcaatggacagagacccgcatctatatgacaaacctagcagtcgccgacctctgcctgctgtgcacactgcccttcgttctccacagcctgagagatacatctgatactccgctgtgccagctatctcagggtatttacctcaccaaccggtacatgagtatctccctggtaaccgccatcgctgtagaccgttatgtggccgtgagacatcccttgcgagcccgaggactgaggtcccctcgccaagccgctgctgtgtgcgctgtcctgtgggtcttagtgattggctccctcgttgccagatggctgctaggaatccaagagggcggattctgtttccgctcaactcgccacaacttcaatagcatggctttccccctcttggggttctacttgcccctggctgtggtggtcttttgctccctaaaggtggtaacagcactggcacagcgcccacccaccgacgtgggacaggctgaggcaaccaggaaggccgcacgcatggtgtgggcaaatctcttggtattcgttgtgtgtttcctacctctgcacgtaggactaaccgtgcggttagcagtgggttggaatgcatgcgctttgctcgagaccataagacgggcactctatataactagcaagttgagcgacgctaattgctgtctggatgccatttgctactactacatggcaaaagaattccaggaggcctcagcattggcagtggccccatccgccaaagctcataagtcccaggattcactgtgtgttactctggcatag

SEQ ID NO: 154731 - DNA, 930 bp, Artificial Sequence
  derived and/or modified sequence
atgaacggaacttacaacacgtgtgggtccagcgacctgacgtggcccccagctatcaagctgggattttatgcctatctgggcgtgttattagtgttaggtcttctcttgaatagcctagccctgtgggtgttttgctgtcgcatgcagcagtggactgagacgcgcatttatatgacaaacctggctgtggccgacctttgcttgctgtgtactctcccattcgtgctgcactctctgagggacaccagtgacacacccctttgccagctgagtcaaggtatctatttaaccaatagatacatgagcatcagcctcgtaactgccatagccgtggatagatatgtcgcagtgcggcaccccctgagagctcgagggctcaggagccctcggcaagccgcagcagtgtgtgcggtgctctgggtcctggtaataggcagcctcgtcgctcggtggttgttaggcattcaggagggaggcttctgtttccgctcaacaaggcataactttaactcaatggccttccctcttctcggcttctaccttcctctcgctgtagtggtgttctgttcactgaaagttgtaaccgccctcgcacagcggccaccaacagatgtgggccaggcagaagcgacaaggaaggctgcgcgtatggtctgggccaacctactggtcttcgtagtgtgttttctaccccttcatgtaggactgactgtgcggttagccgtagggtggaacgcctgtgcactgcttgagacaatacgcagggccctctatatcacctcgaaactgtctgatgcaaactgctgcctcgatgccatttgctattattacatggccaaggaattccaggaggcaagcgcgctggcagtggcgcctagcgcaaaggctcataagagtcaggattccttgtgcgtgaccctcgcctag

SEQ ID NO: 154732 - DNA, 930 bp, Artificial Sequence
  derived and/or modified sequence
atgaacggcacctacaacacctgcggcagcagcgacctgacctggccccccgccatcaagctgggcttctacgcctacctgggcgtgctgctggtgctgggcctgctgctgaacagcctggccctgtgggtgttctgctgcagaatgcagcagtggaccgagaccagaatctacatgaccaacctggccgtggccgacctgtgcctgctgtgcaccctgcccttcgtgctgcacagcctgagagacaccagcgacacccccctgtgccagctgagccagggcatctacctgaccaacagatacatgagcatcagcctggtgaccgccatcgccgtggacagatacgtggccgtgagacaccccctgagagccagaggcctgagaagccccagacaggccgccgccgtgtgcgccgtgctgtgggtgctggtgatcggcagcctggtggccagatggctgctgggcatccaggagggcggcttctgcttcagaagcaccagacacaacttcaacagcatggccttccccctgctgggcttctacctgcccctggccgtggtggtgttctgcagcctgaaggtggtgaccgccctggcccagagaccccccaccgacgtgggccaggccgaggccaccagaaaggccgccagaatggtgtgggccaacctgctggtgttcgtggtgtgcttcctgcccctgcacgtgggcctgaccgtgagactggccgtgggctggaacgcctgcgccctgctggagaccatcagaagagccctgtacatcaccagcaagctgagcgacgccaactgctgcctggacgccatctgctactactacatggccaaggagttccaggaggccagcgccctggccgtggcccccagcgccaaggcccacaagagccaggacagcctgtgcgtgaccctggcctag

SEQ ID NO: 154733 - protein, 613 aa, Artificial Sequence
  derived and/or modified sequence
MRAPGALLARMSRLLLLLLLKVSASSALGVAPASRNETCLGESCAPTVIQRRGRDAWGPGNSARDVLRARAPREEQGAAFLAGPSWDLPAAPGRDPAAGRGAEASAAGPPGPPTRPPGPWRWKGARGQEPSETLGRGNPTALQLFLQISEEEEKGPRGAGISGRSQEQSVKTVPGASDLFYWPRRAGKLQGSHHKPLSKTANGLAGHEGWTIALPGRALAQNGSLGEGIHEPGGPRRGNSTNRRVRLKNPFYPLTQESYGAYAVMCLSVVIFGTGIIGNLAVMCIVCHNYYMRSISNSLLANLAFWDFLIIFFCLPLVIFHELTKKWLLEDFSCKIVPYIEVASLGVTTFTLCALCIDRFRAATNVQMYYEMIENCSSTTAKLAVIWVGALLLALPEVVLRQLSKEDLGFSGRAPAERCIIKISPDLPDTIYVLALTYDSARLWWYFGCYFCLPTLFTITCSLVTARKIRKAEKACTRGNKRQIQLESQMNCTVVALTILYGFCIIPENICNIVTAYMATGVSQQTMDLLNIISQFLLFFKSCVTPVLLFCLCKPFSRAFMECCCCCCEECIQKSSTVTSDDNDNEYTTELELSPFSTIRREMSTFASVGTHC

SEQ ID NO: 154734 - DNA, 3021 bp, Artificial Sequence
  derived and/or modified sequence
ggggttggaatcccgcttctcctcggcagcagtaggctcgcaagtcgctggggttaggtggggcaagagtttcgccggcgcatcagcgctgcttcggactgtttgcaacgtgtttccagcgagctgggagcggggttgtgactgcgagtcgtctgggggagggggacttgtttttcttttcctctagagacctcggcttgcaactggatcaaacgctgtcgaaaggatgtaaataggcagagcaactgttaccaagaaggccaccacccccacccaaaggcagtgaggagtgtggggcttcgtctgggctcccccgagtctcaacagtaatcaacagtcaggtgttgattgcaacttttcaaggtcagccaccgggagtagcctattccctctaggaaccttggagggcataccttgctgggactcaacttggctgagaaatgcacaagatgccaaaggaggaaggattatagggggcgtgtgtgtgacccccaagaccgatcttccgctatcaccctaatctccggttccccgctacccgggcgggggtgagtatgtgacatgtgcctaactctcagcagcaacttcggcagcaggtgtcgatcctaactaagcaggagctgcggctgccgggtgtgccctcaccaagccatgcgagccccgggcgcgcttctcgcccgcatgtcgcggctactgcttctgctactgctcaaggtgtctgcctcttctgccctcggggtcgcccctgcgtccagaaacgaaacttgtctgggggagagctgtgcacctacagtgatccagcgccgcggcagggacgcctggggaccgggaaattctgcaagagacgttctgcgagcccgagcacccagggaggagcagggggcagcgtttcttgcgggaccctcctgggacctgccggcggccccgggccgtgacccggctgcaggcagaggggcggaggcgtcggcagccggacccccgggacctccaaccaggccacctggcccctggaggtggaaaggtgctcggggtcaggagccttctgaaactttggggagagggaaccccacggccctccagctcttccttcagatctcagaggaggaagagaagggtcccagaggcgctggcatttccgggcgtagccaggagcagagtgtgaagacagtccccggagccagcgatcttttttactggccaaggagagccgggaaactccagggttcccaccacaagcccctgtccaagacggccaatggactggcggggcacgaagggtggacaattgcactcccgggccgggcgctggcccagaatggatccttgggtgaaggaatccatgagcctgggggtccccgccggggaaacagcacgaaccggcgtgtgagactgaagaaccccttctacccgctgacccaggagtcctatggagcctacgcggtcatgtgtctgtccgtggtgatcttcgggaccggcatcattggcaacctggcggtgatgtgcatcgtgtgccacaactactacatgcggagcatctccaactccctcttggccaacctggccttctgggactttctcatcatcttcttctgccttccgctggtcatcttccacgagctgaccaagaagtggctgctggaggacttctcctgcaagatcgtgccctatatagaggtcgcttctctgggagtcaccactttcaccttatgtgctctgtgcatagaccgcttccgtgctgccaccaacgtacagatgtactacgaaatgatcgaaaactgttcctcaacaactgccaaacttgctgttatatgggtgggagctctattgttagcacttccagaagttgttctccgccagctgagcaaggaggatttggggtttagtggccgagctccggcagaaaggtgcattattaagatctctcctgatttaccagacaccatctatgttctagccctcacctacgacagtgcgagactgtggtggtattttggctgttacttttgtttgcccacgcttttcaccatcacctgctctctagtgactgcgaggaaaatccgcaaagcagagaaagcctgtacccgagggaataaacggcagattcaactagagagtcagatgaactgtacagtagtggcactgaccattttatatggattttgcattattcctgaaaatatctgcaacattgttactgcctacatggctacaggggtttcacagcagacaatggacctccttaatatcatcagccagttccttttgttctttaagtcctgtgtcaccccagtcctccttttctgtctctgcaaacccttcagtcgggccttcatggagtgctgctgctgttgctgtgaggaatgcattcagaagtcttcaacggtgaccagtgatgacaatgacaacgagtacaccacggaactcgaactctcgcctttcagtaccatacgccgtgaaatgtccacttttgcttctgtcggaactcattgctgaaggacagtacttggttgggtcagatttatttgtttgattttcatatcccgtgaaagtttttaattcatatttttccttatagggaaaaatgcaaaaaagaaacaataaagaaagaaatattaactactgtagaactgattttacaaattaatatttgtgctttgaaaaaaagtttctatttagttatttaagaagaatgagaaggccaatagttttagattattttatctggtatggtgctaatattttatttgaaaaaagttactgcaacttaacttaaaattgctaacgttttttcttcttttaaaaatacaattattgtatattgattatagcaatgtgattttgtaggttattttatatttgagttgtgattgaaagtatgttgtatatggtattgtgagatgatttgtacttggaagcattcacaaagtagcaccaaataaattacactttattctttaatgtcattgtcaatctacttttaaccaatattcaataaatcttctaattgccttaaagatacaa

SEQ ID NO: 154735 - DNA, 1842 bp, Artificial Sequence
  derived and/or modified sequence
atgcgcgctcctggagcgcttctggcacgcatgagccgtctcctccttctactgctactgaaggtgtccgcttcttcagctctcggagtagcaccggcatccaggaatgagacttgtttgggagagagctgcgcccccactgtgattcaaaggaggggcagagacgcttgggggcccgggaactctgctcgagatgtcctgcgcgcccgcgcacccagagaggaacagggcgctgccttcctggcgggcccatcgtgggacctcccagcagcgcctggacgagaccccgccgcagggaggggcgccgaggcctccgccgctggccctccaggaccgcctactcggccgcccggcccatggcgttggaaaggcgcacgaggacaggagccttctgagaccctggggagaggaaaccctactgcactgcagctgtttctacaaatcagtgaggaagaggagaaggggccccggggagcaggaatcagtggacggagtcaagagcagtcagtgaaaactgtgcccggagcaagcgatttgttttactggcccagaagggctggcaagctgcagggctctcaccacaagccattgagcaaaaccgccaacggcctggccggccacgaaggttggacaattgccttgccaggacgggccctcgcccagaatggatccctcggagaaggaatccatgaacctgggggtcccaggcgcgggaactcaaccaacaggagggtaagactcaaaaaccccttctatcccctgacccaagagagttatggcgcctacgctgtcatgtgcttgtccgtggtaatctttggcacaggaattatcggcaatctcgccgtgatgtgcattgtgtgtcacaactactatatgagatctatttccaactccctgttggcaaatctcgcattctgggactttctaatcatctttttttgcctgccccttgtgattttccatgagctgacaaagaagtggttgcttgaggactttagttgtaaaatcgttccctacatcgaagtggcttctctgggtgtgaccacttttacattgtgcgccctctgcatagaccgctttagagcggcaactaacgtccagatgtattacgagatgattgaaaattgctcatccaccacggccaaacttgctgtgatctgggtgggggctctgctgttagccttgcctgaggtggttctccgccagctttccaaggaagatcttggctttagtggccgggcaccagccgaaaggtgcataataaaaatttcgccggatctcccagacacgatttatgtgttggcgctgacctacgattctgcacggctatggtggtatttcgggtgctacttctgcctccccaccctgttcaccatcacgtgctctctggtgactgcaaggaagatccgaaaagcagaaaaagcatgtacgcgtggcaacaagcgtcaaatccagctcgagtcccagatgaattgtacagtcgtcgccttaaccatactttacggcttctgtatcatccccgaaaacatctgtaacattgtgaccgcttacatggcgaccggcgtgtctcagcagaccatggacctactaaacataattagtcaattcctcctgtttttcaaaagttgcgtcacgccggtgctgctgttctgcttatgcaaaccgttcagcagagctttcatggagtgctgctgttgttgttgtgaagagtgcattcagaagtccagcaccgtaacttctgacgataatgataatgagtatacgacggagttggaattgtctccttttagcactatccgtagggagatgtcaactttcgcttctgtggggactcattgttag

SEQ ID NO: 154736 - DNA, 1842 bp, Artificial Sequence
  derived and/or modified sequence
atgagggcccctggggccctgctggccaggatgagccggctgctgctgctgctgctgctgaaggtgtctgccagcagcgccctgggcgtggccccagccagcagaaatgagacctgcctgggggagagctgtgcccccaccgtcatccagaggcggggcagagatgcctggggccctggcaacagcgccagagatgtgctgcgggcccgggccccccgggaggagcagggcgccgccttcctggccggccccagctgggacctgcctgctgcccctggccgggaccctgctgctggccgcggggctgaggccagcgctgctggccccccaggcccccccacccggcccccaggcccctggcgctggaagggggcccggggccaggagcccagcgagaccctgggccggggcaaccccacagccctgcagctgttcctgcagatcagcgaggaggaggagaagggccccagaggagctggcatcagcggccgcagccaggagcagagcgtgaagacagtgcctggggccagtgacctcttctactggccccggcgggccggcaagctgcagggcagccaccacaagcccctgagcaagacagccaacggcctggccggccacgagggctggaccatcgccctgcccggccgggccctggcccagaatggcagcctgggggagggcatccacgagcccggcggcccccggcggggcaacagcaccaacagaagagtgcggctgaagaaccccttctaccccctgacccaggagagctatggagcctatgctgtgatgtgcctgtctgtggtgatcttcggcaccggcatcatcggcaacctggccgtgatgtgcatcgtgtgccacaactactacatgaggagcatcagcaacagcctgctggccaacctggccttctgggacttcctgatcatcttcttctgcctgcccctggtgatcttccacgagctgaccaagaagtggctgctggaggacttcagctgcaagatcgtgccctacatcgaggtggccagcctgggcgtgaccaccttcaccctgtgtgccctgtgcatcgaccgcttccgggccgccaccaacgtgcagatgtactatgagatgattgagaactgcagcagcaccacagccaagctggccgtcatctgggtgggcgccctgctgctggccctgcctgaggtggtgctgcggcagctgagcaaggaggacctgggcttcagcggccgggccccagctgagcgctgcatcatcaagatcagcccagacctgcctgacaccatctacgtgctggccctgacctatgacagcgcccggctgtggtggtacttcggctgctacttctgcctgcccaccctcttcaccatcacctgcagcctggtgacagccaggaagatcaggaaggccgagaaggcctgcacccggggcaacaagaggcagatccagctggagagccagatgaactgcaccgtggtggccctgaccatcctgtatggcttctgcatcatccctgagaacatctgcaacatcgtgacagcctacatggccaccggggtgtcccagcagaccatggacctgctgaacatcatcagccagttcctgctcttcttcaagagctgtgtgacccctgtgctgctcttctgcctgtgcaagcccttcagccgggccttcatggagtgctgctgctgctgctgtgaggagtgcatccagaagagcagcacagtgaccagtgatgacaatgacaatgagtacaccacagagctggagctgagccccttcagcaccatccggcgggagatgagcacctttgcctctgtgggcacccactgctag

SEQ ID NO: 154737 - DNA, 1842 bp, Artificial Sequence
  derived and/or modified sequence
atgcgggcccccggcgccctgctggcccggatgagccggctgctgctgctgttacttctgaaggtttccgcatcttctgcactaggggtggcacctgcttcccggaacgaaacctgcctaggtgagtcgtgtgcgcccacggtaatccagcggcgcgggcgagacgcatgggggcccgggaacagcgccagggacgtcctgagagcccgcgctccgagagaggaacagggggctgccttcctcgccgggccaagctgggatttgcccgctgcacccggtcgcgacccagcggccggaagaggcgcggaagcatctgccgccggccctcctggccctcccacgagacccccagggccctggcgctggaagggggcacgggggcaggaaccgtcagagaccttggggcgcggaaatccaaccgcccttcagttgttcctgcaaataagcgaggaggaggagaaggggccccgaggcgccggcatttccggcaggagtcaagaacaatcagtgaaaactgttccaggcgccagtgacctgttttattggcccagacgtgcaggcaagcttcaaggatcccatcataaaccattatctaagacagctaatgggctggctggacatgagggttggaccatcgctctccctgggagagccctggcccagaatggtagcctaggcgaaggcattcacgagcctggagggccacgccgcggaaattccactaatagaagagttcggctcaagaatcctttctaccccctcacacaggagtcctatggtgcctatgcagtgatgtgcctgagtgtggtcatttttggtactgggattataggaaatttagccgtgatgtgcattgtatgtcataactattatatgcgctcgatctccaactctttgctcgcaaacctcgccttctgggactttctcatcatttttttttgccttccacttgttatttttcacgagctgacgaaaaaatggctcctggaagactttagttgtaagattgtgccatacattgaggtggcaagtctcggggtgacaacgttcacactgtgcgccctgtgcatcgaccggtttagagccgccaccaacgtgcagatgtattacgaaatgatcgaaaactgttctagcaccacagcgaaactggctgtgatttgggttggcgcgctgctcttagctctcccagaagttgtattaaggcaactcagcaaggaagacctggggttctctggacgcgctcccgctgaacggtgcataatcaaaatcagcccagatctgcccgacacgatctacgttcttgccctgacctatgacagcgcgagactgtggtggtacttcgggtgttacttttgcctgcctaccctgtttacaataacgtgttcgttggtgactgccaggaagattagaaaggccgaaaaagcgtgcacgcgagggaacaaacgccagatccagctcgagtctcagatgaactgcactgtggtggctcttactattttatacgggttctgtatcatccctgaaaacatctgcaatattgtgacagcatatatggcaacgggggtaagccagcagactatggacctactaaacatcatcagtcagttcctgctatttttcaaatcttgtgtgacaccagtgcttctcttttgcctgtgcaaaccattttcaagggcttttatggagtgttgctgctgctgttgtgaggaatgcatccagaaatctagtacagttacctccgacgacaacgataacgaatatactacggagctggaattgtctccgtttagcacaatcagacgagaaatgtccacgttcgcctccgtcggaacccactgttag

SEQ ID NO: 154738 - DNA, 1842 bp, Artificial Sequence
  derived and/or modified sequence
atgagggccccaggggctctcctggccagaatgtctcgactgctgctgttgctgctgttgaaagtttcagccagtagtgccctcggagtggcccctgcatctcgcaacgagacatgccttggcgaatcttgcgccccaacagttattcaaagaaggggtagggatgcctggggccctggcaatagcgcccgagacgtcctgcgcgctcgggctccaagagaagaacagggagccgctttcttggctggcccaagctgggatctgcctgcggctccaggcagggatccagccgcaggacggggagccgaggccagtgctgcgggaccccctggcccaccaacacggccacccggaccgtggcggtggaagggagctaggggccaagaaccatctgagactctcggcagaggtaatcctaccgcactgcagctgttcctgcaaatctccgaggaagaggagaagggccctagaggcgcaggcataagcggcagaagccaggagcaatccgtgaaaacagtgcccggagcctcggaccttttttactggccaaggagggcgggtaagctgcagggatcgcaccacaaacctcttagtaagacagcgaacggactcgcagggcacgaggggtggaccatagcgctgcctggacgcgcacttgctcagaacggctcgttgggggaggggattcatgaacccggaggaccccgacggggtaattcaacaaacaggcgggtacggctcaagaaccccttctatccgctcacccaggagtcgtatggcgcatacgcagtgatgtgcctgtctgtcgttatcttcggaacaggcattatcggaaatttggcagttatgtgtattgtgtgccataactattatatgagatcaatctctaacagtttgctcgccaatctggccttttgggattttctcattatctttttttgccttcctctcgtcattttccacgagcttaccaagaagtggttactcgaagacttttcatgtaaaatcgttccttacattgaagtcgcctctttgggcgtgaccacgttcacactgtgcgctttatgtatcgaccggttccgagccgctactaatgtgcagatgtactatgagatgattgagaattgttcatctactactgccaaactcgccgtgatctgggtgggagctcttctcctcgctctgcccgaggtagtgctccgccagctcagcaaggaagacctcggcttcagcgggagggctcctgctgagcggtgcattataaagatcagtcccgatctgcctgacactatatacgtgctcgcgctaacatacgactctgctaggctttggtggtatttcggttgttacttttgtctgcccactctgtttacgatcacctgttctctggtgaccgctcgaaaaattcggaaagcggagaaggcctgcactcggggaaataaaaggcaaatacaactcgagtcgcagatgaattgtaccgtcgttgcactcacgatcctttacgggttctgtatcatccctgagaatatctgcaacattgtgactgcgtatatggctacaggggtcagtcaacagacaatggacttacttaacatcatcagtcagtttcttcttttctttaagtcatgcgtgacacccgttttgttgttttgcctttgtaagccttttagcagggcgtttatggaatgctgctgttgctgttgtgaggagtgtatccagaaatcctctaccgtgaccagtgatgataacgacaacgaatatactaccgaactggagcttagccccttctccaccattcgacgggaaatgtcgacttttgcatccgtgggaacacattgctag

SEQ ID NO: 154739 - DNA, 1842 bp, Artificial Sequence
  derived and/or modified sequence
atgagagcccccggcgccctgctggccagaatgagcagactgctgctgctgctgctgctgaaggtgagcgccagcagcgccctgggcgtggcccccgccagcagaaacgagacctgcctgggcgagagctgcgcccccaccgtgatccagagaagaggcagagacgcctggggccccggcaacagcgccagagacgtgctgagagccagagcccccagagaggagcagggcgccgccttcctggccggccccagctgggacctgcccgccgcccccggcagagaccccgccgccggcagaggcgccgaggccagcgccgccggcccccccggcccccccaccagaccccccggcccctggagatggaagggcgccagaggccaggagcccagcgagaccctgggcagaggcaaccccaccgccctgcagctgttcctgcagatcagcgaggaggaggagaagggccccagaggcgccggcatcagcggcagaagccaggagcagagcgtgaagaccgtgcccggcgccagcgacctgttctactggcccagaagagccggcaagctgcagggcagccaccacaagcccctgagcaagaccgccaacggcctggccggccacgagggctggaccatcgccctgcccggcagagccctggcccagaacggcagcctgggcgagggcatccacgagcccggcggccccagaagaggcaacagcaccaacagaagagtgagactgaagaaccccttctaccccctgacccaggagagctacggcgcctacgccgtgatgtgcctgagcgtggtgatcttcggcaccggcatcatcggcaacctggccgtgatgtgcatcgtgtgccacaactactacatgagaagcatcagcaacagcctgctggccaacctggccttctgggacttcctgatcatcttcttctgcctgcccctggtgatcttccacgagctgaccaagaagtggctgctggaggacttcagctgcaagatcgtgccctacatcgaggtggccagcctgggcgtgaccaccttcaccctgtgcgccctgtgcatcgacagattcagagccgccaccaacgtgcagatgtactacgagatgatcgagaactgcagcagcaccaccgccaagctggccgtgatctgggtgggcgccctgctgctggccctgcccgaggtggtgctgagacagctgagcaaggaggacctgggcttcagcggcagagcccccgccgagagatgcatcatcaagatcagccccgacctgcccgacaccatctacgtgctggccctgacctacgacagcgccagactgtggtggtacttcggctgctacttctgcctgcccaccctgttcaccatcacctgcagcctggtgaccgccagaaagatcagaaaggccgagaaggcctgcaccagaggcaacaagagacagatccagctggagagccagatgaactgcaccgtggtggccctgaccatcctgtacggcttctgcatcatccccgagaacatctgcaacatcgtgaccgcctacatggccaccggcgtgagccagcagaccatggacctgctgaacatcatcagccagttcctgctgttcttcaagagctgcgtgacccccgtgctgctgttctgcctgtgcaagcccttcagcagagccttcatggagtgctgctgctgctgctgcgaggagtgcatccagaagagcagcaccgtgaccagcgacgacaacgacaacgagtacaccaccgagctggagctgagccccttcagcaccatcagaagagagatgagcaccttcgccagcgtgggcacccactgctag

SEQ ID NO: 154740 - protein, 300 aa, Artificial Sequence
  derived and/or modified sequence
MDLPPQLSFGLYVAAFALGFPLNVLAIRGATAHARLRLTPSLVYALNLGCSDLLLTVSLPLKAVEALASGAWPLPASLCPVFAVAHFFPLYAGGGFLAALSAGRYLGAAFPLGYQAFRRPCYSWGVCAAIWALVLCHLGLVFGLEAPGGWLDHSNTSLGINTPVNGSPVCLEAWDPASAGPARFSLSLLLFFLPLAITAFCYVGCLRALARSGLTHRRKLRAAWVAGGALLTLLLCVGPYNASNVASFLYPNLGGSWRKLGLITGAWSVVLNPLVTGYLGRGPGLKTVCAARTQGGKSQK

SEQ ID NO: 154741 - DNA, 903 bp, Artificial Sequence
  derived and/or modified sequence
atggacctgcccccccagctgagcttcggcctgtacgtggccgccttcgccctgggcttccccctgaacgtgctggccatcagaggcgccaccgcccacgccagactgagactgacccccagcctggtgtacgccctgaacctgggctgcagcgacctgctgctgaccgtgagcctgcccctgaaggccgtggaggccctggccagcggcgcctggcccctgcccgccagcctgtgccccgtgttcgccgtggcccacttcttccccctgtacgccggcggcggcttcctggccgccctgagcgccggcagatacctgggcgccgccttccccctgggctaccaggccttcagaagaccctgctacagctggggcgtgtgcgccgccatctgggccctggtgctgtgccacctgggcctggtgttcggcctggaggcccccggcggctggctggaccacagcaacaccagcctgggcatcaacacccccgtgaacggcagccccgtgtgcctggaggcctgggaccccgccagcgccggccccgccagattcagcctgagcctgctgctgttcttcctgcccctggccatcaccgccttctgctacgtgggctgcctgagagccctggccagaagcggcctgacccacagaagaaagctgagagccgcctgggtggccggcggcgccctgctgaccctgctgctgtgcgtgggcccctacaacgccagcaacgtggccagcttcctgtaccccaacctgggcggcagctggagaaagctgggcctgatcaccggcgcctggagcgtggtgctgaaccccctggtgaccggctacctgggcagaggccccggcctgaagaccgtgtgcgccgccagaacccagggcggcaagagccagaagtag

SEQ ID NO: 154742 - DNA, 923 bp, Artificial Sequence
  derived and/or modified sequence
cggcggccccatggacctgcccccgcagctctccttcggcctctatgtggccgcctttgcgctgggcttcccgctcaacgtcctggccatccgaggcgcgacggcccacgcccggctccgtctcacccctagcctggtctacgccctgaacctgggctgctccgacctgctgctgacagtctctctgcccctgaaggcggtggaggcgctagcctccggggcctggcctctgccggcctcgctgtgccccgtcttcgcggtggcccacttcttcccactctatgccggcgggggcttcctggccgccctgagtgcaggccgctacctgggagcagccttccccttgggctaccaagccttccggaggccgtgctattcctggggggtgtgcgcggccatctgggccctcgtcctgtgtcacctgggtctggtctttgggttggaggctccaggaggctggctggaccacagcaacacctccctgggcatcaacacaccggtcaacggctctccggtctgcctggaggcctgggacccggcctctgccggcccggcccgcttcagcctctctctcctgctcttttttctgcccttggccatcacagccttctgctacgtgggctgcctccgggcactggcccgctccggcctgacgcacaggcggaagctgcgggccgcctgggtggccggcggggccctcctcacgctgctgctctgcgtaggaccctacaacgcctccaacgtggccagcttcctgtaccccaatctaggaggctcctggcggaagctggggctcatcacgggtgcctggagtgtggtgcttaatccgctggtgaccggttacttgggaaggggtcctggcctgaagacagtgtgtgcggcaagaacgcaagggggcaagtcccagaagtaacgccactgct

SEQ ID NO: 154743 - DNA, 903 bp, Artificial Sequence
  derived and/or modified sequence
atggatttgcctccacagttatcttttggcttgtacgtagcggctttcgctctcggcttccccttgaacgtactcgccattcggggcgctaccgctcatgcgaggttacgactgacgccttcactggtttatgcccttaacttagggtgctcagaccttctgctgacagtttccctgccactcaaggcggtggaagctctggcctccggcgcttggccacttcccgcatcactttgtcctgtctttgccgtcgctcatttctttcctctgtacgcaggtggtgggtttctggccgccctctcagctggtagatacttgggagccgccttcccactcggctaccaagctttcaggaggccatgctacagttggggagtatgcgccgcgatttgggccctggtcctgtgccacctgggcttggtcttcggcctggaggcccccggtgggtggttagaccacagtaacacctctcttggaattaataccccagtgaacgggtctcctgtctgtctagaggcctgggacccggccagtgctggacccgcacgattctcgttgagcttactgttgttttttttgcccctcgctattaccgctttttgttatgtgggatgtctccgagctttagcccgatccgggctgacacaccgacgaaaactcagggccgcctgggtggccggaggcgccctgctgacccttctcttgtgtgttggcccctacaatgcttcaaacgttgcgagttttctgtacccaaacctcggaggatcttggagaaaactcggcctcatcactggcgcttggtcagtggtgctgaaccccttagttacagggtatctgggccgggggcccggactaaaaactgtgtgtgctgccaggacccaagggggcaaatcccagaagtag

SEQ ID NO: 154744 - DNA, 903 bp, Artificial Sequence
  derived and/or modified sequence
atggacctgcccccccagctgagctttggcctgtatgtggccgcctttgccctgggcttccccctgaatgtgctggccatccggggggccacagcccacgcccggctgcggctgacccccagcctggtgtatgccctgaacctgggctgcagcgacctgctgctgactgtgtccctgcccctgaaggctgtggaggccctggccagcggggcctggcccctgcctgccagcctgtgccctgtgtttgctgtggcccacttcttccccctgtatgctgggggcggcttcctggccgccctgtctgctggccgctacctgggcgccgccttccccctgggctaccaggccttccggcggccctgctacagctggggcgtgtgtgccgccatctgggccctggtgctgtgccacctgggcctggtgtttggcctggaggcccctgggggctggctggaccacagcaacaccagcctgggcatcaacacccctgtgaatggcagccctgtgtgcctggaggcctgggaccctgccagcgctggccctgcccgcttcagcctgagcctgctgctcttcttcctgcccctggccatcacagccttctgctacgtgggctgcctgcgggccctggcccggagcggcctgacccacaggaggaagctgcgggccgcctgggtggccggcggggccctgctgaccctgctgctgtgtgtgggcccctacaatgccagcaatgtggccagcttcctgtaccccaacctgggcggctcctggaggaagctgggcctcatcaccggggcctggagcgtggtgctgaaccccctggtgacaggctacctgggccggggccctggcctgaagacagtgtgtgccgcccggacccagggcggcaagagccagaagtag

SEQ ID NO: 154745 - DNA, 903 bp, Artificial Sequence
  derived and/or modified sequence
atggacctgcccccccagctgagcttcggcctgtacgtggccgccttcgctctgggttttccactcaacgtgctggcaatccggggcgcaaccgcacatgcccggctgagactgactccctccctcgtgtatgccctgaacctgggctgttcagatttactcttgaccgtgagtttgccgttgaaagccgtggaggctcttgcaagcggagcttggccgctgcccgcaagcttgtgccccgtcttcgctgtcgctcacttcttcccactttatgccgggggtggcttcttggctgctctctccgcgggcaggtatttgggagcggccttccctttgggctatcaggccttcaggaggccatgttactcatggggcgtgtgtgccgccatctgggccctggtgctgtgccatctcggcctcgtttttggccttgaagctccgggaggctggctggaccatagcaacacgagcctgggaatcaacactcccgtcaacgggtcacccgtctgcctcgaggcttgggatccagcctctgccggtccagcaaggtttagcctttctttactgctgttcttcctgcctctcgccatcacggcgttctgttacgtgggatgcctcagggccttggcccggtcaggcctcacacacagacggaagttgcgtgccgcctgggttgctggcggagccctcctaactctcctgttgtgtgtgggaccatacaatgcaagcaacgttgccagcttcctgtatcctaatctggggggctcatggcggaagttaggactgatcacgggcgcatggagcgtggttctgaacccactggtcaccgggtacttggggaggggacccggcttgaaaaccgtgtgcgcagcccgaactcaaggagggaagtcacaaaagtag

SEQ ID NO: 154746 - DNA, 903 bp, Artificial Sequence
  derived and/or modified sequence
atggacctcccgcctcagcttagcttcggactatacgtagccgctttcgctcttgggttccccctgaatgttctagccataaggggagcaaccgcccatgccaggctccggctgacaccgtccttagtatacgccctgaacttgggctgcagcgacctgctactgactgtctccctgcctcttaaagcagttgaggctctcgcctcaggggcatggcccttgcctgctagcctgtgtcctgtttttgctgtcgcccatttttttccactgtacgctggcggtggcttcctggccgcattgtctgctgggagatacctcggggctgcatttccgctcggttaccaagcttttaggaggccctgctactcttggggtgtctgcgccgcaatctgggccctagtgctgtgccacctcggcctggtgttcggtctcgaggctcccggaggttggctcgaccattccaacacgtccttaggcatcaatacgccagttaatggctctccggtgtgcctagaggcatgggatccagcttcggccggacccgctcgtttctccctcagtttgctcctttttttcctgccacttgcaataactgcattctgttacgtcgggtgcctcagggcgttggcacggtccggtctgacacataggcggaaactgcgggctgcttgggtggccggtggggcactcctgaccttactcctgtgcgtggggccatacaacgccagtaacgtggcatcctttctgtaccctaatttgggtgggagctggaggaagcttggcctgatcactggtgcctggagcgtggtcctgaatccactcgttacaggctacctcgggaggggacccggactgaagaccgtttgcgctgcccgaacccaaggtggcaagagtcagaaatag

SEQ ID NO: 154747 - DNA, 1041 bp, Artificial Sequence
  derived and/or modified sequence
atggacaccggccccgaccagagctacttcagcggcaaccactggttcgtgttcagcgtgtacctgctgaccttcctggtgggcctgcccctgaacctgctggccctggtggtgttcgtgggcaagctgcagagaagacccgtggccgtggacgtgctgctgctgaacctgaccgccagcgacctgctgctgctgctgttcctgcccttcagaatggtggaggccgccaacggcatgcactggcccctgcccttcatcctgtgccccctgagcggcttcatcttcttcaccaccatctacctgaccgccctgttcctggccgccgtgagcatcgagagattcctgagcgtggcccaccccctgtggtacaagaccagacccagactgggccaggccggcctggtgagcgtggcctgctggctgctggccagcgcccactgcagcgtggtgtacgtgatcgagttcagcggcgacatcagccacagccagggcaccaacggcacctgctacctggagttcagaaaggaccagctggccatcctgctgcccgtgagactggagatggccgtggtgctgttcgtggtgcccctgatcatcaccagctactgctacagcagactggtgtggatcctgggcagaggcggcagccacagaagacagagaagagtggccggcctgctggccgccaccctgctgaacttcctggtgtgcttcggcccctacaacgtgagccacgtggtgggctacatctgcggcgagagccccgcctggagaatctacgtgaccctgctgagcaccctgaacagctgcgtggaccccttcgtgtactacttcagcagcagcggcttccaggccgacttccacgagctgctgagaagactgtgcggcctgtggggccagtggcagcaggagagcagcatggagctgaaggagcagaagggcggcgaggagcagagagccgacagacccgccgagagaaagaccagcgagcacagccagggctgcggcaccggcggccaggtggcctgcgccgagagctag

SEQ ID NO: 154748 - DNA, 1041 bp, Artificial Sequence
  derived and/or modified sequence
atggatactggaccggaccagtcatacttctctggaaaccattggttcgtttttagcgtgtacttgttaactttcctcgtgggcctcccactaaatctactggctcttgttgtgttcgtgggtaaactccaaagacgcccagttgcggtcgacgtattactgctcaacctgactgcctcagacctgttactgttactctttcttccctttcgcatggtggaggccgccaatggaatgcattggcccttgccttttattctgtgtcccctgtcgggcttcattttcttcacaacaatatacctgaccgccttgtttctcgcggccgtcagcatagagcgctttctctcggtcgctcaccccttgtggtataagactaggccaagactcggtcaggccggactcgtgagcgtggcatgttggctgctggcctctgctcactgttcagtggtgtatgttatcgagttctctggtgacatctctcacagtcagggaacgaatggaacttgttacctggaattcaggaaggaccagctggcgattttgctgcccgtgagactggagatggccgtggtcctgtttgttgtgcctcttataatcacaagctactgttacagtcgccttgtatggatcctaggaagaggagggtcgcatcgtagacagcggcgcgtggccggacttctcgcagcaacgttgctgaacttcctggtttgcttcgggccatacaacgttagccatgtggttgggtatatctgcggggagtcccccgcctggcgcatctatgtcacccttctgtccacgctgaattcctgtgtggatccgttcgtgtactattttagcagcagtggtttccaggccgacttccacgaattactgaggcgcctatgcgggctatggggccagtggcagcaggagagttccatggaattgaaggaacaaaaaggaggggaagagcagagagccgaccgcccagccgagaggaagacaagcgaacactctcagggctgcgggacaggtggccaagtggcttgtgccgagtcctag

SEQ ID NO: 154749 - DNA, 1041 bp, Artificial Sequence
  derived and/or modified sequence
atggacaccggccctgaccagagctacttcagcggcaaccactggtttgtgttttctgtgtacctgctgaccttcctggtgggcctgcccctgaacctgctggccctggtggtgtttgtgggcaagctgcagaggaggcctgtggccgtggatgtgctgctgctgaacctgacagccagtgacctgctgctgctgctcttcctgcccttcaggatggtggaggccgccaacggcatgcactggcccctgcccttcatcctgtgccccctgagcggcttcatcttcttcaccaccatctacctgacagccctcttcctggccgctgtgtccattgagcgcttcctgtctgtggcccaccccctgtggtacaagacccggccccggctgggccaggccggcctggtgtctgtggcctgctggctgctggccagcgcccactgcagcgtggtgtatgtgattgagttcagcggggacatcagccacagccagggcaccaacggcacctgctacctggagttcaggaaggaccagctggccatcctgctgcctgtgcggctggagatggctgtggtgctgtttgtggtgcccctcatcatcaccagctactgctacagccggctggtgtggatcctgggccggggcggcagccaccggcggcagaggagagtggccggcctgctggccgccaccctgctgaacttcctggtgtgcttcggcccctacaacgtgagccacgtggtgggctacatctgtggggagagccctgcctggaggatctacgtgaccctgctgagcaccctgaacagctgtgtggacccctttgtgtactacttcagcagcagcggcttccaggccgacttccacgagctgctgcggcggctgtgtggcctgtggggccagtggcagcaggagagctccatggagctgaaggagcagaagggcggggaggagcagagagctgacaggcctgctgagaggaagaccagcgagcacagccagggctgcggcactggaggccaggtggcctgtgccgagagctag

SEQ ID NO: 154750 - DNA, 1041 bp, Artificial Sequence
  derived and/or modified sequence
atggacaccggccccgaccagagctacttcagcggcaaccactggttcgtgtttagcgtgtatttacttacctttctcgtgggcctgccactaaatctcttggccttggtcgtatttgttggcaagctacagcgtcgccctgtcgccgtagacgttctcctcctgaacctgactgctagtgatctgctactcctcctttttcttccttttaggatggtggaagcggctaatggaatgcattggcccctaccctttattctgtgccccctgtctgggttcatcttcttcacaactatatatctgaccgcactgttcttagctgctgtgtccattgagaggtttctcagtgtggcacatcccttgtggtataagacaagacctaggctgggacaggctgggctggtgtctgtggcttgttggctcctggccagtgcccattgcagcgtggtgtacgtcatagagttcagcggagacatctcacattctcagggaaccaacggcacttgctaccttgagtttcgaaaggatcagctggctatactgctgcccgtgcgcctggaaatggcagttgttttatttgtggtgcccctgatcatcacgtcttactgttattctaggctagtatggatcctgggaaggggaggatcacacaggaggcagcgccgagtggcagggttattggctgctactcttctcaattttctggtgtgtttcggcccatacaatgtttctcatgtcgtcggatatatctgcggagaaagcccagcctggaggatctacgtcaccctgctctcaacactcaacagctgtgtcgatccctttgtgtactacttctcttccagcgggttccaggcggatttccatgagctgctgaggcggctctgtggactctgggggcaatggcagcaggagagcagtatggaactcaaagagcagaagggcggcgaagagcaacgtgcagaccgccctgcagaaaggaagacgagcgaacacagccaaggctgcggaacaggaggccaggtggcctgtgcggagagttag

SEQ ID NO: 154751 - DNA, 1041 bp, Artificial Sequence
  derived and/or modified sequence
atggacacgggaccggaccagtcctacttcagcggcaaccattggttcgtcttcagcgtgtatctattaacatttctcgtcggtctgcctctgaaccttcttgccctcgtagtgttcgtgggtaaattacagagacgccctgtggctgtcgacgtgctgttgctaaacctgactgcctcagatttactgctgctgctctttctgccattccgaatggtggaggcagccaatggaatgcattggcctttgccttttatcttatgtccattgagcggattcatttttttcactacaatatatttaaccgccttgtttctcgcagcggtgagtatcgagcggttcttgtccgttgcccatcccttatggtacaagactcggccaagactgggtcaagccggtctcgtcagcgtcgcttgctggttactcgcatctgcccactgcagtgttgtatatgtcatagagttctccggagacatttcgcactcacaagggacaaatggtacgtgctacctggagtttcgcaaggaccagctggccatcctgctgcccgtgaggctcgagatggccgtagtcctgttcgtcgtgcctcttattattacgtcctactgctatagccgccttgtctggattcttggcagggggggtagccaccgtaggcaacgcagggtggccggacttctggcagccacactgctgaatttcctggtctgcttcggtccatacaatgtgtcacatgtagtagggtatatttgcggagagtcgcccgcttggaggatctacgtgactctgctcagcactctcaacagttgtgtggacccgtttgtgtactacttctctagctccggcttccaagctgacttccatgagctgcttagacgcctgtgtggcctatggggccagtggcagcaggagagttccatggaactgaaggagcagaagggtggcgaggagcagagagccgatagaccagcagaacgaaagaccagtgagcacagccagggatgcgggaccggtgggcaagtcgcatgcgctgagtcttag

SEQ ID NO: 154752 - DNA, 1041 bp, Artificial Sequence
  derived and/or modified sequence
atggacacaggaccagaccagagctatttcagtgggaatcattggttcgtgttttccgtgtaccttttgacatttctggtcgggctacccctgaacctcctggccctggtcgtttttgtgggcaagctgcgctgtaggcctgtggctgtagacgtcctgttactgaatcttactgcttccgacctcctcctcctcttgtttttgccgtttcgcatggtggaggctgccaacgggatgcattggcccctgccgtttattttgtgccccctgtccggtttcatctttttcaccaccatatatctcacagcactctttctcgcagcagtgtccattgaaaggtttttatccgttgctcatcccctgtggtataagacccgaccccggctcgggcaggccggactggtttcagtggcatgctggctgctggcctccgctcattgttctgtggtgtacgtaattgagtttagtggggacatttctcattcccaagggactaacggcacatgctacctcgaattctggaaagaccaactggctatcctcctaccagtcagactcgagatggcagtggtgctctttgtagtgccgctgattatcacatcctactgctactcgcgactggtttggattctgggtcgcggcgggagccacagacgccagagaagggtcgctggccttgtggccgctacgctcctaaacttcttggtgtgcttcgggccttataacgtgagccatgtggtgggttatatctgcggcgaatcccctgtctggcgtatctacgttacactgctgtccaccctgaatagttgcgttgatccttttgtgtactactttagttcttctgggttccaggcggactttcatgaacttctgaggagactctgtggcctctgggggcagtggcagcaggaaagctcaatggaactcaaggaacagaaggggggtgaggagcaacgtgcagacagacccgcggaaaggaagacatctgaacacagtcagggatgcggaaccggcggccaggtagcctgcgccgaaaattag

SEQ ID NO: 154753 - DNA, 1041 bp, Artificial Sequence
  derived and/or modified sequence
atggacaccggccctgaccagagctacttcagcggcaaccactggtttgtgttttctgtgtacctgctgaccttcctggtgggcctgcccctgaacctgctggccctggtggtgtttgtgggcaagctgcgctgcaggcctgtggccgtggatgtgctgctgctgaacctgacagccagtgacctgctgctgctgctcttcctgcccttcaggatggtggaggccgccaacggcatgcactggcccctgcccttcatcctgtgccccctgagcggcttcatcttcttcaccaccatctacctgacagccctcttcctggccgctgtgtccattgagcgcttcctgtctgtggcccaccccctgtggtacaagacccggccccggctgggccaggccggcctggtgtctgtggcctgctggctgctggccagcgcccactgcagcgtggtgtatgtgattgagttcagcggggacatcagccacagccagggcaccaacggcacctgctacctggagttctggaaggaccagctggccatcctgctgcctgtgcggctggagatggctgtggtgctgtttgtggtgcccctcatcatcaccagctactgctacagccggctggtgtggatcctgggccggggcggcagccaccggcggcagaggagagtggccggcctggtggccgccaccctgctgaacttcctggtgtgcttcggcccctacaacgtgagccacgtggtgggctacatctgtggggagagccctgtgtggaggatctacgtgaccctgctgagcaccctgaacagctgtgtggacccctttgtgtactacttcagcagcagcggcttccaggccgacttccacgagctgctgcggcggctgtgtggcctgtggggccagtggcagcaggagagctccatggagctgaaggagcagaagggcggggaggagcagagagctgacaggcctgctgagaggaagaccagcgagcacagccagggctgcggcactggaggccaggtggcctgtgctgaaaattag

SEQ ID NO: 154754 - DNA, 1041 bp, Artificial Sequence
  derived and/or modified sequence
atggacaccggccccgaccagagctacttcagcggcaaccactggttcgtgttctccgtgtacctcctaacattccttgtgggactgccactcaacttgttagccttggtcgtattcgtgggaaagttaagatgcagacctgtcgcggtagacgtacttttgttgaatctcactgcctctgatttgctgctcttgctgtttcttccgttccggatggttgaagctgctaacggcatgcactggcccttacccttcatactttgtcccttatccggtttcattttttttaccacgatctacctgacggccctcttcctggccgccgtcagcatcgagagatttctgtccgtcgcgcaccctctgtggtataaaacccgcccccgcctggggcaggccggtttggtgagtgtggcgtgttggctcttggcttctgctcattgttctgtggtttatgttatagagttcagcggcgatatttcccactcacagggaactaacggaacatgctacctggagttctggaaagatcagctggccatcctcctcccagtccgattggaaatggccgtggtgttgttcgtagtgcccctgataatcacctcgtattgttacagcaggctcgtgtggattctggggcgcggaggctcccataggaggcagcgccgggttgccggcctggtggccgccacactgttaaatttcctcgtttgcttcggtccatacaacgtcagccatgtagttggatacatctgcggcgagtcacctgtttggcgaatttacgttacactcttgtccacgctcaattcctgtgtcgatccttttgtgtattatttttctagctcagggtttcaggcggactttcatgaactcctgaggcggctgtgtgggctctggggacagtggcagcaagaatctagcatggaacttaaagaacagaaggggggggaggaacaaagggctgatagaccggccgaacggaagactagcgaacactcgcaaggctgcggaacagggggccaggtggcatgtgccgagaactag

SEQ ID NO: 154755 - DNA, 1041 bp, Artificial Sequence
  derived and/or modified sequence
atggataccggcccagaccaaagttacttctccggaaaccattggtttgtcttttctgtgtacctgttaacttttcttgttggcctgccactgaatctgttggcactagtggtgttcgttggcaagctccgctgtcggccagtcgccgtcgacgttctgctgctgaatcttacagcaagtgacttgttgttactgctgttcctgccgttcaggatggtggaggcagccaacggcatgcactggcccctgccttttatcctgtgtcctctgtccggattcatttttttcaccacaatttacctcacagcactgttcctggctgctgtcagcattgaacgctttctaagtgtggctcaccctctctggtataaaactagaccacgcctagggcaagcgggacttgtctcagtggcgtgctggctgttggcgtctgctcattgtagcgtggtgtatgtgatagagttctccggcgatatctcccactcccaggggaccaatgggacgtgttacctggaattttggaaagatcagctggccatcctcttaccagtccgcctggagatggctgtggttctgttcgtggttccgctgataatcacatcttattgttatagcaggctcgtgtggatactggggcgaggaggctcccaccgcaggcagcgcagggttgccggtctggtggcggcaactctgctgaattttctggtctgttttggaccttacaatgtaagtcatgtggtggggtacatttgtggagaatcaccagtgtggcggatatacgttacccttctgagcactctgaattcctgtgttgatccctttgtatactatttctcctcgtctggctttcaagccgactttcatgaactgctgagacgattgtgtggactgtggggtcaatggcaacaggaatcatctatggagctgaaggagcagaagggaggagaagaacagcgcgctgacagacccgctgaaaggaaaacatctgagcactcccaggggtgtggaacaggagggcaggtggcctgtgctgaaaattag

SEQ ID NO: 154756 - DNA, 1041 bp, Artificial Sequence
  derived and/or modified sequence
atggacaccggccccgaccagagctacttcagcggcaaccactggttcgtgttcagcgtgtacctgctgaccttcctggtgggcctgcccctgaacctgctggccctggtggtgttcgtgggcaagctgagatgcagacccgtggccgtggacgtgctgctgctgaacctgaccgccagcgacctgctgctgctgctgttcctgcccttcagaatggtggaggccgccaacggcatgcactggcccctgcccttcatcctgtgccccctgagcggcttcatcttcttcaccaccatctacctgaccgccctgttcctggccgccgtgagcatcgagagattcctgagcgtggcccaccccctgtggtacaagaccagacccagactgggccaggccggcctggtgagcgtggcctgctggctgctggccagcgcccactgcagcgtggtgtacgtgatcgagttcagcggcgacatcagccacagccagggcaccaacggcacctgctacctggagttctggaaggaccagctggccatcctgctgcccgtgagactggagatggccgtggtgctgttcgtggtgcccctgatcatcaccagctactgctacagcagactggtgtggatcctgggcagaggcggcagccacagaagacagagaagagtggccggcctggtggccgccaccctgctgaacttcctggtgtgcttcggcccctacaacgtgagccacgtggtgggctacatctgcggcgagagccccgtgtggagaatctacgtgaccctgctgagcaccctgaacagctgcgtggaccccttcgtgtactacttcagcagcagcggcttccaggccgacttccacgagctgctgagaagactgtgcggcctgtggggccagtggcagcaggagagcagcatggagctgaaggagcagaagggcggcgaggagcagagagccgacagacccgccgagagaaagaccagcgagcacagccagggctgcggcaccggcggccaggtggcctgcgccgagaactag

SEQ ID NO: 154757 - protein, 330 aa, Artificial Sequence
  derived and/or modified sequence
MLPDWKSSLILMAYIIIFLTGLPANLLALRAFVGRIRQPQPAPVHILLLSLTLADLLLLLLLPFKIIEAASNFRWYLPKVVCALTSFGFYSSIYCSTWLLAGISIERYLGVAFPVQYKLSRRPLYGVIAALVAWVMSFGHCTIVIIVQYLNTTEQVRSGNEITCYENFTDNQLDVVLPVRLELCLVLFFIPMAVTIFCYWRFVWIMLSQPLVGAQRRRRAVGLAVVTLLNFLVCFGPYNVSHLVGYHQRKSPWWRSIAVVFSSLNASLDPLLFYFSSSVVRRAFGRGLQVLRNQGSSLLGRRGKDTAEGTNEDRGVGQGEGMPSSDFTTE

SEQ ID NO: 154758 - DNA, 993 bp, Artificial Sequence
  derived and/or modified sequence
atgctgcccgactggaagagcagcctgatcctgatggcctacatcatcatcttcctgaccggcctgcccgccaacctgctggccctgagagccttcgtgggcagaatcagacagccccagcccgcccccgtgcacatcctgctgctgagcctgaccctggccgacctgctgctgctgctgctgctgcccttcaagatcatcgaggccgccagcaacttcagatggtacctgcccaaggtggtgtgcgccctgaccagcttcggcttctacagcagcatctactgcagcacctggctgctggccggcatcagcatcgagagatacctgggcgtggccttccccgtgcagtacaagctgagcagaagacccctgtacggcgtgatcgccgccctggtggcctgggtgatgagcttcggccactgcaccatcgtgatcatcgtgcagtacctgaacaccaccgagcaggtgagaagcggcaacgagatcacctgctacgagaacttcaccgacaaccagctggacgtggtgctgcccgtgagactggagctgtgcctggtgctgttcttcatccccatggccgtgaccatcttctgctactggagattcgtgtggatcatgctgagccagcccctggtgggcgcccagagaagaagaagagccgtgggcctggccgtggtgaccctgctgaacttcctggtgtgcttcggcccctacaacgtgagccacctggtgggctaccaccagagaaagagcccctggtggagaagcatcgccgtggtgttcagcagcctgaacgccagcctggaccccctgctgttctacttcagcagcagcgtggtgagaagagccttcggcagaggcctgcaggtgctgagaaaccagggcagcagcctgctgggcagaagaggcaaggacaccgccgagggcaccaacgaggacagaggcgtgggccagggcgagggcatgcccagcagcgacttcaccaccgagtag

SEQ ID NO: 154759 - DNA, 2051 bp, Artificial Sequence
  derived and/or modified sequence
atgctgccggactggaagagctccttgatcctcatggcttacatcatcatcttcctcactggcctccctgccaacctcctggccctgcgggcctttgtggggcggatccgccagccccagcctgcacctgtgcacatcctcctgctgagcctgacgctggccgacctcctcctgctgctgctgctgcccttcaagatcatcgaggctgcgtcgaacttccgctggtacctgcccaaggtcgtctgcgccctcacgagttttggcttctacagcagcatctactgcagcacgtggctcctggcgggcatcagcatcgagcgctacctgggagtggctttccccgtgcagtacaagctctcccgccggcctctgtatggagtgattgcagctctggtggcctgggttatgtcctttggtcactgcaccatcgtgatcatcgttcaatacttgaacacgactgagcaggtcagaagtggcaatgaaattacctgctacgagaacttcaccgataaccagttggacgtggtgctgcccgtgcggctggagctgtgcctggtgctcttcttcatccccatggcagtcaccatcttctgctactggcgttttgtgtggatcatgctctcccagccccttgtgggggcccagaggcggcgccgagccgtggggctggctgtggtgacgctgctcaatttcctggtgtgcttcggaccttacaacgtgtcccacctggtggggtatcaccagagaaaaagcccctggtggcggtcaatagccgtggtgttcagttcactcaacgccagtctggaccccctgctcttctatttctcttcttcagtggtgcgcagggcatttgggagagggctgcaggtgctgcggaatcagggctcctccctgttgggacgcagaggcaaagacacagcagaggggacaaatgaggacaggggtgtgggtcaaggagaagggatgccaagttcggacttcactacagagtagcagtttccctggaccttcagaggtcgcctgggttacacaggagctgggaagcctgggagaggcggagcaggaaggctcccatccagattcagaaatccttagacccagcccaggactgcgactttgaaaaaaatgcctttcaccagcttggtatcccttcctgactgaattgtcctactcaaaggagcataagtcagagatgcacgaagaagtagttaggtatagaagcacctgccgggtgtggtggctcatgcctataatcccagaactttgggaggctgaggcaggtggatcacttgaggtcgggagattgagaacatcctggtcaacatgggaaaaccccgtctctactaaaaatacaaaaaaattagctgggcatggtggcacatgcctataatcccagctactctggaggctgaggcaggagaatccttgaacccgggagttggaggttgcagtgagctgagatcacgccactgcactccagcctagcgacagagcaagactccatttaaaaaaaaaaaaaaaaaaaaaaagaagcaccttcaggctggagaagcagcgtagctaacacaagtccagtccttgtgatgtggctggtagttggggatggccaggctgaagcagagagtcctagagaaatctcgatacaagcttcaaagcaacacctagacactgctctagcggttgatcctggagataaaccaacaagagagagatggaagagaaatactaaatgaggtcaaagaagactcagaaaggttctgagcctggagatgagcagggaggcctcagggcttagacctttaatgataggggtttccctgcattggtttgacctgttgcctttttgatgtgctctgtttgttttcatgtgttgtcttgtctcccctgctaaactgggagctgccaggggtctgggtcttatctccttcctccatggtaccccacacaggccaggatgtggtttggtacccagcaatcagagattggcactccctcatacaggggaaagcaacctggtctagcaaattgaaaataaagatgataaaactctg

SEQ ID NO: 154760 - DNA, 993 bp, Artificial Sequence
  derived and/or modified sequence
atgttgccagattggaaatcttctctgatcctgatggcttatattattatattcctgactggactccctgcaaatttactcgcactgcgcgcctttgtgggaagaatcagacaaccacagcctgctccagttcacatcctgctgctgtccctaacactggcagatctgctgcttctcctgctgttaccttttaaaattatcgaggcggcaagcaactttcgctggtacctacccaaagttgtttgtgcacttacttctttcggtttctactcatccatttattgttccacctggctcctcgctggcatctctatcgaacgctacctcggggtagctttccctgtgcagtacaagctgtccaggcgcccgctatacggtgtcattgccgccctggttgcctgggtgatgtcatttggacattgcacaattgtgattatcgtgcaatacctgaacacgaccgaacaggtgagatcgggcaacgaaatcacttgttatgaaaatttcacggacaatcaattggatgtcgttctgccagtcaggctcgagttatgcctagtcctattttttatcccaatggcagtgactatcttttgctattggaggttcgtgtggatcatgctaagtcagccactggtgggcgcccaaaggcgcaggcgcgctgtcggccttgctgtcgtcacccttctgaactttttggtgtgcttcggaccctacaacgtaagccatcttgtgggctaccaccagcggaaatccccgtggtggcgaagtattgccgtcgtcttcagttcccttaacgcttctttggatcccttactgttctacttcagtagctcggttgtgcgcagggcatttggcaggggactccaggttcttaggaaccagggcagttcacttctggggcgccgaggcaaggataccgccgaaggtactaacgaggaccgcggagtgggccagggagagggaatgccctcttccgatttcaccaccgagtag

SEQ ID NO: 154761 - DNA, 993 bp, Artificial Sequence
  derived and/or modified sequence
atgctgcctgactggaagagcagcctcatcctgatggcctacatcatcatcttcctgaccggcctgcctgccaacctgctggccctgcgggcctttgtgggccgcatccggcagccccagcctgcccctgtgcacatcctgctgctgagcctgaccctggccgacctgctgctgctgctgctgctgcccttcaagatcattgaagctgccagcaacttccgctggtacctgcccaaggtggtgtgtgccctgaccagctttggcttctacagcagcatctactgcagcacctggctgctggccggcatcagcattgagcgctacctgggcgtggccttccctgtgcagtacaagctgagcagaagacccctgtatggagtgattgctgccctggtggcctgggtgatgagctttggccactgcaccatcgtcatcatcgtgcagtacctgaacaccacagagcaggtgcgctctggaaatgagatcacctgctatgagaacttcacagacaaccagctggatgtggtgctgcctgtgcggctggagctgtgcctggtgctcttcttcatccccatggctgtgaccatcttctgctactggaggtttgtgtggatcatgctgagccagcccctggtgggcgcccagaggagaagaagagctgtgggcctggccgtggtgaccctgctgaacttcctggtgtgcttcggcccctacaacgtgagccacctggtgggctaccaccagaggaagagcccctggtggaggagcattgctgtggtgttcagcagcctgaatgccagcctggaccccctgctcttctacttcagcagctctgtggtgagaagagccttcggccggggcctgcaggtgctgaggaaccagggcagcagcctgctgggcagaagaggcaaggacacagctgagggcaccaatgaagatagaggagtgggccagggcgagggcatgcccagcagtgacttcaccacagaatag

SEQ ID NO: 154762 - DNA, 993 bp, Artificial Sequence
  derived and/or modified sequence
atgctgcccgactggaagagcagcctgatcctgatggcctacatcatcatttttttaactggcttgccagcaaatctgctggctctgcgcgcctttgtgggccgtatcagacagccgcaacctgcccccgttcacatcctgttgcttagtcttactctggcggatctactgttactcctcctcctgccctttaagattatcgaagccgcttccaatttcaggtggtatctccccaaggtagtgtgcgccttgacatcttttgggttttactccagtatatactgcagcacctggctgctagctggcatttccattgagcggtacctcggagtggctttccctgtccagtacaagctgagtaggcgccccctctacggggttattgcagctcttgtcgcatgggtgatgtcattcgggcattgcacgatcgtgatcattgtgcagtacctgaataccactgaacaagttcgcagtggtaatgagatcacatgttatgaaaattttaccgacaatcagctggatgtggtgctgccggtcaggcttgagttgtgtctcgttctcttcttcatacctatggctgtcacaatcttctgctattggagattcgtgtggatcatgttatcacagccgctcgtcggcgctcagcgacgaagacgcgccgtgggcttagcagtggtgaccctacttaacttcctggtgtgctttggcccttacaatgtgagccatttagtgggttatcaccaaagaaagagcccatggtggcggtccatcgcagtggtgttcagcagcctcaatgcatcactggaccctcttctgttctatttttcatctagtgtagtgcgccgggctttcggtcggggcctgcaggtcctccgaaatcagggctcttctctgctcggaaggagggggaaagatacggccgagggcaccaatgaagacagaggcgtcggacagggggaaggcatgccctcctcagattttactacagagtag

SEQ ID NO: 154763 - DNA, 993 bp, Artificial Sequence
  derived and/or modified sequence
atgttacccgattggaaatccagcctcatcctgatggcatacataattatttttctcacggggctacctgctaacctgcttgccctgagagcttttgttggcagaatccggcagccccaacccgctcccgtgcacatcctcttgttatctctaactcttgctgatcttttgttgttgctccttctgcccttcaagatcatcgaggctgcatccaacttccgctggtatttaccaaaggtggtgtgcgctcttacctcatttggcttttacagttctatctactgctccacatggctgctggccggtattagtatcgaacgctacttgggtgtcgccttcccagtgcagtataaactcagtcggaggccactctacggagtaatcgccgctttagttgcttgggtcatgtctttcggccattgtaccatcgtgatcatagtgcaatacttgaacaccacagaacaagtgcggagcggaaatgagattacctgctatgagaacttcactgacaaccaactcgatgttgtcctgcccgtaaggctcgagctctgcctggtcctgtttttcattcctatggccgtaacaatcttctgctactggaggttcgtctggataatgctgtcacagcctctagtcggtgcacagagaagacgacgagccgtgggactcgccgtcgtaacccttctcaactttctcgtgtgcttcggcccatacaacgtgagccaccttgtgggatatcaccagaggaaatcaccatggtggcggagcatcgctgtggttttctcaagtctaaacgcttccctggacccactcctcttttatttcagctcctccgtcgttcgccgagcgtttggacggggactgcaggtactcagaaatcagggtagcagtctgttgggccgaaggggaaaagacacagcagaaggaactaatgaggatcgcggtgtggggcagggagagggaatgccttcgagcgacttcacgaccgaatag

SEQ ID NO: 154764 - protein, 500 aa, Artificial Sequence
  derived and/or modified sequence
MELENIVANSLLLKARQEKDYSSLCDKQPIGRRLFRQFCDTKPTLKRHIEFLDAVAEYEVADDEDRSDCGLSILDRFFNDKLAAPLPEIPPDVVTECRLGLKEENPSKKAFEECTRVAHNYLRGEPFEEYQESSYFSQFLQWKWLERQPVTKNTFRHYRVLGKGGFGEVCACQVRATGKMYACKKLQKKRIKKRKGEAMALNEKRILEKVQSRFVVSLAYAYETKDALCLVLTIMNGGDLKFHIYNLGNPGFDEQRAVFYAAELCCGLEDLQRERIVYRDLKPENILLDDRGHIRISDLGLATEIPEGQRVRGRVGTVGYMAPEVVNNEKYTFSPDWWGLGCLIYEMIQGHSPFKKYKEKVKWEEVDQRIKNDTEEYSEKFSEDAKSICRMLLTKNPSKRLGCRGEGAAGVKQHPVFKDINFRRLEANMLEPPFCPDPHAVYCKDVLDIEQFSVVKGIYLDTADEDFYARFATGCVSIPWQNEGCLTMVPSEKEVEPKQC

SEQ ID NO: 154765 - DNA, 1503 bp, Artificial Sequence
  derived and/or modified sequence
atggagctggagaacatcgtggccaacagcctgctgctgaaggccagacaggagaaggactacagcagcctgtgcgacaagcagcccatcggcagaagactgttcagacagttctgcgacaccaagcccaccctgaagagacacatcgagttcctggacgccgtggccgagtacgaggtggccgacgacgaggacagaagcgactgcggcctgagcatcctggacagattcttcaacgacaagctggccgcccccctgcccgagatcccccccgacgtggtgaccgagtgcagactgggcctgaaggaggagaaccccagcaagaaggccttcgaggagtgcaccagagtggcccacaactacctgagaggcgagcccttcgaggagtaccaggagagcagctacttcagccagttcctgcagtggaagtggctggagagacagcccgtgaccaagaacaccttcagacactacagagtgctgggcaagggcggcttcggcgaggtgtgcgcctgccaggtgagagccaccggcaagatgtacgcctgcaagaagctgcagaagaagagaatcaagaagagaaagggcgaggccatggccctgaacgagaagagaatcctggagaaggtgcagagcagattcgtggtgagcctggcctacgcctacgagaccaaggacgccctgtgcctggtgctgaccatcatgaacggcggcgacctgaagttccacatctacaacctgggcaaccccggcttcgacgagcagagagccgtgttctacgccgccgagctgtgctgcggcctggaggacctgcagagagagagaatcgtgtacagagacctgaagcccgagaacatcctgctggacgacagaggccacatcagaatcagcgacctgggcctggccaccgagatccccgagggccagagagtgagaggcagagtgggcaccgtgggctacatggcccccgaggtggtgaacaacgagaagtacaccttcagccccgactggtggggcctgggctgcctgatctacgagatgatccagggccacagccccttcaagaagtacaaggagaaggtgaagtgggaggaggtggaccagagaatcaagaacgacaccgaggagtacagcgagaagttcagcgaggacgccaagagcatctgcagaatgctgctgaccaagaaccccagcaagagactgggctgcagaggcgagggcgccgccggcgtgaagcagcaccccgtgttcaaggacatcaacttcagaagactggaggccaacatgctggagccccccttctgccccgacccccacgccgtgtactgcaaggacgtgctggacatcgagcagttcagcgtggtgaagggcatctacctggacaccgccgacgaggacttctacgccagattcgccaccggctgcgtgagcatcccctggcagaacgagggctgcctgaccatggtgcccagcgagaaggaggtggagcccaagcagtgctag

SEQ ID NO: 154766 - DNA, 1503 bp, Artificial Sequence
  derived and/or modified sequence
atggagctggagaacattgtggccaatagtttacttcttaaagctcgtcaggagaaggattactccagcctctgcgataagcagccaattggacgccgactgttcaggcagttttgtgatactaaacctaccctgaaaaggcatatagagttcctcgacgccgtggcagaatacgaggtcgcggacgacgaggacagatccgactgcgggctgtcaatccttgacagattcttcaatgataaactcgctgccccactccccgagataccccctgatgtagtgacggagtgtcggcttggacttaaggaggagaatcccagtaaaaaggccttcgaagaatgtactcgcgtggcgcacaattatcttcgcggggagccctttgaggagtatcaagaaagcagctacttcagccaatttcttcaatggaaatggctggagcggcagccagtgacgaaaaacacctttcgccactaccgcgtcctcggtaagggagggtttggtgaggtgtgtgcctgccaggtaagagcaacaggcaaaatgtacgcttgcaagaagctccaaaaaaagcgcattaagaagcgcaagggagaagccatggcgttgaacgaaaagagaatcctcgaaaaggtccagtctcgcttcgtcgttagtttggcctatgcatatgagacaaaggacgcactgtgtttggtgctgacgatcatgaatggcggagacttgaaattccacatttacaacctcggaaatccgggattcgacgaacagcgggccgtgttttacgccgccgaactttgttgtggcctggaagacctccaacgggagcgcattgtgtatagggacctgaaaccagagaatattctcttggatgaccgcggacatattcgaatttccgacttaggacttgccacagaaatccctgaaggacagcgagtccgcggtcgcgtgggcactgtgggctatatggctccggaagttgttaacaacgagaaatacacatttagccctgactggtggggtttaggctgtctgatctatgagatgatccagggccactcgccattcaagaaatataaagagaaggtgaagtgggaggaagtagatcaacggataaagaacgataccgaagagtattccgaaaagtttagcgaagacgccaagagcatctgtaggatgcttctgaccaagaatccaagcaagcgactgggatgtcgcggcgaaggagccgctggggtgaagcagcaccccgtgtttaaggatataaacttccgacggctggaggctaacatgctagaaccccccttttgtccagatccccacgccgtgtactgtaaagacgttcttgatatcgaacagtttagcgtagtgaagggaatttatttggataccgctgacgaagatttttatgcgcggtttgctactggttgtgtgtctattccttggcaaaatgagggctgcctgaccatggtcccctctgaaaaggaggtggaaccaaagcagtgttag

SEQ ID NO: 154767 - DNA, 1503 bp, Artificial Sequence
  derived and/or modified sequence
atggagctggagaacatcgtggccaacagcctgctgctgaaggcccggcaggagaaggactacagcagcctgtgtgacaagcagcccatcggccggcggctcttccggcagttctgtgacaccaagcccaccctgaagaggcacatcgagttcctggatgctgtggccgagtatgaggtggctgatgatgaggacagaagtgactgtggcctgagcatcctggaccgcttcttcaatgacaagctggccgcccccctgcctgagatccccccagatgtggtgacagagtgccgcctgggcctgaaggaggagaaccccagcaagaaggcctttgaagaatgtaccagggtggcccacaactacctgcggggggagccctttgaggagtaccaggagagcagctacttcagccagttcctgcagtggaagtggctggagcggcagcctgtgaccaagaacaccttccgccactacagagtgctgggcaaaggaggctttggagaggtgtgtgcctgccaggtgcgggccaccgggaagatgtatgcctgcaagaagctgcagaagaagaggatcaagaagaggaaaggagaggccatggccctgaatgagaagaggatcctggagaaggtgcagagcagatttgtggtgtccctggcctatgcctatgagaccaaggatgccctgtgcctggtgctgaccatcatgaatggaggagacctgaagttccacatctacaacctgggcaaccctggctttgatgagcagagagctgtgttctatgctgctgagctgtgctgcggcctggaggacctgcagcgggagcgcatcgtgtacagagacctgaagccagagaacatcctgctggatgaccggggccacatccgcatcagtgacctgggcctggccacagagatccctgagggccagagggtgcggggccgggtgggcaccgtgggctacatggcccctgaggtggtgaacaatgagaagtacaccttctccccagactggtggggcctgggctgcctgatctatgagatgatccagggccacagccccttcaagaagtacaaggagaaggtgaagtgggaggaggtggaccagaggatcaagaatgacacagaggagtacagcgagaagttctctgaagatgccaagagcatctgcaggatgctgctgaccaagaaccccagcaagaggctgggctgccgcggggagggcgctgctggggtgaagcagcaccctgtgttcaaggacatcaacttccggcggctggaggccaacatgctggagccccccttctgcccagacccccatgctgtgtactgcaaggatgtgctggacatcgagcagttctctgtggtgaagggcatctacctggacacagcagatgaggacttctacgccaggtttgccaccggctgtgtgtccatcccctggcagaatgaaggctgcctgaccatggtgcccagcgagaaggaggtggagcccaagcagtgctag

SEQ ID NO: 154768 - DNA, 2068 bp, Artificial Sequence
  derived and/or modified sequence
ttcagctaagccgttagcgccgagcccgcccgggagcgggtcgccggccgcggcgggcgcccctgccagtgagcccctgtccgaagtgagccacggcattgactcggggctgcccgggggcagggcactgaggagggagttgcgcgcgcgaggcgagggcgatggggccaagaagaaccggggcgatagcgcggcagcggtgacagctgggacccgccgcggtcgggctgccccctcccctcgccccgaccgctcccctgctggtgagggcctgcggaggcggcggcggcggcgcccttggtggcagtggtggcggcggagcagcctcccgggatcgtgtccggagctcgaggagagggtggtgcccggcgagctatgcacgggggcggcggcgtctcctcctgttccgcctcctcagtctcctcggtctcgcagaatccgccggcggcggcggcgccaggacatggagctcgagaacatcgtggccaactcgctgctgctgaaagcgcgtcaagaaaaggattatagcagtctttgtgacaagcaaccgataggaagacgtctcttcaggcagttctgtgataccaaacccactctaaagaggcacattgaattcttggatgcagtggcagaatatgaagttgccgatgatgaggaccgaagtgattgtggactgtcaatcttagatagattcttcaatgataagttggcagcccctttaccagaaatacctccagatgttgtgacagaatgtagattgggactgaaggaggagaacccttccaaaaaagcctttgaggaatgtactagagttgcccataactacctaagaggggaaccatttgaagaataccaagaaagctcatatttttctcagtttttacaatggaaatggctggaaaggcaacccgtaacaaagaacacatttagacattacagagttctaggaaaaggcggatttggagaggtttgcgcctgtcaagtgcgagccacaggaaaaatgtatgcctgcaaaaagctacaaaaaaaaagaataaagaagaggaaaggtgaagctatggctctaaatgagaaaagaattctggagaaagtgcaaagtagattcgtagttagtttagcctacgcttatgaaaccaaagatgccttgtgcttggtgctcaccattatgaatggaggggatttgaagtttcacatttacaacctgggcaatcccggctttgatgagcagagagccgttttctatgctgcagagctgtgttgcggcttggaagatttacagagggaaagaattgtatacagagacttgaagcctgagaatattctccttgatgatcgtggacacatccggatttcagacctcggtttggccacagagatcccagaaggacagagggttcgaggaagagttggaacagtcggctacatggcacctgaagttgtcaataatgaaaagtatacgtttagtcccgattggtggggacttggctgtctgatctatgaaatgattcagggacattctccattcaaaaaatacaaagagaaagtcaaatgggaggaggtcgatcaaagaatcaagaatgataccgaggagtattctgagaagttttcagaggatgccaaatctatctgcaggatgttactcaccaagaatccaagcaagcggctgggctgcaggggcgagggagcggctggggtgaagcagcaccccgtgttcaaggacatcaacttcaggaggctggaggcaaacatgctggagccccctttctgtcctgatcctcatgccgtttactgtaaggacgtcctggatatcgagcagttctcggtggtgaaagggatctacctggacaccgcagatgaagacttctatgctcggtttgctaccgggtgtgtctccatcccctggcagaatgagggctgcctgaccatggtccccagtgagaaggaagtggaacccaagcaatgctgagcaccccggtgcggaccacagagcagaccctggcgccaggaaggagcatgtgttagcgtctcgtcccacctggaattgtaataaatacatctaaataaaaca

SEQ ID NO: 154769 - DNA, 1503 bp, Artificial Sequence
  derived and/or modified sequence
atggagctggagaacatcgtggccaacagcctgctgctgaaggccaggcaggaaaaagactacagttctctttgcgacaagcagcccatcggccgcaggctgtttcggcagttttgcgatactaagcccactctgaagcgccacattgaattcctcgacgcggtggctgaatatgaggtcgccgatgatgaggacagaagtgactgcggtctatccattctcgaccgcttctttaacgacaaactggctgctccgttgccagagatcccacccgacgtggtgacagagtgcagattgggtctcaaggaggaaaacccatctaagaaggcctttgaggagtgcacacgagtggcacacaattacttgcgcggcgagccctttgaggagtaccaggaaagttcctacttcagtcagtttctgcaatggaaatggctcgagcgccagccggttactaaaaacacatttcgtcactacagagttctgggaaaaggtggatttggagaagtatgtgcgtgtcaggtccgtgccaccggaaaaatgtacgcatgtaagaaactgcaaaaaaagagaatcaagaagaggaaaggtgaagcgatggcattaaatgaaaagcggatcctggaaaaggttcaatctcggtttgtggtctcactcgcctacgcttatgagacaaaggacgccctctgcctggttctcactatcatgaacggcggtgacttgaaatttcatatttataacttaggaaatccaggattcgacgaacagcgggctgtattttatgcagccgagctgtgctgcggcctcgaggatctccagcgagagagaattgtgtaccgcgacttgaaaccggaaaacattctcttagacgacagagggcacataaggatatccgacctggggcttgcaaccgaaatacctgaaggacagagagtgagggggagagtgggcacggttggttatatggctcccgaggtcgttaataatgaaaagtatacattcagcccagactggtggggcctcggctgcctgatatatgagatgatccagggccattctccattcaaaaagtacaaagaaaaggttaaatgggaggaagtcgaccagcgtatcaagaacgatacggaggagtactcagagaaattctctgaggacgccaaatctatatgccgaatgctccttaccaaaaatcctagcaagaggctggggtgcaggggagaaggcgccgcgggagtgaagcagcacccagtcttcaaagatattaacttccgtaggctggaagcaaatatgcttgagccaccgttctgccctgacccccacgccgtatactgtaaagacgtgcttgacattgagcagttcagcgtcgtcaaaggtatatacctggatactgcagacgaagatttctatgcccggttcgccacgggatgtgtctccatcccttggcagaacgaaggctgccttaccatggtgccgtcagagaaagaggtggaacctaaacaatgttag

SEQ ID NO: 154770 - DNA, 1503 bp, Artificial Sequence
  derived and/or modified sequence
atggagctcgagaatatagtcgcaaacagcttactgctgaaagcaaggcaggagaaggactattcaagtctgtgtgataaacagcccatcggccgtcggctttttcggcaattctgcgatacaaagccaacgctcaaacggcacattgaatttctcgacgcggtcgccgaatatgaagtcgcggatgatgaggacagaagcgattgcggattgagcattttggacaggttttttaacgataagttggccgctccactccccgaaatccccccagacgtggtcacagagtgtagactcgggctcaaggaggaaaatccgtctaaaaaggcatttgaagagtgcacccgagtggctcataactacttaagaggggagcctttcgaagagtatcaggaatcaagttacttctcgcagttccttcagtggaagtggcttgagcgccaacccgtcaccaagaatacttttagacactacagagtgcttggaaagggcggatttggtgaagtatgtgcatgtcaggtgagggcaacaggaaaaatgtacgcttgtaaaaaactccagaagaagcggatcaaaaagcggaaaggagaggcgatggcgttgaatgaaaagagaatcctggaaaaagtgcagagtagatttgtggtgagcctcgcatacgcctacgaaaccaaagacgcactctgcctggtgcttaccataatgaacggcggtgatctgaaatttcatatttacaatctgggaaaccctggatttgacgagcagcgggctgtattttacgccgcagagctctgctgcgggctagaggacctccagagagagagaatcgtatatcgggatctgaagcccgagaacatcctgctggatgacaggggacatattcgcatttccgatttaggactggcaaccgagattcccgagggacagcgggtgaggggcagggtggggaccgtcggctacatggcccctgaagtggtaaacaacgagaagtacaccttttctccagattggtggggtctcgggtgtttgatctatgagatgatccagggtcactcaccatttaagaaatacaaggagaaggtgaagtgggaggaagtggaccaaaggattaagaacgacactgaagagtattccgaaaagttctccgaggacgccaaatccatctgtcgtatgttgctgacaaagaacccaagcaagaggttaggatgtagaggcgaaggcgcagcaggggtcaaacagcatcccgtctttaaggatattaactttcgtagactggaagccaatatgctagagccaccattttgtccagatcctcacgccgtgtactgcaaagatgttttggatatcgagcagttcagtgtagtgaaaggcatttacctcgatacagctgacgaggatttctacgctagattcgcaaccggatgcgtttctatcccctggcagaacgagggctgtcttacaatggttccctccgaaaaggaagttgaacccaagcaatgctag

SEQ ID NO: 154771 - protein, 590 aa, Artificial Sequence
  derived and/or modified sequence
MELENIVANTVLLKAREGGGGKRKGKSKKWKEILKFPHISQCEDLRRTIDRDYCSLCDKQPIGRLLFRQFCETRPGLECYIQFLDSVAEYEVTPDEKLGEKGKEIMTKYLTPKSPVFIAQVGQDLVSQTEEKLLQKPCKELFSACAQSVHEYLRGEPFHEYLDSMFFDRFLQWKWLERQPVTKNTFRQYRVLGKGGFGEVCACQVRATGKMYACKRLEKKRIKKRKGESMALNEKQILEKVNSQFVVNLAYAYETKDALCLVLTIMNGGDLKFHIYNMGNPGFEEERALFYAAEILCGLEDLHRENTVYRDLKPENILLDDYGHIRISDLGLAVKIPEGDLIRGRVGTVGYMAPEVLNNQRYGLSPDYWGLGCLIYEMIEGQSPFRGRKEKVKREEVDRRVLETEEVYSHKFSEEAKSICKMLLTKDAKQRLGCQEEGAAEVKRHPFFRNMNFKRLEAGMLDPPFVPDPRAVYCKDVLDIEQFSTVKGVNLDHTDDDFYSKFSTGSVSIPWQNEMIETECFKELNVFGPNGTLPPDLNRNHPPEPPKKGLLQRLFKRQHQNNSKSSPSSKTSFNHHINSNHVSSNSTGSS

SEQ ID NO: 154772 - protein, 399 aa, Artificial Sequence
  derived and/or modified sequence
MTKYLTPKSPVFIAQVGQDLVSQTEEKLLQKPCKELFSACAQSVHEYLRGEPFHEYLDSMFFDRFLQWKWLERQPVTKNTFRQYRVLGKGGFGEVCACQVRATGKMYACKRLEKKRIKKRKGESMALNEKQILEKVNSQFVVNLAYAYETKDALCLVLTIMNGGDLKFHIYNMGNPGFEEGAAEVKRHPFFRNMNFKRLEAGMLDPPFVPDPRAVYCKDVLDIEQFSTVKGVNLDHTDDDFYSKFSTGSVSIPWQNEMIETECFKELNVFGPNGTLPPDLNRNHPPEPPKKGLLQRLFKRQHQNNSKSSPSSKSTVEPAQTLLLRSGSSGAPALVGLPGETPGAGEGGRPSRRRRTSRFLKEISTQVCFPRRPRPGWIGFVFGEHCNRNPIGYDNLHVF

SEQ ID NO: 154773 - DNA, 2654 bp, Artificial Sequence
  derived and/or modified sequence
aaagcatccgagggagccggaggggaggagaatggagtgacagagacacgcggagggtggggggtgggggggagcgtgttgagggaggggggaggggggacacagagggaggaagaagcggcggcggcggcggcggcggcggcggctcctctttgcagagggggaaactcttgggctgagagcaggaataatgcggtaggcaaggcgggctgctggctcccccggctccggcagcagcggcggcagcccgagcagcggcagcagcagcggcagcaccccaggcgctgacagccccgccggccggctccgttgctgaccgccgactgtcaatggagctggaaaacatcgtggccaacacggtcttgctgaaagccagggaagggggcggaggaaagcgcaaagggaaaagcaagaagtggaaagaaatcctgaagttccctcacattagccagtgtgaagacctccgaaggaccatagacagagattactgcagtttatgtgacaagcagccaatcgggaggctgcttttccggcagttttgtgaaaccaggcctgggctggagtgttacattcagttcctggactccgtggcagaatatgaagttactccagatgaaaaactgggagagaaagggaaggaaattatgaccaagtacctcaccccaaagtcccctgttttcatagcccaagttggccaagacctggtctcccagacggaggagaagctcctacagaagccgtgcaaagaactcttttctgcctgtgcacagtctgtccacgagtacctgaggggagaaccattccacgaatatctggacagcatgttttttgaccgctttctccagtggaagtggttggaaaggcaaccggtgaccaaaaacactttcaggcagtatcgagtgctaggaaaagggggcttcggggaggtctgtgcctgccaggttcgggccacgggtaaaatgtatgcctgcaagcgcttggagaagaagaggatcaaaaagaggaaaggggagtccatggccctcaatgagaagcagatcctcgagaaggtcaacagtcagtttgtggtcaacctggcctatgcctacgagaccaaggatgcactgtgcttggtcctgaccatcatgaatgggggtgacctgaagttccacatctacaacatgggcaaccctggcttcgaggaggagcgggccttgttttatgcggcagagatcctctgcggcttagaagacctccaccgtgagaacaccgtctaccgagatctgaaacctgaaaacatcctgttagatgattatggccacattaggatctcagacctgggcttggctgtgaagatccccgagggagacctgatccgcggccgggtgggcactgttggctacatggctccagaggtcctgaacaaccagaggtacggcctgagccccgactactggggccttggctgcctcatctatgagatgatcgagggccagtcgccgttccgcggccgcaaggagaaggtgaagcgggaggaggtggaccgccgggtcctggagacggaggaggtgtactcccacaagttctccgaggaggccaagtccatctgcaagatgctgctcacgaaagatgcgaagcagaggctgggctgccaggaggagggggctgcagaggtcaagagacaccccttcttcaggaacatgaacttcaagcgcttagaagccgggatgttggaccctcccttcgttccagacccccgcgctgtgtactgtaaggacgtgctggacatcgagcagttctccactgtgaagggcgtcaatctggaccacacagacgacgacttctactccaagttctccacgggctctgtgtccatcccatggcaaaacgagatgatagaaacagaatgctttaaggagctgaacgtgtttggacctaatggtaccctcccgccagatctgaacagaaaccaccctccggaaccgcccaagaaagggctgctccagagactcttcaagcggcagcatcagaacaattccaagagttcgcccagctccaagaccagttttaaccaccacataaactcaaaccatgtcagctcgaactccaccggaagcagctagtttcggctctggcctccaagtccacagtggaaccagcccagacccttctccttagaagtggaagtagtggagcccctgctctggtggggctgccaggggagaccccgggagccggggaaggaggccgtccatcccgtcgacgtagaacctcgaggtttctcaaagaaatttccactcaggtctgttttccgaggcggccccggccggggtggattggatttgtctttggtgaacattgcaatagaaatccaattggatacgacaacttgcacgtattttaatagcgtcataactagaactgaattttgtctttatgatttttaaagaaaagttttgtaaatttctctactgtctcagtttacattttgtatatttgtatttaaatgaaagtgagactttgagggtgtatattttctgtgcagccactgttaagccatgtgttccaaggcattttagcggggagggggttatcaaaaaaaaaaaaatgtgactcaagacttccagagcctcaaatgagaaaatgtctttattaaatgtagaaagtgatccata

SEQ ID NO: 154774 - DNA, 1773 bp, Artificial Sequence
  derived and/or modified sequence
atggagttagaaaacatcgtcgccaataccgtgctccttaaggctagggaagggggcgggggaaaacgtaaagggaagtccaaaaaatggaaagagattttaaaatttccacacatctcacaatgcgaggacctgagacgcactatcgatcgggactactgttccttatgtgacaagcagcctataggccggctgctgttcaggcagttctgcgagacacgacccggtctggagtgctacatccaattcctcgattccgttgctgagtacgaggtgacaccagacgagaaactgggtgagaaagggaaagagatcatgacgaagtacttgactcccaagagtccagttttcatcgctcaagtcggtcaagacttagtgagtcagaccgaggagaaactgttgcagaagccatgcaaagaactgttttctgcttgtgcccaatctgtccacgaatatctgcgcggggagcctttccatgagtacctggacagcatgttttttgacagattcctgcagtggaaatggctggaacgccaacccgtcacaaaaaatacctttcggcagtatagagttctgggaaagggtgggtttggcgaagtctgcgcctgtcaggtgagggcaacaggaaagatgtacgcctgtaagcgccttgagaagaaaaggatcaaaaagaggaagggcgagtctatggcattgaacgagaagcaaatcctggagaaagttaatagtcagttcgtggtcaatttagcgtatgcctatgaaacgaaagatgcattgtgcctggtcctcacgataatgaatggcggggatctcaaatttcacatctacaatatgggtaatccaggcttcgaggaggaacgtgcacttttctacgccgctgagatactgtgcggactggaggacttacatagggaaaataccgtctaccgcgacctgaagcctgaaaacatcctgctggatgattacgggcatatccgcatttccgatctgggcctcgccgtgaagatcccagaaggagacctgatccgcgggcgcgttgggacagtgggttacatggcccctgaagtgctgaataatcaacgctacggcctcagccccgattactggggtctgggctgtctaatctacgagatgatcgagggccagtcaccattcagaggcaggaaagaaaaggtcaaacgcgaggaagtggatagacgcgttctggaaactgaagaggtttactcccacaagtttagcgaagaggctaaatcaatttgtaaaatgctcttgaccaaagacgccaagcagcgactgggatgccaggaggaaggggccgcggaagtaaaaagacacccatttttccgcaacatgaacttcaaaaggctggaagccgggatgttggacccacctttcgttccagaccctagggccgtttactgtaaggacgtgctggacattgaacaattttctacagtgaagggagtcaatctggaccacactgacgacgatttctactccaaattttccaccggttcggtgtccattccatggcagaacgagatgatagagaccgagtgttttaaggaacttaacgtcttcggtccgaacggtactctgccacctgatctcaaccggaaccatcctccagagccccctaagaagggactgctgcagcgtcttttcaagaggcagcaccaaaataactcaaagtccagccccagctccaagacaagcttcaatcaccacattaatagcaaccatgttagtagtaattcgacaggcagtagctag

SEQ ID NO: 154775 - DNA, 1773 bp, Artificial Sequence
  derived and/or modified sequence
atggagctggagaacatcgtggccaacacagtgctgctgaaggcccgggagggcggcggcggcaagaggaagggcaagagcaagaagtggaaggagatcctgaagttcccccacatcagccagtgtgaggacctgcggaggaccatcgaccgggactactgcagcctgtgtgacaagcagcccatcggccgcctgctcttccggcagttctgtgagaccaggcctggcctggagtgctacatccagttcctggacagcgtggccgagtatgaggtgaccccagatgagaagctgggggagaagggcaaggagatcatgaccaagtacctgacccccaagagccctgtgttcatcgcccaggtgggccaggacctggtgtcccagacagaggagaagctgctgcagaagccctgcaaggagctgttcagcgcctgtgcccagagcgtgcatgagtacctgcggggggagcccttccacgagtacctggacagcatgttctttgaccgcttcctgcagtggaagtggctggagcggcagcctgtgaccaagaacaccttccggcagtacagagtgctgggcaagggcggctttggagaggtgtgtgcctgccaggtgcgggccaccgggaagatgtatgcctgcaagaggctggagaagaagaggatcaagaagaggaagggggagagcatggccctgaatgagaagcagatcctggagaaggtgaacagccagtttgtggtgaacctggcctatgcctatgagaccaaggatgccctgtgcctggtgctgaccatcatgaatggaggagacctgaagttccacatctacaacatgggcaaccctggctttgaggaggagcgggccctcttctacgccgctgagatcctgtgtggcctggaggacctgcacagagaaaatacagtgtacagagacctgaagccagagaacatcctgctggatgattatggccacatccgcatcagtgacctgggcctggccgtgaagatccctgagggggacctgatccggggccgggtgggcaccgtgggctacatggcccctgaggtgctgaacaaccagagatatggcctgagcccagactactggggcctgggctgcctgatctatgagatgattgagggccagagccccttccggggcaggaaggagaaggtgaagcgggaggaggtggacagaagagtgctggagacagaggaggtgtacagccacaagttcagcgaggaggccaagagcatctgcaagatgctgctgaccaaggatgccaagcagaggctgggctgccaggaggagggcgctgctgaggtgaagaggcaccccttcttcaggaacatgaacttcaagaggctggaggccggcatgctggaccccccatttgtgcctgaccccagggctgtgtactgcaaggatgtgctggacatcgagcagttcagcacagtgaagggcgtgaacctggaccacacagatgatgacttctacagcaagttcagcacaggctctgtgtccatcccctggcagaatgagatgattgaaacagagtgcttcaaggagctgaatgtgtttggccccaacggcaccctgcccccagacctgaacagaaaccaccccccagagccccccaagaagggcctgctgcagaggctcttcaagaggcagcaccagaacaacagcaagagcagccccagcagcaagaccagcttcaaccaccacatcaacagcaaccacgtgagcagcaacagcacaggcagcagctag

SEQ ID NO: 154776 - DNA, 1773 bp, Artificial Sequence
  derived and/or modified sequence
atggagctggagaacatcgtggccaacaccgtgctgctgaaggccagagaaggcggaggaggtaagcgtaaagggaagtcgaagaagtggaaagaaatcctcaagttcccacatatttcacagtgcgaggacctccgaaggactattgaccgcgactactgctcactctgcgataaacagcctatcggtagactgctatttcggcagttttgtgagaccaggccaggattggagtgttacatacaattcctggactcagtggccgagtacgaggttacccccgacgagaaattgggtgaaaagggcaaagaaatcatgactaagtatcttacacccaaatcaccagtgtttattgcccaggtgggccaagacctagttagccaaaccgaagaaaagctgcttcagaaaccctgcaaagaactttttagtgcctgtgcgcagagcgttcatgagtacctccggggggagccattccatgagtacctggattccatgttctttgaccggttcctccagtggaagtggctggaaagacagccggttacaaagaacaccttccgtcagtatagggtcctgggtaagggcggctttggcgaagtctgcgcttgccaggttagagcaactggcaagatgtatgcctgcaagagactcgaaaaaaaacgtattaagaaacggaagggggagagtatggccttgaatgagaagcaaatcctcgaaaaggtcaactcacagttcgtggttaacctggcatacgcatacgagaccaaggacgccctctgcctcgtgctcacaataatgaatgggggcgacttaaaatttcatatctacaatatggggaacccaggctttgaggaagagagggctttgttctatgcggcagagattctttgtggcctcgaggaccttcatcgggagaataccgtgtatcgagacctcaagccagaaaacatacttttggacgactatgggcacatcagaatttcagacctgggcctcgctgttaaaattcctgaaggcgacttgatccggggcagagtgggtactgtcggatatatggctcctgaggtgctcaataatcaaagatacggcttgagccccgactattggggactgggttgcctaatctacgagatgatcgagggccagtctccatttaggggcaggaaggaaaaagttaaaagggaggaagtagacagaagagtactggagacagaggaggtgtattcccacaagttcagtgaagaagctaagtccatttgtaagatgctgctcacaaaggatgccaagcagcgcctggggtgccaggaggagggggcagcagaggtgaagcggcatccgttttttcgaaacatgaatttcaagcgcctggaagccggaatgctagacccgccgtttgtgcccgacccccgagcggtctactgcaaagatgtcctggatatcgaacaattctcaaccgtcaagggtgtgaatcttgaccataccgacgacgatttctatagtaagttcagtacaggcagcgtaagcattccctggcagaacgagatgatcgaaacagagtgcttcaaggaactgaacgtatttggtccgaacggtacactgccgcctgacttgaatcggaatcatcctcctgagcccccaaagaagggactcttacagcgcctctttaaacgacaacatcaaaacaatagtaagtcgagtccatcctcaaagactagcttcaaccaccacattaactccaaccacgtcagttccaattcgaccggcagctcctag

SEQ ID NO: 154777 - DNA, 1773 bp, Artificial Sequence
  derived and/or modified sequence
atggagttagaaaacatcgtggccaatacagtactcctgaaggcacgggaggggggaggaggaaaacgaaagggaaagtcgaaaaagtggaaagagatcctgaaattcccgcacatttcacagtgtgaagaccttcgacgtactatagaccgagactattgtagcctgtgcgataaacagccaatcggcaggcttctgtttaggcagttttgcgaaacaaggcccggtctggagtgctatatacagttccttgatagcgtggccgagtatgaagttactcctgatgaaaagttgggcgagaaaggtaaggagattatgacgaaatatctcacgccgaagtcacctgtgttcatcgcccaagtggggcaagacctggtgtcacagactgaagagaagctgctgcagaagccttgcaaggaactttttagcgcttgtgcccaatccgttcacgagtatctgagaggcgagccttttcatgaatacctggactcaatgttcttcgacagatttttacaatggaagtggctcgagagacagcccgtgactaaaaatacatttcggcaatatcgggtgcttgggaagggaggttttggggaagtctgcgcatgtcaggtcagagcaacaggaaagatgtatgcttgcaagcgtctcgaaaagaagaggatcaagaagcggaagggcgaaagcatggctctaaatgagaagcagatcctagagaaggttaactctcagttcgtggtaaacttggcctatgcttatgaaactaaggacgcactgtgcctggtgctcaccatcatgaacggcggtgacctaaaattccacatctataacatggggaatccaggcttcgaggaggaacgcgcactcttttacgctgcggagatactatgtgggctggaggaccttcatcgagagaacaccgtgtatcgggatttgaaacctgaaaatattctcctcgatgactatgggcatattcgcataagcgatctgggcttagcagtgaaaatccctgagggggacctgattagaggccgagtgggtactgtgggatatatggccccagaagtgctcaacaaccaacgctacggtttaagcccggactattgggggctcgggtgtctcatttatgaaatgatcgagggccagtctcctttcagggggcgtaaagagaaagttaagcgagaagaggtggatcgacgcgttcttgagacagaggaagtatactcgcacaagttttccgaagaggctaagtcgatttgcaagatgctgctcacaaaagacgcaaaacagcggctgggctgccaggaagaaggggctgccgaggtgaaacggcatcccttctttcggaacatgaattttaaacggctggaggctgggatgctcgacccaccatttgtccctgaccctagggcagtgtattgcaaggatgtactcgatatagagcagttctccaccgtaaagggcgtgaatctggatcataccgatgacgacttctactcaaagttttctacaggaagcgtctccattccctggcagaatgagatgatcgagacagagtgttttaaagaacttaatgtctttggcccaaacggaaccttgcccccagacctgaaccgtaatcatccacctgaaccaccgaagaagggcctgttgcagaggctgtttaagcggcagcatcagaacaatagtaagtctagcccctcctccaaaacctctttcaaccatcatataaactccaaccacgtctccagtaactctacagggagtagttag

SEQ ID NO: 154778 - DNA, 1773 bp, Artificial Sequence
  derived and/or modified sequence
atggagctggagaacatcgtggccaacaccgtgctgctgaaggccagagagggcggcggcggcaagagaaagggcaagagcaagaagtggaaggagatcctgaagttcccccacatcagccagtgcgaggacctgagaagaaccatcgacagagactactgcagcctgtgcgacaagcagcccatcggcagactgctgttcagacagttctgcgagaccagacccggcctggagtgctacatccagttcctggacagcgtggccgagtacgaggtgacccccgacgagaagctgggcgagaagggcaaggagatcatgaccaagtacctgacccccaagagccccgtgttcatcgcccaggtgggccaggacctggtgagccagaccgaggagaagctgctgcagaagccctgcaaggagctgttcagcgcctgcgcccagagcgtgcacgagtacctgagaggcgagcccttccacgagtacctggacagcatgttcttcgacagattcctgcagtggaagtggctggagagacagcccgtgaccaagaacaccttcagacagtacagagtgctgggcaagggcggcttcggcgaggtgtgcgcctgccaggtgagagccaccggcaagatgtacgcctgcaagagactggagaagaagagaatcaagaagagaaagggcgagagcatggccctgaacgagaagcagatcctggagaaggtgaacagccagttcgtggtgaacctggcctacgcctacgagaccaaggacgccctgtgcctggtgctgaccatcatgaacggcggcgacctgaagttccacatctacaacatgggcaaccccggcttcgaggaggagagagccctgttctacgccgccgagatcctgtgcggcctggaggacctgcacagagagaacaccgtgtacagagacctgaagcccgagaacatcctgctggacgactacggccacatcagaatcagcgacctgggcctggccgtgaagatccccgagggcgacctgatcagaggcagagtgggcaccgtgggctacatggcccccgaggtgctgaacaaccagagatacggcctgagccccgactactggggcctgggctgcctgatctacgagatgatcgagggccagagccccttcagaggcagaaaggagaaggtgaagagagaggaggtggacagaagagtgctggagaccgaggaggtgtacagccacaagttcagcgaggaggccaagagcatctgcaagatgctgctgaccaaggacgccaagcagagactgggctgccaggaggagggcgccgccgaggtgaagagacaccccttcttcagaaacatgaacttcaagagactggaggccggcatgctggacccccccttcgtgcccgaccccagagccgtgtactgcaaggacgtgctggacatcgagcagttcagcaccgtgaagggcgtgaacctggaccacaccgacgacgacttctacagcaagttcagcaccggcagcgtgagcatcccctggcagaacgagatgatcgagaccgagtgcttcaaggagctgaacgtgttcggccccaacggcaccctgccccccgacctgaacagaaaccacccccccgagccccccaagaagggcctgctgcagagactgttcaagagacagcaccagaacaacagcaagagcagccccagcagcaagaccagcttcaaccaccacatcaacagcaaccacgtgagcagcaacagcaccggcagcagctag

SEQ ID NO: 154779 - protein, 594 aa, Artificial Sequence
  derived and/or modified sequence
MALAGCPDSFLHHPYYQDKVEQTPRSQQDPAGPGLPAQSDRLANHQEDDVDLEALVNDMNASLESLYSACSMQSDTVPLLQNGQHARSQPRASGPPRSIQPQVSPRQRVQRSQPVHILAVRRLQEEDQQFRTSSLPAIPNPFPELCGPGSPPVLTPGSLPPSQAAAKQDVKVFSEDGTSKVVEILADMTARDLCQLLVYKSHCVDDNSWTLVEHHPHLGLERCLEDHELVVQVESTMASESKFLFRKNYAKYEFFKNPMNFFPEQMVTWCQQSNGSQTQLLQNFLNSSSCPEIQGFLHVKELGKKSWKKLYVCLRRSGLYCSTKGTSKEPRHLQLLADLEDSNIFSLIAGRKQYNAPTDHGLCIKPNKVRNETKELRLLCAEDEQTRTCWMTAFRLLKYGMLLYQNYRIPQQRKALLSPFSTPVRSVSENSLVAMDFSGQTGRVIENPAEAQSAALEEGHAWRKRSTRMNILGSQSPLHPSTLSTVIHRTQHWFHGRISREESHRIIKQQGLVDGLFLLRDSQSNPKAFVLTLCHHQKIKNFQILPCEDDGQTFFSLDDGNTKFSDLIQLVDFYQLNKGVLPCKLKHHCIRVAL

SEQ ID NO: 154780 - DNA, 1785 bp, Artificial Sequence
  derived and/or modified sequence
atggccctggccggctgccccgacagcttcctgcaccacccctactaccaggacaaggtggagcagacccccagaagccagcaggaccccgccggccccggcctgcccgcccagagcgacagactggccaaccaccaggaggacgacgtggacctggaggccctggtgaacgacatgaacgccagcctggagagcctgtacagcgcctgcagcatgcagagcgacaccgtgcccctgctgcagaacggccagcacgccagaagccagcccagagccagcggcccccccagaagcatccagccccaggtgagccccagacagagagtgcagagaagccagcccgtgcacatcctggccgtgagaagactgcaggaggaggaccagcagttcagaaccagcagcctgcccgccatccccaaccccttccccgagctgtgcggccccggcagcccccccgtgctgacccccggcagcctgccccccagccaggccgccgccaagcaggacgtgaaggtgttcagcgaggacggcaccagcaaggtggtggagatcctggccgacatgaccgccagagacctgtgccagctgctggtgtacaagagccactgcgtggacgacaacagctggaccctggtggagcaccacccccacctgggcctggagagatgcctggaggaccacgagctggtggtgcaggtggagagcaccatggccagcgagagcaagttcctgttcagaaagaactacgccaagtacgagttcttcaagaaccccatgaacttcttccccgagcagatggtgacctggtgccagcagagcaacggcagccagacccagctgctgcagaacttcctgaacagcagcagctgccccgagatccagggcttcctgcacgtgaaggagctgggcaagaagagctggaagaagctgtacgtgtgcctgagaagaagcggcctgtactgcagcaccaagggcaccagcaaggagcccagacacctgcagctgctggccgacctggaggacagcaacatcttcagcctgatcgccggcagaaagcagtacaacgcccccaccgaccacggcctgtgcatcaagcccaacaaggtgagaaacgagaccaaggagctgagactgctgtgcgccgaggacgagcagaccagaacctgctggatgaccgccttcagactgctgaagtacggcatgctgctgtaccagaactacagaatcccccagcagagaaaggccctgctgagccccttcagcacccccgtgagaagcgtgagcgagaacagcctggtggccatggacttcagcggccagaccggcagagtgatcgagaaccccgccgaggcccagagcgccgccctggaggagggccacgcctggagaaagagaagcaccagaatgaacatcctgggcagccagagccccctgcaccccagcaccctgagcaccgtgatccacagaacccagcactggttccacggcagaatcagcagagaggagagccacagaatcatcaagcagcagggcctggtggacggcctgttcctgctgagagacagccagagcaaccccaaggccttcgtgctgaccctgtgccaccaccagaagatcaagaacttccagatcctgccctgcgaggacgacggccagaccttcttcagcctggacgacggcaacaccaagttcagcgacctgatccagctggtggacttctaccagctgaacaagggcgtgctgccctgcaagctgaagcaccactgcatcagagtggccctgtag

SEQ ID NO: 154781 - DNA, 1785 bp, Artificial Sequence
  derived and/or modified sequence
atggctctggccggatgtccggatagcttccttcaccacccctactatcaggataaggtcgaacagactccacgatcgcagcaagaccctgctggccctgggttacctgctcagagcgaccggctggcaaaccatcaggaagatgatgtagatctggaggctttagtaaatgacatgaatgcctctcttgagtctctttactctgcttgttcgatgcaatccgacactgtgcccctgctgcaaaacggtcagcatgctaggtctcagcctcgggcatccggaccaccgcgaagcatccagccccaggtgagcccgcgccagcgagtacaacgaagccagccggtccacatactggccgtgagaaggctgcaagaggaggaccagcagttcagaacatcttccctccccgcaattcccaatccctttccagagctctgtggacccgggtctcctcctgtgctgacccctgggtccctccctcctagccaggccgccgctaaacaggatgtaaaggtgtttagcgaagacggaacgtccaaggtggtggaaatcctggctgacatgacagcaagagatctgtgccagttgcttgtgtacaagagccactgcgttgacgacaatagctggacactcgtggagcatcacccccacctggggctggaacgctgccttgaggaccatgagcttgtggttcaggtagaaagcactatggctagcgagtctaaatttctatttaggaaaaattacgccaagtacgagttttttaagaatcctatgaatttctttccggaacaaatggtgacatggtgccaacaaagcaatggctcccagacacagcttcttcagaactttctgaatagttcctcgtgtcctgagattcagggctttctacatgtgaaggaactgggcaagaaatcttggaagaagctgtatgtatgcctgcggaggtccggcctgtattgctcaacaaagggcacctctaaggagccgcgccatctgcagctcctggcagatctggaagacagcaatattttttccctaatcgcgggtaggaagcagtataatgctccgacggaccatgggctctgtatcaagccaaataaagtgcgcaatgagacaaaggaactcagactcctctgcgctgaggacgagcagacgcggacctgttggatgactgcctttcgtctcctgaagtacggcatgctgctgtatcagaattataggatccctcagcagcgaaaagcgttgctgagtccattctcaacacccgtcaggagcgtcagtgaaaactcactggtagcaatggactttagcggacagaccggaagagtcatagagaacccagcggaggcacagagcgccgcactggaagaaggacacgcttggcgcaagcgcagcacacggatgaatattctaggctcacagtctccgcttcaccccagcaccctcagtacagtgatccataggacccagcactggttccacgggagaatcagcagagaagaaagtcacagaattattaagcagcagggcctagtggatggattatttcttctccgagattcgcagtccaatccaaaggcctttgttttgaccctgtgccatcaccagaagatcaagaacttccagatcctcccctgcgaggatgacggccagacattcttcagcctggatgatggcaacaccaagtttagtgacctcatccagttggtggacttctaccagttgaataagggggtcctgccatgcaagctgaagcatcattgcattagggtggccctgtag

SEQ ID NO: 154782 - DNA, 1785 bp, Artificial Sequence
  derived and/or modified sequence
atggccctagccggttgtcccgactcttttctgcaccatccatattatcaggacaaggttgaacaaacccctaggtcccaacaggacccagccggtccaggcctccccgcgcaatctgatcggctggctaatcatcaggaggatgatgtagatttggaagctctggtgaacgacatgaacgcctctctggaaagcctatactctgcctgtagtatgcagtccgataccgtacccctcctccagaacggccagcacgcaagaagccagcctcgagcgtccgggcccccccgctctatccagccacaggtgtccccgcgccagcgcgtgcagcgctctcaaccagtacacatcctcgcagtgaggcgcttgcaagaggaggatcagcaatttcgtacctcaagtctgcccgccattccgaacccttttccagagttgtgcggtcctgggagtcctcctgtgctgacccccggatccttgccgccgagccaggccgcagctaagcaggatgtaaaggtattcagcgaggacggaacttccaaagtggtggagatccttgcggatatgaccgcaagggatctgtgtcagctgctggtgtataagagccattgcgtagatgataacagctggactttggtagaacaccacccccatctcggcctggaacgatgcctggaggatcacgaactggtggtccaagtagaaagcacgatggcctcggagtctaaattcctcttccgaaagaactatgccaaatatgaattcttcaagaaccctatgaacttctttccagagcagatggtcacatggtgtcaacagtcaaatgggtcccaaactcagttgctgcagaactttctcaattcgtctagttgtcctgaaatacaggggttcctgcacgtaaaagaactgggcaaaaaatcctggaaaaaactttatgtctgtctgaggcgcagcggcctgtactgcagtaccaagggaacttccaaagaacccagacatctgcagctgttggctgatttagaggacagcaacatttttagtcttattgctggcaggaaacagtacaatgcaccgactgatcatggactgtgcatcaagcctaataaagtgcgcaacgagacaaaggagctcaggctactttgcgctgaggacgaacaaaccaggacttgctggatgacagctttccgcttgctgaaatacggcatgctcttgtaccaaaattatcgcattccccagcagagaaaagctctgttgagtccctttagcacccctgtgcgctctgtgtcagagaactcgcttgtcgctatggacttttcggggcagactggacgcgtcatcgagaatccagctgaggcccagagcgccgcgctggaggagggacacgcatggaggaagcgctccacacggatgaatatactgggatctcagtcaccattgcacccctctacccttagtacagttatccatcgtacgcaacattggttccatgggcggatttcacgagaagagtcacacaggattattaaacagcaaggtctcgtcgatggcctctttctgttacgcgacagccaaagtaatcccaaggctttcgtgttgaccctgtgccaccaccaaaaaatcaaaaacttccagattctgccctgtgaagatgacgggcagactttcttctctctagatgatggcaacacaaaattcagtgatctcatccagttggtcgacttctatcagctgaataagggagtcctgccctgtaagctgaaacatcactgtattagagtggccttatag

SEQ ID NO: 154783 - DNA, 5032 bp, Artificial Sequence
  derived and/or modified sequence
ggggaggtcgggaggaggcagagagggaagcgagctgcggccgggcgggctcggcgctcggagacccggtggagcccaaagtttccgcgcagcccctgggtggcggcagcgccggcggcgcggggcgcccgggacagtcttgagcgccggcctcgccccgcggggacccgcgcccgccgccggccacgccgagtgtcgcccgcagccacgcggaggcggcggggagccgcgcgcggcagctttggcgctgaccacaatgctgagcaggaagcagcagctgcaggcccagtgactggtagctcagtgaccagcagcccagtgaccggcagccaggtcctcacctgggtcctctcagtgaagccagggtggccgccccagcagacagtgctacagagccaactcctgacaggacaaggtggagcagacacctcgcagtcaacaagacccggcaggaccaggactccccgcacagtctgaccgacttgcgaatcaccaggaggatgatgtggacctggaagccctggtgaacgatatgaatgcatccctggagagcctgtactcggcctgcagcatgcagtcagacacggtgcccctcctgcagaatggccagcatgcccgcagccagcctcgggcttcaggccctcctcggtccatccagccacaggtgtccccgaggcagagggtgcagcgctcccagcctgtgcacatcctcgctgtcaggcgccttcaggaggaagaccagcagtttagaacctcatctctgccggccatccccaatccttttcctgaactctgtggccctgggagcccccctgtgctcacgccgggttctttacctccgagccaggccgccgcaaagcaggatgttaaagtctttagtgaagatgggacaagcaaagtggtggagattctagcagacatgacagccagagacctgtgccaattgctggtttacaaaagtcactgtgtggatgacaacagctggacactagtggagcaccacccgcacctaggattagagaggtgcttggaagaccatgagctggtggtccaggtggagagtaccatggccagtgagagtaaatttctattcaggaagaattacgcaaaatacgagttctttaaaaatcccatgaatttcttcccagaacagatggttacttggtgccagcagtcaaatggcagtcaaacccagcttttgcagaattttctgaactccagtagttgtcctgaaattcaagggtttttgcatgtgaaagagctgggaaagaaatcatggaaaaagctgtatgtgtgtttgcggagatctggcctttattgctccaccaagggaacttcaaaggaacccagacacctgcagctgctggccgacctggaggacagcaacatcttctccctgatcgctggcaggaagcagtacaacgcccctacagaccacgggctctgcataaagccaaacaaagtcaggaatgaaactaaagagctgaggttgctctgtgcagaggacgagcaaaccaggacgtgctggatgacagcgttcagactcctcaagtatggaatgctcctttaccagaattaccgaatccctcagcagaggaaggccttgctgtccccgttctcgacgccagtgcgcagtgtctccgagaactccctcgtggcaatggatttttctgggcaaacaggacgcgtgatagagaatccggcagaggcccagagcgcagccctggaggagggccacgcctggaggaagcgaagcacacggatgaacatcctaggtagccaaagtcccctccacccttctaccctaagtacagtgattcacaggacacagcactggtttcacgggaggatctccagggaggaatcccacaggatcattaaacagcaagggctcgtggatgggctttttctcctccgtgacagccagagtaatccaaaggcatttgtactcacactgtgtcatcaccagaaaattaaaaatttccagatcttaccttgcgaggacgacgggcagacgttcttcagcctagatgacgggaacaccaaattctctgacctgatccagctggttgacttttaccagctgaacaaaggagtcctgccttgcaaactcaagcaccactgcatccgagtggccttatgaccgcagatgtcctctcggctgaagactggaggaagtgaacactggagtgaagaagcggtctgtgcgttggtgaagaacacacatcgattctgcacctggggacccagagcgagatgggtttgttcggtgccagccgaccaagattgactagtttgttggacttaaacgacgatttgctgctgtgaacccagcagggtcgcctccctctgcatcggccaaattggggagggcatggaagatccagcggaaagttgaaaataaactggaatgatcatcttggcttgggccgcttaggaacaagaaccggagagaagtgattggaaatgaactcttgccctggaataatcttgacaattaaaactgatatgtttactttttttgtattgatcacttttttgcactccttctttgttttcaatattgtattcagcctattgtaggagggggatgtggcgtttcaactcatataatacagaaagagttttgaatgggcagatttcaaactgaatatgggtccccaaatgttcccagagggtcctccacaccctctgccgactaccacggtgtggattcagctcccaaatgacaaacccagcccttcccagtatacttgaaaagctttcttgttaaaataaaaggtgtcactgtggtaggcatttggcatattttgtggactcagtcaagcaaccacagtctgttaatcatttctctatgctcagatgtcagatcctcttgttattagtgtgtcttgttctgcacagtgcaggagactttattcctttggaaaattcactgttccacaaacagcaggctgaatggcctcgcctctagattgacgtgggccagcctccttgagacacacctggcacccgtcatcggccagcggtggatgctgcataatccacctgggtacttcagccttgcgtttccacagccttcagcctgttctagaacgatcactgccttacccctgctgctgcagtggtgtgagtcgtttcacggctgatgtccctcgggggattaaaggatctaaagagaaaatggcacctggttgtcttcgtgctgtgtctcatgggtttccatagtgataaagacaaggaaacgctgcaggggccacaggcacaggctgatatttaaagatctttgcttgcagccctccgtcctgctgaaaacccccataagccagtgaacacagagcagctagaggctcctcctctgctggcttagggtcagaagtacctcacagtggttgtggacatggaagagttttgtcaacacaacactttgtccccgctccgggagatgagtcagatggtggcttgagttgtcacttggtcccctccgcccctcgggtggccccctttgccacgtccccttagcttagtgatcaggtgtgagagtggccatttccttacctttgatccctgtaaagcagaaaggactcctttgacaggcgacaaactactgtggtgagcagaatgatttcctttttcaagacaacacctgcctggcttctattaatgtgtgctggccatgatattgccccaaatccgccccactgaagtgttccctaaggaacagcatttctctgctcctcagtcaacccccgtagcctagagcagtgtcacaagcttcagtaaggccagtcagctggaagtcagtctaccgtatagtaacactgtatgtcagtctacagaccacactctagttgttttccatgaaaggtatacaaatgaagaattttctagcaaaacatgtttttaaccatcagtgctcaattgcattttcttcctttcgcagccagtcagtctttcaaactattgacagtaagataattctcacgttcacacctggtggcaggcttcactgtagggacggacattgcagttacaccacgattccttcctcttcactggctcgaggtaaacccttttcaaggaaaaacaactctaggatttcttttttctgtgtacgtagaccagtcccatcagtgtataatctctctctcacacgcctctctccaatagacagcttgtatttgcagtatttcatatttataaatatgcgtttatttaaaaggagaacaaaagcttgactctgattcacagttttgtatgtagctggtttgacgtagtcttttgtattttccctgccgaagtgaattgttggagaatgtaaaccgcctccacgtggcggcagacttcctaaggccccagctcgctggcctcgcgctgggcggctgggaattccacctgagaacaagtcccgcaaaccggggacggaaggacatttgacttttatttttgtatttaattgacatgaatgtaaaggggacagctcagggttgttttggagcctgttgactttgtatctctgcctgtgattttcttttctaaatgaaactccatgtagcaaccaggacgaagttgagaaggaaaacgccaaatgctttggttattagagtttaataggtaagctctgttacactaggtgttagagttccagaatgttcttttgtttgctaaaccttgaagaaacatgtgcctcagcctagatgttttgtcttctcttttctgcacttaatacctgacagtatgaccgatctctgcgcctttctgggggcgggcaagctggcggtagatttgtgatgtcacagtgcaaactgcagtgactgtaaattggcctggcgtgtataaacgttttcagggaatgcagaaggtattaatgaagagacaaaacctttattccatgtgctttgcttcattctgtacatagctctttggctcgtgaacctaattgtaaactttcaggtatttttgtacaaataagggactgatgttctgtttcttgtaattagaaataaacattaatacagtgttcttcattttc

SEQ ID NO: 154784 - DNA, 2627 bp, Artificial Sequence
  derived and/or modified sequence
cagcccggcccggctccgagcgctgtccatgcggagcgctgtccacgcgccgggcactgcgggggccgggccccgaagccctacccgggccggcggcgcacacgcagcgaccccgtgcggccagtgctgccgcccgctctccagacttgggaggctgcattctgataattctcaggaggaagaatgtataggagagaccagggtttttaaggtgtgacctctgaaccacctacatcagagctgactgcctctcgctttggcgctgaccacaatgctgagcaggaagcagcagctgcaggcccagtgactggtagctcagtgaccagcagcccagtgaccggcagccaggtcctcacctgggtcctctcagtgaagccagggtggccgccccagcagacagtgctacagagccaactcctgacaggtgctgcagcgcagtaaatgtaatttgaagaaggcagaaggaacccatggctttagccggctgcccagattcctttttgcaccatccgtactaccaggacaaggtggagcagacacctcgcagtcaacaagacccggcaggaccaggactccccgcacagtctgaccgacttgcgaatcaccaggaggatgatgtggacctggaagccctggtgaacgatatgaatgcatccctggagagcctgtactcggcctgcagcatgcagtcagacacggtgcccctcctgcagaatggccagcatgcccgcagccagcctcgggcttcaggccctcctcggtccatccagccacaggtgtccccgaggcagagggtgcagcgctcccagcctgtgcacatcctcgctgtcaggcgccttcaggaggaagaccagcagtttagaacctcatctctgccggccatccccaatccttttcctgaactctgtggccctgggagcccccctgtgctcacgccgggttctttacctccgagccaggccgccgcaaagcaggatgttaaagtctttagtgaagatgggacaagcaaagtggtggagattctagcagacatgacagccagagacctgtgccaattgctggtttacaaaagtcactgtgtggatgacaacagctggacactagtggagcaccacccgcacctaggattagagaggtgcttggaagaccatgagctggtggtccaggtggagagtaccatggccagtgagagtaaatttctattcaggaagaattacgcaaaatacgagttctttaaaaatcccatgaatttcttcccagaacagatggttacttggtgccagcagtcaaatggcagtcaaacccagcttttgcagaattttctgaactccagtagttgtcctgaaattcaagggtttttgcatgtgaaagagctgggaaagaaatcatggaaaaagctgtatgtgtgtttgcggagatctggcctttattgctccaccaagggaacttcaaaggaacccagacacctgcagctgctggccgacctggaggacagcaacatcttctccctgatcgctggcaggaagcagtacaacgcccctacagaccacgggctctgcataaagccaaacaaagtcaggaatgaaactaaagagctgaggttgctctgtgcagaggacgagcaaaccaggacgtgctggatgacagcgttcagactcctcaagtatggaatgctcctttaccagaattaccgaatccctcagcagaggaaggccttgctgtccccgttctcgacgccagtgcgcagtgtctccgagaactccctcgtggcaatggatttttctgggcaaacaggacgcgtgatagagaatccggcagaggcccagagcgcagccctggaggagggccacgcctggaggaagcgaagcacacggatgaacatcctaggtagccaaagtcccctccacccttctaccctaagtacagtgattcacaggacacagcactggtttcacgggaggatctccagggaggaatcccacaggatcattaaacagcaagggctcgtggatgggctttttctcctccgtgacagccagagtaatccaaaggcatttgtactcacactgtgtcatcaccagaaaattaaaaatttccagatcttaccttgcgaggacgacgggcagacgttcttcagcctagatgacgggaacaccaaattctctgacctgatccagctggttgacttttaccagctgaacaaaggagtcctgccttgcaaactcaagcaccactgcatccgagtggccttatgaccgcagatgtcctctcggctgaagactggaggaagtgaacactggagtgaagaagcggtctgtgcgttggtgaagaacacacatcgattctgcacctggggacccagagcgagatgggtttgttcggtgccagccgaccaagattgactagtttgttggacttaaacgacgatttgctgctgtgaacccagcagggtcgcctccctctgcatcggccaaattggggagggcatggaagatccagcggaaagttgaaaataaactggaatgatcatcttggcttgggccgcttaggaacaagaaccggagagaagtgattggaaatgaactcttgccctggaataatcttgacaattaaaactgatatgttta

SEQ ID NO: 154785 - DNA, 4785 bp, Artificial Sequence
  derived and/or modified sequence
cgcaactttgcctcccagggaacaaacatcctccttctaagtggtagatgtgggtgagctgaccctgctggagtctgtcccctgggctaccctctgcttccccccattgtgagtggtccgtgaagcacagcgttgaccagacctaaacctgtttgctcccaggacaaggtggagcagacacctcgcagtcaacaagacccggcaggaccaggactccccgcacagtctgaccgacttgcgaatcaccaggaggatgatgtggacctggaagccctggtgaacgatatgaatgcatccctggagagcctgtactcggcctgcagcatgcagtcagacacggtgcccctcctgcagaatggccagcatgcccgcagccagcctcgggcttcaggccctcctcggtccatccagccacaggtgtccccgaggcagagggtgcagcgctcccagcctgtgcacatcctcgctgtcaggcgccttcaggaggaagaccagcagtttagaacctcatctctgccggccatccccaatccttttcctgaactctgtggccctgggagcccccctgtgctcacgccgggttctttacctccgagccaggccgccgcaaagcaggatgttaaagtctttagtgaagatgggacaagcaaagtggtggagattctagcagacatgacagccagagacctgtgccaattgctggtttacaaaagtcactgtgtggatgacaacagctggacactagtggagcaccacccgcacctaggattagagaggtgcttggaagaccatgagctggtggtccaggtggagagtaccatggccagtgagagtaaatttctattcaggaagaattacgcaaaatacgagttctttaaaaatcccatgaatttcttcccagaacagatggttacttggtgccagcagtcaaatggcagtcaaacccagcttttgcagaattttctgaactccagtagttgtcctgaaattcaagggtttttgcatgtgaaagagctgggaaagaaatcatggaaaaagctgtatgtgtgtttgcggagatctggcctttattgctccaccaagggaacttcaaaggaacccagacacctgcagctgctggccgacctggaggacagcaacatcttctccctgatcgctggcaggaagcagtacaacgcccctacagaccacgggctctgcataaagccaaacaaagtcaggaatgaaactaaagagctgaggttgctctgtgcagaggacgagcaaaccaggacgtgctggatgacagcgttcagactcctcaagtatggaatgctcctttaccagaattaccgaatccctcagcagaggaaggccttgctgtccccgttctcgacgccagtgcgcagtgtctccgagaactccctcgtggcaatggatttttctgggcaaacaggacgcgtgatagagaatccggcagaggcccagagcgcagccctggaggagggccacgcctggaggaagcgaagcacacggatgaacatcctaggtagccaaagtcccctccacccttctaccctaagtacagtgattcacaggacacagcactggtttcacgggaggatctccagggaggaatcccacaggatcattaaacagcaagggctcgtggatgggctttttctcctccgtgacagccagagtaatccaaaggcatttgtactcacactgtgtcatcaccagaaaattaaaaatttccagatcttaccttgcgaggacgacgggcagacgttcttcagcctagatgacgggaacaccaaattctctgacctgatccagctggttgacttttaccagctgaacaaaggagtcctgccttgcaaactcaagcaccactgcatccgagtggccttatgaccgcagatgtcctctcggctgaagactggaggaagtgaacactggagtgaagaagcggtctgtgcgttggtgaagaacacacatcgattctgcacctggggacccagagcgagatgggtttgttcggtgccagccgaccaagattgactagtttgttggacttaaacgacgatttgctgctgtgaacccagcagggtcgcctccctctgcatcggccaaattggggagggcatggaagatccagcggaaagttgaaaataaactggaatgatcatcttggcttgggccgcttaggaacaagaaccggagagaagtgattggaaatgaactcttgccctggaataatcttgacaattaaaactgatatgtttactttttttgtattgatcacttttttgcactccttctttgttttcaatattgtattcagcctattgtaggagggggatgtggcgtttcaactcatataatacagaaagagttttgaatgggcagatttcaaactgaatatgggtccccaaatgttcccagagggtcctccacaccctctgccgactaccacggtgtggattcagctcccaaatgacaaacccagcccttcccagtatacttgaaaagctttcttgttaaaataaaaggtgtcactgtggtaggcatttggcatattttgtggactcagtcaagcaaccacagtctgttaatcatttctctatgctcagatgtcagatcctcttgttattagtgtgtcttgttctgcacagtgcaggagactttattcctttggaaaattcactgttccacaaacagcaggctgaatggcctcgcctctagattgacgtgggccagcctccttgagacacacctggcacccgtcatcggccagcggtggatgctgcataatccacctgggtacttcagccttgcgtttccacagccttcagcctgttctagaacgatcactgccttacccctgctgctgcagtggtgtgagtcgtttcacggctgatgtccctcgggggattaaaggatctaaagagaaaatggcacctggttgtcttcgtgctgtgtctcatgggtttccatagtgataaagacaaggaaacgctgcaggggccacaggcacaggctgatatttaaagatctttgcttgcagccctccgtcctgctgaaaacccccataagccagtgaacacagagcagctagaggctcctcctctgctggcttagggtcagaagtacctcacagtggttgtggacatggaagagttttgtcaacacaacactttgtccccgctccgggagatgagtcagatggtggcttgagttgtcacttggtcccctccgcccctcgggtggccccctttgccacgtccccttagcttagtgatcaggtgtgagagtggccatttccttacctttgatccctgtaaagcagaaaggactcctttgacaggcgacaaactactgtggtgagcagaatgatttcctttttcaagacaacacctgcctggcttctattaatgtgtgctggccatgatattgccccaaatccgccccactgaagtgttccctaaggaacagcatttctctgctcctcagtcaacccccgtagcctagagcagtgtcacaagcttcagtaaggccagtcagctggaagtcagtctaccgtatagtaacactgtatgtcagtctacagaccacactctagttgttttccatgaaaggtatacaaatgaagaattttctagcaaaacatgtttttaaccatcagtgctcaattgcattttcttcctttcgcagccagtcagtctttcaaactattgacagtaagataattctcacgttcacacctggtggcaggcttcactgtagggacggacattgcagttacaccacgattccttcctcttcactggctcgaggtaaacccttttcaaggaaaaacaactctaggatttcttttttctgtgtacgtagaccagtcccatcagtgtataatctctctctcacacgcctctctccaatagacagcttgtatttgcagtatttcatatttataaatatgcgtttatttaaaaggagaacaaaagcttgactctgattcacagttttgtatgtagctggtttgacgtagtcttttgtattttccctgccgaagtgaattgttggagaatgtaaaccgcctccacgtggcggcagacttcctaaggccccagctcgctggcctcgcgctgggcggctgggaattccacctgagaacaagtcccgcaaaccggggacggaaggacatttgacttttatttttgtatttaattgacatgaatgtaaaggggacagctcagggttgttttggagcctgttgactttgtatctctgcctgtgattttcttttctaaatgaaactccatgtagcaaccaggacgaagttgagaaggaaaacgccaaatgctttggttattagagtttaataggtaagctctgttacactaggtgttagagttccagaatgttcttttgtttgctaaaccttgaagaaacatgtgcctcagcctagatgttttgtcttctcttttctgcacttaatacctgacagtatgaccgatctctgcgcctttctgggggcgggcaagctggcggtagatttgtgatgtcacagtgcaaactgcagtgactgtaaattggcctggcgtgtataaacgttttcagggaatgcagaaggtattaatgaagagacaaaacctttattccatgtgctttgcttcattctgtacatagctctttggctcgtgaacctaattgtaaactttcaggtatttttgtacaaataagggactgatgttctgtttcttgtaattagaaataaacattaatacagtgttcttcattttc

SEQ ID NO: 154786 - DNA, 4705 bp, Artificial Sequence
  derived and/or modified sequence
aaatgtaatttgaagaaggcagaaggaacccatggctttagccggctgcccagattcctttttgcaccatccgtactaccaggacaaggtggagcagacacctcgcagtcaacaagacccggcaggaccaggactccccgcacagtctgaccgacttgcgaatcaccaggaggatgatgtggacctggaagccctggtgaacgatatgaatgcatccctggagagcctgtactcggcctgcagcatgcagtcagacacggtgcccctcctgcagaatggccagcatgcccgcagccagcctcgggcttcaggccctcctcggtccatccagccacaggtgtccccgaggcagagggtgcagcgctcccagcctgtgcacatcctcgctgtcaggcgccttcaggaggaagaccagcagtttagaacctcatctctgccggccatccccaatccttttcctgaactctgtggccctgggagcccccctgtgctcacgccgggttctttacctccgagccaggccgccgcaaagcaggatgttaaagtctttagtgaagatgggacaagcaaagtggtggagattctagcagacatgacagccagagacctgtgccaattgctggtttacaaaagtcactgtgtggatgacaacagctggacactagtggagcaccacccgcacctaggattagagaggtgcttggaagaccatgagctggtggtccaggtggagagtaccatggccagtgagagtaaatttctattcaggaagaattacgcaaaatacgagttctttaaaaatcccatgaatttcttcccagaacagatggttacttggtgccagcagtcaaatggcagtcaaacccagcttttgcagaattttctgaactccagtagttgtcctgaaattcaagggtttttgcatgtgaaagagctgggaaagaaatcatggaaaaagctgtatgtgtgtttgcggagatctggcctttattgctccaccaagggaacttcaaaggaacccagacacctgcagctgctggccgacctggaggacagcaacatcttctccctgatcgctggcaggaagcagtacaacgcccctacagaccacgggctctgcataaagccaaacaaagtcaggaatgaaactaaagagctgaggttgctctgtgcagaggacgagcaaaccaggacgtgctggatgacagcgttcagactcctcaagtatggaatgctcctttaccagaattaccgaatccctcagcagaggaaggccttgctgtccccgttctcgacgccagtgcgcagtgtctccgagaactccctcgtggcaatggatttttctgggcaaacaggacgcgtgatagagaatccggcagaggcccagagcgcagccctggaggagggccacgcctggaggaagcgaagcacacggatgaacatcctaggtagccaaagtcccctccacccttctaccctaagtacagtgattcacaggacacagcactggtttcacgggaggatctccagggaggaatcccacaggatcattaaacagcaagggctcgtggatgggctttttctcctccgtgacagccagagtaatccaaaggcatttgtactcacactgtgtcatcaccagaaaattaaaaatttccagatcttaccttgcgaggacgacgggcagacgttcttcagcctagatgacgggaacaccaaattctctgacctgatccagctggttgacttttaccagctgaacaaaggagtcctgccttgcaaactcaagcaccactgcatccgagtggccttatgaccgcagatgtcctctcggctgaagactggaggaagtgaacactggagtgaagaagcggtctgtgcgttggtgaagaacacacatcgattctgcacctggggacccagagcgagatgggtttgttcggtgccagccgaccaagattgactagtttgttggacttaaacgacgatttgctgctgtgaacccagcagggtcgcctccctctgcatcggccaaattggggagggcatggaagatccagcggaaagttgaaaataaactggaatgatcatcttggcttgggccgcttaggaacaagaaccggagagaagtgattggaaatgaactcttgccctggaataatcttgacaattaaaactgatatgtttactttttttgtattgatcacttttttgcactccttctttgttttcaatattgtattcagcctattgtaggagggggatgtggcgtttcaactcatataatacagaaagagttttgaatgggcagatttcaaactgaatatgggtccccaaatgttcccagagggtcctccacaccctctgccgactaccacggtgtggattcagctcccaaatgacaaacccagcccttcccagtatacttgaaaagctttcttgttaaaataaaaggtgtcactgtggtaggcatttggcatattttgtggactcagtcaagcaaccacagtctgttaatcatttctctatgctcagatgtcagatcctcttgttattagtgtgtcttgttctgcacagtgcaggagactttattcctttggaaaattcactgttccacaaacagcaggctgaatggcctcgcctctagattgacgtgggccagcctccttgagacacacctggcacccgtcatcggccagcggtggatgctgcataatccacctgggtacttcagccttgcgtttccacagccttcagcctgttctagaacgatcactgccttacccctgctgctgcagtggtgtgagtcgtttcacggctgatgtccctcgggggattaaaggatctaaagagaaaatggcacctggttgtcttcgtgctgtgtctcatgggtttccatagtgataaagacaaggaaacgctgcaggggccacaggcacaggctgatatttaaagatctttgcttgcagccctccgtcctgctgaaaacccccataagccagtgaacacagagcagctagaggctcctcctctgctggcttagggtcagaagtacctcacagtggttgtggacatggaagagttttgtcaacacaacactttgtccccgctccgggagatgagtcagatggtggcttgagttgtcacttggtcccctccgcccctcgggtggccccctttgccacgtccccttagcttagtgatcaggtgtgagagtggccatttccttacctttgatccctgtaaagcagaaaggactcctttgacaggcgacaaactactgtggtgagcagaatgatttcctttttcaagacaacacctgcctggcttctattaatgtgtgctggccatgatattgccccaaatccgccccactgaagtgttccctaaggaacagcatttctctgctcctcagtcaacccccgtagcctagagcagtgtcacaagcttcagtaaggccagtcagctggaagtcagtctaccgtatagtaacactgtatgtcagtctacagaccacactctagttgttttccatgaaaggtatacaaatgaagaattttctagcaaaacatgtttttaaccatcagtgctcaattgcattttcttcctttcgcagccagtcagtctttcaaactattgacagtaagataattctcacgttcacacctggtggcaggcttcactgtagggacggacattgcagttacaccacgattccttcctcttcactggctcgaggtaaacccttttcaaggaaaaacaactctaggatttcttttttctgtgtacgtagaccagtcccatcagtgtataatctctctctcacacgcctctctccaatagacagcttgtatttgcagtatttcatatttataaatatgcgtttatttaaaaggagaacaaaagcttgactctgattcacagttttgtatgtagctggtttgacgtagtcttttgtattttccctgccgaagtgaattgttggagaatgtaaaccgcctccacgtggcggcagacttcctaaggccccagctcgctggcctcgcgctgggcggctgggaattccacctgagaacaagtcccgcaaaccggggacggaaggacatttgacttttatttttgtatttaattgacatgaatgtaaaggggacagctcagggttgttttggagcctgttgactttgtatctctgcctgtgattttcttttctaaatgaaactccatgtagcaaccaggacgaagttgagaaggaaaacgccaaatgctttggttattagagtttaataggtaagctctgttacactaggtgttagagttccagaatgttcttttgtttgctaaaccttgaagaaacatgtgcctcagcctagatgttttgtcttctcttttctgcacttaatacctgacagtatgaccgatctctgcgcctttctgggggcgggcaagctggcggtagatttgtgatgtcacagtgcaaactgcagtgactgtaaattggcctggcgtgtataaacgttttcagggaatgcagaaggtattaatgaagagacaaaacctttattccatgtgctttgcttcattctgtacatagctctttggctcgtgaacctaattgtaaactttcaggtatttttgtacaaataagggactgatgttctgtttcttgtaattagaaataaacattaatacagtgttcttcattttc

SEQ ID NO: 154787 - DNA, 2289 bp, Artificial Sequence
  derived and/or modified sequence
gaagcgagctgcggccgggcgggctcggcgctcggagacccggtggagcccaaagtttccgcgcagcccctgggtggcggcagcgccggcggcgcggggcgcccgggacagtcttgagcgccggcctcgccccgcggggacccgcgcccgccgccggccacgccgagtgtcgcccgcagccacgcggaggcggcggggagccgcgcgcggcaggacaaggtggagcagacacctcgcagtcaacaagacccggcaggaccaggactccccgcacagtctgaccgacttgcgaatcaccaggaggatgatgtggacctggaagccctggtgaacgatatgaatgcatccctggagagcctgtactcggcctgcagcatgcagtcagacacggtgcccctcctgcagaatggccagcatgcccgcagccagcctcgggcttcaggccctcctcggtccatccagccacaggtgtccccgaggcagagggtgcagcgctcccagcctgtgcacatcctcgctgtcaggcgccttcaggaggaagaccagcagtttagaacctcatctctgccggccatccccaatccttttcctgaactctgtggccctgggagcccccctgtgctcacgccgggttctttacctccgagccaggccgccgcaaagcaggatgttaaagtctttagtgaagatgggacaagcaaagtggtggagattctagcagacatgacagccagagacctgtgccaattgctggtttacaaaagtcactgtgtggatgacaacagctggacactagtggagcaccacccgcacctaggattagagaggtgcttggaagaccatgagctggtggtccaggtggagagtaccatggccagtgagagtaaatttctattcaggaagaattacgcaaaatacgagttctttaaaaatcccatgaatttcttcccagaacagatggttacttggtgccagcagtcaaatggcagtcaaacccagcttttgcagaattttctgaactccagtagttgtcctgaaattcaagggtttttgcatgtgaaagagctgggaaagaaatcatggaaaaagctgtatgtgtgtttgcggagatctggcctttattgctccaccaagggaacttcaaaggaacccagacacctgcagctgctggccgacctggaggacagcaacatcttctccctgatcgctggcaggaagcagtacaacgcccctacagaccacgggctctgcataaagccaaacaaagtcaggaatgaaactaaagagctgaggttgctctgtgcagaggacgagcaaaccaggacgtgctggatgacagcgttcagactcctcaagtatggaatgctcctttaccagaattaccgaatccctcagcagaggaaggccttgctgtccccgttctcgacgccagtgcgcagtgtctccgagaactccctcgtggcaatggatttttctgggcaaacaggacgcgtgatagagaatccggcagaggcccagagcgcagccctggaggagggccacgcctggaggaagcgaagcacacggatgaacatcctaggtagccaaagtcccctccacccttctaccctaagtacagtgattcacaggacacagcactggtttcacgggaggatctccagggaggaatcccacaggatcattaaacagcaagggctcgtggatgggctttttctcctccgtgacagccagagtaatccaaaggcatttgtactcacactgtgtcatcaccagaaaattaaaaatttccagatcttaccttgcgaggacgacgggcagacgttcttcagcctagatgacgggaacaccaaattctctgacctgatccagctggttgacttttaccagctgaacaaaggagtcctgccttgcaaactcaagcaccactgcatccgagtggccttatgaccgcagatgtcctctcggctgaagactggaggaagtgaacactggagtgaagaagcggtctgtgcgttggtgaagaacacacatcgattctgcacctggggacccagagcgagatgggtttgttcggtgccagccgaccaagattgactagtttgttggacttaaacgacgatttgctgctgtgaacccagcagggtcgcctccctctgcatcggccaaattggggagggcatggaagatccagcggaaagttgaaaataaactggaatgatcatcttggcttgggccgcttaggaacaagaaccggagagaagtgattggaaatgaactcttgccctggaa

SEQ ID NO: 154788 - DNA, 4760 bp, Artificial Sequence
  derived and/or modified sequence
accgactctgtgaattgggtaccttcatgatacccattttataaatgagaaaactgaggtttttactatatgctggtcatcatgctgaggactttacttggattttctctcctgccaatgctacgcggtggggaccttcatgttctcccctttgcagatgagattatcaaagcagaaaaagaccatctctcctactgagtaacagaggaaaccagggcttgcagatattgaggatgatgtggacctggaagccctggtgaacgatatgaatgcatccctggagagcctgtactcggcctgcagcatgcagtcagacacggtgcccctcctgcagaatggccagcatgcccgcagccagcctcgggcttcaggccctcctcggtccatccagccacaggtgtccccgaggcagagggtgcagcgctcccagcctgtgcacatcctcgctgtcaggcgccttcaggaggaagaccagcagtttagaacctcatctctgccggccatccccaatccttttcctgaactctgtggccctgggagcccccctgtgctcacgccgggttctttacctccgagccaggccgccgcaaagcaggatgttaaagtctttagtgaagatgggacaagcaaagtggtggagattctagcagacatgacagccagagacctgtgccaattgctggtttacaaaagtcactgtgtggatgacaacagctggacactagtggagcaccacccgcacctaggattagagaggtgcttggaagaccatgagctggtggtccaggtggagagtaccatggccagtgagagtaaatttctattcaggaagaattacgcaaaatacgagttctttaaaaatcccatgaatttcttcccagaacagatggttacttggtgccagcagtcaaatggcagtcaaacccagcttttgcagaattttctgaactccagtagttgtcctgaaattcaagggtttttgcatgtgaaagagctgggaaagaaatcatggaaaaagctgtatgtgtgtttgcggagatctggcctttattgctccaccaagggaacttcaaaggaacccagacacctgcagctgctggccgacctggaggacagcaacatcttctccctgatcgctggcaggaagcagtacaacgcccctacagaccacgggctctgcataaagccaaacaaagtcaggaatgaaactaaagagctgaggttgctctgtgcagaggacgagcaaaccaggacgtgctggatgacagcgttcagactcctcaagtatggaatgctcctttaccagaattaccgaatccctcagcagaggaaggccttgctgtccccgttctcgacgccagtgcgcagtgtctccgagaactccctcgtggcaatggatttttctgggcaaacaggacgcgtgatagagaatccggcagaggcccagagcgcagccctggaggagggccacgcctggaggaagcgaagcacacggatgaacatcctaggtagccaaagtcccctccacccttctaccctaagtacagtgattcacaggacacagcactggtttcacgggaggatctccagggaggaatcccacaggatcattaaacagcaagggctcgtggatgggctttttctcctccgtgacagccagagtaatccaaaggcatttgtactcacactgtgtcatcaccagaaaattaaaaatttccagatcttaccttgcgaggacgacgggcagacgttcttcagcctagatgacgggaacaccaaattctctgacctgatccagctggttgacttttaccagctgaacaaaggagtcctgccttgcaaactcaagcaccactgcatccgagtggccttatgaccgcagatgtcctctcggctgaagactggaggaagtgaacactggagtgaagaagcggtctgtgcgttggtgaagaacacacatcgattctgcacctggggacccagagcgagatgggtttgttcggtgccagccgaccaagattgactagtttgttggacttaaacgacgatttgctgctgtgaacccagcagggtcgcctccctctgcatcggccaaattggggagggcatggaagatccagcggaaagttgaaaataaactggaatgatcatcttggcttgggccgcttaggaacaagaaccggagagaagtgattggaaatgaactcttgccctggaataatcttgacaattaaaactgatatgtttactttttttgtattgatcacttttttgcactccttctttgttttcaatattgtattcagcctattgtaggagggggatgtggcgtttcaactcatataatacagaaagagttttgaatgggcagatttcaaactgaatatgggtccccaaatgttcccagagggtcctccacaccctctgccgactaccacggtgtggattcagctcccaaatgacaaacccagcccttcccagtatacttgaaaagctttcttgttaaaataaaaggtgtcactgtggtaggcatttggcatattttgtggactcagtcaagcaaccacagtctgttaatcatttctctatgctcagatgtcagatcctcttgttattagtgtgtcttgttctgcacagtgcaggagactttattcctttggaaaattcactgttccacaaacagcaggctgaatggcctcgcctctagattgacgtgggccagcctccttgagacacacctggcacccgtcatcggccagcggtggatgctgcataatccacctgggtacttcagccttgcgtttccacagccttcagcctgttctagaacgatcactgccttacccctgctgctgcagtggtgtgagtcgtttcacggctgatgtccctcgggggattaaaggatctaaagagaaaatggcacctggttgtcttcgtgctgtgtctcatgggtttccatagtgataaagacaaggaaacgctgcaggggccacaggcacaggctgatatttaaagatctttgcttgcagccctccgtcctgctgaaaacccccataagccagtgaacacagagcagctagaggctcctcctctgctggcttagggtcagaagtacctcacagtggttgtggacatggaagagttttgtcaacacaacactttgtccccgctccgggagatgagtcagatggtggcttgagttgtcacttggtcccctccgcccctcgggtggccccctttgccacgtccccttagcttagtgatcaggtgtgagagtggccatttccttacctttgatccctgtaaagcagaaaggactcctttgacaggcgacaaactactgtggtgagcagaatgatttcctttttcaagacaacacctgcctggcttctattaatgtgtgctggccatgatattgccccaaatccgccccactgaagtgttccctaaggaacagcatttctctgctcctcagtcaacccccgtagcctagagcagtgtcacaagcttcagtaaggccagtcagctggaagtcagtctaccgtatagtaacactgtatgtcagtctacagaccacactctagttgttttccatgaaaggtatacaaatgaagaattttctagcaaaacatgtttttaaccatcagtgctcaattgcattttcttcctttcgcagccagtcagtctttcaaactattgacagtaagataattctcacgttcacacctggtggcaggcttcactgtagggacggacattgcagttacaccacgattccttcctcttcactggctcgaggtaaacccttttcaaggaaaaacaactctaggatttcttttttctgtgtacgtagaccagtcccatcagtgtataatctctctctcacacgcctctctccaatagacagcttgtatttgcagtatttcatatttataaatatgcgtttatttaaaaggagaacaaaagcttgactctgattcacagttttgtatgtagctggtttgacgtagtcttttgtattttccctgccgaagtgaattgttggagaatgtaaaccgcctccacgtggcggcagacttcctaaggccccagctcgctggcctcgcgctgggcggctgggaattccacctgagaacaagtcccgcaaaccggggacggaaggacatttgacttttatttttgtatttaattgacatgaatgtaaaggggacagctcagggttgttttggagcctgttgactttgtatctctgcctgtgattttcttttctaaatgaaactccatgtagcaaccaggacgaagttgagaaggaaaacgccaaatgctttggttattagagtttaataggtaagctctgttacactaggtgttagagttccagaatgttcttttgtttgctaaaccttgaagaaacatgtgcctcagcctagatgttttgtcttctcttttctgcacttaatacctgacagtatgaccgatctctgcgcctttctgggggcgggcaagctggcggtagatttgtgatgtcacagtgcaaactgcagtgactgtaaattggcctggcgtgtataaacgttttcagggaatgcagaaggtattaatgaagagacaaaacctttattccatgtgctttgcttcattctgtacatagctctttggctcgtgaacctaattgtaaactttcaggtatttttgtacaaataagggactgatgttctgtttcttgtaattagaaataaacattaatacagtgttcttca

SEQ ID NO: 154789 - DNA, 2700 bp, Artificial Sequence
  derived and/or modified sequence
ctttccagctttggcgctgaccacaatgctgagcaggaagcagcagctgcaggcccagtgactggtagctcagtgaccagcagcccagtgaccggcagccaggtcctcacctgggtcctctcagtgaagccagggtggccgccccagcagacagtgctacagagccaactcctgacagatattctggaggaaggtgtgaacgcaactttgcctcccagggaacaaacatcctccttctaagtggtagatgtgggtgagctgaccctgctggagtctgtcccctgggctaccctctgcttccccccattgtgagtggtccgtgaagcacagcgttgaccagacctaaacctgtttgctcccaggacaaggtggagcagacacctcgcagtcaacaagacccggcaggaccaggactccccgcacagtctgaccgacttgcgaatcaccaggaggatgatgtggacctggaagccctggtgaacgatatgaatgcatccctggagagcctgtactcggcctgcagcatgcagtcagacacggtgcccctcctgcagaatggccagcatgcccgcagccagcctcgggcttcaggccctcctcggtccatccagccacaggtgtccccgaggcagagggtgcagcgctcccagcctgtgcacatcctcgctgtcaggcgccttcaggaggaagaccagcagtttagaacctcatctctgccggccatccccaatccttttcctgaactctgtggccctgggagcccccctgtgctcacgccgggttctttacctccgagccaggccgccgcaaagcaggatgttaaagtctttagtgaagatgggacaagcaaagtggtggagattctagcagacatgacagccagagacctgtgccaattgctggtttacaaaagtcactgtgtggatgacaacagctggacactagtggagcaccacccgcacctaggattagagaggtgcttggaagaccatgagctggtggtccaggtggagagtaccatggccagtgagagtaaatttctattcaggaagaattacgcaaaatacgagttctttaaaaatcccatgaatttcttcccagaacagatggttacttggtgccagcagtcaaatggcagtcaaacccagcttttgcagaattttctgaactccagtagttgtcctgaaattcaagggtttttgcatgtgaaagagctgggaaagaaatcatggaaaaagctgtatgtgtgtttgcggagatctggcctttattgctccaccaagggaacttcaaaggaacccagacacctgcagctgctggccgacctggaggacagcaacatcttctccctgatcgctggcaggaagcagtacaacgcccctacagaccacgggctctgcataaagccaaacaaagtcaggaatgaaactaaagagctgaggttgctctgtgcagaggacgagcaaaccaggacgtgctggatgacagcgttcagactcctcaagtatggaatgctcctttaccagaattaccgaatccctcagcagaggaaggccttgctgtccccgttctcgacgccagtgcgcagtgtctccgagaactccctcgtggcaatggatttttctgggcaaacaggacgcgtgatagagaatccggcagaggcccagagcgcagccctggaggagggccacgcctggaggaagcgaagcacacggatgaacatcctaggtagccaaagtcccctccacccttctaccctaagtacagtgattcacaggacacagcactggtttcacgggaggatctccagggaggaatcccacaggatcattaaacagcaagggctcgtggatgggctttttctcctccgtgacagccagagtaatccaaaggcatttgtactcacactgtgtcatcaccagaaaattaaaaatttccagatcttaccttgcgaggacgacgggcagacgttcttcagcctagatgacgggaacaccaaattctctgacctgatccagctggttgacttttaccagctgaacaaaggagtcctgccttgcaaactcaagcaccactgcatccgagtggccttatgaccgcagatgtcctctcggctgaagactggaggaagtgaacactggagtgaagaagcggtctgtgcgttggtgaagaacacacatcgattctgcacctggggacccagagcgagatgggtttgttcggtgccagccgaccaagattgactagtttgttggacttaaacgacgatttgctgctgtgaacccagcagggtcgcctccctctgcatcggccaaattggggagggcatggaagatccagcggaaagttgaaaataaactggaatgatcatcttggcttgggccgcttaggaacaagaaccggagagaagtgattggaaatgaactcttgccctggaataatcttgacaattaaaactgatatgtttactttttttgtattgatcacttttttgcactccttctttgttttcaatattgtattcagcctattgtaggagggggatgtggcgtttcaactcatataatacagaaagagttttgaatgggcagatttcaaactgaatatgggtccccaaatgttcccagagggtcctccacaccctctgccgactaccacggtgtggattcagctcccaaatgacaaacccagcccttccca

SEQ ID NO: 154790 - DNA, 2279 bp, Artificial Sequence
  derived and/or modified sequence
cagctttggcgctgaccacaatgctgagcaggaagcagcagctgcaggcccagtgactggtagctcagtgaccagcagcccagtgaccggcagccaggtcctcacctgggtcctctcagtgaagccagggtggccgccccagcagacagtgctacagagccaactcctgacaggacaaggtggagcagacacctcgcagtcaacaagacccggcaggaccaggactccccgcacagtctgaccgacttgcgaatcaccaggaggatgatgtggacctggaagccctggtgaacgatatgaatgcatccctggagagcctgtactcggcctgcagcatgcagtcagacacggtgcccctcctgcagaatggccagcatgcccgcagccagcctcgggcttcaggccctcctcggtccatccagccacaggtgtccccgaggcagagggtgcagcgctcccagcctgtgcacatcctcgctgtcaggcgccttcaggaggaagaccagcagtttagaacctcatctctgccggccatccccaatccttttcctgaactctgtggccctgggagcccccctgtgctcacgccgggttctttacctccgagccaggccgccgcaaagcaggatgttaaagtctttagtgaagatgggacaagcaaagtggtggagattctagcagacatgacagccagagacctgtgccaattgctggtttacaaaagtcactgtgtggatgacaacagctggacactagtggagcaccacccgcacctaggattagagaggtgcttggaagaccatgagctggtggtccaggtggagagtaccatggccagtgagagtaaatttctattcaggaagaattacgcaaaatacgagttctttaaaaatcccatgaatttcttcccagaacagatggttacttggtgccagcagtcaaatggcagtcaaacccagcttttgcagaattttctgaactccagtagttgtcctgaaattcaagggtttttgcatgtgaaagagctgggaaagaaatcatggaaaaagctgtatgtgtgtttgcggagatctggcctttattgctccaccaagggaacttcaaaggaacccagacacctgcagctgctggccgacctggaggacagcaacatcttctccctgatcgctggcaggaagcagtacaacgcccctacagaccacgggctctgcataaagccaaacaaagtcaggaatgaaactaaagagctgaggttgctctgtgcagaggacgagcaaaccaggacgtgctggatgacagcgttcagactcctcaagtatggaatgctcctttaccagaattaccgaatccctcagcagaggaaggccttgctgtccccgttctcgacgccagtgcgcagtgtctccgagaactccctcgtggcaatggatttttctgggcaaacaggacgcgtgatagagaatccggcagaggcccagagcgcagccctggaggagggccacgcctggaggaagcgaagcacacggatgaacatcctaggtagccaaagtcccctccacccttctaccctaagtacagtgattcacaggacacagcactggtttcacgggaggatctccagggaggaatcccacaggatcattaaacagcaagggctcgtggatgggctttttctcctccgtgacagccagagtaatccaaaggcatttgtactcacactgtgtcatcaccagaaaattaaaaatttccagatcttaccttgcgaggacgacgggcagacgttcttcagcctagatgacgggaacaccaaattctctgacctgatccagctggttgacttttaccagctgaacaaaggagtcctgccttgcaaactcaagcaccactgcatccgagtggccttatgaccgcagatgtcctctcggctgaagactggaggaagtgaacactggagtgaagaagcggtctgtgcgttggtgaagaacacacatcgattctgcacctggggacccagagcgagatgggtttgttcggtgccagccgaccaagattgactagtttgttggacttaaacgacgatttgctgctgtgaacccagcagggtcgcctccctctgcatcggccaaattggggagggcatggaagatccagcggaaagttgaaaataaactggaatgatcatcttggcttgggccgcttaggaacaagaaccggagagaagtgattggaaatgaactcttgccctggaataatcttgacaattaaaactgatatgttta

SEQ ID NO: 154791 - DNA, 1785 bp, Artificial Sequence
  derived and/or modified sequence
atggccctggccggctgcccagacagcttcctgcaccacccctactaccaggacaaggtggagcagacccccaggagccagcaggaccctgctggccctggcctgcctgcccagagcgaccggctggccaaccaccaggaggatgatgtggacctggaggccctggtgaatgacatgaatgccagcctggagagcctgtacagcgcctgcagcatgcagagcgacacagtgcccctgctgcagaatggccagcacgcccggagccagccccgggccagcggccccccaagaagcatccagccccaggtgagcccccggcagagggtgcagaggagccagcctgtgcacatcctggccgtgcggcggctgcaggaggaggaccagcagttccgcaccagcagcctgcctgccatccccaaccccttccctgagctgtgtggccctggcagcccccctgtgctgaccccaggcagcctgccccccagccaggccgccgccaagcaggatgtgaaggtgttttctgaagatggcaccagcaaggtggtggagatcctggccgacatgacagcccgggacctgtgccagctgctggtgtacaagagccactgtgtggatgacaacagctggaccctggtggagcaccacccccacctgggcctggagcgctgcctggaggaccacgagctggtggtgcaggtggagagcaccatggccagcgagagcaagttcctgttcaggaagaactatgccaagtatgagttcttcaagaaccccatgaacttcttccctgagcagatggtgacctggtgccagcagagcaatggcagccagacccagctgctgcagaacttcctgaacagcagcagctgcccagagatccagggcttcctgcacgtgaaggagctgggcaagaagtcctggaagaagctgtatgtgtgcctgcggcgcagcggcctgtactgcagcaccaagggcaccagcaaggagcccaggcacctgcagctgctggccgacctggaggacagcaacatcttcagcctgattgctggcaggaagcagtacaatgcccccacagaccacggcctgtgcatcaagcccaacaaggtgagaaatgagaccaaggagctgcggctgctgtgtgccgaggatgagcagaccaggacctgctggatgacagccttccggctgctgaagtatggcatgctgctgtaccagaactaccgcatcccccagcagaggaaggccctgctgagccccttcagcacccctgtgcgctctgtgtctgagaacagcctggtggccatggacttcagcggccagacaggccgggtgattgagaacccagctgaggcccagagcgctgccctggaggagggccacgcctggaggaagaggagcaccaggatgaacatcctgggcagccagagccccctgcaccccagcaccctgagcaccgtcatccacaggacccagcactggttccacggccgcatcagccgggaggagagccaccgcatcatcaagcagcagggcctggtggatggcctcttcctgctgcgggacagccagagcaaccccaaggcctttgtgctgaccctgtgccaccaccagaagatcaagaacttccagatcctgccctgtgaagatgatggccagaccttcttcagcctggatgatggcaacaccaagttcagtgacctgatccagctggtggacttctaccagctgaacaagggcgtgctgccctgcaagctgaagcaccactgcatccgggtggccctgtag

SEQ ID NO: 154792 - DNA, 1785 bp, Artificial Sequence
  derived and/or modified sequence
atggccctggccggctgccccgacagcttcctgcaccacccctactatcaggacaaggtcgagcagaccccccgctcgcagcaggaccccgctgggcccgggctgcccgcccagtctgataggctcgccaaccaccaggaagatgacgtggacctggaggcgttagtgaacgatatgaatgcatctctggaaagcctgtattcagcatgcagtatgcagtcagatacggtgccactgctgcagaatgggcaacacgcgcgcagtcagccgcgagcttctgggcctccccgcagtatccagccccaggttagccccaggcagcgagttcaacggagccagcccgtccacatcctggccgtccggagactccaggaggaggatcagcagtttcgtaccagctctctgccagccatcccaaaccctttccccgagctgtgcgggcctggctcccctccagtactgactccaggcagtctgcctcccagtcaggcagccgccaagcaggatgtgaaggtgttctctgaagacggtaccagcaaagtcgtggagatcctcgcagacatgacagcgcgtgacctgtgtcagttgctggtctacaaaagccattgcgtggatgacaacagctggacattggttgagcaccaccctcatcttggactggaacgctgtcttgaagatcatgagcttgttgtccaggttgagagcaccatggcaagcgaatcgaagttcctgtttagaaaaaactatgcaaagtacgagttttttaaaaatccaatgaatttttttcctgagcagatggttacctggtgtcaacagagtaacgggtcccagactcagcttctccagaattttttgaactcatcctcttgccctgaaattcagggatttctgcatgtgaaagaattggggaagaagtcttggaagaagctatacgtatgcctccggcggagtggactgtattgttccactaaagggacaagtaaggagccaaggcatctgcagctcctggccgatctcgaagacagcaacatattcagtctgattgccggacgcaaacagtacaatgcccccacagaccacgggctgtgtatcaagccgaacaaggtgcggaatgagaccaaagagctcagactgttatgcgccgaagatgagcagacacgcacctgttggatgacagctttcaggctgttgaagtatggaatgttgctgtatcagaattataggatcccgcaacaacgtaaggccctccttagccccttctctacgcccgtgcgctccgtctcagagaactcgttggtcgctatggatttctctggtcagacgggccgcgtcattgagaatcctgccgaggctcagagcgctgccctcgaagagggtcatgcctggcgcaagcgaagcaccaggatgaacatcctcggatcacagtcacccctccatccatccacgctgagcacagtgattcatcggacccagcattggttccacgggagaatctccagggaggaaagccaccggatcattaagcagcagggtttggttgacggtctgttcttgctgcgcgattcacagtccaatcctaaggcgttcgtgttgaccctgtgtcaccaccagaagattaagaattttcagatcctcccctgtgaagacgatggtcaaaccttcttttccctagatgacggaaataccaagttcagtgatttaattcaattagtcgatttttatcaacttaataaaggcgtgttaccctgtaaattaaaacaccattgcattagggtagctttgtag

SEQ ID NO: 154793 - DNA, 1785 bp, Artificial Sequence
  derived and/or modified sequence
atggccctggccggctgccccgacagcttcctgcaccacccctactaccaggacaaggtagagcagactcccaggtcccaacaagaccctgccgggcccggcctaccagcccagagcgatcgactggcaaatcaccaggaagatgacgtggacctagaggcccttgtgaatgatatgaatgcctccctcgaaagcctgtactcagcctgttccatgcaatcagataccgtgccattgctgcagaatgggcagcacgcccggagccaacccagagctagtggacccccacggagcatccagccacaggtgtctccacgacagcgagttcagcggagccagccagtgcatattctcgcagttcggagacttcaggaagaagatcagcagtttcgcactagcagtttacccgcgatccctaacccttttcccgagctgtgcggccccggctccccgcctgtgctgaccccaggatcgctgccgccatctcaggccgctgccaagcaggacgtgaaggtgttttctgaagacgggacctcgaaagtcgtcgaaattttggcagatatgacagcgagagacctttgtcaattgctcgtctataaatcccactgtgtggacgacaacagctggacgctggtagagcatcatccccacttaggtctagagagatgcttggaggaccacgagctcgtagtgcaggtagaatccactatggcctcagagagcaagttcctgttccgcaagaactacgccaaatacgaattcttcaagaacccaatgaatttttttcctgaacaaatggtcacatggtgccagcagtctaatggctcgcagacacagctcctgcagaacttccttaatagctcctcatgccccgagatccagggattcttgcacgtcaaggagctagggaaaaagtcatggaaaaaactttacgtgtgtttgcggcggtctgggctctactgctccactaagggaacctctaaagaaccccggcacctgcagctgctggctgaccttgaggattcaaacatcttcagcctaatcgccgggagaaagcagtacaacgctccaacagatcacggcttgtgtataaaacctaataaggtgcggaacgagacaaaggaattacgactcctctgtgcagaggacgaacaaacgcgaacatgttggatgactgcctttcgcctgttgaagtatggaatgctactgtatcaaaattatagaatcccacaacagcgcaaggctctcttgtcccctttcagcacccctgttagatccgtcagcgagaattctctggtggctatggatttttcaggacagaccggcagggtgatcgaaaacccagccgaggcgcaatctgccgccttggaagaggggcatgcatggcgaaagcgatccacacggatgaacatcttggggagtcagtcaccgctccacccctcaacgctatccaccgtcatccatagaacacaacattggttccatggacggatcagccgggaggagagtcaccgtatcattaagcagcaaggactcgtggacggcctgttcctgctgcgagactcccaaagcaaccccaaggctttcgtactgaccttgtgtcaccaccagaagattaagaattttcagattctgccctgcgaggatgatggccagacattcttcagtcttgatgatgggaacactaagttttccgatctgattcagctcgtggacttttatcaactcaacaagggtgtactcccctgtaagctgaaacaccactgcatacgcgtggcgctttag

SEQ ID NO: 154794 - DNA, 1785 bp, Artificial Sequence
  derived and/or modified sequence
atggcattggccggatgccccgacagttttctacatcatccttattatcaggacaaagtggagcagacacccagaagccagcaggaccctgctggcccaggcctccctgcccagtctgatcgcctggcgaaccaccaggaggatgacgtggatttagaggcgttggttaacgacatgaacgcctcactggagtcactgtactcggcctgcagcatgcagagtgacactgtccctctgcttcagaacggtcaacacgccagaagtcagcctcgcgcttcaggtccacccaggagcatccaaccacaggtgtctcctcgccagcgggttcaacgctcccagcccgtgcacattctggcagtgaggagactccaggaagaggaccaacagttcagaacctcctctctaccagcaatccccaatcctttccctgagttgtgtgggcctggaagcccaccagttctgacccccggatcccttcccccttcccaagccgcagctaagcaggatgttaaggtgttctctgaagacggcacctcaaaagtcgtcgagattttggcggacatgacggcaagggacctgtgccagttgctcgtgtacaagtctcattgtgtggacgacaattcgtggaccctagttgagcaccacccacatttgggcctcgaaagatgtttggaggaccacgagctagtggtccaagtggagtccaccatggcatccgaaagcaagttcctgttccggaagaattacgccaaatatgagttcttcaagaatcctatgaactttttccccgaacagatggtgacctggtgccaacagtctaacggttctcagactcagcttctacaaaattttcttaatagctcgagttgcccggagatacaaggattcctccacgtcaaagagctgggcaaaaagtcctggaaaaagctgtatgtgtgtctgcgcaggtctgggctgtactgctctactaagggcacctcgaaagagcccaggcacctccaacttctggccgacctcgaagattcaaacatattctcgctgatagccggacggaaacagtataacgcacctaccgatcatgggctttgtattaaaccgaataaagttaggaacgagacaaaagagttacgactgctatgtgccgaggatgaacaaacccgcacttgttggatgaccgcgtttcgtctgctgaagtacggaatgctgctgtatcagaattaccgaatcccccagcaaaggaaggcattactgagtcctttctccactcccgtcagatcagtcagtgagaattcgctggttgccatggacttttcagggcaaaccggccgagtcatagagaaccccgctgaagcgcagtccgcggcactagaagaggggcacgcatggaggaaacgttcaactcggatgaatatactgggatcacagtcccccctacaccccagtactctgagcaccgtgatccatcgcacacagcactggtttcacggcagaatctccagggaggagtctcatcgaattataaagcagcaaggcctggttgacggcctgtttctgctccgggatagtcagagtaatccaaaggcctttgtccttactctttgtcaccatcaaaagattaagaattttcagatcctgccttgcgaagatgatgggcagacatttttttcacttgacgacggtaatactaagtttagcgacttgatccaactcgtggatttctatcaactgaacaaaggcgttctaccgtgtaagctcaaacatcactgcatccgagtcgccttgtag

SEQ ID NO: 154795 - DNA, 1785 bp, Artificial Sequence
  derived and/or modified sequence
atggccctagcaggatgcccagactcgtttttacaccacccttactaccaagacaaagtggaacagacaccacgttctcaacaggatcctgccggacccggactgcctgcccagagtgaccgtctggcgaatcaccaggaagatgatgtggacctcgaagcactggtgaacgatatgaacgctagtcttgagtctctatattctgcttgctcaatgcagtccgataccgtgcccctgctccagaacgggcagcacgccaggagccagccgcgagccagcggcccacctcgcagtattcagccgcaggtctccccaaggcaaagggtccagcgctcccagcctgtgcacatcttggcggtccggagactccaggaggaggatcagcagtttcgcacctcctcactcccagcgattcccaatcctttccccgaactttgcggcccaggaagtcctccagtgttaacacccggttccctacctccgtcccaggcggcagctaaacaggacgtgaaagtctttagcgaggatggcacttcaaaagtggtggagatcctagccgatatgaccgcccgtgatctgtgccagcttctggtgtacaaaagtcactgtgtggatgacaacagctggaccttagtcgaacaccaccctcaccttgggctcgagcggtgtctcgaggatcatgagcttgtagtgcaggtggaatcgacaatggcctcggagtccaagtttctgttcaggaaaaattacgctaagtacgaattttttaagaaccccatgaacttctttccagaacaaatggttacatggtgtcagcagtccaacggatcacagacacagctgctccagaacttcctcaacagtagcagttgccctgagatccagggcttcctccatgtgaaagaactaggcaagaaatcttggaagaagctgtacgtgtgtctgcgaaggagcgggctttattgctctacgaaaggtacctccaaggagcccaggcacctgcagttactcgccgacctcgaggactccaatatttttagtctgatcgctggacgcaagcaatacaatgctcccactgatcacggcctgtgcatcaagccaaataaagtgcgtaatgagaccaaggaactgaggctgctttgcgctgaggatgagcagacacgcacctgctggatgaccgctttccggttgttgaagtatggcatgctactctatcaaaattaccggatccctcagcagcgaaaggcactgctctccccattctccacccctgtgcggtctgtctcggaaaattccctagtagcaatggacttctctggccagaccggacgtgtcatcgagaatcccgctgaggcgcagtccgcagcactcgaagagggacatgcgtggagaaaacggagcaccaggatgaacatactcggttcccagagccctctccacccctccaccttgtcaacagttatacatagaactcagcactggttccacggccgtatttcccgcgaggagagtcaccgcattatcaagcagcaggggcttgtggacggcctgtttctgctgagagattcccaaagcaatcccaaggcctttgttttgacactgtgccaccaccagaaaattaaaaattttcaaatcttaccctgtgaagatgacggacagacattctttagcctcgacgatggcaatacaaaatttagcgatctgatccaattggtggacttttatcagctcaataagggggtgttgccttgcaagctcaaacaccactgtatccgagttgcactttag

SEQ ID NO: 154796 - protein, 1077 aa, Artificial Sequence
  derived and/or modified sequence
MDTDSQRSHLSSFTMKLMDKFHSPKIKRTPSKKGKPAEVSVKIPEKPVNKEATDRFLPEGYPLPLDLEQQAVEFMSTSAVASRSQRQKNLSWLEEKEKEVVSALRYFKTIVDKMAIDKKVLEMLPGSASKVLEAILPLVQNDPRIQHSSALSSCYSRVYQSLANLIRWSDQVMLEGVNSEDKEMVTTVKGVIKAVLDGVKELVRLTIEKQGRPSPTSPVKPSSPASKPDGPAELPLTDREVEILNKTTGMSQSTELLPDATDEEVAPPKPPLPGIRVVDNSPPPALPPKKRQSAPSPTRVAVVAPMSRATSGSSLPVGINRQDFDVDCYAQRRLSGGSHSYGGESPRLSPCSSIGKLSKSDEQLSSLDRDSGQCSRNTSCETLDHYDPDYEFLQQDLSNADQIPQQTAWNLSPLPESLGESGSPFLGPPFQLPLGGHPQPDGPLAPGQQTDTPPALPEKKRRSAASQTADGSGCRVSYERHPSQYDNISGEDLQSTAPIPSVPYAPFAAILPFQHGGSSAPVEFVGDFTAPESTGDPEKPPPLPEKKNKHMLAYMQLLEDYSEPQPSMFYQTPQNEHIYQQKNKLLMEVYGFSDSFSGVDSVQELAPPPALPPKQRQLEPPAGKDGHPRDPSAVSGVPGKDSRDGSERAPKSPDALESAQSEEEVDELSLIDHNEIMSRLTLKQEGDDGPDVRGGSGDILLVHATETDRKDLVLYCEAFLTTYRTFISPEELIKKLQYRYEKFSPFADTFKKRVSKNTFFVLVRVVDELCLVELTEEILKLLMELVFRLVCNGELSLARVLRKNILDKVDQKKLLRCATSSQPLAARGVAARPGTLHDFHSHEIAEQLTLLDAELFYKIEIPEVLLWAKEQNEEKSPNLTQFTEHFNNMSYWVRSIIMLQEKAQDRERLLLKFIKIMKHLRKLNNFNSYLAILSALDSAPIRRLEWQKQTSEGLAEYCTLIDSSSSFRAYRAALSEVEPPCIPYLGLILQDLTFVHLGNPDYIDGKVNFSKRWQQFNILDSMRCFQQAHYDMRRNDDIINFFNDFSDHLAEEALWELSLKIKPRNITRRKTDREEKT

SEQ ID NO: 154797 - DNA, 3234 bp, Artificial Sequence
  derived and/or modified sequence
atggacaccgacagccagagaagccacctgagcagcttcaccatgaagctgatggacaagttccacagccccaagatcaagagaacccccagcaagaagggcaagcccgccgaggtgagcgtgaagatccccgagaagcccgtgaacaaggaggccaccgacagattcctgcccgagggctaccccctgcccctggacctggagcagcaggccgtggagttcatgagcaccagcgccgtggccagcagaagccagagacagaagaacctgagctggctggaggagaaggagaaggaggtggtgagcgccctgagatacttcaagaccatcgtggacaagatggccatcgacaagaaggtgctggagatgctgcccggcagcgccagcaaggtgctggaggccatcctgcccctggtgcagaacgaccccagaatccagcacagcagcgccctgagcagctgctacagcagagtgtaccagagcctggccaacctgatcagatggagcgaccaggtgatgctggagggcgtgaacagcgaggacaaggagatggtgaccaccgtgaagggcgtgatcaaggccgtgctggacggcgtgaaggagctggtgagactgaccatcgagaagcagggcagacccagccccaccagccccgtgaagcccagcagccccgccagcaagcccgacggccccgccgagctgcccctgaccgacagagaggtggagatcctgaacaagaccaccggcatgagccagagcaccgagctgctgcccgacgccaccgacgaggaggtggccccccccaagccccccctgcccggcatcagagtggtggacaacagccccccccccgccctgccccccaagaagagacagagcgcccccagccccaccagagtggccgtggtggcccccatgagcagagccaccagcggcagcagcctgcccgtgggcatcaacagacaggacttcgacgtggactgctacgcccagagaagactgagcggcggcagccacagctacggcggcgagagccccagactgagcccctgcagcagcatcggcaagctgagcaagagcgacgagcagctgagcagcctggacagagacagcggccagtgcagcagaaacaccagctgcgagaccctggaccactacgaccccgactacgagttcctgcagcaggacctgagcaacgccgaccagatcccccagcagaccgcctggaacctgagccccctgcccgagagcctgggcgagagcggcagccccttcctgggcccccccttccagctgcccctgggcggccacccccagcccgacggccccctggcccccggccagcagaccgacaccccccccgccctgcccgagaagaagagaagaagcgccgccagccagaccgccgacggcagcggctgcagagtgagctacgagagacaccccagccagtacgacaacatcagcggcgaggacctgcagagcaccgcccccatccccagcgtgccctacgcccccttcgccgccatcctgcccttccagcacggcggcagcagcgcccccgtggagttcgtgggcgacttcaccgcccccgagagcaccggcgaccccgagaagcccccccccctgcccgagaagaagaacaagcacatgctggcctacatgcagctgctggaggactacagcgagccccagcccagcatgttctaccagaccccccagaacgagcacatctaccagcagaagaacaagctgctgatggaggtgtacggcttcagcgacagcttcagcggcgtggacagcgtgcaggagctggcccccccccccgccctgccccccaagcagagacagctggagccccccgccggcaaggacggccaccccagagaccccagcgccgtgagcggcgtgcccggcaaggacagcagagacggcagcgagagagcccccaagagccccgacgccctggagagcgcccagagcgaggaggaggtggacgagctgagcctgatcgaccacaacgagatcatgagcagactgaccctgaagcaggagggcgacgacggccccgacgtgagaggcggcagcggcgacatcctgctggtgcacgccaccgagaccgacagaaaggacctggtgctgtactgcgaggccttcctgaccacctacagaaccttcatcagccccgaggagctgatcaagaagctgcagtacagatacgagaagttcagccccttcgccgacaccttcaagaagagagtgagcaagaacaccttcttcgtgctggtgagagtggtggacgagctgtgcctggtggagctgaccgaggagatcctgaagctgctgatggagctggtgttcagactggtgtgcaacggcgagctgagcctggccagagtgctgagaaagaacatcctggacaaggtggaccagaagaagctgctgagatgcgccaccagcagccagcccctggccgccagaggcgtggccgccagacccggcaccctgcacgacttccacagccacgagatcgccgagcagctgaccctgctggacgccgagctgttctacaagatcgagatccccgaggtgctgctgtgggccaaggagcagaacgaggagaagagccccaacctgacccagttcaccgagcacttcaacaacatgagctactgggtgagaagcatcatcatgctgcaggagaaggcccaggacagagagagactgctgctgaagttcatcaagatcatgaagcacctgagaaagctgaacaacttcaacagctacctggccatcctgagcgccctggacagcgcccccatcagaagactggagtggcagaagcagaccagcgagggcctggccgagtactgcaccctgatcgacagcagcagcagcttcagagcctacagagccgccctgagcgaggtggagcccccctgcatcccctacctgggcctgatcctgcaggacctgaccttcgtgcacctgggcaaccccgactacatcgacggcaaggtgaacttcagcaagagatggcagcagttcaacatcctggacagcatgagatgcttccagcaggcccactacgacatgagaagaaacgacgacatcatcaacttcttcaacgacttcagcgaccacctggccgaggaggccctgtgggagctgagcctgaagatcaagcccagaaacatcaccagaagaaagaccgacagagaggagaagacctag

SEQ ID NO: 154798 - DNA, 3234 bp, Artificial Sequence
  derived and/or modified sequence
atggatactgattcacaacgctcacatttgtcttcattcaccatgaagctgatggacaagtttcacagccccaagatcaagcggacaccctccaaaaagggaaaacccgctgaagtttcagttaagatccccgagaaacccgtgaacaaggaagctactgataggttcctgcctgaggggtacccccttccattagacctggagcaacaggctgtcgagttcatgagcacatctgcggtcgcctcaaggagtcagaggcaaaagaatctgagttggctggaggagaaggagaaagaggtcgtgtccgcgttgagatatttcaaaaccatagtcgacaagatggctatagacaagaaggtgctggagatgctgcccggatcagcctccaaagtgctggaggcaatcttgcccttagtccaaaacgacccccggattcagcactcctctgccctctctagctgctattccagggtgtaccagtccctcgccaacctgatcaggtggagcgaccaggtgatgcttgaaggcgtcaattcagaggacaaggaaatggtgaccaccgtgaaaggggtaattaaagccgtgctagacggagtcaaagagctcgtgagattgactatcgagaaacaggggaggcccagccccacttcgccggtgaagccatcatcacccgcgagcaagcccgatggacccgctgaattaccgctcaccgacagggaagtggaaattctgaacaagacaactggaatgtcccagagcaccgagctactcccagatgcgacagacgaagaggtggccccaccaaagccccctctaccagggatccgcgtggtcgacaatagtccacctccagcactgcctcccaaaaaacggcagagcgctcctagccccaccagggtggcggtggtggctcctatgagccgcgctaccagcggctcctccttgcccgttggcattaacaggcaagatttcgacgtggattgttatgcccagcggcgtctttcagggggaagccacagctacggaggcgagtcacccaggctaagcccctgtagcagcatcgggaagctgtctaagtctgatgagcagctctcttctctcgatcgggactcggggcagtgctcacgtaataccagttgcgagacattggatcattatgatcccgactatgagtttctccagcaggatctgagtaatgctgaccaaattcctcagcagactgcttggaacctgagccctctcccagaatcactgggcgagtccggcagcccattcctgggtcccccttttcagcttccacttggcggacatccccagcccgacgggccgctggcccccggacagcaaactgacactcctcctgccctgccggaaaaaaagagacgctctgctgccagccagaccgccgatggcagtggctgccgtgtgtcgtatgaacggcacccatctcagtacgataacatatcaggcgaagacttgcagtctaccgcacctataccaagtgtcccatacgcaccgttcgctgccatcttgcctttccagcatggtggcagctcagccccagttgagttcgtgggcgacttcactgcgcccgagagtacaggagaccccgagaagcctcctccactcccagagaagaagaataaacatatgttagcttacatgcaactgctggaagattacagcgagccccaaccatctatgttctaccagactcctcagaacgaacatatctaccagcaaaagaataagctgctgatggaggtatatggcttctccgattctttttctggggtggatagtgttcaggaactggcccctccgccggccctgcctcctaagcagcgacaactggagcctcctgccggaaaggacggacaccctcgggatccgtcggcagtctcgggcgtgcctgggaaagatagtagggatggatccgagagagccccaaagtcccctgatgccttagagtccgcgcagtccgaagaagaagtggacgagctcagcctcattgaccataatgagatcatgagccggctgaccctgaaacaggaaggcgatgacgggcccgacgttcgaggcggaagcggggacattctactagtgcatgcaactgaaaccgatcgtaaggacttggtgctctattgcgaagcgttcctcactacttaccgaacgttcatatcccctgaggagcttatcaagaagctgcagtacaggtacgaaaagttttcccctttcgcagatacctttaaaaagcgtgtgtccaagaatactttctttgttctcgtgagggtggtggatgagctgtgtttggtggagctgaccgaggagatactcaagctactcatggaactcgtcttccggttggtgtgcaatggagagctgagtttggctcgagtccttcgcaaaaatatcctggataaagtcgaccaaaagaagttactgcggtgtgccaccagttcacaaccacttgctgcccggggagtcgcggccaggccagggactctgcacgacttccatagccatgaaatcgccgaacagctcactctgcttgacgccgagttattctataagatcgaaatcccagaggtgcttctgtgggcaaaggagcagaacgaggagaagtcaccaaatctgacacagttcaccgaacactttaacaatatgagctactgggttagaagcattataatgctgcaagagaaagctcaggatagggagagactgcttctgaaatttattaagatcatgaaacacttaagaaaactcaataactttaatagttaccttgcaatcctcagcgctttggattcagcacctatacgtagactcgaatggcagaaacaaacatctgaagggctggctgaatattgtacattgatcgatagttcatcttcatttagggcataccgtgccgccttgtccgaagtggaacccccttgtataccatacctgggtctgattctgcaggatctgacatttgtgcacttagggaatcctgattatatagatgggaaggtcaatttcagtaaaaggtggcagcagtttaatattcttgattcaatgcgatgctttcagcaagctcattacgacatgaggcggaacgacgatattataaacttcttcaacgatttttcagaccatctggcggaagaagccttgtgggaactaagtctcaaaataaaaccccgtaacattactcgtcgcaaaacagaccgggaagaaaagacttag

SEQ ID NO: 154799 - DNA, 3234 bp, Artificial Sequence
  derived and/or modified sequence
atggacacagactcccagagatcccacctgtccagctttactatgaagctgatggataaattccacagccccaaaatcaaacgcactccaagcaaaaagggaaagcccgccgaggttagcgtgaaaatccccgagaaacccgtgaacaaggaggcaacggatcgcttcttgcccgaaggataccctctgcccttggacctggagcagcaggcagtcgagtttatgtcaacatcagccgtcgccagccggtctcagaggcagaaaaacctctcttggctggaagaaaaggagaaagaagtggtctccgcgctccggtacttcaagaccattgttgacaaaatggccatcgataaaaaggtacttgaaatgctccctggcagcgcatccaaggtgctcgaagctatactgcccctggtacagaatgaccccaggattcagcactccagcgcactctcatcctgttactcccgggtttatcaaagtctggctaatctgatccgctggagcgaccaggtgatgcttgagggagttaatagtgaggacaaagagatggtgacaactgtcaagggcgttataaaggctgtgttggacggtgttaaagagctggtcaggctcacgatcgagaagcagggcagaccatcgccaactagtccagtgaagcctagcagtcccgcatcaaaacctgacggccctgccgaacttcctctcaccgatagggaggtcgaaatcctgaacaaaactactggtatgagccagagcacagagttgcttcccgacgcgactgacgaggaagtcgcacccccaaagccaccccttccaggcatccgggttgtggataactctccgccccctgctctgcccccgaaaaagagacagtcagctccttctcctactcgagtggccgttgtcgcccctatgagtagggctacctcgggatcaagcctgcctgttggcattaacagacaggactttgacgtcgattgttacgcgcagagacgcctgagtggggggtcccacagctatggcggggagtctccaagactgtccccctgtagtagtatcggcaaactaagcaagagtgacgaacagctcagtagcttggatagggacagtgggcagtgcagtagaaacacttcatgtgagaccctggatcactacgatcctgattacgaattcctacagcaggatttgtcaaatgctgaccagattcctcaacagactgcctggaatctctctcctcttcctgaatccctcggggagtcaggaagcccattcctgggtcccccctttcaactcccacttggcggccatccacagcctgacggaccgctcgcccccggacaacaaactgacactccccctgccctgcctgaaaaaaagaggcgcagtgcagccagtcaaactgcggacggatcgggctgcagagtatcatatgagcgacaccccagtcagtatgataatatctctggggaggacctgcaatccacagcccctattccctccgtgccatacgcaccattcgctgccattctccctttccagcacgggggatcctccgcgcccgtagaatttgtgggtgatttcaccgctccagagtctactggtgacccagaaaagccgccccctcttcctgaaaaaaagaacaaacacatgcttgcctacatgcaactgctagaggactacagtgagccccagccctccatgttctatcagacaccacagaacgaacatatttatcagcagaaaaataagctgctgatggaagtgtacggtttctcggattcttttagcggcgtcgacagtgtccaagagttggcccctccacctgccctgcctcctaagcagaggcagctggagccgccagcaggcaaagatggacacccgcgagacccatcagctgtgagtggcgtccccggtaaagactcccgggacggtagcgagagagctccgaagagtcctgatgccttggaatcagcacaatccgaggaggaagtggacgagctgtcactgatcgaccacaacgagatcatgagccgcctaacactgaagcaggagggagatgacggccccgacgtacggggtgggagtggggacatccttctcgtgcacgcaaccgagactgatagaaaagacctcgtgttgtactgcgaggccttcctcactacctaccgtaccttcataagcccggaagaacttattaagaaactacagtatagatatgaaaagttttctccttttgccgatacttttaaaaaacgagtgtccaagaatacattcttcgtgctggttcgcgttgttgacgaactgtgtcttgttgagctgactgaggagatactaaaacttctaatggagctggtctttaggctggtgtgcaacggggaactcagcctggcacgggtgttacgcaaaaatattctggacaaggtagatcagaagaagctgctgaggtgtgccactagcagtcaaccgctggccgcaagaggcgtggctgcacgacctggcacattgcatgacttccactcacacgagatagcggaacaacttacgctgttggacgcggaactgttttacaaaatagagatacccgaagtgttgctgtgggcaaaagagcagaacgaggaaaagtccccaaacttgacccagtttacagagcatttcaataacatgtcctactgggtgagatctattattatgctccaggagaaggcccaggatcgggagaggttgcttctcaagtttatcaagataatgaaacatttacgtaagctgaataacttcaattcctatctcgcaatcctgtctgccctggacagcgcccccattcgaagactggagtggcagaaacagacaagcgagggactggccgagtattgtacactcattgacagctcttcaagctttagagcctatcgggcagcactctcagaagtcgagcctccttgcatcccctatttaggccttatacttcaggacctgacattcgtgcaccttgggaatcctgactacattgacggcaaggtcaatttcagcaaacgttggcagcagttcaatattttagacagcatgaggtgtttccagcaggctcattatgacatgaggaggaacgatgacataatcaacttctttaacgacttctccgatcatttggctgaggaagcgctatgggagctcagtttgaaaattaaaccccggaacatcactcgaaggaagacggaccgcgaggaaaaaacgtag

SEQ ID NO: 154800 - DNA, 3234 bp, Artificial Sequence
  derived and/or modified sequence
atggacacagacagccagaggagccacctgagcagcttcaccatgaagctgatggacaagttccacagccccaagatcaagaggacccccagcaagaagggcaagccagctgaggtgtctgtgaagatccctgagaagcctgtgaacaaggaggccacagaccgcttcctgcctgagggctaccccctgcccctggacctggagcagcaggccgtggagttcatgagcaccagcgctgtggccagccgcagccagaggcagaagaacctgtcctggctggaggagaaggagaaggaggtggtgtctgccctgcgctacttcaagaccatcgtggacaagatggccatcgacaagaaggtgctggagatgctgcccggcagcgccagcaaggtgctggaggccatcctgcccctggtgcagaatgacccccgcatccagcacagcagcgccctgagcagctgctacagccgggtgtaccagagcctggccaacctgatccgctggagcgaccaggtgatgctggagggcgtgaacagcgaggacaaggagatggtgaccaccgtgaagggcgtcatcaaggctgtgctggatggagtgaaggagctggtgcggctgaccatcgagaagcagggccggcccagccccaccagccctgtgaagcccagcagccctgccagcaagccagatggccctgctgagctgcccctgacagaccgggaggtggagatcctgaacaagaccaccggcatgagccagagcacagagctgctgcctgatgccacagatgaggaggtggccccacccaagccacccctgcccggcatccgggtggtggacaacagccccccaccagccctgccccccaagaagaggcagagcgcccccagccccaccagggtggccgtggtggcccccatgagccgggccaccagcggcagcagcctgcctgtgggcatcaaccggcaggactttgatgtggactgctacgcccagaggcggctgagcggcggcagccacagctatggaggagagagcccccggctgagcccctgcagcagcatcggcaagctgagcaagagtgatgagcagctgagcagcctggaccgggacagcggccagtgcagcaggaacaccagctgtgagaccctggaccactatgaccctgactatgagttcctgcagcaggacctgagcaatgctgaccagatcccccagcagacagcctggaacctgagccccctgcctgagagcctgggggagagcggcagccccttcctgggcccccccttccagctgcccctgggcggccacccccagccagatggccccctggcccctggccagcagacagacaccccaccagccctgcctgagaagaagagaagatctgctgccagccagacagcagatggcagcggctgccgggtgtcctatgaaagacaccccagccagtatgacaacatctctggagaggacctgcagagcacagcccccatccccagcgtgccctatgccccctttgctgccatcctgcccttccagcacggcggcagcagcgcccctgtggagtttgtgggggacttcaccgcccctgagagcactggagaccctgagaagcccccacccctgcctgagaagaagaacaagcacatgctggcctacatgcagctgctggaggactacagcgagccccagcccagcatgttctaccagaccccccagaatgagcacatctaccagcagaagaacaagctgctgatggaggtgtatggcttcagtgacagcttctctggagtggacagcgtgcaggagctggcccctcctccagccctgccccccaagcagaggcagctggagcccccagctgggaaggatggccacccccgggaccccagcgctgtgtctggagtgcctgggaaggacagcagagatggcagcgagcgggcccccaagagcccagatgccctggagagcgcccagagcgaggaggaggtggatgagctgagcctgattgaccacaatgagatcatgagccggctgaccctgaagcaggagggagatgatggcccagatgtgcggggcggcagcggggacatcctgctggtgcacgccacagaaacagacaggaaggacctggtgctgtactgtgaggccttcctgaccacctaccgcaccttcatcagccctgaggagctgatcaagaagctgcagtaccgctatgagaagttcagcccctttgctgacaccttcaagaagagggtgtccaagaacaccttctttgtgctggtgcgggtggtggatgagctgtgcctggtggagctgacagaggagatcctgaagctgctgatggagctggtgttccggctggtgtgcaatggagagctgagcctggcccgggtgctgaggaagaacatcctggacaaggtggaccagaagaagctgctgcgctgtgccaccagcagccagcccctggccgcccggggcgtggccgcccggcccggcaccctgcatgacttccacagccatgaaattgctgagcagctgaccctgctggatgctgagctgttctacaagattgagatccctgaggtgctgctgtgggccaaggagcagaatgaggagaagagccccaacctgacccagttcacagagcacttcaacaacatgagctactgggtgcgcagcatcatcatgctgcaggagaaggcccaggaccgggagcggctgctgctgaagttcatcaagatcatgaagcacctgaggaagctgaacaacttcaacagctacctggccatcctgagcgccctggacagcgcccccatccggcggctggagtggcagaagcagaccagcgagggcctggccgagtactgcaccctgattgacagcagcagcagcttccgggcctaccgggccgccctgtctgaggtggagcccccctgcatcccctacctgggcctcatcctgcaggacctgacctttgtgcacctgggcaacccagactacattgatggcaaggtgaacttcagcaagcgctggcagcagttcaacatcctggacagcatgcgctgcttccagcaggcccactatgacatgagaagaaatgatgacatcatcaacttcttcaatgacttcagtgaccacctggccgaggaggccctgtgggagctgagcctgaagatcaagcccaggaacatcaccaggaggaagacagaccgggaggagaagacctag

SEQ ID NO: 154801 - DNA, 3234 bp, Artificial Sequence
  derived and/or modified sequence
atggacaccgacagccagcggagccacctgagcagcttcaccatgaaattgatggataagttccacagtccaaagatcaaaagaacaccatccaaaaaaggaaaacccgcggaagtgagcgtcaagatccccgaaaaacctgtcaataaggaggctactgacagatttctccccgaagggtatcccctgcccctcgatttggagcagcaggctgtcgagttcatgagcacctctgcggttgcttcacggagtcagagacaaaagaacttgtcttggctcgaagagaaagaaaaggaggtcgtgtccgccctgcggtatttcaaaaccatcgtggacaagatggctatagacaaaaaggtgctggaaatgctgcccggctcggcgtctaaggtcctggaggctatcttgcccctggtgcagaacgatccgcgaattcagcacagctctgctctgtcctcttgctattcccgcgtctatcaatccttggcaaatctcatacgatggtctgaccaggtgatgttagaaggcgtgaactcagaggacaaggagatggtgacaacagtgaagggcgtaattaaggctgtgctcgatggagtcaaagagcttgtccgcctcactattgaaaaacaggggaggccctctccaaccagcccagtgaagccctcttcaccggcatctaaaccagacggaccagccgagctgcctctcacagaccgcgaggtggagatcttgaacaaaacaacaggcatgagccagtccacggagctacttccggatgccactgacgaggaagtggcccccccaaagccccctctcccaggaattcgcgtggtagacaactcccctccacccgcactgccgccgaagaaaagacaaagcgcgccctcccctacccgggtggccgttgtggccccaatgtcccgggctaccagcggctcttctctgcctgtcgggattaataggcaagactttgatgtcgactgttacgcccaacgcaggttaagcggaggttcgcattcatatggtggggaatccccacggctcagtccctgcagtagtatcgggaagctaagcaaaagcgatgaacagctttcctcattggacagagattctggacagtgctctcgcaataccagttgtgaaacactcgatcattacgacccagactacgagttcctccaacaggatttgagcaatgccgaccagattccgcagcagactgcatggaatctgtctccccttcctgagtccctcggagagagtggctccccatttcttgggcctccatttcagctgccccttgggggccaccctcagcccgacggtccactggcccctggacagcagactgatactcctccagcgttgcccgagaaaaaacgaaggtccgccgcctcgcagacggctgatggctccggttgccgggtgtcttatgagcggcatccgagccaatacgacaacatttcaggcgaggaccttcagagcactgctcccatcccaagcgtgccctacgccccattcgccgcaattctccctttccaacacggtggaagctccgctccagttgagtttgttggcgattttactgcacctgagtctaccggggaccccgaaaagccgcccccactgccagagaagaagaacaagcatatgctcgcatatatgcagttactggaggactactccgagccacagccttctatgttttaccagacccctcagaacgaacacatctaccaacagaagaacaaactccttatggaggtatacggcttctccgacagctttagtggtgtggactcagtgcaagagctggctccgcctcccgccttgccaccaaagcaacgacagctggagccacctgcggggaaggatggacatcctagagatccctccgcagtctctggagtgcccggcaaggacagcagggatggctcagaaagggcacccaaatccccggatgctttggaaagtgctcagtccgaggaagaagtggatgagctctcattgattgaccacaatgaaataatgtcacgcctcaccttaaagcaggaaggcgacgacgggcccgacgtgaggggcggctcaggcgatatcctgctggttcatgctaccgagaccgaccgcaaggacctagtgttgtactgcgaggcattcctcactacctataggacattcatttcacctgaagagctgatcaagaaacttcagtatcgttacgaaaaattctctcctttcgctgatacattcaagaagcgcgtttccaagaacactttctttgtcctggtgcgagtggttgatgagctgtgcctagtagaactcacagaggaaatccttaaactcctgatggaacttgtctttagacttgtttgcaacggagaactctctcttgcgagggtcttgcgtaaaaacattcttgacaaggtagatcagaagaagttattgcgttgcgccaccagctctcagccccttgccgctaggggagttgcagctcgacctggcactctgcacgactttcactcccacgagatcgcagaacaactgaccctcctggatgctgagttgttctacaagatcgagataccagaagtcctcctgtgggctaaggaacagaatgaggaaaaaagccctaatctcacccagttcacggagcattttaataatatgagctactgggttcgaagtataatcatgcttcaggagaaagctcaagacagggaacgccttttactgaagttcatcaagatcatgaagcacttacgcaagctcaacaacttcaattcttacctggccatacttagcgccctggattccgctcccatcagacgcctcgagtggcaaaagcagacaagtgaaggcctggcggaatattgcacactcatagacagtagttcaagcttccgcgcttatcgtgcagccttgagtgaagtggagccaccctgcattccatatctgggccttattctgcaagacctgacctttgttcatctgggaaaccccgactatatcgacggaaaagttaactttagtaagcgctggcaacaattcaatatcctggacagcatgcggtgctttcagcaagcccactatgacatgcggcgcaacgatgacatcatcaatttttttaatgatttcagcgaccacctagctgaagaagccctctgggagctgtcgcttaaaatcaagcccagaaatattacacgaagaaagaccgatcgcgaggagaaaacctag

SEQ ID NO: 154802 - DNA, 3234 bp, Artificial Sequence
  derived and/or modified sequence
atggacaccgacagccagcggagccacctgagcagcttcaccatgaagctaatggacaagtttcatagccctaagatcaagcgcactccctccaagaaaggcaaacctgcagaggtatctgtgaaaatccctgagaagccggtgaacaaagaggcaaccgatcgatttctccctgaaggttatccactgccactcgacctggagcagcaggctgtggagttcatgtccacctctgcggtggcttccagatcccagcgacaaaagaacctcagttggttggaagagaaagagaaggaggtggtgtctgcccttaggtatttcaagaccattgtagataaaatggccatcgacaagaaggtgctggaaatgctgcccggaagcgcttctaaggtgctagaggccatccttcccctggttcagaatgatccacggatccagcactcaagtgccttgagttcatgctacagccgggtctaccaatccctcgccaatttgattcggtggtcggaccaagtgatgttggagggcgtgaactccgaagacaaggagatggttactactgtgaaaggcgtgattaaagcggtgctggatggcgttaaggaactcgtccgtctaactattgaaaaacagggtagacccagccctacaagcccagtgaagccctcctctcccgccagcaagcctgatggtcccgccgaactgcctctcaccgatagggaagtagagatcctcaataagaccacaggtatgagccagtccacagagttgctgccagatgctacagatgaagaagtggccccgccaaagcctcccctccccggtattagagtagtggataattctcccccacctgctctgccccccaagaagcgccagagtgccccaagcccgacacgagtcgcagttgtggcaccgatgtctcgggccacaagcgggagctccctgcccgtcggcattaaccgccaggattttgatgttgattgttacgcccaacgtcggctaagtgggggtagccattcctatggaggagagtctccccggctttcaccttgtagctctatcgggaagctctccaaaagcgacgagcagttaagctcgctggatcgtgattccggtcaatgcagtcgcaacacgagttgtgagactctggaccattacgaccctgattacgagtttctccagcaggatcttagcaatgcagaccagatccctcaacagacagcttggaacctgtcccctctcccggagtccttgggagagagcgggagcccttttcttgggcctccatttcagctgcctctcggcgggcaccctcagccagacggccctttagcgcctgggcagcagaccgacaccccaccggctttgcccgaaaaaaagaggaggtctgcagctagccagactgccgacggcagtgggtgtcgagtgtcatacgaacggcatccttcacagtatgacaacatttcaggagaagatctgcagtctaccgcccccatccctagtgtcccctacgcccccttcgccgccatacttccatttcagcatggcggttcctctgctccagtggagtttgttggcgatttcacggcgccagaatcaactggggaccccgagaagccaccacccctgcccgagaagaaaaataagcatatgctagcatatatgcagctgctcgaggattattcagaaccccaaccaagtatgttctatcagactccccagaacgaacatatctaccagcagaaaaataagttgcttatggaggtgtatggctttagtgatagctttagtggcgtcgattccgtgcaggaactggcaccacctcctgctctacctccaaaacagcgtcaacttgaaccacccgccggaaaagacggccacccccgggaccctagcgccgtgtctggggttccaggtaaggattctagagacggctccgagcgtgccccgaaaagtccagatgccctcgagtctgctcagagcgaggaagaggttgacgaactctcactcatcgaccataacgagatcatgtcgcggcttacccttaaacaggaaggcgacgacggccctgacgtcagggggggatctggggatatattactggtgcacgccactgagactgatcggaaagatttggtcctttattgcgaagcatttctgactacctatcgcacatttatctcaccggaagagctcattaaaaaacttcagtaccggtacgagaagttcagtccattcgccgacactttcaagaagagagtatccaaaaacacattctttgtgctcgtgagagtcgtcgacgagttgtgcttagtggagcttaccgaggaaatcctcaagcttctcatggagttagtgtttcgactcgtgtgtaacggcgaattatctctggcgcgcgtgctcaggaagaatattctcgacaaagtggatcagaagaagctgctgagatgtgccacttcatctcagcctctagcagctcgaggggtggccgcccgcccagggacgctgcatgactttcatagtcacgagattgcagaacagcttacactcttggatgcggagcttttttataagatagaaatccccgaggtgcttttatgggcgaaggaacagaatgaagagaagagtcccaacctgacccagtttaccgaacatttcaacaacatgagctactgggtgcgtagcatcataatgctccaagagaaggcccaggacagggagcggctgctactcaaatttatcaaaataatgaagcacttacgcaagttgaacaacttcaatagctaccttgcgattctgtcagcccttgatagcgcccctatccggcggctggagtggcagaaacagacctccgagggacttgctgagtattgcaccctgatcgatagcagttcctcgttcagggcttaccgcgctgctctcagtgaggtcgagccaccatgtattccctaccttggattgatcttgcaggatctaactttcgtccacctcggcaacccagactacatcgatggaaaggttaatttctccaaacggtggcagcaatttaacatcctggattctatgagatgcttccagcaggcccactatgacatgcggagaaatgacgacatcataaatttttttaacgatttctctgaccaccttgctgaggaggccctgtgggagctgtctctcaaaatcaaaccacggaacatcacacgccgcaagactgatcgcgaagaaaagacctag

SEQ ID NO: 154803 - DNA, 3234 bp, Artificial Sequence
  derived and/or modified sequence
atggataccgactctcagcgcagccacctgagctctttcactatgaaactgatggataaattccatagtccaaagatcaagcgcactcctagtaaaaaggggaagcctgccgaggtatccgtcaaaatccctgagaagccagtgaacaaagaagccactgaccgcttcctgccagaggggtatcccctgcctctcgaccttgaacagcaggctgtggaattcatgtcaacctccgccgtggcctcaagatcccagagacagaaaaacctctcatggctggaggagaaggagaaagaggttgttagtgctctcaggtattttaaaactatcgtggacaagatggcaatcgataagaaagtactagagatgctgcccggatctgctagtaaagttctagaagccatccttcccctcgtgcaaaacgatcctcggattcaacatagttctgcccttagctcctgttactccagggtctaccagtctctggccaacctgataagatggagcgaccaggttatgctcgagggcgtgaattcagaagataaagagatggttactaccgtgaaaggagtaatcaaggctgtacttgacggcgtcaaggaactcgtccgtctcaccatcgaaaagcaaggtaggccttcacctacatcccccgtaaaaccttctagtcccgcttcaaagcctgacggtcccgctgagttacccctgacagaccgcgaggtagagattctcaacaagaccacaggcatgagccaatccacagaattactgcccgacgccaccgacgaagaggtggccccacccaaaccaccgctgcccggaatccgcgtcgtggacaattcccccccacctgccctcccaccaaagaagcgccagtcagctccatcacctactcgtgtcgccgtggtcgcaccgatgtctagagccacgagtgggagcagcctgccggttggaatcaaccgtcaggactttgacgtggattgttacgcccagagacgactgtccggcggttcacactcttacggcggtgaatcccctcggctttctccatgttcctcaatcgggaaattgagcaagtccgatgaacagctcagttctttagacagggattctggacaatgttcgagaaatacttcatgcgagaccctcgaccattacgatcccgattacgagtttttgcaacaagatctgagtaatgcagaccagattccgcagcagacagcttggaatctgagtcctctgccagagagcctgggggagagcggttctccgttcctgggtccacccttccagctgcctctcggtggccaccctcaaccagatggcccactggcaccaggccagcagaccgacacacccccagccctccccgaaaagaagcgcaggtcagctgcatcacagaccgctgatggttcaggatgcagagtatcatacgagagacaccccagccagtatgataacattagcggagaggacttgcagagcacagctcccatccccagcgtgccctacgcacctttcgcggctattctgccttttcagcacgggggatcatcagctccggtagaatttgtcggtgacttcaccgcccctgaaagcaccggcgatccagagaagcccccaccactgcccgagaaaaaaaacaaacacatgctcgcctatatgcagcttctggaggattactccgagcctcaaccaagtatgttttaccagacgccccagaatgagcatatctaccagcagaagaataagctcttaatggaggtctacggcttcagtgacagctttagcggagttgactcggtgcaggagttagcgcctccaccagccctgccgcctaagcaacgccagctggagccacctgcagggaaggatgggcatccaagagacccaagtgcagttagtggagtgcccggaaaggactcccgagatggctctgagcgagctccaaaaagcccagacgccctcgaaagtgctcagtccgaggaagaggtggatgagctgagcttgatcgaccataacgagatcatgtctaggctcaccttgaagcaggagggcgatgacggccctgatgtgcgcggaggtagtggggatattcttctggtccacgcaaccgagaccgatcgcaaagaccttgtcctgtattgcgaagccttcctgacgacctaccgtacttttatttccccagaagaacttatcaagaaactgcagtatcggtatgaaaaattttcccccttcgccgatacattcaagaagcgcgtctcaaagaacacatttttcgttctggtgcgagtggtagacgaactctgcctggtggaattaacggaagaaatcttaaaactgttgatggaactcgtgtttcgattggtgtgcaatggcgagctaagcctggcccgagtcctgagaaagaacattctggataaagtcgaccaaaagaagctgctccggtgcgctacttcctctcagcctctcgcggctcggggagttgccgctcgccctgggacacttcatgattttcactctcacgaaatagcagagcagcttactctgctcgatgccgagctgttctataaaattgagatacctgaggttctgctttgggctaaggaacagaatgaggagaaatccccaaacctaactcaattcactgaacactttaataatatgtcttactgggtccggagcatcattatgcttcaggagaaagctcaggatagggagcggctgttactaaagttcataaaaattatgaaacatctgcggaagctgaataactttaacagctacctggctatcttaagcgcactggattcggccccaatccggaggctcgaatggcagaagcagaccagtgagggactggccgaatactgcacactgatagactcttcgtcatctttccgggcttacagagctgctctcagcgaggttgagccaccatgcattccttaccttggactgatcctacaagacctgacattcgtccatctgggcaaccccgattatatcgatggcaaagtaaacttctccaagaggtggcagcaattcaacattttggattcaatgcgttgttttcaacaagctcactatgacatgaggaggaatgacgacatcatcaatttcttcaacgatttttcagaccacctggctgaggaggccctgtgggaactgagtctgaagatcaaaccccgtaatataaccaggcgaaagactgaccgcgaggaaaagacctag

SEQ ID NO: 154804 - DNA, 3234 bp, Artificial Sequence
  derived and/or modified sequence
atggataccgactctcagcgaagccacctctcctctttcaccatgaagttgatggataaatttcacagtcctaagatcaagcggaccccttctaaaaaaggaaaacccgcagaggtttctgtgaaaattcccgagaaacccgtgaacaaagaagccactgacagattcttgcctgaaggttacccactgcctttggacctggaacagcaggccgtagagttcatgagcacaagcgctgtggcgtcaagaagccagaggcagaagaatttgagttggttagaggaaaaagagaaagaagtagtatctgctctccgatatttcaagactattgtcgacaaaatggctattgataagaaggtgctagagatgctgcctggcagtgctagcaaggttctggaagcgatcctgcctcttgtccagaatgacccacgcattcaacactcctcggcgctatcttcttgctattcccgggtgtaccaatctctggcgaatctgataagatggtccgaccaggtgatgttggagggcgtgaactccgaggataaagagatggtaacaacagtcaaaggcgtgatcaaagcggtgctggatggcgtcaaggagctagtacggctgaccatcgaaaaacagggaagaccatcgcccacatcccctgtgaaaccatcatctccggcttccaaaccagatggtccagcagaactccccctgacagaccgtgaagtggagattctaaataagaccaccggcatgtcgcagtccacggagctgctacccgacgccaccgatgaggaagtggctccgccaaaaccccctctgcccggaataagggtggtggataatagtccacccccagctctgcctcccaaaaagaggcagtccgctccctcccctacccgagttgctgttgtcgccccaatgtcccgagcaaccagcggatctagcctgccagtgggaataaatcgccaggacttcgacgtagattgctacgcacagcgtcgcctcagcggcggatcccacagctatggaggcgagtcgccacggctctcaccctgcagttctatcgggaaactcagcaaatctgatgagcagctgtcaagtttagatcgggactccggacaatgttctcgaaacacctcctgcgagacactggatcactacgatccagattacgagtttctgcagcaagatctgtcgaatgctgatcagatcccacaacagactgcatggaacttatctccccttcctgaatcactgggtgagtccggctccccctttcttggacccccttttcagctgcctctgggaggtcaccctcagcccgacggacccctcgccccaggacagcagaccgacacccccccagcccttccagaaaagaagaggcgctcggccgcttcccaaaccgccgacggctctggatgcagagtctcttacgagcggcacccctctcagtacgacaatattagcggggaggacctgcagtcgacagcccctattccaagtgtcccctatgcaccttttgccgctatccttccttttcagcatggcggatcctccgcaccggtggaattcgtgggcgactttacggcgccagagtcaaccggggatccagaaaagccaccgcctcttcctgaaaaaaaaaacaaacatatgctggcctatatgcagctcctggaagactacagcgagccccaaccctccatgttctaccagacacctcagaacgaacatatataccagcaaaagaacaaactactgatggaagtctacggtttctccgatagtttctcaggcgtggacagtgtgcaggagcttgccccacctcccgctcttccgcctaagcaacggcagctcgagcctcccgctggcaaggatggccacccccgagacccatctgctgtcagcggtgtgcccggtaaagactccagggatggctccgaacgtgcaccaaagtcgcccgacgcgctcgaatcagcgcagagtgaggaggaagtggatgagttgtcccttatcgaccataatgaaattatgagccgtttgacattgaaacaagagggcgacgacgggcctgacgtccggggaggttcaggtgatatcctgttggtgcacgctactgaaactgaccggaaagacctcgtgctgtactgtgaggcattcttgacaacctatcgtacttttatctcgcccgaagaactgatcaagaaactgcaatatcggtatgaaaagttctcaccatttgccgacaccttcaaaaaaagagttagcaagaatacattcttcgtgctggtacgagtggttgacgaactgtgcctggtcgaactcactgaagagattctgaaactcttgatggaactggtgtttcgcctggtatgcaacggtgagttgagtctcgcccgagtgctcaggaagaatatacttgacaaggttgaccagaagaagctgctccgctgcgccacaagctcccaaccactagctgctcgcggagtggctgccagacctggcacactacacgatttccacagccacgaaattgccgagcagctaactttgctcgacgccgagctattctacaaaatagaaatacctgaggtcctgctctgggctaaggagcagaacgaagagaagtcccccaatttgactcagtttaccgagcattttaacaatatgtcctattgggtgcggtccatcattatgctccaagagaaagctcaggaccgagagcgtcttctgctaaaatttatcaagattatgaagcacctgcgcaaactcaacaacttcaattcctatttggcaatcctcagcgctctggattcagctcctattcggagattggagtggcagaagcagacgagcgaaggattagctgagtactgtacattgatcgattccagcagcagctttcgtgcttatcgcgctgcattgtctgaggttgagcctccctgcatcccgtaccttggacttattttgcaggaccttaccttcgtgcaccttgggaatccagattatattgatggtaaagtgaactttagtaagcgctggcaacagttcaacatactggattcaatgaggtgcttccagcaggctcactacgatatgcggagaaatgacgacatcataaactttttcaacgattttagtgaccatctggccgaggaggccttgtgggaactgagtctgaagatcaagcccaggaacataacacgtaggaagactgatagggaggagaagacttag

SEQ ID NO: 154805 - DNA, 6085 bp, Artificial Sequence
  derived and/or modified sequence
ccttttctgggcaccgccttctgctagggggttgtagatgaaagtgcctgctcccagagaagcttgtctaacctagcacagtttctaagctacccaggctgccagaccgagcgaccgtgctgccatggacacagactctcagcgttctcatctctcttccttcaccatgaagctgatggacaaattccactcacccaaaatcaagagaacgccatcaaagaagggaaaaccagctgaggtgtccgtaaagattccagagaagcctgtgaacaaagaggcaacagacagatttctaccagagggctaccctctccccttggatctggagcagcaggcagtagaatttatgtccaccagtgctgtggcttccaggtctcaaaggcagaagaacctgagctggctggaggagaaagagaaggaagttgtcagtgccctgcgctactttaagaccattgtggacaaaatggcaattgataagaaggtactggagatgcttccagggtcagccagcaaggtgctggaggccatcttacccctggtgcagaacgatcctcgaattcagcacagctcagccctctcttcctgctatagccgagtgtaccaaagcctcgccaacctcattcgctggtctgaccaagtgatgctggaaggcgtgaactcagaagacaaggagatggtgacgactgtgaagggggtcatcaaggctgtgctggatggagtgaaggagctggtcaggctcaccatcgagaagcagggacgtccgtctccgacgagccccgtgaagcccagttcccctgccagcaagcctgatggcccagcagagctccccctgacagaccgcgaggtagagatcctaaacaagacgactgggatgtcacagtcaactgagctcctcccagatgccacggatgaagaggtcgcgccccccaagcctcctctgcctggcattcgggtggttgataatagtcctccaccagcattgccacccaagaaaagacagtcggcgccgtcccctacccgagtggctgtggtggcccccatgagccgagccaccagtggctccagtttgcctgttggaatcaataggcaggattttgatgttgactgttacgcacagaggcgactgtcaggaggcagccactcatatggtggagagtcgccccgcctctccccctgcagcagcataggcaagctcagcaagtcagacgagcagctgtcctctctggacagggacagtgggcagtgctcccggaacacaagctgtgaaacactagaccactatgatcccgactatgaattcctccagcaagacctctctaacgcagaccagatacctcagcagacggcctggaaccttagcccgttgccagagtctttgggggagtctgggtctccatttcttggccctcctttccagctgcctcttggcggccatccccagccagacggacctctggccccagggcagcagacagatacgccacctgctctccccgagaagaagcgcaggagcgcagcctcccagacggcggacggctctggctgcagggtgtcctacgagcggcatccctcgcagtatgacaacatctctggggaggacctgcagagcacagccccgatcccatccgtcccctacgcgccctttgctgctattctgccctttcagcatggaggttcctcagcccctgtcgaatttgtgggtgattttactgctcctgagtcaaccggtgacccagaaaaaccacctcctctaccagagaagaaaaacaaacacatgctggcctacatgcagttgctggaggactactcggagccgcagccctctatgttctaccagacgccacagaacgagcacatctaccagcagaagaacaagctcctcatggaggtatacggcttcagcgactccttcagtggggtggactccgtgcaggagctggccccgccgcccgccctaccccccaagcagcggcagctggagccaccggctgggaaagacggacatcccagagatccctcagcggtcagcggcgtccctgggaaggacagcagagacggcagtgagagggccccaaagtcaccagatgctctggagtcggctcagtcggaggaggaagtggacgagctgtccctcattgaccacaacgaaattatgtccaggctgacgctcaagcaggagggtgatgacgggccggacgtccgcggaggatctggggacatcttactggtccatgctactgagactgacaggaaagatttggtgttgtactgcgaggcattcctgaccacctacaggaccttcatctccccagaggagctcatcaagaagctgcagtacagatatgagaaattctctccctttgccgacacattcaagaagcgcgtcagcaagaacacgttcttcgtgctggtacgggtggtggatgagctctgcctggtggagttgacagaagagatcctgaagctgctgatggaactggtcttccgcctggtgtgcaatggggagctgagcctggcccgtgtgctccggaagaacatcctggacaaggtggaccagaagaagctactcaggtgtgccacctccagccagcccctggcagcccggggggtagcagccaggccggggaccttgcacgactttcacagccatgagatagcggagcagctaacgctgctggatgctgagctcttctataaaatagagattcctgaggttttgctttgggcaaaagagcagaatgaggagaagagccccaacttgacccagttcacggagcacttcaacaacatgtcctactgggtccggtccataatcatgttacaggaaaaggcccaggacagggaacggctgctcttgaagttcatcaagatcatgaagcacttgcggaagctgaataacttcaactcctacttggccatcctctctgccctggactcggcgcccatccgcaggctggagtggcagaagcagacttcagagggcctggccgagtactgcacactgatcgacagctcgtcctccttccgagcctaccgggccgccctctcggaggtggaaccgccgtgcatcccgtacctggggctgatcctgcaggacctgaccttcgttcacctgggaaacccagactacatcgacgggaaagtgaacttctccaagcggtggcagcagttcaacatcctcgacagcatgcgctgcttccagcaggcgcactatgacatgcggaggaacgacgacattataaacttcttcaatgacttcagtgaccacctggctgaggaggccctatgggaactgtctctgaaaattaaacccaggaacataacaaggagaaaaacagaccgggaagagaagacctaggagcagacgccgggatccaggagaatgctcgaggggcgcagagggcagctcccagaccggagaggaccttggacctgttaggcgcatggcaggagtcccggcctcggagccatgaggctggccagccctcagcggggccgggcgggagctggagcctgccagccgcttcctgcctccttcctctgtgggagcagacccgtgggcctcagggcagccagcaggcaggtcttgttgccaatttacaaaccggtggttttctggtttggttttgttttctgcttttacttccatctctcccctcttgaccttccacccactcccctccagggagagagcagcagagacctcatcagcagaccaaggaagtggtgggtgctccccctccctaagctccagggtccctgaatcttctgaaatctcaaatgagtggaggcctcctggggtggcctgtcctgcaggggccctggaatgggggcaagcagctgggtgggcagaatgcagagtagactcgggggaggatcctttcactttccgcttccccttctgatgcatggaggatggtgtgagcttttcagcaggcccggaaaggtacgcaggtgacgccttagcagccccgcagctggtgctctgccccgcggtactggcgccatcagggcctcccttgcccgcctgagagcagcagcagtctctgtcatcccgtcgccccttaccccccaccccaggccactgggcccctcccacaccacctggggagctgagaagaggaggctggagtaagggaggacttgatcatccaagaaatactttttattgctgggagtcttctgaacctcaccaaactgaggccagagctgagctcctgggggagttaattcagaggggagaggccagcacctccctcctccatcgctcgctgtgtgccttaaactccatctcatgtccctccccatcccctggctttccctccctccttgccccatcctgggccagccagcagggctcctcctctggctcttcagacctttcagccagtgctgtcagtgcccctgggagggaagggcatccctgaggcacccgaatggtccctcagggtgcagggaggcagaagcctggccacagaggagcctcctaaggcagcagctgcagcaagcgcaccctctccccactctccccacgccagagcggcttccagagcagatgctgtttccatcctcctcgtcaaaaccattctcgctgctgagcttgacaatctgggcaaggcttgtggggcgcttgacaaacagaatctgccctgtgccgcctggttccgtggcctccagcatgagcctgcaggcagggcgctgcgggaacccagttgtgctgccccagcccatgcctccgggtctgctgtgcatgaatgagtgctcacttgtcccgggtttaggacgtggtcaagtgaacagcagggtctaactgtgcttacttagcccagttcaaacagaacaaaggaaaaatatagaaagcaacatctgttgatcatttaggtttttttttaaaccaccatgtcactttgagtccttcatgggtttttgaacagcatttatcaagaagaaaatgtgggctttttcccctctcccgtgttttgtttgtcctgtagatagagggaggaaagccgtgcagtggcaggcgggaccccctctggtggcgggaccccctcttgcggtggtcttgcggggccagccgggacctgtcactttattatttaaggagtgtgtgtgtagagtcgctggcttattaacagtattgtgtgtgggttgggtttttagtttgttccttctttttgaagtcccttcatttcaatccttgactctctctccccttcccttgcccagctctgttgaatgctgctgtgcgcgtgtgagggccgctctgcacacagggcccttgggttgtgtgaactgaaattctccctgtatttgtgagactcgcaggagtccccatctgtagcacaggcaatgccagtgccatgctgcagcctcagaaaccaggcctctcactccagcagcaggcagaaccgtgtctgtggtcgggtgctgtccacagctctgtctgccttgttcttgggcttgagctggatagaggtggggtctcttcaccttccctgaattcagaacagaccctgtgcctggccccagtgtgcccaggcaattccccaggccctcactgggagcccttggtgttctgagcagcagggcccaggcagcacatgagcagtgcccaggggctccctgcgtgaggacggcaaggtgcgatgtatgtctaacttattgatggcaggcagccccctgtgccccctaagcctggccctggttattgctgagctctgtgctcagtgctgcggcctggccgtggctcgtctgttcctttggggggcccgggcgggttgtgggaatcagtcttcacagacagacgtgagccaggcggaggactcgttccttgcagaggtcagtcctcacctgcaggtgtcggggtgtgggggggcaaggaggggcaggcacacaccatgtctgacctgaacccgattctggggagcatcttcccgctccggccccacgacctccacagggttacattgtaatatatatgccccagctaacctgtctgatggtggcatcttcctgcagacatttcaaacatgtaacttttatatgaaaaaaaataaacacagatgaaagctgcccaatgcca

SEQ ID NO: 154806 - DNA, 6084 bp, Artificial Sequence
  derived and/or modified sequence
ccttttctgggcaccgccttctgctagggggttgtagatgaaagtgcctgctcccagagaagcttgtctaacctagcacagtttctaagctacccaggctgccagaccgagcgaccgtgctgccatggacacagactctcagcgttctcatctctcttccttcaccatgaagctgatggacaaattccactcacccaaaatcaagagaacgccatcaaagaagggaaaaccagctgaggtgtccgtaaagattccagagaagcctgtgaacaaagaggcaacagacagatttctaccagagggctaccctctccccttggatctggagcagcaggcagtagaatttatgtccaccagtgctgtggcttccaggtctcaaaggcagaagaacctgagctggctggaggagaaagagaaggaagttgtcagtgccctgcgctactttaagaccattgtggacaaaatggcaattgataagaaggtactggagatgcttccagggtcagccagcaaggtgctggaggccatcttacccctggtgcagaacgatcctcgaattcagcacagctcagccctctcttcctgctatagccgagtgtaccaaagcctcgccaacctcattcgctggtctgaccaagtgatgctggaaggcgtgaactcagaagacaaggagatggtgacgactgtgaagggggtcatcaaggctgtgctggatggagtgaaggagctggtcaggctcaccatcgagaagcagggacgtccgtctccgacgagccccgtgaagcccagttcccctgccagcaagcctgatggcccagcagagctccccctgacagaccgcgaggtagagatcctaaacaagacgactgggatgtcacagtcaactgagctcctcccagatgccacggatgaagaggtcgcgccccccaagcctcctctgcctggcattcgggtggttgataatagtcctccaccagcattgccacccaagaaaagacagtcggcgccgtcccctacccgagtggctgtggtggcccccatgagccgagccaccagtggctccagtttgcctgttggaatcaataggcaggattttgatgttgactgttacgcacagaggcgactgtcaggaggcagccactcatatggtggagagtcgccccgcctctccccctgcagcagcataggcaagctcagcaagtcagacgagcagctgtcctctctggacagggacagtgggcagtgctcccggaacacaagctgtgaaacactagaccactatgatcccgactatgaattcctccagcaagacctctctaacgcagaccagatacctcagcagacggcctggaaccttagcccgttgccagagtctttgggggagtctgggtctccatttcttggccctcctttccagctgcctcttggcggccatccccagccagacggacctctggccccagggcagcagacagatacgccacctgctctccccgagaagaagcgcaggagcgcagcctcccagacggcggacggctctggctgcagggtgtcctacgagcggcatccctcgcagtatgacaacatctctggggaggacctgcagagcacagccccgatcccatccgtcccctacgcgccctttgctgctattctgccctttcagcatggaggttcctcagcccctgtcgaatttgtgggtgattttactgctcctgagtcaaccggtgacccagaaaaaccacctcctctaccagagaagaaaaacaaacacatgctggcctacatgcagttgctggaggactactcggagccgcagccctctatgttctaccagacgccacagaacgagcacatctaccagcagaagaacaagctcctcatggaggtatacggcttcagcgactccttcagtggggtggactccgtgcaggagctggccccgccgcccgccctaccccccaagcagcggcagctggagccaccggctgggaaagacggacatcccagagatccctcagcggtcagcggcgtccctgggaaggacagcagagacggcagtgagagggccccaaagtcaccagatgctctggagtcggctcagtcggaggaggaagtggacgagctgtccctcattgaccacaacgaaattatgtccaggctgacgctcaagcaggagggtgatgacgggccggacgtccgcggaggatctggggacatcttactggtccatgctactgagactgacaggaaagatttggtgttgtactgcgaggcattcctgaccacctacaggaccttcatctccccagaggagctcatcaagaagctgcagtacagatatgagaaattctctccctttgccgacacattcaagaagcgcgtcagcaagaacacgttcttcgtgctggtacgggtggtggatgagctctgcctggtggagttgacagaagagatcctgaagctgctgatggaactggtcttccgcctggtgtgcaatggggagctgagcctggcccgtgtgctccggaagaacatcctggacaaggtggaccagaagaagctactcaggtgtgccacctccagccagcccctggcagcccggggggtagcagccaggccggggaccttgcacgactttcacagccatgagatagcggagcagctaacgctgctggatgctgagctcttctataaaatagagattcctgaggttttgctttgggcaaaagagcagaatgaggagaagagccccaacttgacccagttcacggagcacttcaacaacatgtcctactgggtccggtccataatcatgttacaggaaaaggcccaggacagggaacggctgctcttgaagttcatcaagatcatgaagcacttgcggaagctgaataacttcaactcctacttggccatcctctctgccctggactcggcgcccatccgcaggctggagtggcagaagcagacttcagagggcctggccgagtactgcacactgatcgacagctcgtcctccttccgagcctaccgggccgccctctcggaggtggaaccgccgtgcatcccgtacctggggctgatcctgcaggacctgaccttcgttcacctgggaaacccagactacatcgacgggaaagtgaacttctccaagcggtggcagcagttcaacatcctcgacagcatgcgctgcttccagcaggcgcactatgacatgcggaggaacgacgacattataaacttcttcaatgacttcagtgaccacctggctgaggaggccctatgggaactgtctctgaaaattaaacccaggaacataacaaggagaaaaacagaccgggaagagaagacctaggagcagacgccgggatccaggagaatgctcgaggggcgcagagggcagctcccagaccggagaggaccttggacctgttaggcgcatggcaggagtcccggcctcggagccatgaggctggccagccctcagcggggccgggcgggagctggagcctgccagccgcttcctgcctccttcctctgtgggagcagacccgtgggcctcagggcagccagcaggcaggtcttgttgccaatttacaaaccggtggttttctggtttggttttgttttctgcttttacttccatctctcccctcttgaccttccacccactcccctccagggagagagcagcagagacctcatcagcagaccaaggaagtggtgggtgctccccctccctaagctccagggtccctgaatcttctgaaatctcaaatgagtggaggcctcctggggtggcctgtcctgcaggggccctggaatgggggcaagcagctgggtgggcagaatgcagagtagactcgggggaggatcctttcactttccgcttccccttctgatgcatggaggatggtgtgagcttttcagcaggcccggaaaggtacgcaggtgacgccttagcagccccgcagctggtgctctgccccgcggtactggcgccatcagggcctcccttgcccgcctgagagcagcagcagtctctgtcatcccgtcgccccttaccccccaccccaggccactgggcccctcccacaccacctggggagctgagaagaggaggctggagtaagggaggacttgatcatccaagaaatactttttattgctgggagtcttctgaacctcaccaaactgaggccagagctgagctcctgggggagttaattcagaggggagaggccagcacctccctcctccatcgctcgctgtgtgccttaaactccatctcatgtccctccccatcccctggctttccctccctccttgccccatcctgggccagccagcagggctcctcctctggctcttcagacctttcagccagtgctgtcagtgcccctgggagggaagggcatccctgaggcacccgaatggtccctcagggtgcagggaggcagaagcctggccacagaggagcctcctaaggcagcagctgcagcaagcgcaccctctccccactctccccacgccagagcggcttccagagcagatgctgtttccatcctcctcgtcaaaaccattctcgctgctgagcttgacaatctgggcaaggcttgtggggcgcttgacaaacagaatctgccctgtgccgcctggttccgtggcctccagcatgagcctgcaggcagggcgctgcgggaacccagttgtgctgccccagcccatgcctccgggtctgctgtgcatgaatgagtgctcacttgtcccgggtttaggacgtggtcaagtgaacagcagggtctaactgtgcttacttagcccagttcaaacagaacaaaggaaaaatatagaaagcaacatctgttgatcatttaggtttttttttaaaccaccatgtcactttgagtccttcatgggtttttgaacagcatttatcaagaagaaaatgtgggctttttcccctctcccgtgttttgtttgtcctgtagatagagggaggaaagccgtgcagtggcaggcgggaccccctctggtggcgggaccccctcttgcggtggtcttgcggggccagccgggacctgtcactttattatttaaggagtgtgtgtgtagagtcgctggcttattaacagtattgtgtgtgggttgggtttttagtttgttccttctttttgaagtcccttcatttcaatccttgactctctctccccttcccttgcccagctctgttgaatgctgctgtgcgcgtgtgagggccgctctgcacacagggcccttgggttgtgtgaactgaaattctccctgtatttgtgagactcgcaggagtccccatctgtagcacaggcaatgccagtgccatgctgcagcctcagaaaccaggcctctcactccagcagcaggcagaaccgtgtctgtggtcgggtgctgtccacagctctgtctgccttgttcttgggcttgagctggatagaggtggggtctcttcaccttccctgaattcagaacagaccctgtgcctggccccagtgtgcccaggcaattccccaggccctcactgggagcccttggtgttctgagcagcagggcccaggcagcacatgagcagtgcccaggggctccctgcgtgaggacggcaaggtgcgatgtatgtctaacttattgatggcaggcagccccctgtgccccctaagcctggccctggttattgctgagctctgtgctcagtgctgcggcctggccgtggctcgtctgttcctttggggggcccgggcgggttgtgggaatcagtcttcacagacagacgtgagccaggcggaggactcgttccttgcagaggtcagtcctcacctgcaggtgtcggggtgtgggggggcaaggaggggcaggcacacaccatgtctgacctgaacccgattctggggagcatcttcccgctccggccccacgacctccacagggttacattgtaatatatatgccccagctaacctgtctgatggtggcatcttcctgcagacatttcaaacatgtaacttttatatgaaaaaaaataaacacagatgaaagctgcccaatgcc

SEQ ID NO: 154807 - protein, 505 aa, Artificial Sequence
  derived and/or modified sequence
MRLRRLALFPGVALLLAAARLAAASDVLELTDDNFESRISDTGSAGLMLVEFFAPWCGHCKRLAPEYEAAATRLKGIVPLAKVDCTANTNTCNKYGVSGYPTLKIFRDGEEAGAYDGPRTADGIVSHLKKQAGPASVPLRTEEEFKKFISDKDASIVGFFDDSFSEAHSEFLKAASNLRDNYRFAHTNVESLVNEYDDNGEGIILFRPSHLTNKFEDKTVAYTEQKMTSGKIKKFIQENIFGICPHMTEDNKDLIQGKDLLIAYYDVDYEKNAKGSNYWRNRVMMVAKKFLDAGHKLNFAVASRKTFSHELSDFGLESTAGEIPVVAIRTAKGEKFVMQEEFSRDGKALERFLQDYFDGNLKRYLKSEPIPESNDGPVKVVVAENFDEIVNNENKDVLIEFYAPWCGHCKNLEPKYKELGEKLSKDPNIVIAKMDATANDVPSPYEVRGFPTIYFSPANKKLNPKKYEGGRELSDFISYLQREATNPPVIQEEKPKKKKKAQEDL

SEQ ID NO: 154808 - protein, 279 aa, Artificial Sequence
  derived and/or modified sequence
MTSGKIKKFIQENIFGICPHMTEDNKDLIQGKDLLIAYYDVDYEKNAKGSNYWRNRVMMVAKKFLDAGHKLNFAVASRKTFSHELSDFGLESTAGEIPVVAIRTAKGEKFVMQEEFSRDGKALERFLQDYFDGNLKRYLKSEPIPESNDGPVKVVVAENFDEIVNNENKDVLIEFYAPWCGHCKNLEPKYKELGEKLSKDPNIVIAKMDATANDVPSPYEVRGFPTIYFSPANKKLNPKKYEGGRELSDFISYLQREATNPPVIQEEKPKKKKKAQEDL

SEQ ID NO: 154809 - protein, 485 aa, Artificial Sequence
  derived and/or modified sequence
MTLWILPKFKAVDFSPSLAAYTHTWLLPRFLEILIQCGHCKRLAPEYEAAATRLKGIVPLAKVDCTANTNTCNKYGVSGYPTLKIFRDGEEAGAYDGPRTADGIVSHLKKQAGPASVPLRTEEEFKKFISDKDASIVGFFDDSFSEAHSEFLKAASNLRDNYRFAHTNVESLVNEYDDNGEGIILFRPSHLTNKFEDKTVAYTEQKMTSGKIKKFIQENIFGICPHMTEDNKDLIQGKDLLIAYYDVDYEKNAKGSNYWRNRVMMVAKKFLDAGHKLNFAVASRKTFSHELSDFGLESTAGEIPVVAIRTAKGEKFVMQEEFSRDGKALERFLQDYFDGNLKRYLKSEPIPESNDGPVKVVVAENFDEIVNNENKDVLIEFYAPWCGHCKNLEPKYKELGEKLSKDPNIVIAKMDATANDVPSPYEVRGFPTIYFSPANKKLNPKKYEGGRELSDFISYLQREATNPPVIQEEKPKKKKKAQEDL

SEQ ID NO: 154810 - protein, 480 aa, Artificial Sequence
  derived and/or modified sequence
MRLRRLALFPGVALLLAAARLAAASEFFAPWCGHCKRLAPEYEAAATRLKGIVPLAKVDCTANTNTCNKYGVSGYPTLKIFRDGEEAGAYDGPRTADGIVSHLKKQAGPASVPLRTEEEFKKFISDKDASIVGFFDDSFSEAHSEFLKAASNLRDNYRFAHTNVESLVNEYDDNGEGIILFRPSHLTNKFEDKTVAYTEQKMTSGKIKKFIQENIFGICPHMTEDNKDLIQGKDLLIAYYDVDYEKNAKGSNYWRNRVMMVAKKFLDAGHKLNFAVASRKTFSHELSDFGLESTAGEIPVVAIRTAKGEKFVMQEEFSRDGKALERFLQDYFDGNLKRYLKSEPIPESNDGPVKVVVAENFDEIVNNENKDVLIEFYAPWCGHCKNLEPKYKELGEKLSKDPNIVIAKMDATANDVPSPYEVRGFPTIYFSPANKKLNPKKYEGGRELSDFISYLQREATNPPVIQEEKPKKKKKAQEDL

SEQ ID NO: 154811 - DNA, 840 bp, Artificial Sequence
  derived and/or modified sequence
atgaccagcggcaagatcaagaagttcatccaggagaacatcttcggcatctgcccccacatgaccgaggacaacaaggacctgatccagggcaaggacctgctgatcgcctactacgacgtggactacgagaagaacgccaagggcagcaactactggagaaacagagtgatgatggtggccaagaagttcctggacgccggccacaagctgaacttcgccgtggccagcagaaagaccttcagccacgagctgagcgacttcggcctggagagcaccgccggcgagatccccgtggtggccatcagaaccgccaagggcgagaagttcgtgatgcaggaggagttcagcagagacggcaaggccctggagagattcctgcaggactacttcgacggcaacctgaagagatacctgaagagcgagcccatccccgagagcaacgacggccccgtgaaggtggtggtggccgagaacttcgacgagatcgtgaacaacgagaacaaggacgtgctgatcgagttctacgccccctggtgcggccactgcaagaacctggagcccaagtacaaggagctgggcgagaagctgagcaaggaccccaacatcgtgatcgccaagatggacgccaccgccaacgacgtgcccagcccctacgaggtgagaggcttccccaccatctacttcagccccgccaacaagaagctgaaccccaagaagtacgagggcggcagagagctgagcgacttcatcagctacctgcagagagaggccaccaacccccccgtgatccaggaggagaagcccaagaagaagaagaaggcccaggaggacctgtag

SEQ ID NO: 154812 - DNA, 1458 bp, Artificial Sequence
  derived and/or modified sequence
atgaccctgtggatcctgcccaagttcaaggccgtggacttcagccccagcctggccgcctacacccacacctggctgctgcccagattcctggagatcctgatccagtgcggccactgcaagagactggcccccgagtacgaggccgccgccaccagactgaagggcatcgtgcccctggccaaggtggactgcaccgccaacaccaacacctgcaacaagtacggcgtgagcggctaccccaccctgaagatcttcagagacggcgaggaggccggcgcctacgacggccccagaaccgccgacggcatcgtgagccacctgaagaagcaggccggccccgccagcgtgcccctgagaaccgaggaggagttcaagaagttcatcagcgacaaggacgccagcatcgtgggcttcttcgacgacagcttcagcgaggcccacagcgagttcctgaaggccgccagcaacctgagagacaactacagattcgcccacaccaacgtggagagcctggtgaacgagtacgacgacaacggcgagggcatcatcctgttcagacccagccacctgaccaacaagttcgaggacaagaccgtggcctacaccgagcagaagatgaccagcggcaagatcaagaagttcatccaggagaacatcttcggcatctgcccccacatgaccgaggacaacaaggacctgatccagggcaaggacctgctgatcgcctactacgacgtggactacgagaagaacgccaagggcagcaactactggagaaacagagtgatgatggtggccaagaagttcctggacgccggccacaagctgaacttcgccgtggccagcagaaagaccttcagccacgagctgagcgacttcggcctggagagcaccgccggcgagatccccgtggtggccatcagaaccgccaagggcgagaagttcgtgatgcaggaggagttcagcagagacggcaaggccctggagagattcctgcaggactacttcgacggcaacctgaagagatacctgaagagcgagcccatccccgagagcaacgacggccccgtgaaggtggtggtggccgagaacttcgacgagatcgtgaacaacgagaacaaggacgtgctgatcgagttctacgccccctggtgcggccactgcaagaacctggagcccaagtacaaggagctgggcgagaagctgagcaaggaccccaacatcgtgatcgccaagatggacgccaccgccaacgacgtgcccagcccctacgaggtgagaggcttccccaccatctacttcagccccgccaacaagaagctgaaccccaagaagtacgagggcggcagagagctgagcgacttcatcagctacctgcagagagaggccaccaacccccccgtgatccaggaggagaagcccaagaagaagaagaaggcccaggaggacctgtag

SEQ ID NO: 154813 - DNA, 1443 bp, Artificial Sequence
  derived and/or modified sequence
atgagactgagaagactggccctgttccccggcgtggccctgctgctggccgccgccagactggccgccgccagcgagttcttcgccccctggtgcggccactgcaagagactggcccccgagtacgaggccgccgccaccagactgaagggcatcgtgcccctggccaaggtggactgcaccgccaacaccaacacctgcaacaagtacggcgtgagcggctaccccaccctgaagatcttcagagacggcgaggaggccggcgcctacgacggccccagaaccgccgacggcatcgtgagccacctgaagaagcaggccggccccgccagcgtgcccctgagaaccgaggaggagttcaagaagttcatcagcgacaaggacgccagcatcgtgggcttcttcgacgacagcttcagcgaggcccacagcgagttcctgaaggccgccagcaacctgagagacaactacagattcgcccacaccaacgtggagagcctggtgaacgagtacgacgacaacggcgagggcatcatcctgttcagacccagccacctgaccaacaagttcgaggacaagaccgtggcctacaccgagcagaagatgaccagcggcaagatcaagaagttcatccaggagaacatcttcggcatctgcccccacatgaccgaggacaacaaggacctgatccagggcaaggacctgctgatcgcctactacgacgtggactacgagaagaacgccaagggcagcaactactggagaaacagagtgatgatggtggccaagaagttcctggacgccggccacaagctgaacttcgccgtggccagcagaaagaccttcagccacgagctgagcgacttcggcctggagagcaccgccggcgagatccccgtggtggccatcagaaccgccaagggcgagaagttcgtgatgcaggaggagttcagcagagacggcaaggccctggagagattcctgcaggactacttcgacggcaacctgaagagatacctgaagagcgagcccatccccgagagcaacgacggccccgtgaaggtggtggtggccgagaacttcgacgagatcgtgaacaacgagaacaaggacgtgctgatcgagttctacgccccctggtgcggccactgcaagaacctggagcccaagtacaaggagctgggcgagaagctgagcaaggaccccaacatcgtgatcgccaagatggacgccaccgccaacgacgtgcccagcccctacgaggtgagaggcttccccaccatctacttcagccccgccaacaagaagctgaaccccaagaagtacgagggcggcagagagctgagcgacttcatcagctacctgcagagagaggccaccaacccccccgtgatccaggaggagaagcccaagaagaagaagaaggcccaggaggacctgtag

SEQ ID NO: 154814 - DNA, 1518 bp, Artificial Sequence
  derived and/or modified sequence
atgcgtcttaggcgcctcgccctctttccaggcgttgcgctcttgctcgcagccgcgagacttgccgcagcgtccgatgtgcttgaactgaccgacgacaactttgagtccagaataagcgacaccgggagtgccgggctgatgcttgtggagtttttcgccccgtggtgtgggcactgtaagcggctcgcacccgagtacgaggccgcagctaccagactgaagggtattgttccattggcgaaagttgactgtacagccaacacaaacacttgcaataaatatggagtgagcggatatccaactctaaagatttttagggacggggaagaggccggcgcctacgatgggccaaggacagctgatggaatagtctcacacctcaaaaaacaggccgggccggcctctgttcctctgagaacggaggaggagtttaagaaattcatttcagacaaagacgcatccatagtgggattctttgacgatagcttctccgaggcccacagcgagttcctgaaagccgcttcaaacctccgggataattaccggttcgcacacaccaatgttgagtctttagtaaatgagtacgacgacaatggagagggcatcattcttttccgaccctctcacctcacaaacaaattcgaggataaaacggtagcgtatacagagcagaagatgaccagtggaaaaattaagaagttcatccaagaaaatatctttggcatttgtcctcatatgacggaggacaacaaggacttgatccagggaaaagacctcttaatcgcctactatgacgttgattatgaaaagaacgcgaaaggctctaattactggagaaatagggttatgatggtcgctaagaaattcttggacgcgggccataagctgaacttcgctgttgcctcccgaaagaccttttctcatgaactgagcgatttcgggttggagagcactgcaggcgaaattcctgtggtcgccattcgaacggcgaaaggtgaaaagtttgtgatgcaggaggagttttctagggatggaaaagctctcgaaaggtttctgcaagactacttcgatgggaacctgaagagatacctgaaatccgaaccaattcccgagtcaaatgatgggcccgtaaaggtggtggttgcggagaattttgatgaaatcgtcaacaatgaaaacaaagatgtattaatagaattctacgctccctggtgcggacactgtaagaatctggaacccaaatataaagaactcggcgagaagctgagcaaggaccctaacatcgtgatcgccaagatggacgcgactgcaaatgacgttccgtcaccatatgaggtgcgcggtttcccgacgatctacttctcgcctgcaaataagaaactgaatcctaagaaatacgagggcggccgagagctcagcgattttattagctacctgcagagagaagccacgaaccctccggtgattcaggaggaaaaaccaaagaaaaagaaaaaagctcaggaagacctgtag

SEQ ID NO: 154815 - DNA, 840 bp, Artificial Sequence
  derived and/or modified sequence
atgacaagcggcaaaatcaagaagtttattcaagagaatatcttcggaatttgtccgcatatgacagaggataacaaggatctcatccagggaaaggatctgctgattgcttattatgacgttgactacgaaaagaatgccaagggctctaactattggcgaaatcgagtgatgatggtggcaaagaagtttttggacgctggacacaagttaaacttcgccgtcgcgagccgtaaaactttctcccatgagctgtccgattttggtcttgagtcaactgctggggaaatccccgtcgtggccatccggacggccaagggggagaagtttgtgatgcaggaagagtttagcagagatggcaaagcccttgagagattcctacaagactactttgacggcaacctgaaacgctacctgaagtctgagcccattcccgagtctaatgatggtccggtgaaagtcgtcgtggccgaaaatttcgacgaaattgtaaataacgaaaataaagacgtcctcattgagttctacgccccatggtgtggacactgcaaaaaccttgaacccaaatacaaggagctgggtgaaaagttgtcgaaagaccctaatatagtcatcgccaaaatggacgctaccgcgaatgacgtgcccagtccctacgaagtgcgaggatttcccaccatttatttctccccagccaacaagaaattgaaccccaagaagtatgaggggggccgagagctgagcgacttcatcagctatctgcagcgggaagcgacaaatcctccagtgattcaggaggagaagcctaaaaagaagaaaaaagcacaggaagatctttag

SEQ ID NO: 154816 - DNA, 1458 bp, Artificial Sequence
  derived and/or modified sequence
atgactctgtggatcctgcctaagttcaaagccgtagatttctctccaagtctggccgcctatactcatacgtggctgctgccccgatttcttgagatcctcattcagtgcggacattgcaaacgactggctcccgaatacgaggcagcagcgacccggctgaagggtattgtgcctttggccaaagtcgattgtacagcaaacactaatacatgtaacaagtacggggtgagtggttacccgacactgaagatattccgcgacggagaggaggcgggggcatacgacggtccccgaactgctgacgggattgtgagccacttgaagaagcaagccgggccagcttccgttccactgcggactgaggaggagtttaagaaattcattagcgataaggacgcttcgattgttggtttcttcgacgattctttcagcgaggcacactccgagtttcttaaagcagccagcaaccttcgagacaattaccgcttcgcgcatactaacgtggagtcacttgtaaatgagtatgatgacaacggcgagggcataatactcttcaggccgagtcacctcacaaacaagttcgaggacaaaacggtggcctatactgagcagaagatgactagtggcaagattaagaagtttattcaggaaaatatcttcggcatatgtcctcacatgacagaggacaataaggaccttattcagggcaaggacctcctcattgcgtattacgatgtggactatgagaagaatgccaaaggctctaattactggagaaatcgcgttatgatggtagccaaaaagttcttggatgcaggccataagctgaactttgctgttgcaagtcgcaaaacctttagtcatgaactcagcgacttcggcctggagtccacagctggagagattcccgttgtcgctattagaacggccaagggggagaagttcgtaatgcaagaagagttttcaagagatgggaaagctttggagcgttttctccaggactacttcgacgggaacctgaagcgctatttgaaatctgaaccaatccccgagtctaacgacggccctgtgaaggtggtcgtcgccgagaattttgacgagatcgtgaacaacgagaacaaggatgtcctgatcgagttttatgctccttggtgcggacactgtaagaacctggaaccgaaatataaggagttaggcgagaaactctcaaaggacccaaacatagtcattgccaaaatggatgcaacagcaaatgacgtaccctccccttacgaagtccggggattcccaaccatttacttctcacctgccaataaaaaactaaatccaaagaagtacgaaggcggaagagaattgagtgattttatcagttatctacaacgcgaagccacaaatcctcccgtgatccaggaggagaagccaaaaaagaagaaaaaggcccaggaagacctgtag

SEQ ID NO: 154817 - DNA, 1443 bp, Artificial Sequence
  derived and/or modified sequence
atgagactgagaaggttggccctttttcccggtgtagccctgttgctcgccgctgcccggctggcagctgcctccgagtttttcgccccctggtgcggccattgcaagcgactagctcccgagtacgaggctgcagctacccggctgaaaggcattgtacctctggcaaaagtcgactgcacagccaatacaaacacgtgcaacaagtatggagtgtccgggtatccgaccctaaaaatattccgcgacggtgaggaagcaggcgcctacgacggccctcgcactgctgacgggatcgtctcacacttgaaaaagcaggcaggtccggccagtgtaccccttcggaccgaggaggagtttaaaaagtttattagtgacaaagatgcgagtatcgtcggattctttgacgattccttttccgaggcacacagcgaattcctgaaggccgcaagtaaccttcgcgacaactataggtttgcgcacacgaacgtggagagcctagtgaatgaatacgatgacaatggcgaggggatcatcctgtttcggccctcacatttaactaataagtttgaggacaaaaccgtcgcctacaccgagcaaaagatgacaagcggcaagataaagaagttcatccaggaaaatatattcgggatctgcccccacatgacggaggataacaaggacctgatccaaggaaaagatctgttgatcgcgtattacgacgtagactatgagaagaatgcaaaagggtcaaactactggaggaaccgggtgatgatggtggcgaaaaaattcctcgacgctggacataagctgaacttcgctgtcgcaagtcgaaaaacgttctcgcacgagctcagtgactttggcctggaatctactgccggcgagattccagtggtagctatccgcaccgccaagggagaaaaattcgtcatgcaggaggagttctccagggacgggaaggccctggagagattccttcaagattattttgacggcaacttgaagcgatatttgaagtccgagccaatccccgaatctaacgatggcccagttaaagtagtggtcgctgaaaatttcgatgagatcgtgaataatgaaaacaaggatgtgctgatcgaattttatgctccatggtgcgggcactgtaagaatttggagcctaagtacaaggagctgggcgaaaagctgagtaaagatcccaatatcgttatcgcgaaaatggacgctacagccaatgatgtaccctccccttacgaagtgaggggcttcccaaccatctacttttcgccggcgaataagaaattgaacccaaaaaagtacgagggtggccgggagctgtcggacttcatatcgtatctgcagagagaagccaccaatccccccgtaatacaagaagagaaaccgaagaaaaagaagaaggcgcaggaagacctctag

SEQ ID NO: 154818 - DNA, 1518 bp, Artificial Sequence
  derived and/or modified sequence
atgaggctgcggcggctggccctcttccctggggtggccctgctgctggccgccgcccggctggccgccgccagtgatgtgctggagctgacagatgacaactttgagagccgcatcagtgacaccggcagcgctggcctgatgctggtggagttctttgccccctggtgtggccactgcaagaggctggccccagaatatgaagctgctgccacccggctgaagggcatcgtgcccctggccaaggtggactgcacagccaacaccaacacctgcaacaagtatggagtgtctggctaccccaccctgaagatcttcagagatggagaggaggccggggcctatgatggccccaggacagcagatggcatcgtgagccacctgaagaagcaggccggccctgcctctgtgcccctgaggacagaggaggagttcaagaagttcatcagtgacaaggatgccagcatcgtgggcttctttgatgacagcttcagcgaggcccacagcgagttcctgaaggccgccagcaacctgcgggacaactacagatttgcccacaccaacgtggagagcctggtgaatgaatatgatgacaatggagagggcatcatcctcttccggcccagccacctgaccaacaagtttgaggacaagacagtggcctacacagagcagaagatgaccagcggcaagatcaagaagttcatccaggagaacatcttcggcatctgcccccacatgacagaggacaacaaggacctgatccagggcaaggacctgctgattgcctactatgatgtggactatgagaagaatgccaagggcagcaactactggaggaacagagtgatgatggtggccaagaagttcctggatgctggccacaagctgaactttgctgtggccagcaggaagaccttcagccatgagctgagtgactttggcctggagagcacagctggggagatccctgtggtggccatcagaacagccaagggggagaagtttgtgatgcaggaggagttcagcagagatggcaaggccctggagcgcttcctgcaggactactttgatggcaacctgaagcgctacctgaagtctgagcccatccctgagagcaatgatggccctgtgaaggtggtggtggccgagaactttgatgaaattgtgaacaatgaaaacaaggatgtgctgattgagttctacgccccctggtgtggccactgcaagaacctggagcccaagtacaaggagctgggggagaagctgagcaaggaccccaacatcgtgattgccaagatggatgccacagccaatgatgtgcccagcccctatgaggtgcggggcttccccaccatctacttctccccagccaacaagaagctgaaccccaagaagtatgaaggaggccgggagctgagtgacttcatctcctacctgcagcgggaggccaccaacccccctgtgatccaggaggagaagcccaagaagaagaagaaggcccaggaggacctgtag

SEQ ID NO: 154819 - DNA, 840 bp, Artificial Sequence
  derived and/or modified sequence
atgaccagcggcaagatcaagaagttcatccaggagaacatcttcggcatctgcccccacatgacagaggacaacaaggacctgatccagggcaaggacctgctgattgcctactatgatgtggactatgagaagaatgccaagggcagcaactactggaggaacagagtgatgatggtggccaagaagttcctggatgctggccacaagctgaactttgctgtggccagcaggaagaccttcagccatgagctgagtgactttggcctggagagcacagctggggagatccctgtggtggccatcagaacagccaagggggagaagtttgtgatgcaggaggagttcagcagagatggcaaggccctggagcgcttcctgcaggactactttgatggcaacctgaagcgctacctgaagtctgagcccatccctgagagcaatgatggccctgtgaaggtggtggtggccgagaactttgatgaaattgtgaacaatgaaaacaaggatgtgctgattgagttctacgccccctggtgtggccactgcaagaacctggagcccaagtacaaggagctgggggagaagctgagcaaggaccccaacatcgtgattgccaagatggatgccacagccaatgatgtgcccagcccctatgaggtgcggggcttccccaccatctacttctccccagccaacaagaagctgaaccccaagaagtatgaaggaggccgggagctgagtgacttcatctcctacctgcagcgggaggccaccaacccccctgtgatccaggaggagaagcccaagaagaagaagaaggcccaggaggacctgtag

SEQ ID NO: 154820 - DNA, 1458 bp, Artificial Sequence
  derived and/or modified sequence
atgaccctgtggatcctgcccaagttcaaggctgtggacttcagccccagcctggccgcctacacccacacctggctgctgccccgcttcctggagatcctgatccagtgtggccactgcaagaggctggccccagaatatgaagctgctgccacccggctgaagggcatcgtgcccctggccaaggtggactgcacagccaacaccaacacctgcaacaagtatggagtgtctggctaccccaccctgaagatcttcagagatggagaggaggccggggcctatgatggccccaggacagcagatggcatcgtgagccacctgaagaagcaggccggccctgcctctgtgcccctgaggacagaggaggagttcaagaagttcatcagtgacaaggatgccagcatcgtgggcttctttgatgacagcttcagcgaggcccacagcgagttcctgaaggccgccagcaacctgcgggacaactacagatttgcccacaccaacgtggagagcctggtgaatgaatatgatgacaatggagagggcatcatcctcttccggcccagccacctgaccaacaagtttgaggacaagacagtggcctacacagagcagaagatgaccagcggcaagatcaagaagttcatccaggagaacatcttcggcatctgcccccacatgacagaggacaacaaggacctgatccagggcaaggacctgctgattgcctactatgatgtggactatgagaagaatgccaagggcagcaactactggaggaacagagtgatgatggtggccaagaagttcctggatgctggccacaagctgaactttgctgtggccagcaggaagaccttcagccatgagctgagtgactttggcctggagagcacagctggggagatccctgtggtggccatcagaacagccaagggggagaagtttgtgatgcaggaggagttcagcagagatggcaaggccctggagcgcttcctgcaggactactttgatggcaacctgaagcgctacctgaagtctgagcccatccctgagagcaatgatggccctgtgaaggtggtggtggccgagaactttgatgaaattgtgaacaatgaaaacaaggatgtgctgattgagttctacgccccctggtgtggccactgcaagaacctggagcccaagtacaaggagctgggggagaagctgagcaaggaccccaacatcgtgattgccaagatggatgccacagccaatgatgtgcccagcccctatgaggtgcggggcttccccaccatctacttctccccagccaacaagaagctgaaccccaagaagtatgaaggaggccgggagctgagtgacttcatctcctacctgcagcgggaggccaccaacccccctgtgatccaggaggagaagcccaagaagaagaagaaggcccaggaggacctgtag

SEQ ID NO: 154821 - DNA, 1443 bp, Artificial Sequence
  derived and/or modified sequence
atgaggctgcggcggctggccctcttccctggggtggccctgctgctggccgccgcccggctggccgccgccagcgagttctttgccccctggtgtggccactgcaagaggctggccccagaatatgaggccgccgccacccggctgaagggcatcgtgcccctggccaaggtggactgcacagccaacaccaacacctgcaacaagtatggagtgtctggctaccccaccctgaagatcttcagagatggagaggaggccggggcctatgatggccccaggacagcagatggcatcgtgagccacctgaagaagcaggccggccctgcctctgtgcccctgaggacagaggaggagttcaagaagttcatcagtgacaaggatgccagcatcgtgggcttctttgatgacagcttcagcgaggcccacagcgagttcctgaaggccgccagcaacctgcgggacaactacagatttgcccacaccaacgtggagagcctggtgaatgaatatgatgacaacggggagggcatcatcctcttccggcccagccacctgaccaacaagtttgaggacaagacagtggcctacacagagcagaagatgaccagcggcaagatcaagaagttcatccaggagaacatcttcggcatctgcccccacatgacagaggacaacaaggacctgatccagggcaaggacctgctgattgcctactatgatgtggactatgagaagaatgccaagggcagcaactactggaggaacagagtgatgatggtggccaagaagttcctggatgctggccacaagctgaactttgctgtggccagcaggaagaccttcagccatgagctgagtgactttggcctggagagcacagctggggagatccctgtggtggccatcagaacagccaagggggagaagtttgtgatgcaggaggagttcagcagagatggcaaggccctggagcgcttcctgcaggactactttgatggcaacctgaagcgctacctgaagtctgagcccatccctgagagcaatgatggccctgtgaaggtggtggtggctgaaaattttgatgagatcgtgaacaatgaaaacaaggatgtgctgattgagttctacgccccctggtgtggccactgcaagaacctggagcccaagtacaaggagctgggggagaagctgagcaaggaccccaacatcgtcatcgccaagatggatgccacagccaatgatgtgcccagcccctatgaggtgcggggcttccccaccatctacttcagccctgccaacaagaagctgaaccccaagaagtatgagggcggccgggagctgagtgacttcatctcctacctgcagcgggaggccaccaacccccctgtgatccaggaggagaagcccaagaagaagaagaaggcccaggaggacctgtag

SEQ ID NO: 154822 - DNA, 1518 bp, Artificial Sequence
  derived and/or modified sequence
atgcggctgcggcggctggccctgttccccggcgtggccctgctgctcgccgcggctcggttggctgctgcttccgacgttctggagctaacggacgataactttgagtcacgcatctccgatactgggtctgcaggactcatgctggtggagttcttcgccccatggtgcgggcattgcaaaagactcgcacccgagtacgaagcggcagctaccaggttgaagggaatcgttcccttggcaaaagtggactgcaccgctaacaccaatacttgcaacaaatacggagtttccggttaccctaccctgaagatattccgtgacggcgaggaagcaggggcctatgacggtcctcgaaccgccgatggaatagttagccatctaaagaagcaggccggtcctgcttcggtgccactcagaacggaggaggaatttaagaagttcatatctgacaaagacgcctctattgtgggattttttgatgattccttttctgaagcacacagcgagtttctaaaagccgcctccaacttgagagacaactataggtttgcccacacgaacgtggagtctttagtgaatgagtatgacgataacggcgaaggtatcatcctgttccgcccgtctcacctaacaaataaatttgaggacaagacggtggcatataccgagcaaaagatgacgagtggtaagataaagaagtttattcaggagaacatcttcggaatctgcccacacatgacggaggacaataaagatctcattcaggggaaggatctgctgattgcttactacgacgtggattatgagaaaaatgccaagggatctaactactggagaaacagggtcatgatggtcgccaaaaaatttctggacgccggtcacaagctgaactttgcagtggctagcaggaagaccttttcccacgagctatctgatttcgggcttgagtctaccgcaggggagatcccagtggttgccattcgcacagctaaaggcgagaaattcgtgatgcaagaagaatttagcagggacgggaaggcactcgagaggttcttgcaagactactttgacggcaaccttaaacggtacctgaaaagtgaaccgatccccgaatccaacgatggtcctgttaaagtggttgtggccgagaattttgacgaaatcgtcaacaacgagaacaaggacgtgctgatagaattctatgccccttggtgcgggcattgtaaaaaccttgaaccaaaatacaaagaactaggggaaaagctatctaaggaccccaacatcgtgatcgccaaaatggacgccaccgctaatgacgtgccttctccctacgaggttaggggctttcctacgatctacttcagcccggcaaacaaaaaactgaatccgaagaagtacgaaggcgggcgagaactgagcgatttcatttcatatctccagcgagaggctactaaccccccggtgatccaggaagaaaagcctaaaaagaagaagaaagctcaggaggatctgtag

SEQ ID NO: 154823 - DNA, 840 bp, Artificial Sequence
  derived and/or modified sequence
atgaccagcggcaagatcaagaagttcatccaggagaacatcttcggcatctgtccacacatgacggaagacaataaggacctgattcagggaaaagatctactcatcgcctactatgatgtggattacgagaaaaatgccaagggtagcaattattggcggaaccgcgttatgatggtggccaagaaattcctggatgctggacacaaactgaacttcgccgtggcctccagaaaaaccttttctcatgagctctctgacttcgggcttgagtcaaccgccggagaaatccccgttgtggctatcagaacggctaagggagagaaatttgtgatgcaggaagaattctcaagagacggcaaagcccttgagcgctttcttcaggactacttcgatgggaacttgaagcgctacctgaaaagcgaaccaataccagaaagcaatgacggtcctgtgaaggtagtggtagcagagaatttcgatgaaatcgtgaacaatgaaaacaaagacgtgttaatcgagttttacgctccctggtgtgggcactgtaaaaacctcgaacccaagtacaaagaactgggtgagaagctttcgaaagatcccaatattgtaattgccaagatggatgctacagccaatgatgttccctctccttacgaggtgagaggatttcccacaatctatttctcgcctgctaataaaaagttgaatcccaagaagtacgaaggaggccgagagttgtcagacttcattagctacctccagcgagaagctacaaacccccccgtcattcaggaggagaaaccaaagaagaagaagaaggctcaagaagatttgtag

SEQ ID NO: 154824 - DNA, 1458 bp, Artificial Sequence
  derived and/or modified sequence
atgaccctgtggatcctgcccaagttcaaggccgtggacttcagccccagtttggctgcttatacccacacgtggctgttacctaggtttctagagattctcatccaatgcggacactgcaagaggctggcgcccgaatatgaagctgctgctactagactcaagggaattgttccactcgcgaaagtggattgtaccgcgaacacgaatacatgcaataagtatggcgtgagcggctaccccacactgaagatctttcgtgacggtgaggaggctggagcttatgatggccccagaacagctgatggcatcgtttctcatctgaagaagcaagcaggcccagcctcagtgcccctcagaaccgaagaggaatttaagaagtttatttccgataaggatgccagtatcgtcgggtttttcgacgatagctttagcgaggcacattccgagtttctgaaggctgcgtctaatttaagagataattaccggttcgcccatactaacgtggagtcactggtgaatgaatacgacgataatggagagggtattatactgtttcgcccgtcacatctgacaaacaagtttgaggataaaactgtggcatacacagaacaaaaaatgacctccggcaagatcaaaaagttcatacaggaaaacatatttggcatttgtccacatatgactgaagataataaagatcttatccaagggaaagacctgctgatcgcttactatgatgtggactacgaaaagaacgcaaaaggatcaaattactggaggaacagagtgatgatggtggccaaaaaattcctggatgccggccacaagcttaatttcgctgtggcaagtaggaagacattttctcacgagcttagcgattttggtctggaaagtacagcgggggaaatccctgttgtggcaatccggacagccaagggggaaaagtttgtgatgcaggaggaatttagccgagatggtaaggcactagaacgatttttacaggactacttcgatggaaacttgaaaagatacctgaagtccgagcctatccccgaatctaacgatggacctgtcaaagtggtggtggccgagaattttgatgaaattgtgaacaatgagaataaagacgtgctcattgaattttacgcaccatggtgtgggcattgtaagaatctggaacctaagtataaggaactaggagaaaagctgtccaaagaccctaacatagtgattgccaagatggacgccacggcaaacgacgtgccttccccgtatgaagtcaggggctttcctacgatctacttttccccagcaaataagaagctgaatccgaagaagtacgaaggaggaagagagctgtccgatttcattagctacttgcagagagaggctacaaaccctccagtgatccaggaagaaaaaccaaagaaaaagaagaaagcccaagaagacctctag

SEQ ID NO: 154825 - DNA, 1443 bp, Artificial Sequence
  derived and/or modified sequence
atgcggctgcggcggctggccctgttccccggcgtggccctgctgttggccgcagccagactcgctgccgcatcggaattctttgcaccctggtgtgggcactgcaagcgtttggctccggaatacgaggcagcggctactcgactcaaaggaatcgtccccctagcaaaagtcgactgtaccgctaatacaaatacatgcaataaatatggcgtgtctggatatcctaccctgaaaatctttcgcgatggcgaggaggctggagcctatgatgggccccggaccgccgacggcattgtgtcccaccttaaaaagcaagcggggcctgccagtgtgccgcttcgaaccgaagaggagttcaagaagttcatttcagacaaagacgcttctatcgtcgggtttttcgatgatagttttagtgaagctcacagtgagttcctgaaggccgccagtaacttacgggacaattaccgattcgctcacacaaacgttgaaagtcttgtgaatgagtatgatgacaacggtgaggggattattttatttcgtccttcacacctgactaataagttcgaagacaagaccgtagcctacactgaacagaagatgacttccgggaagatcaagaagttcatccaagagaatatttttggtatctgccctcacatgacagaggataataaggatttgatccaaggaaaggacttactgatagcctattatgacgtggactacgaaaagaatgctaaagggagcaactattggagaaatagagtcatgatggttgccaagaagttcctcgatgccgggcataagctgaatttcgccgtagcttcacgtaagacattcagccacgaactgtccgactttggcctggagagcactgctggcgaaattcccgtagtcgcaatcaggaccgccaagggtgagaaattcgtaatgcaggaggaattttctcgagatggcaaagccctggagaggttcctgcaggactatttcgacggcaacctgaagcgctacctcaaatcggaacctatacctgagagcaacgatggccctgtgaaagttgtcgtcgcggagaacttcgatgaaatcgtgaacaacgaaaacaaggacgttctgattgaattctatgccccgtggtgtggccactgcaagaacctagaacccaagtataaagaactgggggagaaactcagcaaagatcctaatatcgttattgctaaaatggacgccaccgctaatgacgtcccgtcaccctatgaggtgcggggttttcctaccatttactttagccctgcgaacaagaagcttaacccgaagaagtacgaaggcggcagagagctcagtgacttcatcagctatcttcagagggaagctacgaacccacccgttatccaggaagagaagcctaagaaaaagaaaaaagcacaggaagacctctag

SEQ ID NO: 154826 - DNA, 1518 bp, Artificial Sequence
  derived and/or modified sequence
atgcgcctgcgacgtctggctcttttccccggagtagctctcctgttagccgcagcacggttggcagcagcaagcgacgtgctggaattaacggacgataattttgaatcacggattagtgataccggttcagcgggtcttatgttggtcgaattcttcgcaccctggtgtggccattgcaagagattggctcctgaatacgaggccgcagctacacgcctcaagggaattgtccccctcgctaaggtggattgcactgccaatactaacacatgtaacaagtatggagtaagcggctacccgacgctcaagatattccgtgacggcgaggaagcaggcgcttacgacgggccacgcactgcagatggcatagtctcacacttgaaaaagcaggcgggtccagcctcagttcccctgcggaccgaggaggagttcaaaaaattcattagcgataaggacgctagtatagtcggtttcttcgatgactcattctctgaagcccactctgaatttctgaaagccgctagtaacctgagagacaattacagattcgcccacaccaacgtggaatctttggtgaatgagtatgatgacaatggggagggaatcattctgttccgcccaagtcatctgaccaacaaattcgaggacaagaccgtggcctacacagagcagaagatgacgagcggcaagattaaaaaattcattcaggagaacattttcggcatctgtccgcatatgacagaagacaacaaagatttaatccagggcaaggacttgttgatagcctactacgatgtcgattacgaaaaaaacgcaaaagggtctaactattggcggaatagggtgatgatggtggctaagaagtttttggatgccggacacaaactgaactttgcagtggccagccgcaagactttctcacacgaactgtctgattttggcctcgagtcaactgctggagagattccagtcgtagcgatcagaaccgctaagggtgagaaatttgtgatgcaggaagaattctcccgtgacgggaaagctcttgaacggttcctgcaggactactttgacgggaacctgaagcgctacctaaaatcagaaccaatccccgaaagcaatgatggccctgtaaaggtcgtggtggccgagaattttgacgagatcgtgaataatgaaaataaagatgtcctcatagaattctacgcaccctggtgcgggcactgtaagaacctggagccaaaatataaagagctgggggagaagctgagtaaagatccaaacattgtgatcgcaaaaatggacgcaactgccaatgacgtacccagtccctacgaagttcggggattccctaccatttatttctcacccgcaaataaaaaactcaatccaaagaaatatgagggaggaagagagctttcagattttatcagctaccttcagcgagaagcaacaaatccacctgtgattcaggaagaaaagcctaaaaagaaaaagaaggcacaggaagatctgtag

SEQ ID NO: 154827 - DNA, 840 bp, Artificial Sequence
  derived and/or modified sequence
atgacatctgggaaaatcaagaagttcattcaagagaatatttttggcatctgtccacacatgaccgaggacaacaaggatctgatacagggcaaggacctcctgattgcctattacgacgtagactacgaaaaaaatgccaaagggagtaactattggcgcaatcgtgtcatgatggtcgccaaaaagttcctagacgcagggcataaactgaactttgctgtggcttcacggaagacgttcagccatgaactgagtgatttcggtctcgagtccacggcgggtgagatccccgttgtggccatacgcaccgccaaaggagagaagttcgttatgcaggaggagttctccagagacgggaaagcacttgagaggttcttacaggactactttgatggtaatctcaaaagatacctcaaatcggagcccattcctgagtccaacgacggacctgttaaggttgtggtagccgagaatttcgatgagatagtgaacaacgaaaataaggacgtgctcatcgaattttatgctccctggtgcggtcattgtaaaaatcttgaaccaaaatataaggagttaggcgaaaagttgtctaaagacccgaacatcgtcatagccaagatggacgcaacagcgaacgatgtcccctcgccatacgaagtaaggggatttccgactatctacttttctcctgctaacaaaaagctcaatcccaagaaatacgaaggcggtcgcgaactttcagactttatttcatacctgcagagagaggccacgaatcctccggtgatccaggaggaaaagccgaagaagaagaagaaagctcaagaggacctttag

SEQ ID NO: 154828 - DNA, 1458 bp, Artificial Sequence
  derived and/or modified sequence
atgacactctggatccttccaaagttcaaggctgttgacttttcccccagcctggctgcttacacccacacttggcttctgcccaggtttttggaaattctgattcaatgcggtcattgcaaacgcctcgcccctgagtatgaagcagcggctaccaggctcaaggggattgtcccactcgctaaggtagattgcacagctaatactaatacatgcaataagtatggggtctctggctaccccacgctaaagatcttcagagatggtgaagaggcgggtgcatatgatggacccaggaccgcggacggcatcgtctcgcacttgaagaagcaggccggacccgcatcagtcccactgcggaccgaggaggaattcaaaaagttcatttccgataaagatgcatcaattgtgggcttctttgacgatagtttcagtgaagcccatagtgagtttctgaaagccgcaagcaacctgcgcgacaattaccgcttcgcccacactaatgtggagagtttggtcaatgagtacgacgacaacggtgaaggtatcattctcttccggccttcgcaccttaccaacaagttcgaggacaagactgtggcttataccgagcagaaaatgacatccggcaagattaagaaattcatccaggagaacattttcggcatttgtcctcacatgactgaggataataaagatctcattcaagggaaagacctgcttatcgcctactacgatgtagactacgagaagaacgcaaagggatcaaattactggcgaaacagagttatgatggtagcaaagaagttcctggacgcaggccataaactcaatttcgcagtagccagcaggaagaccttttcacacgaactcagcgactttggactggagtccactgctggagagattccagtagttgccatccgaaccgcaaaaggtgaaaagtttgtgatgcaggaagagtttagtagagatggcaaggctctggagcgattccttcaagactatttcgatggcaacctcaagcgatacctgaaatccgagcctattcccgagtcaaatgacggacccgtgaaggtggtcgttgcagaaaacttcgatgagattgtgaacaatgagaataaagacgtgcttatcgaattttacgctccctggtgtggccactgtaaaaacttagagcccaaatataaggagttgggcgaaaagctgtccaaagacccaaacatcgttatcgctaaaatggacgctacagctaatgacgtaccatctccctacgaagttagaggtttccccactatttatttctctcctgcaaacaaaaaactgaatccaaaaaaatatgagggaggacgggaactgagtgacttcatctcgtatctgcagcgagaggccactaacccgcctgtgatccaggaagagaaacccaaaaaaaaaaagaaagctcaggaagacctatag

SEQ ID NO: 154829 - DNA, 1443 bp, Artificial Sequence
  derived and/or modified sequence
atgaggcttagacgattggccttattccccggagtggctcttctactcgcagccgcacggctcgcagccgcttctgagttcttcgccccttggtgcggacactgtaaacgcctagcgcctgagtatgaggccgctgctacaaggctgaagggaatcgtgccactagccaaggtagactgcacagccaatacaaacacctgcaacaaatacggggtgtctggatatccaacattgaaaattttcagggacggcgaggaggccggagcttatgacggacctcgtactgcagatggtatcgtgagtcatctgaagaaacaggcgggtcccgcaagcgtgcccctccgaactgaggaggaatttaagaagttcatcagtgataaagatgcatctattgtaggcttttttgatgacagctttagcgaagcccactccgagttcctgaaggcggcaagtaatctgcgggacaattatcgattcgcccacacgaacgtggagagcttagtgaacgagtatgacgacaatggggaagggattattctcttcagaccctcgcatctaacaaacaagtttgaggacaagaccgttgcctacactgaacagaagatgactagtgggaaaattaagaagttcatccaagaaaacatttttgggatttgcccacatatgacagaggataacaaggacttgatacaaggaaaggatttgctgattgcctattatgatgtcgattatgagaagaacgctaaagggagtaattattggaggaacagggtgatgatggtggcaaaaaagtttctggatgccggtcacaagttaaacttcgcggtcgccagtcgaaaaacattctcccacgagttaagtgacttcggcctggaaagcacagcaggcgagatacctgtcgttgctatccgtactgctaagggtgaaaagtttgttatgcaagaagagttttcccgggacgggaaggcgttggaaagattcctccaggattatttcgacggtaacttgaagcggtacctcaagagtgaacctatccctgagagcaacgatgggcctgtgaaagttgtagtggctgagaacttcgatgaaatagtcaacaatgagaacaaggacgtcctcattgagttttacgctccctggtgtggccattgcaagaatctggaacccaaatataaggagctaggagaaaaactcagcaaagaccccaacatcgtgattgcgaagatggacgcaacggccaatgacgtgccatcaccatatgaggtgcgtgggttccctactatatattttagcccagccaataagaagcttaatcccaaaaaatacgaagggggacgggagcttagcgatttcatatcatacctgcagcgcgaggcaaccaatcctcctgtaatccaggaagagaaaccaaagaagaagaaaaaggcccaggaagatttgtag

SEQ ID NO: 154830 - DNA, 1569 bp, Artificial Sequence
  derived and/or modified sequence
cagacgcgcgagcgcaagcagcgggttagtggtcgcgcgcccgacctccgcagtcccagccgaggttgattgcactgccaacactaacacctgtaataaatatggagtcagtggatatccaaccctgaagatatttagagatggtgaagaagcaggtgcttatgatggacctaggactgctgatggaattgtcagccacttgaagaagcaggcaggaccagcttcagtgcctctcaggactgaggaagaatttaagaaattcattagtgataaagatgcctctatagtaggttttttcgatgattcattcagtgaggctcactccgagttcctaaaagcagccagcaacttgagggataactaccgatttgcacatacgaatgttgagtctctggtgaacgagtatgatgataatggagagggtatcatcttatttcgtccttcacatctcactaacaagtttgaggacaagactgtggcatatacagagcaaaaaatgaccagtggcaaaattaaaaagtttatccaggaaaacatttttggtatctgccctcacatgacagaagacaataaagatttgatacagggcaaggacttacttattgcttactatgatgtggactatgaaaagaacgctaaaggttccaactactggagaaacagggtaatgatggtggcaaagaaattcctggatgctgggcacaaactcaactttgctgtagctagccgcaaaacctttagccatgaactttctgattttggcttggagagcactgctggagagattcctgttgttgctatcagaactgctaaaggagagaagtttgtcatgcaggaggagttctcgcgtgatgggaaggctctggagaggttcctgcaggattactttgatggcaatctgaagagatacctgaagtctgaacctatcccagagagcaatgatgggcctgtgaaggtagtggtagcagagaattttgatgaaatagtgaataatgaaaataaagatgtgctgattgaattttatgccccttggtgtggtcactgtaagaacctggagcccaagtataaagaacttggcgagaagctcagcaaagacccaaatatcgtcatagccaagatggatgccacagccaatgatgtgccttctccatatgaagtcagaggttttcctaccatatacttctctccagccaacaagaagctaaatccaaagaaatatgaaggtggccgtgaattaagtgattttattagctatctacaaagagaagctacaaacccccctgtaattcaagaagaaaaacccaagaagaagaagaaggcacaggaggatctctaaagcagtagccaaacaccactttgtaaaaggactcttccatcagagatgggaaaaccattggggaggactaggacccatatgggaattattacctctcagggccgagaggacagaatggatataatctgaatcctgttaaattttctctaaactgtttcttagctgcactgtttatggaaataccaggaccagtttatgtttgtggttttgggaaaaattatttgtgttggggg

SEQ ID NO: 154831 - DNA, 2099 bp, Artificial Sequence
  derived and/or modified sequence
agcagcgggttagtggtcgcgcgcccgacctccgcagtcccagccgagccgcgacccttccggccgtccccaccccacctcgccgccatgcgcctccgccgcctagcgctgttcccgggtgtggcgctgcttcttgccgcggcccgcctcgccgctgcctccgacgtgctagaactcacggacgacaacttcgagagtcgcatctccgacacgggctctgcgggcctcatgctcgtcgagttcttcgccccctgttccattcctgctggatttgaagaggagagtctcctccagcctcattgaaactctttttgtggatttgatgaccttatggatattgccaaagtttaaggcagtggattttagtcccagccttgcagcttacacacacacctggttgctccccagatttctggagattctcattcagtgtggacactgcaagagacttgcacctgagtatgaagctgcagctaccagattaaaaggaatagtcccattagcaaaggttgattgcactgccaacactaacacctgtaataaatatggagtcagtggatatccaaccctgaagatatttagagatggtgaagaagcaggtgcttatgatggacctaggactgctgatggaattgtcagccacttgaagaagcaggcaggaccagcttcagtgcctctcaggactgaggaagaatttaagaaattcattagtgataaagatgcctctatagtaggttttttcgatgattcattcagtgaggctcactccgagttcctaaaagcagccagcaacttgagggataactaccgatttgcacatacgaatgttgagtctctggtgaacgagtatgatgataatggagagggtatcatcttatttcgtccttcacatctcactaacaagtttgaggacaagactgtggcatatacagagcaaaaaatgaccagtggcaaaattaaaaagtttatccaggaaaacatttttggtatctgccctcacatgacagaagacaataaagatttgatacagggcaaggacttacttattgcttactatgatgtggactatgaaaagaacgctaaaggttccaactactggagaaacagggtaatgatggtggcaaagaaattcctggatgctgggcacaaactcaactttgctgtagctagccgcaaaacctttagccatgaactttctgattttggcttggagagcactgctggagagattcctgttgttgctatcagaactgctaaaggagagaagtttgtcatgcaggaggagttctcgcgtgatgggaaggctctggagaggttcctgcaggattactttgatggcaatctgaagagatacctgaagtctgaacctatcccagagagcaatgatgggcctgtgaaggtagtggtagcagagaattttgatgaaatagtgaataatgaaaataaagatgtgctgattgaattttatgccccttggtgtggtcactgtaagaacctggagcccaagtataaagaacttggcgagaagctcagcaaagacccaaatatcgtcatagccaagatggatgccacagccaatgatgtgccttctccatatgaagtcagaggttttcctaccatatacttctctccagccaacaagaagctaaatccaaagaaatatgaaggtggccgtgaattaagtgattttattagctatctacaaagagaagctacaaacccccctgtaattcaagaagaaaaacccaagaagaagaagaaggcacaggaggatctctaaagcagtagccaaacaccactttgtaaaaggactcttccatcagagatgggaaaaccattggggaggactaggacccatatgggaattattacctctcagggccgagaggacagaatggatataatctgaatcctgttaaattttctctaaactgtttcttagctgcactgtttatggaaataccaggaccagtttatgtttgtggttttgggaaaaattatttgtgttgggggaaatgttgtgggggtggggttgagttgggggtattttctaattttttttgtacatttggaacagtgacaataaatgagaccccttt

SEQ ID NO: 154832 - DNA, 1885 bp, Artificial Sequence
  derived and/or modified sequence
ggctgcaggtccgcctgggccagacgcgcgagcgcaagcagcgggttagtggtcgcgcgcccgacctccgcagtcccagccgagccgcgacccttccggccgtccccaccccacctcgccgccatgcgcctccgccgcctagcgctgttcccgggtgtggcgctgcttcttgccgcggcccgcctcgccgctgcctccgagttcttcgccccctggtgtggacactgcaagagacttgcacctgagtatgaagctgcagctaccagattaaaaggaatagtcccattagcaaaggttgattgcactgccaacactaacacctgtaataaatatggagtcagtggatatccaaccctgaagatatttagagatggtgaagaagcaggtgcttatgatggacctaggactgctgatggaattgtcagccacttgaagaagcaggcaggaccagcttcagtgcctctcaggactgaggaagaatttaagaaattcattagtgataaagatgcctctatagtaggttttttcgatgattcattcagtgaggctcactccgagttcctaaaagcagccagcaacttgagggataactaccgatttgcacatacgaatgttgagtctctggtgaacgagtatgatgataatggagagggtatcatcttatttcgtccttcacatctcactaacaagtttgaggacaagactgtggcatatacagagcaaaaaatgaccagtggcaaaattaaaaagtttatccaggaaaacatttttggtatctgccctcacatgacagaagacaataaagatttgatacagggcaaggacttacttattgcttactatgatgtggactatgaaaagaacgctaaaggttccaactactggagaaacagggtaatgatggtggcaaagaaattcctggatgctgggcacaaactcaactttgctgtagctagccgcaaaacctttagccatgaactttctgattttggcttggagagcactgctggagagattcctgttgttgctatcagaactgctaaaggagagaagtttgtcatgcaggaggagttctcgcgtgatgggaaggctctggagaggttcctgcaggattactttgatggcaatctgaagagatacctgaagtctgaacctatcccagagagcaatgatgggcctgtgaaggtagtggtagcagagaattttgatgaaatagtgaataatgaaaataaagatgtgctgattgaattttatgccccttggtgtggtcactgtaagaacctggagcccaagtataaagaacttggcgagaagctcagcaaagacccaaatatcgtcatagccaagatggatgccacagccaatgatgtgccttctccatatgaagtcagaggttttcctaccatatacttctctccagccaacaagaagctaaatccaaagaaatatgaaggtggccgtgaattaagtgattttattagctatctacaaagagaagctacaaacccccctgtaattcaagaagaaaaacccaagaagaagaagaaggcacaggaggatctctaaagcagtagccaaacaccactttgtaaaaggactcttccatcagagatgggaaaaccattggggaggactaggacccatatgggaattattacctctcagggccgagaggacagaatggatataatctgaatcctgttaaattttctctaaactgtttcttagctgcactgtttatggaaataccaggaccagtttatgtttgtggttttgggaaaaattatttgtgttgggggaaatgttgtgggggtggggttgagttgggggtattttctaattttttttgtacatttggaacagtgacaataaatgagaccccttt

SEQ ID NO: 154833 - DNA, 3727 bp, Artificial Sequence
  derived and/or modified sequence
gccgggtttgggggttgggacctccggctgcaggtccgcctgggccagacgcgcgagcgcaagcagcgggttagtggtcgcgcgcccgacctccgcagtcccagccgagccgcgacccttccggccgtccccaccccacctcgccgccatgcgcctccgccgcctagcgctgttcccgggtgtggcgctgcttcttgccgcggcccgcctcgccgctgcctccgacgtgctagaactcacggacgacaacttcgagagtcgcatctccgacacgggctctgcgggcctcatgctcgtcgagttcttcgccccctggtgtggacactgcaagagacttgcacctgagtatgaagctgcagctaccagattaaaaggaatagtcccattagcaaaggttgattgcactgccaacactaacacctgtaataaatatggagtcagtggatatccaaccctgaagatatttagagatggtgaagaagcaggtgcttatgatggacctaggactgctgatggaattgtcagccacttgaagaagcaggcaggaccagcttcagtgcctctcaggactgaggaagaatttaagaaattcattagtgataaagatgcctctatagtaggttttttcgatgattcattcagtgaggctcactccgagttcctaaaagcagccagcaacttgagggataactaccgatttgcacatacgaatgttgagtctctggtgaacgagtatgatgataatggagagggtatcatcttatttcgtccttcacatctcactaacaagtttgaggacaagactgtggcatatacagagcaaaaaatgaccagtggcaaaattaaaaagtttatccaggaaaacatttttggtatctgccctcacatgacagaagacaataaagatttgatacagggcaaggacttacttattgcttactatgatgtggactatgaaaagaacgctaaaggttccaactactggagaaacagggtaatgatggtggcaaagaaattcctggatgctgggcacaaactcaactttgctgtagctagccgcaaaacctttagccatgaactttctgattttggcttggagagcactgctggagagattcctgttgttgctatcagaactgctaaaggagagaagtttgtcatgcaggaggagttctcgcgtgatgggaaggctctggagaggttcctgcaggattactttgatggcaatctgaagagatacctgaagtctgaacctatcccagagagcaatgatgggcctgtgaaggtagtggtagcagagaattttgatgaaatagtgaataatgaaaataaagatgtgctgattgaattttatgccccttggtgtggtcactgtaagaacctggagcccaagtataaagaacttggcgagaagctcagcaaagacccaaatatcgtcatagccaagatggatgccacagccaatgatgtgccttctccatatgaagtcagaggttttcctaccatatacttctctccagccaacaagaagctaaatccaaagaaatatgaaggtggccgtgaattaagtgattttattagctatctacaaagagaagctacaaacccccctgtaattcaagaagaaaaacccaagaagaagaagaaggcacaggaggatctctaaagcagtagccaaacaccactttgtaaaaggactcttccatcagagatgggaaaaccattggggaggactaggacccatatgggaattattacctctcagggccgagaggacagaatggatataatctgaatcctgttaaattttctctaaactgtttcttagctgcactgtttatggaaataccaggaccagtttatgtttgtggttttgggaaaaattatttgtgttgggggaaatgttgtgggggtggggttgagttgggggtattttctaattttttttgtacatttggaacagtgacaataaatgagacccctttaaactgtcttattttccaccagattgagaaccagatgttctctacacactatcactgttcaatagagctttcttcagtgatggaaatgctctgtaatctacactgttcagtacaggtagctacggagcatctgaaatatggctagaaactacatttttgttttgattaatttaaatagccatacagttgctaccatactggtcacggcagctgtagactgactgggtccatagttcatcacctcaaaattctttcaaaatttattatctctttctctccttacatgtttatttcccaggcctaccctggtgattagaacagctgaagggcctttcttgttaggctgtccatgccctaaggatgggttcctgtttatccttgccacgcagctgagcttactgcatgtttatatctcccaaggactgttctctgctcagaaatgccctgtcaagggtgtggcatcacgcagtttcatccaagttgtttcaggaattgctgacactgctgggtgcagttctatcccctaaagcctagggtgtggccctttaacttccccttcagtagaactgggaaaggcagtaccattcctagttatgagtgaagcatccactttcttttgtaacaatgaggaacagaaaggataagactgaagagtgatcttttgtccaactaaaccatttatctccttttgtaggtaaattcaaatcctgcccagttatagttttcagtcactggagaattccaggtaggagccctactttaggtgatcctaggaactcctatgttcagaaaagaattttcttcctactatataattacagtatttagctgtcaattttaagatgaatttggtagagccttatagtaaagtatgtatcttggtcacacacaaagcttggaaaaagtaaaagatgtctaaaccataatcttgtaactcataacatctgggctggggcccggggatctaattgtttagagagccccaaaagtggctcagatgtaaagccagggttaagaaccatctgccttggaagatttaagggaaacatataaacttgtacaaaggacacagaagcagtcagttttaattttttagccatgttggtaaaagttcattttcagtacatgggtaacacccaggccctttcccattatatccaggtatgctacaagttcttttaactcttatcagaagttattattactgtttccttagagaggctaccaggctaaaattcacttagtttggtttgtctaatgtcctcattattttatcctgaagatgatgtcatttctcaggacttgaaaatgacttggctgaactaaaggtaaaaaagccaagcctctgtcacttttcctagactcctaggcacagctatggagtctttgcacagtgcccataccctaaaaattaataatgaaaaccaaacctcaagaacctagagcagctctctacttgccaccatggactccagtggtcagcataagaaaagcagatagttgcattctatttagtttatagctgctttgttcctttgtgtttcactaagcagaggctcaaaaattcccttgataacttcagctgcccctgttcttttcctcaaactccaggatgagacctttaatgtgggacaatttctggtgaaggtactcacagcgacgcttttcttctctgtaacttgggtactgctgcagagaaaaagcatccatgtcaaaaagtaaaaattctcattctaccttgc

SEQ ID NO: 154834 - DNA, 1518 bp, Artificial Sequence
  derived and/or modified sequence
atgagactgagaagactggccctgttccccggcgtggccctgctgctggccgccgccagactggccgccgccagcgacgtgctggagctgaccgacgacaacttcgagagcagaatcagcgacaccggcagcgccggcctgatgctggtggagttcttcgccccctggtgcggccactgcaagagactggcccccgagtacgaggccgccgccaccagactgaagggcatcgtgcccctggccaaggtggactgcaccgccaacaccaacacctgcaacaagtacggcgtgagcggctaccccaccctgaagatcttcagagacggcgaggaggccggcgcctacgacggccccagaaccgccgacggcatcgtgagccacctgaagaagcaggccggccccgccagcgtgcccctgagaaccgaggaggagttcaagaagttcatcagcgacaaggacgccagcatcgtgggcttcttcgacgacagcttcagcgaggcccacagcgagttcctgaaggccgccagcaacctgagagacaactacagattcgcccacaccaacgtggagagcctggtgaacgagtacgacgacaacggcgagggcatcatcctgttcagacccagccacctgaccaacaagttcgaggacaagaccgtggcctacaccgagcagaagatgaccagcggcaagatcaagaagttcatccaggagaacatcttcggcatctgcccccacatgaccgaggacaacaaggacctgatccagggcaaggacctgctgatcgcctactacgacgtggactacgagaagaacgccaagggcagcaactactggagaaacagagtgatgatggtggccaagaagttcctggacgccggccacaagctgaacttcgccgtggccagcagaaagaccttcagccacgagctgagcgacttcggcctggagagcaccgccggcgagatccccgtggtggccatcagaaccgccaagggcgagaagttcgtgatgcaggaggagttcagcagagacggcaaggccctggagagattcctgcaggactacttcgacggcaacctgaagagatacctgaagagcgagcccatccccgagagcaacgacggccccgtgaaggtggtggtggccgagaacttcgacgagatcgtgaacaacgagaacaaggacgtgctgatcgagttctacgccccctggtgcggccactgcaagaacctggagcccaagtacaaggagctgggcgagaagctgagcaaggaccccaacatcgtgatcgccaagatggacgccaccgccaacgacgtgcccagcccctacgaggtgagaggcttccccaccatctacttcagccccgccaacaagaagctgaaccccaagaagtacgagggcggcagagagctgagcgacttcatcagctacctgcagagagaggccaccaacccccccgtgatccaggaggagaagcccaagaagaagaagaaggcccaggaggacctgtag

SEQ ID NO: 154835 - protein, 384 aa, Artificial Sequence
  derived and/or modified sequence
MALNDCFLLNLEVDHFMHCNISSHSADLPVNDDWSHPGILYVIPAVYGVIILIGLIGNITLIKIFCTVKSMRNVPNLFISSLALGDLLLLITCAPVDASRYLADRWLFGRIGCKLIPFIQLTSVGVSVFTLTALSADRYKAIVRPMDIQASHALMKICLKAAFIWIISMLLAIPEAVFSDLHPFHEESTNQTFISCAPYPHSNELHPKIHSMASFLVFYVIPLSIISVYYYFIAKNLIQSAYNLPVEGNIHVKKQIESRKRLAKTVLVFVGLFAFCWLPNHVIYLYRSYHYSEVDTSMLHFVTSICARLLAFTNSCVNPFALYLLSKSFRKQFNTQLLCCQPGLIIRSHSTGRSTTCMTSLKSTNPSVATFSLINGNICHERYV

SEQ ID NO: 154836 - protein, 159 aa, Artificial Sequence
  derived and/or modified sequence
MASFLVFYVIPLSIISVYYYFIAKNLIQSAYNLPVEGNIHVKKQIESRKRLAKTVLVFVGLFAFCWLPNHVIYLYRSYHYSEVDTSMLHFVTSICARLLAFTNSCVNPFALYLLSEFQETVQHSAALLPAWPDHPVSQHWKEYNLHDLPQEYQPLRGHL

SEQ ID NO: 154837 - DNA, 1155 bp, Artificial Sequence
  derived and/or modified sequence
atggccctcaacgactgttttcttctgaatctggaagttgaccattttatgcattgtaatattagtagccatagtgctgatctccccgtcaacgatgactggtctcatcccggaatcttatacgtcattccagcagtgtacggtgtgatcattctcatcggactgatcggcaatataaccctgatcaaaatattctgcaccgtcaagtccatgcggaatgtcccaaatttgttcatctcatccctggctctcggggacttactcctcctgattacatgtgcccctgtggacgcctctcggtatctggctgataggtggcttttcggccgtatcggctgtaagctgatcccattcatccaactgactagcgtcggtgtcagtgtgttcacgttgactgcactctcagccgacaggtataaggctatcgtaagacctatggacatacaggcttctcatgctcttatgaagatatgcctgaaagcggccttcatttggatcatctctatgttactggcaatcccagaggcggtgttctctgatctgcacccgtttcatgaggagtccaccaaccagacttttatatcctgcgctccctatccacacagtaacgaactgcatccaaagatccacagcatggcaagttttctagtcttttatgtgattccgctctctattatctccgtctactactattttatcgcgaaaaacttaatccagtctgcctacaacctgcctgtcgaggggaacattcatgtgaaaaagcaaatcgaatctcgcaaacgcttggccaagaccgtgcttgtcttcgtcgggctattcgccttctgttggcttccgaatcatgtcatttatctttaccgtagttatcattattccgaggttgacacaagcatgcttcatttcgttacctctatctgtgcaaggctgcttgcctttacgaactcctgcgtaaaccccttcgcactctatctcctgagcaaatcctttagaaaacagtttaatacacagctcctgtgctgtcagccagggctgattatacgatcgcatagtactgggagatctaccacatgtatgacctcccttaaatccacaaaccccagtgtcgccacatttagcctgataaatggcaatatttgccacgagcgttatgtgtag

SEQ ID NO: 154838 - DNA, 480 bp, Artificial Sequence
  derived and/or modified sequence
atggcctcattccttgtgttttatgtcattccactatctattatttcagtgtattactattttattgcaaaaaatctgatccaatcggcgtataacctgcctgtggagggaaatattcacgtaaagaaacagattgagagccgcaaacggctggcaaaaacagtcctagtgtttgtgggcctgttcgccttttgctggctccctaatcatgtaatatacctatatagatcgtatcactactccgaggtggacacctcaatgctgcacttcgtaacttctatttgcgcgcggctgctagctttcaccaattcctgcgtgaatccttttgccctctatctgttgagtgagtttcaggaaaccgtgcaacacagcgctgctctccttcctgcatggcccgatcaccctgtgtcacaacattggaaagaatataacctccacgatctcccccaagaataccagcctctgagaggacacctttag

SEQ ID NO: 154839 - DNA, 1929 bp, Artificial Sequence
  derived and/or modified sequence
ccagattctaaatatcaggaaagacgctgtgggaaaatagcaggccaaaagttcttagtaaactgcagccagggagactcagactagaatggaggtagaaagaactgatgcagagtgggtttaattctaagcctttttgtggctaagttttgttgttgttaacttattgaatttagagttgtattgcactggtcatgtgaaagccagagcagcaccagtgtcaaaatagtgacagagagttttgaataccatagttagtatatatgtactcagagtatttttattaaagaaggcaaagagcccggcatagatcttatcttcatcttcactcggttgcaaaatcaatagttaagaaatagcatctaagggaacttttaggtgggaaaaaaaatctagagatggctctaaatgactgtttccttctgaacttggaggtggaccatttcatgcactgcaacatctccagtcacagtgcggatctccccgtgaacgatgactggtcccacccggggatcctctatgtcatccctgcagtttatggggttatcattctgataggcctcattggcaacatcactttgatcaagatcttctgtacagtcaagtccatgcgaaacgttccaaacctgttcatttccagtctggctttgggagacctgctcctcctaataacgtgtgctccagtggatgccagcaggtacctggctgacagatggctatttggcaggattggctgcaaactgatcccctttatacagcttacctctgttggggtgtctgtcttcacactcacggcgctctcggcagacagatacaaagccattgtccggccaatggatatccaggcctctcatgccctgatgaagatctgcctcaaagccgcctttatctggatcatctccatgctgctggccattccagaggccgtgttttctgacctccatcccttccatgaggaaagcaccaaccagaccttcattagctgtgccccatacccacactctaatgagcttcaccccaaaatccattctatggcttcctttctggtcttctacgtcattccactgtcgatcatctctgtttactactacttcattgctaaaaatctgatccagagtgcttacaatcttcccgtggaagggaatatacatgtcaagaagcagattgaatcccggaagcgacttgccaagacagtgctggtgtttgtgggcctgttcgccttctgctggctccccaatcatgtcatctacctgtaccgctcctaccactactctgaggtggacacctccatgctccactttgtcaccagcatctgtgcccgcctcctggccttcaccaactcctgcgtgaacccctttgccctctacctgctgagcaagagtttcaggaaacagttcaacactcagctgctctgttgccagcctggcctgatcatccggtctcacagcactggaaggagtacaacctgcatgacctccctcaagagtaccaacccctccgtggccacctttagcctcatcaatggaaacatctgtcacgagcggtatgtctagattgacccttgattttgccccctgagggacggttttgctttatggctagacaggaacccttgcatccattgttgtgtctgtgccctccaaagagccttcagaatgctcctgagtggtgtaggtgggggtggggaggcccaaatgatggatcaccattatattttgaaagaagccatcaagtcttaagtttttcatttcaacttgtgaacgtttcttctgatgtgaagcaaaccttcccttttcagaaaagggaacaagtagaaaattattttttaagcctcaagccctgttaaatggtcgtggccaattatgtcatagaaactgtatgaacaaccagatttacatagcagagaaatcatacattgaatgcttactt

SEQ ID NO: 154840 - DNA, 1225 bp, Artificial Sequence
  derived and/or modified sequence
gggaacttttaggtgggaaaaaaaatctagagatggctctaaatgactgtttccttctgaacttggaggtggaccatttcatgcactgcaacatctccagtcacagtgcggatctccccgtgaacgatgactggtcccacccggggatcctctatgtcatccctgcagtttatggggttatcattctgataggcctcattggcaacatcactttgatcaagatcttctgtacagtcaagtccatgcgaaacgttccaaacctgttcatttccagtctggctttgggagacctgctcctcctaataacgtgtgctccagtggatgccagcaggtacctggctgacagatggctatttggcaggattggctgcaaactgatcccctttatacagcttacctctgttggggtgtctgtcttcacactcacggcgctctcggcagacagatacaaagccattgtccggccaatggatatccaggcctctcatgccctgatgaagatctgcctcaaagccgcctttatctggatcatctccatgctgctggccattccagaggccgtgttttctgacctccatcccttccatgaggaaagcaccaaccagaccttcattagctgtgccccatacccacactctaatgagcttcaccccaaaatccattctatggcttcctttctggtcttctacgtcattccactgtcgatcatctctgtttactactacttcattgctaaaaatctgatccagagtgcttacaatcttcccgtggaagggaatatacatgtcaagaagcagattgaatcccggaagcgacttgccaagacagtgctggtgtttgtgggcctgttcgccttctgctggctccccaatcatgtcatctacctgtaccgctcctaccactactctgaggtggacacctccatgctccactttgtcaccagcatctgtgcccgcctcctggccttcaccaactcctgcgtgaacccctttgccctctacctgctgagcgagtttcaggaaacagttcaacactcagctgctctgttgccagcctggcctgatcatccggtctcacagcactggaaggagtacaacctgcatgacctccctcaagagtaccaacccctccgtggccacctttagcctcatcaatggaaacatctgtcacgagcggtatgtctagattgacccttgattttgccccctgagggacggttttgctt

SEQ ID NO: 154841 - DNA, 1155 bp, Artificial Sequence
  derived and/or modified sequence
atggccctgaatgactgcttcctgctgaacctggaggtggaccacttcatgcactgcaacatcagcagccacagcgctgacctgcctgtgaatgatgactggagccaccctggcatcctgtatgtgatcccagctgtgtatggagtcatcatcctgattggcctcatcggcaacatcaccctcatcaagatcttctgcaccgtgaagtccatgagaaatgtgcccaacctcttcatcagcagcctggccctgggggacctgctgctgctgatcacctgtgcccctgtggatgccagccgctacctggccgaccgctggctgtttggaagaattggctgcaagctgatccccttcatccagctgacctctgtgggcgtgtctgtgttcaccctgacagccctgtctgctgaccgctacaaggccatcgtgcggcccatggacatccaggccagccacgccctgatgaagatctgcctgaaggccgccttcatctggatcatctccatgctgctggccatccctgaggccgtgttcagtgacctgcaccccttccacgaggagagcaccaaccagaccttcatcagctgtgccccctacccccacagcaatgagctgcaccccaagatccacagcatggccagcttcctggtgttctacgtgatccccctgagcatcatctctgtgtactactacttcatcgccaagaacctgatccagagcgcctacaacctgcctgtggagggcaacatccacgtgaagaagcagatcgagagcaggaagaggctggccaagacagtgctggtgtttgtgggcctgtttgccttctgctggctgcccaaccacgtgatctacctgtaccgcagctaccactacagcgaggtggacacctccatgctgcactttgtgaccagcatctgtgcccggctgctggccttcaccaacagctgtgtgaacccctttgccctgtacctgctgagcaagagcttcaggaagcagttcaacacccagctgctgtgctgccagcccggcctcatcatccgcagccacagcacaggccgcagcaccacctgcatgaccagcctgaagagcaccaaccccagcgtggccaccttcagcctcatcaatggaaacatctgccacgagagatatgtgtag

SEQ ID NO: 154842 - DNA, 480 bp, Artificial Sequence
  derived and/or modified sequence
atggccagcttcctggtgttctacgtgatccccctgagcatcatctctgtgtactactacttcatcgccaagaacctgatccagagcgcctacaacctgcctgtggagggcaacatccacgtgaagaagcagatcgagagcaggaagaggctggccaagacagtgctggtgtttgtgggcctgtttgccttctgctggctgcccaaccacgtgatctacctgtaccgcagctaccactacagcgaggtggacacctccatgctgcactttgtgaccagcatctgtgcccggctgctggccttcaccaacagctgtgtgaacccctttgccctgtacctgctgtctgagttccaggagaccgtgcagcacagcgctgccctgctgcctgcctggccagaccaccctgtgtcccagcactggaaggagtacaacctgcatgacctgccccaggagtaccagcccctgcggggccacctgtag

SEQ ID NO: 154843 - DNA, 1155 bp, Artificial Sequence
  derived and/or modified sequence
atggccctgaacgactgcttcctgctgaacctggaggtggaccactttatgcattgtaacataagcagccacagcgccgacctgccagtgaacgacgactggagtcatcctggaattctatacgtaatacccgcagtctatggcgttattatccttattggcctaatcggcaatattacgctgataaaaatattttgtacggtgaaatcaatgaggaacgtcccaaacctgtttattagttccctggcgttaggtgacctgctgctgctgattacctgtgcaccagtcgacgcatcccgctatctcgccgacagatggctcttcggtcgcattggatgtaagctgatcccattcatccagctcacgagtgtgggcgtgagcgtcttcacgctgactgccctctctgcagataggtacaaggctattgtccgccccatggatatacaggcttcgcacgcccttatgaagatttgtctgaaagcagcattcatctggatcatttccatgctgctcgcaattcccgaagccgtgttcagcgatttgcatccgtttcatgaggaatctactaatcaaactttcatctcttgtgcaccatatccccatagtaatgagctgcacccaaagattcatagtatggctagctttctagtgttctacgtcatacccttatccatcatctccgtctattattacttcattgctaagaatctgatccagtctgcttacaaccttccggtggaagggaatatccatgtaaaaaagcagatagaatcccggaaaaggctagcaaagaccgtccttgtgttcgtgggtttgttcgccttttgttggcttcctaaccacgttatctatctatatcgcagctatcactacagtgaagtggacacttcgatgttgcactttgttacatccatatgcgcccgcctcctggccttcaccaactcctgtgtgaatcctttcgcgctgtacctcctgtctaagagcttcagaaaacaattcaacacacagttactctgttgccagcctggactgatcattcgcagccatagcactgggaggtcaacgacttgtatgacttctctgaaatcaaccaacccttctgtggcaacgttctctctgatcaacggtaatatctgtcacgaaagatatgtgtag

SEQ ID NO: 154844 - DNA, 480 bp, Artificial Sequence
  derived and/or modified sequence
atggccagcttcctggtgttctacgtgatccccctgagcatcatcagcgtttactactattttatagccaagaacttaatacaatcagcttataacttgccagtggaaggaaacatccacgtgaagaaacaaatcgagtccagaaagcgactggctaaaacagtgttagtttttgtcggactctttgccttctgttggctgcccaaccacgttatctatctctatagatcatatcactatagtgaagtcgatacttctatgctgcacttcgttacctcaatctgtgccagactgctggccttcacaaatagttgcgtgaatccatttgccctttatctactgtcggaattccaggagacagtgcagcactcagccgccctgctccccgcttggcctgaccacccggtgagccagcattggaaggagtataacctgcacgatttgccacaggagtatcagcctctcagaggtcatctttag

SEQ ID NO: 154845 - DNA, 1155 bp, Artificial Sequence
  derived and/or modified sequence
atggctcttaacgactgttttctgctgaaccttgaagtggaccatttcatgcactgtaatatatcctctcattctgccgatttacccgtgaacgatgactggtctcatcccggtatcctgtacgttatccccgcagtgtatggcgtgataattctgattgggctgatcgggaacatcacgctgatcaaaatcttctgcactgtgaagagcatgagaaatgtgccaaatttattcatttcctccttagctttgggcgaccttctgctcctaataacatgcgcccctgtcgacgcttcccgctatttggctgacagatggctgttcgggcgtatagggtgcaaattgatcccttttattcagctgacatcggtcggggtgtctgtgtttacactaactgctttatccgctgaccgttacaaggctatagtccggcctatggatatacaagcgtctcacgcccttatgaaaatatgtttaaaagcggctttcatctggattattagcatgctcttggcgattccagaagctgtcttctctgatctgcacccatttcatgaggaatcgacaaaccagactttcatctcgtgcgcgccataccctcattcaaacgaactgcatcccaagatacatagtatggcatcattccttgtgttttacgttattccacttagcattatctctgtttactactacttcattgcaaagaatttgatacagtctgcctataatctgcccgtggaaggcaatatccatgtcaaaaagcagatagaatctagaaaaaggttagcaaaaacagtgttggtgttcgtaggccttttcgctttttgttggttgcctaaccatgtcatctatctttaccggtcttatcactacagcgaggttgatacctcaatgctgcacttcgtgacctcaatctgcgcgaggctccttgcttttacaaattcttgtgtgaacccattcgccctgtacctgttaagcaaaagcttccgcaagcagtttaacacccagctgctgtgctgccaacccggattgatcataagaagtcactcaacaggtaggtctactacctgcatgacttcattgaagtcgaccaacccttcagtcgccacattcagccttataaatgggaatatctgccatgaaagatacgtatag

SEQ ID NO: 154846 - DNA, 480 bp, Artificial Sequence
  derived and/or modified sequence
atggcctccttcttagtgttctatgttattcccttgtcaataattagtgtgtactattatttcattgcaaagaacctgatacagagtgcgtacaatttgcctgtggagggcaacatccacgtgaaaaagcagatagagagtcgcaaacgcttagcaaaaaccgttctggtgtttgtgggcttattcgccttctgctggctccctaaccatgttatatacctatacaggtcttatcactatagcgaagtagacacttctatgcttcattttgtgacaagcatatgcgccaggctgctggcctttacaaatagctgtgtgaaccccttcgccctgtacctgttaagcgagttccaggagaccgtacagcactccgccgcactgctgcccgcatggcctgaccaccctgtgtctcagcactggaaggagtacaacctgcacgacctcccccaagaataccagccgctgagaggccatctgtag

SEQ ID NO: 154847 - DNA, 1155 bp, Artificial Sequence
  derived and/or modified sequence
atggccctgaacgactgcttcctgctgaacctggaggtggaccacttcatgcactgcaacatcagcagccacagcgccgacctgcccgtgaacgacgactggagccaccccggcatcctgtacgtgatccccgccgtgtacggcgtgatcatcctgatcggcctgatcggcaacatcaccctgatcaagatcttctgcaccgtgaagagcatgagaaacgtgcccaacctgttcatcagcagcctggccctgggcgacctgctgctgctgatcacctgcgcccccgtggacgccagcagatacctggccgacagatggctgttcggcagaatcggctgcaagctgatccccttcatccagctgaccagcgtgggcgtgagcgtgttcaccctgaccgccctgagcgccgacagatacaaggccatcgtgagacccatggacatccaggccagccacgccctgatgaagatctgcctgaaggccgccttcatctggatcatcagcatgctgctggccatccccgaggccgtgttcagcgacctgcaccccttccacgaggagagcaccaaccagaccttcatcagctgcgccccctacccccacagcaacgagctgcaccccaagatccacagcatggccagcttcctggtgttctacgtgatccccctgagcatcatcagcgtgtactactacttcatcgccaagaacctgatccagagcgcctacaacctgcccgtggagggcaacatccacgtgaagaagcagatcgagagcagaaagagactggccaagaccgtgctggtgttcgtgggcctgttcgccttctgctggctgcccaaccacgtgatctacctgtacagaagctaccactacagcgaggtggacaccagcatgctgcacttcgtgaccagcatctgcgccagactgctggccttcaccaacagctgcgtgaaccccttcgccctgtacctgctgagcaagagcttcagaaagcagttcaacacccagctgctgtgctgccagcccggcctgatcatcagaagccacagcaccggcagaagcaccacctgcatgaccagcctgaagagcaccaaccccagcgtggccaccttcagcctgatcaacggcaacatctgccacgagagatacgtgtag

SEQ ID NO: 154848 - DNA, 480 bp, Artificial Sequence
  derived and/or modified sequence
atggccagcttcctggtgttctacgtgatccccctgagcatcatcagcgtgtactactacttcatcgccaagaacctgatccagagcgcctacaacctgcccgtggagggcaacatccacgtgaagaagcagatcgagagcagaaagagactggccaagaccgtgctggtgttcgtgggcctgttcgccttctgctggctgcccaaccacgtgatctacctgtacagaagctaccactacagcgaggtggacaccagcatgctgcacttcgtgaccagcatctgcgccagactgctggccttcaccaacagctgcgtgaaccccttcgccctgtacctgctgagcgagttccaggagaccgtgcagcacagcgccgccctgctgcccgcctggcccgaccaccccgtgagccagcactggaaggagtacaacctgcacgacctgccccaggagtaccagcccctgagaggccacctgtag

SEQ ID NO: 154849 - protein, 205 aa, Artificial Sequence
  derived and/or modified sequence
MAAAAGGAASRRGAGRPCPFSIEHILSSLPERSLPARAACPPQPAGRQSPAKPEEPGAPEAAPCACCCCCGPRAAPCGPPEAAAGLGARLAWPLRLGPAVPLSLGAPAGGSGALPGAVGPGSQRRTRRHRTIFSEEQLQALEALFVQNQYPDVSTRERLAGRIRLREERVEVWFKNRRAKWRHQKRASASARLLPGVKKSPKGSC

SEQ ID NO: 154850 - DNA, 618 bp, Artificial Sequence
  derived and/or modified sequence
atggcggcagcggctgggggcgcggcgagccgccggggtgccgggcggccctgccccttctccatcgagcacatcctctccagcctgcccgagcggagcctcccggcccgggccgcctgcccaccgcagcccgccggtcgccagagccccgcgaagccagaggagcccggggcgcccgaggctgcgccctgcgcctgctgctgctgctgcggcccccgcgcggcgccctgcgggcccccagaggcggccgccgggctgggcgctcgtctggcgtggccgctgaggctgggaccggcggtgcccttgtctctgggtgcgccagccggaggttccggggcgctcccgggcgcggtcggcccgggttcgcagcggcgcacgaggcgccaccgcaccatcttcagcgaagagcagctgcaggcgctcgaggcgcttttcgtgcagaaccagtatcctgacgtgagtacgcgcgagcgcctggccggccgcatccgccttcgcgaggagcgcgtggaggtctggttcaagaaccgccgggccaaatggcgacaccagaagcgcgcgtcggcttccgcgaggctcctgcccggcgtcaagaagtccccgaaggggagctgctga

SEQ ID NO: 154851 - DNA, 618 bp, Artificial Sequence
  derived and/or modified sequence
atggccgccgcagccggaggggcagcttcaagacgtggagcaggtagaccatgccccttctctattgagcacatattgtccagcctgccggagcgctcactgccagccagggccgcttgtccaccccagccagccgggcgacagtcgcccgccaagccggaggagcctggggccccagaggctgcaccatgtgcctgctgctgctgttgtggccctcgggcggcaccttgtgggccaccagaagcggcagcaggcctgggagcgagactggcctggcccttgagacttgggcctgccgtgcccctcagccttggcgcaccggctggcgggagtggcgcacttcccggagcagttgggccaggttcccagagacgcactcgcaggcacagaacaatcttctctgaagaacaattacaggctctggaagcactattcgtgcagaaccagtatcccgacgtcagtactcgggagcgcctagccggacggattaggctgagggaggagagggtggaagtgtggtttaagaatagacgggcaaagtggcgacaccaaaaacgggcctctgcttctgctcggctgttacctggagtgaaaaaatcacccaaaggtagctgctag

SEQ ID NO: 154852 - DNA, 618 bp, Artificial Sequence
  derived and/or modified sequence
atggctgctgctgctggaggagctgccagcagaagaggagctggccggccctgccccttcagcattgagcacatcctgagcagcctgcctgagaggagcctgcctgcccgggccgcctgccccccccagcctgctggccggcagagccctgccaagccagaggagcccggggcccctgaggccgccccctgtgcctgctgctgctgctgcggcccccgggccgccccctgtggccccccagaggccgccgccggcctgggcgcccggctggcctggcccctgcggctgggccctgctgtgcccctgagcctgggcgccccagctgggggcagcggggccctgcctggagctgtgggccctggcagccagaggaggaccaggaggcacaggaccatcttcagcgaggagcagctgcaggccctggaggccctgtttgtgcagaaccagtacccagatgtgtccacccgggagcggctggccggccgcatccggctgcgggaggagcgggtggaggtgtggttcaagaacagaagagccaagtggaggcaccagaagagggccagcgccagcgcccggctgctgcccggggtgaagaagagccccaagggcagctgctag

SEQ ID NO: 154853 - DNA, 618 bp, Artificial Sequence
  derived and/or modified sequence
atggccgccgccgccggcggcgccgccagccggcggggcgccggccgtccttgtccatttagcatcgagcacattctctccagcctgcctgagagaagtctgccggcccgcgccgcttgcccaccccagccagctgggagacagtcgccagctaaacccgaggagcctggagccccagaggctgccccatgcgcctgctgctgctgttgtggccccagagcagcgccatgcgggcccccagaagctgccgcaggcctgggggccagattggcttggcccctgaggctcggtcccgcggtgcccttgagcttaggggctcccgccggcggctccggcgctctgcctggcgcagtagggcccggctcccagcggcgcactcgccgccaccggacaattttctctgaggagcaactgcaggcactggaagcacttttcgtgcaaaaccagtaccctgatgtgagtacgcgggagcgactggccgggagaatacgccttcgtgaggaaagagtcgaagtatggttcaaaaaccgaagggcaaagtggcggcatcaaaaacgcgcctcagcatcagctcgcttgctccccggtgtcaaaaaatcccccaagggatcttgttag

SEQ ID NO: 154854 - DNA, 618 bp, Artificial Sequence
  derived and/or modified sequence
atggcggcagcggcagggggagccgcttcccgcaggggcgcaggtcggccatgcccattcagcattgagcacatcctcagctctcttcctgaaaggtccttgcccgctagagcagcctgcccacctcagccggctgggagacagagtcctgcgaagcctgaggaacctggagcacccgaggccgcaccttgtgcatgttgttgttgttgcgggcctagagccgctccctgtgggcctcccgaagccgcagccggacttggtgcacgcctggcttggccactacgcttggggccagccgtaccattgagcctgggagcccctgccggagggagtggggctctaccaggggctgtaggaccagggtctcagagaagaactcgtagacaccggaccatcttctctgaagaacaactgcaagctcttgaagccctgttcgtgcaaaaccaatatcctgacgtctccacacgcgagaggctggccggtagaattcgactgcgggaggagagagtcgaagtctggtttaagaatcgcagggccaagtggcgccatcaaaaacgggcaagcgcctctgccagactactgcccggtgtcaagaagtcccctaagggctcatgctag

SEQ ID NO: 154855 - DNA, 618 bp, Artificial Sequence
  derived and/or modified sequence
atggccgccgcggcggggggggctgcctctcgccgaggagcggggcgcccctgtccatttagtattgagcacatattgtcttctttgccagagcggtctctacctgcccgtgctgcgtgtccacctcaaccggcagggcgtcagagccctgctaagcctgaagagcccggagctcccgaggctgctccatgcgcgtgctgttgttgttgtggccctagagctgcgccatgtggaccaccagaggccgccgcaggactaggagcacgactagcttggcctctgcgactcggacccgctgtaccactgtccttaggcgcccccgcaggagggtctggagcactgccaggcgcagtcggccccggatcccagagacgtacaaggagacatcggacgatttttagcgaggagcagttacaagcacttgaagcattatttgtgcagaaccaatatcccgatgtcagtactcgcgaacggctagcagggagaatacgactcagagaggagcgggttgaggtctggttcaagaatagacgggccaagtggcggcatcaaaaaagggcttctgctagcgccagattactacccggtgtcaagaagtctcccaagggctcttgttag

SEQ ID NO: 154856 - DNA, 618 bp, Artificial Sequence
  derived and/or modified sequence
atggcagctgcagctggaggagccgcctcacgcagaggggcaggaagaccttgccctttctctatcgaacacatcctgtcatccctgccagaacgcagtctacccgctcgcgcagcctgtccacctcaaccagctggccgccagagccccgcaaaacccgaagaaccaggcgcccccgaagccgccccatgcgcctgttgttgctgttgcgggcctcgggccgctccttgtggaccacccgaagccgccgccggattaggagctcgactagcctggccactgcgactgggtccagcagtgccactgtccttaggcgcccccgcaggagggtctggagcactgccaggcgcagtcggccccggatcccagagacgtacaaggagacatcggacgatttttagcgaggagcagttacaagcacttgaagcattatttgtgcagaaccaatatcccgatgtcagtactcgcgaacggctagcagggagaatacgactcagagaggagcgggttgaggtctggttcaagaatagacgggccaagtggcggcatcaaaaaagggcttctgctagcgccagattactacccggtgtcaagaagtctcccaaaggatcctgttag

SEQ ID NO: 154857 - DNA, 1033 bp, Artificial Sequence
  derived and/or modified sequence
atggcggcagcggctgggggcgcggcgagccgccggggtgccgggcggccctgccccttctccatcgagcacatcctctccagcctgcccgagcggagcctcccggcccgggccgcctgcccaccgcagcccgccggtcgccagagccccgcgaagccagaggagcccggggcgcccgaggctgcgccctgcgcctgctgctgctgctgcggcccccgcgcggcgccctgcgggcccccagaggcggccgccgggctgggcgctcgtctggcgtggccgctgaggctgggaccggcggtgcccttgtctctgggtgcgccagccggaggttccggggcgctcccgggcgcggtcggcccgggttcgcagcggcgcacgaggcgccaccgcaccatcttcagcgaagagcagctgcaggcgctcgaggcgcttttcgtgcagaaccagtatcctgacgtgagtacgcgcgagcgcctggccggccgcatccgccttcgcgaggagcgcgtggaggtctggttcaagaaccgccgggccaaatggcgacaccagaagcgcgcgtcggcttccgcgaggctcctgcccggcgtcaagaagtccccgaaggggagctgctgatgactctaggagctgcccctgggctcggccaccctttttgggatctttggagttggcgctgagagaagacaggtctacccgaaaaggagctgggagagtacaccggccgcctccacccgtctccacagcccttgcctcctgcagctcgtgctgccgtggcgctggggacgggcccccggtgcttggtgttccacggcagtgggagtggcgagtcccttgggggtgggctggggcatagagcagtttcctcagctccctaccccccgagagacactaactccaccgcaggaggggaaccaccccgtatcaacacgggacccagaatcctacgcagtggagcgtctctccgcaccctgggacatgctggccaccctcttctcaatgtggacattgacctaacttgacctggctcgtc

SEQ ID NO: 154858 - DNA, 618 bp, Artificial Sequence
  derived and/or modified sequence
atggccgccgccgccggcggcgccgccagcagaagaggcgccggcagaccctgccccttcagcatcgagcacatcctgagcagcctgcccgagagaagcctgcccgccagagccgcctgccccccccagcccgccggcagacagagccccgccaagcccgaggagcccggcgcccccgaggccgccccctgcgcctgctgctgctgctgcggccccagagccgccccctgcggcccccccgaggccgccgccggcctgggcgccagactggcctggcccctgagactgggccccgccgtgcccctgagcctgggcgcccccgccggcggcagcggcgccctgcccggcgccgtgggccccggcagccagagaagaaccagaagacacagaaccatcttcagcgaggagcagctgcaggccctggaggccctgttcgtgcagaaccagtaccccgacgtgagcaccagagagagactggccggcagaatcagactgagagaggagagagtggaggtgtggttcaagaacagaagagccaagtggagacaccagaagagagccagcgccagcgccagactgctgcccggcgtgaagaagagccccaagggcagctgctag

SEQ ID NO: 154859 - DNA, 549 bp, Artificial Sequence
  derived and/or modified sequence
aaactaaaatgatggctatgtggacatgagcagcttcaacacctttaagaacaatcagcagagcacagaccaggacgcagaaagattatttatgaaaactgcaatagtcatcatttaaagttatggaactgtgtccggaattggtgggttcttggtctcactgacttcaagaatgaagccgcggacccttgcggtaagtcagggatttcttcttggtttggatccactgctggtgagcagaacagagcaggacccaggatgcaagaccctaggcatccccaaggccttccactgtccccaggccttccaaagagacagcggcaggaccgcacaatctacaactggaaacagcaggaagtgctagaaaatcactttaaggaggaacagtacccagactatgacacacgacaagagctggcggagatgctcaatctcagggagtaccaagtgcaggtgtggttcaagaatcgccgggccaaacgctctcgggagcggtggttccagaagcagctccagcagctccagaagcatcctcagcagcagcatcct

SEQ ID NO: 154860 - DNA, 508 bp, Artificial Sequence
  derived and/or modified sequence
ttgcataaatgtttcaagtatctaacagacagcttacagtagatgtacacaatggtttgcaataagatctactctccttcctctggttcaaggaaaaaaattatctggatttttgccacttcaagaccaagactgctgccatgctagaaaagggctggggtaagacagagtcttgccctgttgcccaggctggagtatagtagtgcagtggtgtgatcatagctcactgtaacttcgaccacctgggctcaaacaatccttcttcctctgcctcccaagtagctgggactacagagcaggacccaggatgcaagaccctaggcatccccaaggccttccactgtccccaggccttccaaagagacagcggcaggaccgcacaatctacaactggaaacagcaggaagtgctagaaaatcactttaaggaggaacagtacccagactatgacacacgacaagagctggcggagatgctcaatctcagggagtaccaagtgcaggtgtgg

SEQ ID NO: 154861 - RNA, 618 nt, Artificial Sequence
  derived and/or modified sequence
auggccgccgcggcggggggggcugccucucgccgaggagcggggcgccccuguccauuuaguauugagcacauauugucuucuuugccagagcggucucuaccugcccgugcugcguguccaccucaaccggcagggcgucagagcccugcuaagccugaagagcccggagcucccgaggcugcuccaugcgcgugcuguuguuguuguggcccuagagcugcgccauguggaccaccagaggccgccgcaggacuaggagcacgacuagcuuggccucugcgacucggacccgcuguaccacuguccuuaggcgcccccgcaggagggucuggagcacugccaggcgcagucggccccggaucccagagacguacaaggagacaucggacgauuuuuagcgaggagcaguuacaagcacuugaagcauuauuugugcagaaccaauaucccgaugucaguacucgcgaacggcuagcagggagaauacgacucagagaggagcggguugaggucugguucaagaauagacgggccaaguggcggcaucaaaaaagggcuucugcuagcgccagauuacuacccggugucaagaagucucccaagggcucuuguuag

SEQ ID NO: 154862 - RNA, 618 nt, Artificial Sequence
  derived and/or modified sequence
auggcagcugcagcuggaggagccgccucacgcagaggggcaggaagaccuugcccuuucucuaucgaacacauccugucaucccugccagaacgcagucuacccgcucgcgcagccuguccaccucaaccagcuggccgccagagccccgcaaaacccgaagaaccaggcgcccccgaagccgccccaugcgccuguuguugcuguugcgggccucgggccgcuccuuguggaccacccgaagccgccgccggauuaggagcucgacuagccuggccacugcgacuggguccagcagugccacuguccuuaggcgcccccgcaggagggucuggagcacugccaggcgcagucggccccggaucccagagacguacaaggagacaucggacgauuuuuagcgaggagcaguuacaagcacuugaagcauuauuugugcagaaccaauaucccgaugucaguacucgcgaacggcuagcagggagaauacgacucagagaggagcggguugaggucugguucaagaauagacgggccaaguggcggcaucaaaaaagggcuucugcuagcgccagauuacuacccggugucaagaagucucccaaaggauccuguuag

SEQ ID NO: 154863 - protein, 257 aa, Artificial Sequence
  derived and/or modified sequence
MEACVSSLLVLALGALSVGSSFGTQIIGGREVIPHSRPYMASLQRNGSHLCGGVLVHPKWVLTAAHCLAQRMAQLRLVLGLHTLDSPGLTFHIKAAIQHPRYKPVPALENDLALLQLDGKVKPSRTIRPLALPSKRQVVAAGTRCSMAGWGLTHQGGRLSRVLRELDLQVLDTRMCNNSRFWNGSLSPSMVCLAADSKDQAPCKGDSGGPLVCGKGRVLARVLSFSSRVCTDIFKPPVATAVAPYVSWIRKVTGRSA

SEQ ID NO: 154864 - DNA, 774 bp, Artificial Sequence
  derived and/or modified sequence
atggaagcctgtgtgagcagccttctcgttcttgccttaggggcattatccgtcgggtcatcattcggcacccagatcatagggggccgggaagtaatcccacactccagaccgtatatggccagtctgcagcggaacggttctcacctgtgcggaggagtcttggtgcatcctaagtgggtgttaacggccgctcactgcctggcccaacggatggcacagctgcgactggtgctgggcctgcacacccttgactctcccgggttgacgtttcatatcaaggctgcaattcaacatcccaggtacaaacccgtacctgccctggagaacgatcttgcattgttgcagctggatggaaaggtgaagccctctcgcactatccggcccctggccctaccgtccaaaaggcaggtcgtcgccgctggcacccgctgcagcatggctggatggggcttgactcaccagggtggtcgtctgagccgagtgttgagagaactggacctccaggtattagatacccgcatgtgcaacaactctaggttttggaacggtagcctcagtcccagcatggtatgtcttgctgcagactccaaggatcaagcgccatgcaaaggcgacagcggagggccgttggtgtgcggtaaaggccgcgtgctagctcgcgtgctgtcctttagctcccgggtttgcacggacatcttcaagccacccgttgctacagccgtcgcgccatacgtttcttggatcagaaaggtgacaggaaggtctgcctag

SEQ ID NO: 154865 - DNA, 947 bp, Artificial Sequence
  derived and/or modified sequence
ggctcggggccggggccagcacccacactgggtctccacagcggcatggaggcctgcgtgtcttcactgctggtgctggccctgggggccctgtcagtaggcagctcctttgggacccagatcatcgggggccgggaggtgatcccccactcgcgcccgtacatggcctcactgcagagaaatggctcccacctgtgcgggggtgtcctggtgcacccaaagtgggtgctgacggctgcccactgcctggcccagcggatggcccagctgaggctggtgctggggctccacaccctggacagccccggtctcaccttccacatcaaggcagccatccagcaccctcgctacaagcccgtccctgccctggagaacgacctcgcgctgcttcagctggacgggaaagtgaagcccagccggaccatccggccgttggccctgcccagtaagcgccaggtggtggcagcagggactcggtgcagcatggccggctgggggctgacccaccagggcgggcgcctgtcccgggtgctgcgggagctggacctccaagtgctggacacccgcatgtgtaacaacagccgcttctggaacggcagcctctcccccagcatggtctgcctggcggccgactccaaggaccaggctccctgcaagggtgactcgggcgggcccctggtgtgtggcaaaggccgggtgttggccagagtcctgtccttcagctccagggtctgcactgacatcttcaagcctcccgtggccaccgctgtggcgccttacgtgtcctggatcaggaaggtcaccggccgatcggcctgatgccctggggtgatggggaccccctcgctgtctccacaggacccttcccctccaggggtgcagtggggtgggtgaggacgggtgggagggacagggagggaccaataaatcataatgaagaaacgctc

SEQ ID NO: 154866 - DNA, 774 bp, Artificial Sequence
  derived and/or modified sequence
atggaggcctgtgtgagcagcctgctggtgctggccctgggcgccctgtctgtgggcagcagctttggcacccagatcattggaggccgggaggtgatcccccacagccggccctacatggccagcctgcagagaaatggcagccacctgtgtggcggcgtgctggtgcaccccaagtgggtgctgacagctgcccactgcctggcccagaggatggcccagctgcggctggtgctgggcctgcacaccctggacagccctggcctgaccttccacatcaaggccgccatccagcacccccgctacaagcctgtgcctgccctggagaatgacctggccctgctgcagctggatggcaaggtgaagcccagcaggaccatccggcccctggccctgcccagcaagaggcaggtggtggccgccggcacccgctgcagcatggccggctggggcctgacccaccagggcggccgcctgagccgggtgctgcgggagctggacctgcaggtgctggacaccaggatgtgcaacaacagccgcttctggaatggcagcctgagccccagcatggtgtgcctggccgctgacagcaaggaccaggccccctgcaagggggacagcggcggccccctggtgtgtgggaagggccgggtgctggcccgggtgctgtccttcagcagccgggtgtgcacagacatcttcaagccccctgtggccacagctgtggccccctacgtgtcctggatcaggaaggtgacaggccgcagcgcctag

SEQ ID NO: 154867 - DNA, 774 bp, Artificial Sequence
  derived and/or modified sequence
atggaggcctgcgtgagcagcctgctggtgctggccctgggcgccctttccgtcggctcctccttcgggacacagattatcggcgggagggaggtgatccctcacagcagaccttacatggctagtcttcagcgaaatggcagccacctgtgcggcggagttctcgtgcatcctaaatgggtgcttaccgccgcccactgtctggcccagcgtatggcacagctgaggctggtcctcggcctccatacgctggactctcctgggctcacttttcatatcaaggccgcaatccaacacccccgatacaaaccagtgccagcacttgagaacgatttggcactccttcagctggatgggaaggtgaagccatctcgaacaatccgccccctggccctgcctagtaaaagacaggtcgtggctgctggaacacggtgcagtatggcgggctggggtctgacgcaccagggcggccgcctgtcccgcgtcctccgggaattggacttgcaggtgttagataccagaatgtgcaataattcaagattctggaacggctcattgagtcctagcatggtttgcttggcggctgatagcaaagatcaggccccctgtaagggggatagcgggggtcccctggtgtgcggtaagggacgcgttctggccagagtgctctcgttttctagcagagtatgcactgatattttcaagccccctgtcgcaaccgctgttgccccatatgtaagctggattcgaaaggtgacagggcgaagcgcttag

SEQ ID NO: 154868 - DNA, 774 bp, Artificial Sequence
  derived and/or modified sequence
atggaggcctgtgtgtccagcctactcgtgctggcccttggagccctctcagtcggcagttctttcggaactcagatcatcggaggcagggaggtgatcccacactctcgtccctacatggcttctctccagagaaatggctctcacttgtgtggaggagtgctcgtgcatccaaagtgggttctgactgccgctcattgtttggctcaaagaatggcccaactgagactggttctggggctgcatacgcttgacagtccaggcctaacatttcacattaaggcagccatccagcatccccgatataagccagttcccgctctcgagaacgatctagccttattgcagctggacgggaaggtgaaaccaagtagaacaatacgacccctggccttgccaagcaagcggcaggtcgtggcagctggaactcgatgttccatggcaggctggggactgacacaccaaggcggtaggttgagccgggtgttgagggagctcgacctacaggtgctggacacccggatgtgcaataactcgaggttctggaacggctcgctctcaccttccatggtgtgcctggctgccgattcaaaagatcaggccccatgcaaaggggactccgggggtcccctggtatgcggtaaaggaagggtgctggcgagggtactgagcttttcttcgagggtttgtactgatatattcaaaccaccagtggcaactgccgtcgccccttacgtgtcttggattcggaaagttacggggcgaagcgcatag

SEQ ID NO: 154869 - DNA, 774 bp, Artificial Sequence
  derived and/or modified sequence
atggaggcctgcgtgagcagcctgctggtgctggccctgggcgccctgagcgtgggcagcagcttcggcacccagatcatcggcggcagagaggtgatcccccacagcagaccctacatggccagcctgcagagaaacggcagccacctgtgcggcggcgtgctggtgcaccccaagtgggtgctgaccgccgcccactgcctggcccagagaatggcccagctgagactggtgctgggcctgcacaccctggacagccccggcctgaccttccacatcaaggccgccatccagcaccccagatacaagcccgtgcccgccctggagaacgacctggccctgctgcagctggacggcaaggtgaagcccagcagaaccatcagacccctggccctgcccagcaagagacaggtggtggccgccggcaccagatgcagcatggccggctggggcctgacccaccagggcggcagactgagcagagtgctgagagagctggacctgcaggtgctggacaccagaatgtgcaacaacagcagattctggaacggcagcctgagccccagcatggtgtgcctggccgccgacagcaaggaccaggccccctgcaagggcgacagcggcggccccctggtgtgcggcaagggcagagtgctggccagagtgctgagcttcagcagcagagtgtgcaccgacatcttcaagccccccgtggccaccgccgtggccccctacgtgagctggatcagaaaggtgaccggcagaagcgcctag

SEQ ID NO: 154870 - protein, 194 aa, Artificial Sequence
  derived and/or modified sequence
MTENSTSAPAAKPKRAKASKKSTDHPKYSDMIVAAIQAEKNRAGSSRQSIQKYIKSHYKVGENADSQIKLSIKRLVTTGVLKQTKGVGASGSFRLAKSDEPKKSVAFKKTKKEIKKVATPKKASKPKKAASKAPTKKPKATPVKKAKKKLAATPKKAKKPKTVKAKPVKASKPKKAKPVKPKAKSSAKRAGKKK

SEQ ID NO: 154871 - protein, 177 aa, Artificial Sequence
  derived and/or modified sequence
MTEKSTDHPKYSDMIVAAIQAEKNRAGSSRQSIQKYIKSHYKVGENADSQIKLSIKRLVTTGVLKQTKGVGASGSFRLAKSDEPKKSVAFKKTKKEIKKVATPKKASKPKKAASKAPTKKPKATPVKKAKKKLAATPKKAKKPKTVKAKPVKASKPKKAKPVKPKAKSSAKRAGKKK

SEQ ID NO: 154872 - DNA, 585 bp, Artificial Sequence
  derived and/or modified sequence
atgactgagaatagtaccagcgctccggctgctaaacctaagcgggctaaggcctcaaaaaagagtacagatcatcccaagtatagcgacatgatcgtagcagctattcaggctgagaagaatcgcgccggttctagccggcagtccatacagaaatatataaaaagccactacaaggtgggcgaaaacgccgacagccagataaagcttagtattaaacgcctcgtgacaaccggcgtgttaaaacagactaaaggggtaggagccagcggttcctttagactggccaagtccgacgagcctaagaagagcgttgcatttaaaaagaccaaaaaggagataaagaaagtcgccacacccaaaaaagctagcaagccaaagaaggccgcctcgaaggctcctacaaagaaacccaaagcaacccccgtgaaaaaagccaagaagaaactggcggctacacccaaaaaagcaaagaaacctaaaacggtgaaggcaaagcccgtcaaggcctcaaagccaaaaaaggctaaacccgtgaagcctaaagccaagtctagcgcgaagcgcgcgggaaaaaagaagtag

SEQ ID NO: 154873 - DNA, 534 bp, Artificial Sequence
  derived and/or modified sequence
atgacagaaaaaagtacagatcaccccaaatactccgatatgatcgtcgctgcaatccaggccgagaaaaatagagccgggtcttcacgtcaatcgattcaaaagtatatcaagtcgcattataaggtcggggaaaatgctgactctcagatcaagctgagcattaaaagacttgtgaccacaggtgtcctcaaacagaccaaaggagtgggtgcaagcggctcctttagacttgccaagagcgacgaaccaaagaagtctgtggctttcaagaagactaaaaaggagatcaaaaaggtcgcaacgccaaaaaaggcttccaagccaaaaaaggccgcttcaaaagcccctactaagaaacccaaagctacaccagtgaagaaggcaaagaaaaaactggcggcaacaccaaagaaggccaaaaagccaaaaacagttaaggccaaacccgttaaagcgagcaagccaaagaaggccaagccagtcaaaccgaaggcgaagtcatcagccaaaagagcaggcaagaagaaatag

SEQ ID NO: 154874 - DNA, 2329 bp, Artificial Sequence
  derived and/or modified sequence
ggaagaaacacagatggcggcggcgcagcgccattccgggccgggagcaggcagccagcagccctgtcctcaccgcggtccgcccgccgccgctaaatacccggatgcgccgcccaagcgccagacgcggagctgggaaaagggaggcagaggaggcggaggcagaggcagaggcagaggcagagcccgagcccggtgccgagaccaagcgacagaccggcggggctgggcctcgcaaagccggctcggcgagctctcccgacacccgagccggggaggaaaagcagcgactcctcgctcgcatccccgggagccgcactccagactggcccggtagtcaggggctcaggagcagatcccgaggcaggctttgctcagcctccgacgagggctggccctttggaaggcgccttcaacagccggaccagacaggccaccatgaccgagaattccacgtccgcccctgcggccaagcccaagcgggccaaggcctccaagaagtccacagaccaccccaagtattcagacatgatcgtggctgccatccaggccgagaagaaccgcgctggctcctcgcgccagtccattcagaagtatatcaagagccactacaaggtgggtgagaacgctgactcgcagatcaagttgtccatcaagcgcctggtcaccaccggtgtcctcaagcagaccaaaggggtgggggcctcggggtccttccggctagccaagagcgacgaacccaagaagtcagtggccttcaagaagaccaagaaggaaatcaagaaggtagccacgccaaagaaggcatccaagcccaagaaggctgcctccaaagccccaaccaagaaacccaaagccaccccggtcaagaaggccaagaagaagctggctgccacgcccaagaaagccaaaaaacccaagactgtcaaagccaagccggtcaaggcatccaagcccaaaaaggccaaaccagtgaaacccaaagcaaagtccagtgccaagagggccggcaagaagaagtgacaatgaagtcttttcttgcggacactccctcctgtctcctattttctgtaaataattttctccttttttctctcttgatgctcaccaccaccttttgcccccttctgttctgactttataagagacaggatttggattcttcagaaattacagaataattcatttttccttaaccagttgtgcaaggacagcaacaaccaatctaatgatgagaatgtacttatattttgttttgctattaacctacttacggggttagggatttgcggggggggcttgtgtgttttgttggcttgtttgccatgaaggtagatgtgggtggggagaagacacaaggcagtttgttctggctagatgagagggaacccaggaattgtgaggttagcaggaatatctttagggtgagtgagttttctttgagttgggcacccgttgtgagagtttcagaacctttggccagcaggagagaggtggtagggagcagccagccggcaaaggaaggagggggaaaaaaaccgccaccgggctgacttccacctcccagtggtgagcagtgggggcccaaacccagtttccttctcatttttgttagtttgcgctttcggcctccctattttcttagggaaggggagtggggtccaagtgacagctggatgggagaagccatagtttctcccagtcagctaggatgtagccattgggggatctttgtggcttcagcaaattctcttgttaaaccggagtgaaaacttcaggggaagggtggggagtcagccaagtgcctcagtgtgccctgttgaaacttaggtttttccacgcaatcgatggattgtgtcctaggaagacttttcttttcctctggatttttgttcctcctgtacaagaggtgtctttgcttggtttggtggggctgcggccacttaaaacctcccgatctctttttgagtcctttattataagtagttgtagctgcgggagggggagggggagtgggcgggcagtggatagtaagacttactgcagtcgatttgggatttgctaagtagttttacagagctagatctgtgtgcatgtgtgtgtttgtgtatatatacatatctagggctagtacttagtttcacacccgggagctgggagaaaaaacctgtacagttgtctttctcttatttttaataaaatagaaaaatcgcgcacttgcgcgtcccccccccacccccttttttaaacaagtgttacttgtgccgggaaaattttgctgtctttgtaattttaaaactttaaaataaattggaaaagggagaaactg

SEQ ID NO: 154875 - DNA, 1172 bp, Artificial Sequence
  derived and/or modified sequence
agacgcggagctgggaaaagggaggcagaggaggcggaggcagaggcagaggcagaggcagagcccgagcccggtgccgagaccaagcgacagaccggcggggctgggcctcgcaaagccggctcggcgagctctcccgacacccgagccggggaggaaaagcagcgactcctcgctcgcatccccgggagccgcactccagactggcccggtagtcaggggctcaggagcagatcccgaggcaggctttgctcagcctccgacgagggctggccctttggaaggcgccttcaacagccggaccagacaggccaccatgaccgagaagtccacagaccaccccaagtattcagacatgatcgtggctgccatccaggccgagaagaaccgcgctggctcctcgcgccagtccattcagaagtatatcaagagccactacaaggtgggtgagaacgctgactcgcagatcaagttgtccatcaagcgcctggtcaccaccggtgtcctcaagcagaccaaaggggtgggggcctcggggtccttccggctagccaagagcgacgaacccaagaagtcagtggccttcaagaagaccaagaaggaaatcaagaaggtagccacgccaaagaaggcatccaagcccaagaaggctgcctccaaagccccaaccaagaaacccaaagccaccccggtcaagaaggccaagaagaagctggctgccacgcccaagaaagccaaaaaacccaagactgtcaaagccaagccggtcaaggcatccaagcccaaaaaggccaaaccagtgaaacccaaagcaaagtccagtgccaagagggccggcaagaagaagtgacaatgaagtcttttcttgcggacactccctcctgtctcctattttctgtaaataattttctccttttttctctcttgatgctcaccaccaccttttgcccccttctgttctgactttataagagacaggatttggattcttcagaaattacagaataattcatttttccttaaccagttgtgcaaggacagcaacaaccaatctaatgatgagaatgtacttatattttgttttgctattaacctacttacggggttagggatttgcggggggggcttgtgtgttttgttggcttgtttgccatgaaggtagatgtgggtgg

SEQ ID NO: 154876 - DNA, 585 bp, Artificial Sequence
  derived and/or modified sequence
atgacagagaacagcaccagcgccccagctgccaagcccaagagggccaaggccagcaagaagagcacagaccaccccaagtacagcgacatgattgtggccgccatccaggccgagaagaacagagctggcagcagccggcagagcatccagaagtacatcaagagccactacaaggtgggggagaatgctgacagccagatcaagctgagcatcaagaggctggtgaccaccggggtgctgaagcagaccaagggcgtgggcgccagcggcagcttccggctggccaagagtgatgagcccaagaagtctgtggccttcaagaagaccaagaaggagatcaagaaggtggccacccccaagaaggccagcaagcccaagaaggccgccagcaaggcccccaccaagaagcccaaggccacccctgtgaagaaggccaagaagaagctggccgccacccccaagaaggccaagaagcccaagacagtgaaggccaagcctgtgaaggccagcaagcccaagaaggccaagcctgtgaagcccaaggccaagagcagcgccaagagagctgggaagaagaagtag

SEQ ID NO: 154877 - DNA, 534 bp, Artificial Sequence
  derived and/or modified sequence
atgacagagaagagcacagaccaccccaagtacagcgacatgattgtggccgccatccaggccgagaagaacagagctggcagcagccggcagagcatccagaagtacatcaagagccactacaaggtgggagaaaatgctgacagccagatcaagctgagcatcaagaggctggtgaccactggagtgctgaagcagaccaagggcgtgggcgccagcggcagcttccggctggccaagagtgatgagcccaagaagtctgtggccttcaagaagaccaagaaggagatcaagaaggtggccacccccaagaaggccagcaagcccaagaaggccgccagcaaggcccccaccaagaagcccaaggccacccctgtgaagaaggccaagaagaagctggccgccacccccaagaaggccaagaagcccaagacagtgaaggccaagcctgtgaaggccagcaagcccaagaaggccaagcctgtgaagcccaaggccaagagcagcgccaagagagctgggaagaagaagtag

SEQ ID NO: 154878 - DNA, 585 bp, Artificial Sequence
  derived and/or modified sequence
atgaccgagaacagcaccagcgcccccgccgccaagcccaagcgggccaaggcttcaaaaaagagcaccgaccatcctaagtattcagacatgattgtggccgctatccaggccgaaaagaatcgagccggctcaagcagacagtccatccagaagtacattaaatcacattataaagttggtgaaaacgcagactcccagataaaactgtctatcaagaggctggtgaccaccggcgttctgaagcagactaagggcgtaggcgcatctggatcttttagactggcaaaaagtgacgagcctaagaaatccgttgccttcaagaaaacaaaaaaggagattaagaaagtggccacacccaaaaaagccagcaagcctaagaaagcggctagcaaggcaccgacaaagaagcctaaagccacgcccgtgaagaaggcgaaaaagaaacttgctgcaaccccaaagaaggcaaagaaaccaaaaaccgtgaaagccaaaccagttaaggcctccaagcctaagaaagcaaagcctgtcaagccaaaggctaagagctctgcaaaaagagcaggcaaaaagaaatag

SEQ ID NO: 154879 - DNA, 534 bp, Artificial Sequence
  derived and/or modified sequence
atgaccgagaagagcaccgaccaccccaagtacagcgacatgatcgtcgctgcgatccaagccgaaaaaaaccgggctggttccagtcggcagtccattcaaaagtatattaaatcacattacaaggtgggcgagaacgctgacagccaaatcaagctgtcgatcaagcgtttagtgaccaccggagttctcaaacagacaaagggtgtgggagcatccggcagtttccgcctcgccaaatcggatgaacctaagaaaagcgtggcctttaagaagacaaagaaagaaattaagaaagtagccacaccaaagaaagcatcaaagcctaagaaagccgcctctaaggccccgacgaaaaaacccaaggcgactccggtgaagaaagcaaagaaaaagctggcagctacaccaaaaaaggccaagaaaccaaaaacagttaaagccaagcccgtgaaagcctcgaagcctaaaaaggcaaagcccgttaagcccaaagctaagtcctccgccaagagggctggaaaaaaaaagtag

SEQ ID NO: 154880 - DNA, 585 bp, Artificial Sequence
  derived and/or modified sequence
atgaccgaaaatagcactagcgccccagccgctaagccaaaacgagctaaagcttctaagaaatcaacagatcacccaaaatactcagacatgatcgttgcagcaatccaagctgagaagaaccgagctggcagttccaggcagagcatccagaaatacatcaagtctcactacaaggttggcgagaatgcagatagtcagattaagctcagcataaaaaggctggtgacgacaggtgtactgaaacaaaccaagggagtcggggcttctggttcatttcgccttgcaaagagcgacgaacccaagaaaagtgttgcattcaagaagacaaaaaaagagatcaagaaggtggccactccaaagaaggctagtaagcccaagaaggccgcttccaaagctccaaccaaaaagcctaaggcaaccccagtcaagaaggccaaaaagaagctggccgcaactcccaaaaaggccaaaaagcccaaaaccgtcaaagccaaacctgtgaaagctagcaagcccaaaaaagcaaagccagtgaagcctaaggcgaagagttcagcaaagagggctgggaaaaaaaagtag

SEQ ID NO: 154881 - DNA, 534 bp, Artificial Sequence
  derived and/or modified sequence
atgacagaaaagtctacggaccatccaaagtactcagatatgattgtcgccgcaatccaagctgaaaagaatcgtgctggcagctccaggcagtccattcaaaagtacatcaagtcacactataaagtaggggaaaatgctgacagtcagataaaactgtcgattaagcgtctggtgacgacaggcgtccttaagcagacaaagggtgttggggcatctggaagcttccgtcttgcgaagagcgatgagcctaagaaatctgttgccttcaaaaagaccaagaaagagattaagaaagtagccacgcccaaaaaggccagtaaaccaaaaaaagctgcatcaaaggctcccaccaaaaaacccaaagctaccccagtgaagaaggcgaaaaaaaagctcgccgctacgccaaagaaggcaaagaaacctaagaccgtaaaggcaaagcctgtgaaggccagcaaacctaagaaggccaagcctgtgaagccaaaggccaaatcatccgctaaacgggctgggaaaaagaaatag

SEQ ID NO: 154882 - DNA, 585 bp, Artificial Sequence
  derived and/or modified sequence
atgaccgagaacagcaccagcgcccccgccgccaagcccaagagagccaaggccagcaagaagagcaccgaccaccccaagtacagcgacatgatcgtggccgccatccaggccgagaagaacagagccggcagcagcagacagagcatccagaagtacatcaagagccactacaaggtgggcgagaacgccgacagccagatcaagctgagcatcaagagactggtgaccaccggcgtgctgaagcagaccaagggcgtgggcgccagcggcagcttcagactggccaagagcgacgagcccaagaagagcgtggccttcaagaagaccaagaaggagatcaagaaggtggccacccccaagaaggccagcaagcccaagaaggccgccagcaaggcccccaccaagaagcccaaggccacccccgtgaagaaggccaagaagaagctggccgccacccccaagaaggccaagaagcccaagaccgtgaaggccaagcccgtgaaggccagcaagcccaagaaggccaagcccgtgaagcccaaggccaagagcagcgccaagagagccggcaagaagaagtag

SEQ ID NO: 154883 - DNA, 534 bp, Artificial Sequence
  derived and/or modified sequence
atgaccgagaagagcaccgaccaccccaagtacagcgacatgatcgtggccgccatccaggccgagaagaacagagccggcagcagcagacagagcatccagaagtacatcaagagccactacaaggtgggcgagaacgccgacagccagatcaagctgagcatcaagagactggtgaccaccggcgtgctgaagcagaccaagggcgtgggcgccagcggcagcttcagactggccaagagcgacgagcccaagaagagcgtggccttcaagaagaccaagaaggagatcaagaaggtggccacccccaagaaggccagcaagcccaagaaggccgccagcaaggcccccaccaagaagcccaaggccacccccgtgaagaaggccaagaagaagctggccgccacccccaagaaggccaagaagcccaagaccgtgaaggccaagcccgtgaaggccagcaagcccaagaaggccaagcccgtgaagcccaaggccaagagcagcgccaagagagccggcaagaagaagtag

SEQ ID NO: 154884 - protein, 213 aa, Artificial Sequence [sequence omitted]

SEQ ID NO: 154885 - DNA, 642 bp, Artificial Sequence
  derived and/or modified sequence
atgagtgaaaccgccccagcggcccccgccgccgcacctcccgctgagaaagcccccgtgaagaagaaggccgcaaagaaagccgggggcactccgcgaaaagcctccgggccccctgtgtcggaactgattaccaaggcagtggccgcatcaaaagagagaagtggtgtgagcctcgctgccttgaagaaggcacttgccgcagcagggtatgacgtggagaagaataactccagaattaagctgggactgaagagtctggtgtccaagggtacccttgtgcagaccaagggcacaggcgcctccggaagcttcaaactcaacaagaaagcagcaagtggggaggcgaagccaaaggtcaaaaaagccggaggaacaaaaccaaaaaaacccgtaggggccgctaagaagccaaagaaggcagccgggggagccacccctaagaaatccgcgaaaaagaccccaaagaaggcaaagaagcccgccgctgccaccgtcactaagaaagtcgctaagtcacctaagaaagctaaggtggctaagccgaagaaagctgctaagtctgcagctaaagccgttaaacccaaagccgctaaacctaaagttgtgaaacccaaaaaagccgcacctaaaaaaaagtag

SEQ ID NO: 154886 - DNA, 666 bp, Artificial Sequence
  derived and/or modified sequence
atgtctgagacagctccgctcgcccccaccatacctgctccagccgagaagacacccgttaagaagaaggccaaaaaagctggcgccacagccggaaagagaaaagcctctggtccaccagtgtccgaactgataaccaaggccgtggccgcctcaaaggagagatctggggtttctctggccgccctaaaaaaggccctcgctgctgcgggatacgacgtggagaaaaacaatagccggatcaagctaggtctgaagtccctggtgagcaaaggcacattggttcagactaagggcacgggcgcctctggttcatttaagctgaacaagaaggcggcatcaggagagggaaaacctaaagcaaagaaagcaggtgccgcgaaacccaggaagcccgcaggggccgctaaaaaacctaagaaagtggccggtgccgccacgccgaaaaagagcatcaaaaagacacctaagaaggttaagaagcccgccaccgccgcgggcacaaaaaaggttgccaagtctgccaaaaaagtcaaaactccccagcccaagaaggccgcaaagagcccagctaaggccaaggccccaaagcccaaagccgcaaagccaaagagcggcaaacccaaggtaaccaaagcaaaaaaagcagcccccaaaaaaaagtag

SEQ ID NO: 154887 - DNA, 732 bp, Artificial Sequence
  derived and/or modified sequence
catcggcgctttgccacttgtacccgagtttttgattctcaacatgtccgagactgctcctgccgctcccgctgccgcgcctcctgcggagaaggcccctgtaaagaagaaggcggccaaaaaggctgggggtacgcctcgtaaggcgtctggtcccccggtgtcagagctcatcaccaaggctgtggccgcctctaaagagcgtagcggagtttctctggctgctctgaaaaaagcgttggctgccgccggctatgatgtggagaaaaacaacagccgtatcaaacttggtctcaagagcctggtgagcaagggcactctggtgcaaacgaaaggcaccggtgcttctggctcctttaaactcaacaagaaggcagcctccggggaagccaagcccaaggttaaaaaggcgggcggaaccaaacctaagaagccagttggggcagccaagaagcccaagaaggcggctggcggcgcaactccgaagaagagcgctaagaaaacaccgaagaaagcgaagaagccggccgcggccactgtaaccaagaaagtggctaagagcccaaagaaggccaaggttgcgaagcccaagaaagctgccaaaagtgctgctaaggctgtgaagcccaaggccgctaagcccaaggttgtcaagcctaagaaggcggcgcccaagaagaaataggcgaacgcctacttctaaaacccaaaaggctcttttcagagccacca

SEQ ID NO: 154888 - DNA, 777 bp, Artificial Sequence
  derived and/or modified sequence
catgctgttctgacagtttgagattacttattgtcttttctgggaagacaaaaacatgtcggagactgctccacttgctcctaccattcctgcacccgcagaaaaaacacctgtgaagaaaaaggcgaagaaggcaggcgcaactgctgggaaacgcaaagcatccggacccccagtatctgagcttatcaccaaggcagtggcagcttctaaggagcgcagcggcgtttctctggccgcgcttaagaaagcgcttgcggctgctggctacgatgtagaaaaaaacaacagccgtatcaagcttggcctcaagagcttggtgagcaaaggtactctggtgcagaccaaaggtaccggtgcttctggctccttcaaactcaacaagaaagcggcttccggggaaggcaaacccaaggccaaaaaggctggcgcagccaagcctaggaagcctgctggggcagccaagaagcccaagaaggtggctggcgccgctaccccgaagaaaagcatcaaaaagactcctaagaaggtaaagaagccagcaaccgctgctgggaccaagaaagtggccaagagtgcgaaaaaggtgaaaacacctcagccaaaaaaagctgccaagagtccagctaaggccaaagcccctaagcccaaggcggccaagcctaagtcggggaagccgaaggttacaaaggcaaagaaggcagctccgaagaaaaagtgaaactggcgggacgttcccctttgaaaattttaaacggctcttttcagagccaccca

SEQ ID NO: 154889 - DNA, 642 bp, Artificial Sequence
  derived and/or modified sequence
atgtctgaaacagccccagctgccccagctgctgcccctcctgctgagaaggcccctgtgaagaagaaggccgccaagaaggccggcggcacccccaggaaggccagcggcccccctgtgtctgagctgatcaccaaggctgtggccgccagcaaggagaggtctggagtgtccctggccgccctgaagaaggccctggccgctgctggctatgatgtggagaagaacaacagccgcatcaagctgggcctgaagagcctggtgtccaagggcaccctggtgcagaccaagggcactggagccagcggcagcttcaagctgaacaagaaggccgccagcggggaggccaagcccaaggtgaagaaggccggcggcaccaagcccaagaagcctgtgggcgccgccaagaagcccaagaaggccgccggcggggccacccccaagaagagcgccaagaagacccccaagaaggccaagaagccagctgctgccaccgtgaccaagaaggtggccaagagccccaagaaggccaaggtggccaagcccaagaaggccgccaagtctgctgccaaggctgtgaagcccaaggccgccaagcccaaggtggtgaagcccaagaaggccgcccccaagaagaagtag

SEQ ID NO: 154890 - DNA, 666 bp, Artificial Sequence
  derived and/or modified sequence
atgtctgaaacagcccccctggcccccaccatcccagccccagctgagaagacccctgtgaagaagaaggccaagaaggccggggccacagctgggaagaggaaggccagcggcccccctgtgtctgagctgatcaccaaggctgtggccgccagcaaggagaggtctggagtgtccctggccgccctgaagaaggccctggccgccgccggctatgatgtggagaagaacaacagccgcatcaagctgggcctgaagagcctggtgtccaagggcaccctggtgcagaccaagggcaccggggccagcggcagcttcaagctgaacaagaaggccgccagcggggagggcaagcccaaggccaagaaggccggggccgccaagcccaggaagccagctggagctgccaagaagcccaagaaggtggccggggccgccacccccaagaagagcatcaagaagacccccaagaaggtgaagaagccagccacagctgctggcaccaagaaggtggccaagagcgccaagaaggtgaagaccccccagcccaagaaggccgccaagagccctgccaaggccaaggcccccaagcccaaggccgccaagcccaagagcggcaagcccaaggtgaccaaggccaagaaggccgcccccaagaagaagtag

SEQ ID NO: 154891 - DNA, 642 bp, Artificial Sequence
  derived and/or modified sequence
atgagcgagaccgcccccgccgcccccgccgccgccccccccgccgagaaagcgcccgtcaagaaaaaggccgctaaaaaagccgggggaacaccccgcaaggccagcggccccccagtgagcgagctcatcacaaaggccgtggccgccagcaaggagaggagcggggtatctctggcagccctcaagaaagcattggccgctgccggctatgatgtggagaaaaacaattcgcggattaagctggggctgaaatccttggtctcaaaaggtacactggttcagactaagggcaccggggcttccggctccttcaagttgaataaaaaggctgcgtcaggcgaagctaagccaaaggtcaagaaagcaggtggcactaagcctaagaaaccagtgggtgccgcaaaaaaacccaagaaagccgcaggaggagctacacctaagaaatcagccaagaagactcccaagaaagccaaaaagccagcagccgctacagtcactaaaaaggtggcgaagtcaccaaagaaagcgaaggttgcaaagcccaagaaggctgcaaagagcgccgccaaagccgtgaaacctaaggcagcaaaaccaaaagtcgtcaagcccaaaaaagccgctccaaaaaagaagtag

SEQ ID NO: 154892 - DNA, 666 bp, Artificial Sequence
  derived and/or modified sequence
atgagcgagaccgcccccctggcccccaccatccccgcccccgccgagaagacaccagtcaaaaaaaaagcaaaaaaggcgggagcaaccgccggaaagagaaaagccagtgggcccccggtgtccgagctcatcactaaagcagtcgccgcctcaaaggagcggagcggcgtttccctggcagcactgaaaaaggccttggccgccgccggttacgatgtggagaaaaacaactccaggataaaacttggactaaaaagcctggtgagcaagggtactctcgtccagactaaagggactggggcttccgggtcttttaaacttaataaaaaagccgctagcggtgaggggaaaccgaaggccaagaaggcgggcgccgctaaaccgcgcaaacccgcaggcgctgcgaagaaacctaagaaggtggcaggcgcagcaacacccaagaagagtattaagaaaactccgaagaaggttaagaagcctgcgactgccgccggtactaagaaggttgccaaatccgccaagaaagtaaaaaccccccaacctaagaaagctgcgaagagccccgccaaggcaaaggcacctaagcctaaggcagctaagcctaagtctggtaaaccaaaggtgaccaaggccaagaaggctgctcccaagaagaagtag

SEQ ID NO: 154893 - DNA, 642 bp, Artificial Sequence
  derived and/or modified sequence
atgtccgagactgcccctgctgccccagcagcggctcctcctgcagagaaagctccggttaagaaaaaggctgctaagaaagccggtggtacccctagaaaggcctcaggacctcctgtgagtgagctgatcacgaaggctgtagccgcaagcaaagagagatctggggtgtctcttgccgctctgaagaaagctctagctgccgcaggctacgatgtggagaaaaataattcacggatcaagctcggcctgaaatccctggtgagtaagggcacgttggtccaaactaagggcacaggcgcatctgggtcttttaagctaaacaagaaagccgcatccggcgaagctaaaccaaaggtaaagaaagccggaggcacaaagcccaaaaagccagttggcgctgctaagaagcctaaaaaggcagccggaggtgccacccctaaaaaatccgcgaagaagacgccaaaaaaagcaaaaaaacccgctgctgccaccgttaccaaaaaggtggccaaaagccctaaaaaggccaaggtggcaaaacccaagaaagcagccaaaagcgctgccaaagcagtgaagcccaaggccgctaaacccaaagtggtaaaaccaaaaaaggcagcaccgaagaaaaaatag

SEQ ID NO: 154894 - DNA, 666 bp, Artificial Sequence
  derived and/or modified sequence
atgtcggagaccgccccattagctcctaccattcccgctccagccgagaaaacccctgtcaagaaaaaggctaagaaagccggtgccactgctggcaaaaggaaagccagcggaccccctgtgtcggagctcatcacaaaagccgtagctgcttccaaagagcgctcaggggtctctctcgctgcccttaagaaagccttggccgctgctgggtatgatgtagagaagaataacagccggatcaagctcggactcaagtctctggtcagcaaagggaccctcgtgcagacaaagggcacgggtgcctctgggagctttaaactgaataagaaagctgcctcgggcgaagggaaaccaaaggcaaagaaagcaggagctgcaaagcctaggaagcctgccggagcggctaagaagcctaagaaggtcgcaggggcagccacccccaagaagagtatcaagaaaacaccaaaaaaggtgaaaaagcccgctaccgctgctgggaccaaaaaagtcgcaaaatcagccaagaaagtaaagacaccccagccaaagaaggccgcaaagagccctgctaaagccaaggcccctaaacctaaggccgcaaaacccaagtctgggaagcccaaggttactaaagccaagaaagcagcacctaagaaaaagtag

SEQ ID NO: 154895 - DNA, 642 bp, Artificial Sequence
  derived and/or modified sequence
atgagcgagaccgcccccgccgcccccgccgccgccccccccgccgagaaggcccccgtgaagaagaaggccgccaagaaggccggcggcacccccagaaaggccagcggcccccccgtgagcgagctgatcaccaaggccgtggccgccagcaaggagagaagcggcgtgagcctggccgccctgaagaaggccctggccgccgccggctacgacgtggagaagaacaacagcagaatcaagctgggcctgaagagcctggtgagcaagggcaccctggtgcagaccaagggcaccggcgccagcggcagcttcaagctgaacaagaaggccgccagcggcgaggccaagcccaaggtgaagaaggccggcggcaccaagcccaagaagcccgtgggcgccgccaagaagcccaagaaggccgccggcggcgccacccccaagaagagcgccaagaagacccccaagaaggccaagaagcccgccgccgccaccgtgaccaagaaggtggccaagagccccaagaaggccaaggtggccaagcccaagaaggccgccaagagcgccgccaaggccgtgaagcccaaggccgccaagcccaaggtggtgaagcccaagaaggccgcccccaagaagaagtag

SEQ ID NO: 154896 - DNA, 666 bp, Artificial Sequence
  derived and/or modified sequence
atgagcgagaccgcccccctggcccccaccatccccgcccccgccgagaagacccccgtgaagaagaaggccaagaaggccggcgccaccgccggcaagagaaaggccagcggcccccccgtgagcgagctgatcaccaaggccgtggccgccagcaaggagagaagcggcgtgagcctggccgccctgaagaaggccctggccgccgccggctacgacgtggagaagaacaacagcagaatcaagctgggcctgaagagcctggtgagcaagggcaccctggtgcagaccaagggcaccggcgccagcggcagcttcaagctgaacaagaaggccgccagcggcgagggcaagcccaaggccaagaaggccggcgccgccaagcccagaaagcccgccggcgccgccaagaagcccaagaaggtggccggcgccgccacccccaagaagagcatcaagaagacccccaagaaggtgaagaagcccgccaccgccgccggcaccaagaaggtggccaagagcgccaagaaggtgaagaccccccagcccaagaaggccgccaagagccccgccaaggccaaggcccccaagcccaaggccgccaagcccaagagcggcaagcccaaggtgaccaaggccaagaaggccgcccccaagaagaagtag

SEQ ID NO: 154897 - protein, 221 aa, Artificial Sequence
  derived and/or modified sequence
MSETAPLAPTIPAPAEKTPVKKKAKKAGATAGKRKASGPPVSELITKAVAASKERSGVSLAALKKALAAAGYDVEKNNSRIKLGLKSLVSKGTLVQTKGTGASGSFKLNKKAASGEGKPKAKKAGAAKPRKPAGAAKKPKKVAGAATPKKSIKKTPKKVKKPATAAGTKKVAKSAKKVKTPQPKKAAKSPAKAKAPKPKAAKPKSGKPKVTKAKKAAPKKK

SEQ ID NO: 154898 - protein, 219 aa, Artificial Sequence
  derived and/or modified sequence
MSETAPAAPAAPAPAEKTPVKKKARKSAGAAKRKASGPPVSELITKAVAASKERSGVSLAALKKALAAAGYDVEKNNSRIKLGLKSLVSKGTLVQTKGTGASGSFKLNKKAASGEAKPKAKKAGAAKAKKPAGAAKKPKKATGAATPKKSAKKTPKKAKKPAAAAGAKKAKSPKKAKAAKPKKAPKSPAKAKAVKPKAAKPKTAKPKAAKPKKAAAKKK

SEQ ID NO: 154899 - DNA, 660 bp, Artificial Sequence
  derived and/or modified sequence
atgagcgaaaccgcccccgccgcaccagcagctccggcgccagccgaaaagactccagtgaaaaaaaaggcccgaaaaagtgcgggtgcagccaagaggaaggcttccgggccccccgtaagcgagctgatcaccaaggcggtggcagcctccaaggagcgaagcggcgtgtctcttgccgcactaaagaaggctctcgccgccgcaggctatgacgtggagaaaaataattctcggattaagcttggcctaaaatccctggtttctaagggtaccttagtacagactaagggaaccggggctagcggatcgtttaaactgaacaaaaaggctgcatctggtgaggctaaacccaaggccaaaaaggccggggcggcgaaggcgaagaagccagctggggcagcaaagaagccaaaaaaagctacaggggcagccactccgaagaaatcagccaagaaaacccctaagaaggccaagaagcccgccgccgccgccggggccaagaaagctaagtcgccgaaaaaggccaaagctgccaagcctaaaaaagccccaaagtcccccgcaaaagccaaggcggtaaagcctaaagcagccaagcccaagacagccaagcctaaagcagctaaaccgaagaaggctgcggctaagaaaaaatag

SEQ ID NO: 154900 - DNA, 785 bp, Artificial Sequence
  derived and/or modified sequence
agtcccggccagtgcctctgcttccggctcgaattgctctcgctcacgcttgccttcaacatgtccgagactgcgcctgccgcgcccgctgctccggcccctgccgagaagactcccgtgaagaagaaggcccgcaagtctgcaggtgcggccaagcgcaaagcgtctgggcccccggtgtccgagctcattactaaagctgttgccgcctccaaggagcgcagcggcgtatctttggccgctctcaagaaagcgctggcagccgctggctatgacgtggagaagaacaacagccgcatcaagctgggtctcaagagcctggtgagcaagggcaccctggtgcagaccaagggcaccggcgcgtcgggttccttcaaactcaacaagaaggcggcctctggggaagccaagcctaaggctaaaaaggcaggcgcggccaaggccaagaagccagcaggagcggcgaagaagcccaagaaggcgacgggggcggccacccccaagaagagcgccaagaagaccccaaagaaggcgaagaagccggctgcagctgctggagccaaaaaagcgaaaagcccgaaaaaggcgaaagcagccaagccaaaaaaggcgcccaagagcccagcgaaggccaaagcagttaaacccaaggcggctaaaccaaagaccgccaagcccaaggcagccaagccaaagaaggcggcagccaagaaaaagtagaaagttcctttggccaactgcttagaagcccaacacaacccaaaggctcttttcagagccaccca

SEQ ID NO: 154901 - DNA, 660 bp, Artificial Sequence
  derived and/or modified sequence
atgtctgaaacagccccagctgccccagctgccccagccccagctgagaagacccctgtgaagaagaaggccaggaagtctgctggggccgccaagaggaaggccagcggcccccctgtgtctgagctgatcaccaaggctgtggccgccagcaaggagaggtctggagtgtccctggccgccctgaagaaggccctggccgctgctggctatgatgtggagaagaacaacagccgcatcaagctgggcctgaagagcctggtgtccaagggcaccctggtgcagaccaagggcactggagccagcggcagcttcaagctgaacaagaaggccgccagcggggaggccaagcccaaggccaagaaggccggggccgccaaggccaagaagccagctggggccgccaagaagcccaagaaggccaccggggccgccacccccaagaagagcgccaagaagacccccaagaaggccaagaagccagctgctgctgctggggccaagaaggccaagagccccaagaaggccaaggccgccaagcccaagaaggcccccaagagccctgccaaggccaaggctgtgaagcccaaggccgccaagcccaagacagccaagcccaaggccgccaagcccaagaaggctgctgccaagaagaagtag

SEQ ID NO: 154902 - DNA, 660 bp, Artificial Sequence
  derived and/or modified sequence
atgagcgagaccgcccccgccgcccccgccgcccccgcccccgccgagaaaacaccggtgaagaagaaggcccggaaatcagctggtgccgccaagcggaaggcaagcggcccccctgtgtccgaactgatcactaaagcagtcgcggcttctaaggaacgaagcggcgtttccctggccgctcttaaaaaggctttggccgctgcaggctacgacgtcgagaaaaacaactctcggatcaagctgggcctgaagagcctagtgagcaagggcacattggtgcagactaagggaacaggggcgtcaggttcctttaaattaaacaagaaggcggccagcggcgaagctaaacccaaagctaaaaaggcaggagctgccaaggccaagaaacctgctggagcggccaagaaacccaaaaaagctaccggggcagctaccccgaagaagagcgccaaaaaaacacccaagaaagccaaaaagcccgccgctgcagctggggccaagaaagcgaagtcccctaaaaaagcgaaggctgctaagccaaaaaaagcccccaagagccctgcgaaggcaaaggctgtcaagccaaaggcagctaaacccaagacagcaaaaccaaaggccgcaaagcctaagaaggctgccgcaaagaagaaatag

SEQ ID NO: 154903 - DNA, 660 bp, Artificial Sequence
  derived and/or modified sequence
atgtcagagaccgcacctgccgcacctgccgctcctgctcccgcagagaagacacctgtgaagaagaaagcccgtaaaagcgccggagctgcaaagcgaaaggctagtggaccgcctgttagtgagctcatcactaaggccgtcgcagcaagtaaggagcgctcaggagtgtctcttgctgccctcaagaaggccctggccgctgctggctatgatgtcgaaaagaacaatagtcgcattaaactcggcctaaaaagtctcgtctctaaaggcacattggttcagacgaagggcacaggtgcgtctggcagttttaaattaaataagaaggctgcctcaggagaggcgaagccaaaagccaaaaaggcgggagctgccaaggccaagaagccagctggggctgctaagaaacctaaaaaggccaccggggcagcaacaccaaagaaatccgcaaaaaagacacccaaaaaagcgaagaaacccgcagccgcagccggagccaagaaggccaagagtcccaaaaaggcaaaagccgcaaaaccaaaaaaagcaccgaagtctcccgctaaggctaaagccgtcaaaccaaaggccgctaagcccaagactgccaagcccaaagcggcaaaacccaaaaaagccgcagctaaaaaaaagtag

SEQ ID NO: 154904 - DNA, 660 bp, Artificial Sequence
  derived and/or modified sequence
atgagcgagaccgcccccgccgcccccgccgcccccgcccccgccgagaagacccccgtgaagaagaaggccagaaagagcgccggcgccgccaagagaaaggccagcggcccccccgtgagcgagctgatcaccaaggccgtggccgccagcaaggagagaagcggcgtgagcctggccgccctgaagaaggccctggccgccgccggctacgacgtggagaagaacaacagcagaatcaagctgggcctgaagagcctggtgagcaagggcaccctggtgcagaccaagggcaccggcgccagcggcagcttcaagctgaacaagaaggccgccagcggcgaggccaagcccaaggccaagaaggccggcgccgccaaggccaagaagcccgccggcgccgccaagaagcccaagaaggccaccggcgccgccacccccaagaagagcgccaagaagacccccaagaaggccaagaagcccgccgccgccgccggcgccaagaaggccaagagccccaagaaggccaaggccgccaagcccaagaaggcccccaagagccccgccaaggccaaggccgtgaagcccaaggccgccaagcccaagaccgccaagcccaaggccgccaagcccaagaaggccgccgccaagaagaagtag

SEQ ID NO: 154905 - protein, 226 aa, Artificial Sequence
  derived and/or modified sequence
MSETAPAETATPAPVEKSPAKKKATKKAAGAGAAKRKATGPPVSELITKAVAASKERNGLSLAALKKALAAGGYDVEKNNSRIKLGLKSLVSKGTLVQTKGTGASGSFKLNKKAASGEAKPKAKKAGAAKAKKPAGATPKKAKKAAGAKKAVKKTPKKAKKPAAAGVKKVAKSPKKAKAAAKPKKATKSPAKPKAVKPKAAKPKAAKPKAAKPKAAKAKKAAAKKK

SEQ ID NO: 154906 - DNA, 681 bp, Artificial Sequence
  derived and/or modified sequence
atgagtgagaccgctccagccgagacagcaaccccagcccctgtagaaaagtcaccagcgaagaagaaagcgaccaaaaaggctgcaggagccggggccgccaagcggaaagcaacaggtccaccggtgagcgagctgattacgaaggctgtggccgcctctaaggaaaggaatggcctgtccctggcggccctcaaaaaggctttggccgctggaggatatgatgtggagaagaataatagccgcattaagctgggtttgaagtccctagttagtaagggtaccctggtgcagacaaagggaacaggcgcctcgggctctttcaagcttaacaaaaaagccgcctctggcgaggccaagccgaaagcgaaaaaagccggcgcagcgaaagcgaagaagcctgctggcgcaacacctaaaaaagcgaaaaaggccgccggagccaagaaagctgtcaagaaaacaccgaagaaggccaagaaacctgccgctgccggggtgaagaaggttgccaagagcccgaaaaaggctaaagccgctgctaagccaaaaaaagcaactaagtccccagctaagccgaaggcagtgaaaccaaaagccgccaagcccaaagcagcaaagccaaaagccgcaaagcccaaggctgccaaagccaaaaaggccgcagccaagaaaaagtag

SEQ ID NO: 154907 - DNA, 790 bp, Artificial Sequence
  derived and/or modified sequence
aacctgctctttagatttcgagcttattctcttctagcagtttcttgccaccatgtcggaaaccgctcctgccgagacagccaccccagcgccggtggagaaatccccggctaagaagaaggcaactaagaaggctgccggcgccggcgctgctaagcgcaaagcgacggggcccccagtctcagagctgatcaccaaggctgtggctgcttctaaggagcgcaatggcctttctttggcagcccttaagaaggccttagcggccggtggctacgacgtggagaagaataacagccgcattaagctgggcctcaagagcttggtgagcaagggcaccctggtgcagaccaagggcactggtgcttctggctcctttaaactcaacaagaaggcggcctccggggaagccaagcccaaagccaagaaggcaggcgccgctaaagctaagaagcccgcgggggccacgcctaagaaggccaagaaggctgcaggggcgaaaaaggcagtgaagaagactccgaagaaggcgaagaagcccgcggcggctggcgtcaaaaaggtggcgaagagccctaagaaggccaaggccgctgccaaaccgaaaaaggcaaccaagagtcctgccaagcccaaggcagttaagccgaaggcggcaaagcccaaagccgctaagcccaaagcagcaaaacctaaagctgcaaaggccaagaaggcggctgccaaaaagaagtaggaagctggcgtgtgaaaaccgcaacaaagccccaaaggctcttttcagagccaccca

SEQ ID NO: 154908 - DNA, 681 bp, Artificial Sequence
  derived and/or modified sequence
atgtctgaaacagccccagctgagacagccaccccagcccctgtggagaagagccctgccaagaagaaggccaccaagaaggctgctggagctggagctgccaagaggaaggccactggacctcctgtgtctgagctgatcaccaaggctgtggccgccagcaaggagagaaatggcctgagcctggccgccctgaagaaggccctggccgccggcggctatgatgtggagaagaacaacagccgcatcaagctgggcctgaagagcctggtgtccaagggcaccctggtgcagaccaagggcaccggggccagcggcagcttcaagctgaacaagaaggccgccagcggggaggccaagcccaaggccaagaaggccggggccgccaaggccaagaagccagctggggccacccccaagaaggccaagaaggccgccggggccaagaaggctgtgaagaagacccccaagaaggccaagaagccagctgctgctggggtgaagaaggtggccaagagccccaagaaggccaaggccgccgccaagcccaagaaggccaccaagagccctgccaagcccaaggctgtgaagcccaaggccgccaagcccaaggccgccaagcccaaggccgccaagcccaaggccgccaaggccaagaaggccgccgccaagaagaagtag

SEQ ID NO: 154909 - DNA, 681 bp, Artificial Sequence
  derived and/or modified sequence
atgagcgagaccgcccccgccgagaccgccacccccgcccccgtggagaagagtcctgccaagaagaaggccacaaagaaagccgctggcgccggagctgcaaagcggaaagctaccggcccccctgtgagtgagttaatcaccaaagctgtcgccgcatctaaagaaaggaatggcttgtctctggcggctctaaagaaagctctcgctgcaggaggctatgacgtggagaagaacaactccagaattaaactgggtctgaaatctctggtgtcgaaaggtactttagtccagactaagggcacaggagcttcaggtagttttaaattaaacaagaaagcggcttcaggggaggccaaaccgaaagccaagaaagcgggggccgcaaaagctaaaaaaccagccggcgccacaccaaaaaaggccaagaaggctgcgggtgccaagaaagctgtgaagaaaacacccaaaaaagccaaaaagcctgccgccgcaggagtcaagaaggtagccaagagccccaagaaggctaaggcggccgccaaacccaagaaggcaaccaaaagccccgctaagcccaaagcagtcaagccaaaagcggccaaacctaaagccgcgaagccgaaggcagccaagcccaaagctgccaaggccaagaaggctgcagccaagaagaaatag

SEQ ID NO: 154910 - DNA, 681 bp, Artificial Sequence
  derived and/or modified sequence
atgagcgagactgctccggcagagaccgctactccggctcccgtggaaaagtctcccgcaaagaagaaggctaccaaaaaggccgcaggcgcaggcgcagcgaagagaaaagcgactgggccacctgtctctgaactgatcaccaaggctgtggcagcttccaaagagcggaatgggctttctctggccgctttaaagaaagcactggcagccggtggctatgacgtcgagaaaaacaacagtagaataaaactcggtctcaagtctctcgttagcaagggcaccttggtccaaaccaagggtactggcgctagcggaagtttcaagttgaacaaaaaagccgcatccggcgaagccaagcctaaggccaagaaagcaggggctgccaaggccaagaaacccgctggcgcaacccctaagaaggctaaaaaagccgcaggcgcaaaaaaagcggttaagaagacacccaaaaaagcaaaaaagcccgctgctgccggagtaaaaaaggttgctaagtcccccaaaaaggctaaggccgctgcgaagcctaaaaaagcaactaaatctcctgccaaacctaaggccgtgaagccaaaggctgcaaaaccgaaggcagcaaaacctaaagccgcaaaacccaaggccgctaaagccaaaaaagccgctgctaaaaagaagtag

SEQ ID NO: 154911 - DNA, 681 bp, Artificial Sequence
  derived and/or modified sequence
atgagcgagaccgcccccgccgagaccgccacccccgcccccgtggagaagagccccgccaagaagaaggccaccaagaaggccgccggcgccggcgccgccaagagaaaggccaccggcccccccgtgagcgagctgatcaccaaggccgtggccgccagcaaggagagaaacggcctgagcctggccgccctgaagaaggccctggccgccggcggctacgacgtggagaagaacaacagcagaatcaagctgggcctgaagagcctggtgagcaagggcaccctggtgcagaccaagggcaccggcgccagcggcagcttcaagctgaacaagaaggccgccagcggcgaggccaagcccaaggccaagaaggccggcgccgccaaggccaagaagcccgccggcgccacccccaagaaggccaagaaggccgccggcgccaagaaggccgtgaagaagacccccaagaaggccaagaagcccgccgccgccggcgtgaagaaggtggccaagagccccaagaaggccaaggccgccgccaagcccaagaaggccaccaagagccccgccaagcccaaggccgtgaagcccaaggccgccaagcccaaggccgccaagcccaaggccgccaagcccaaggccgccaaggccaagaaggccgccgccaagaagaagtag

SEQ ID NO: 154912 - protein, 207 aa, Artificial Sequence
  derived and/or modified sequence
MSETVPAASASAGVAAMEKLPTKKRGRKPAGLISASRKVPNLSVSKLITEALSVSQERVGMSLVALKKALAAAGYDVEKNNSRIKLSLKSLVNKGILVQTRGTGASGSFKLSKKVIPKSTRSKAKKSVSAKTKKLVLSRDSKSPKTAKTNKRAKKPRATTPKTVRSGRKAKGAKGKQQQKSPVKARASKSKLTQHHEVNVRKATSKK

SEQ ID NO: 154913 - DNA, 624 bp, Artificial Sequence
  derived and/or modified sequence
atgtccgagacggtgccggctgcaagtgcttccgcaggcgtcgctgcaatggagaaactgcctacaaagaaaagaggccggaaacccgcaggcctgataagcgctagtagaaaggtaccgaacctcagcgtcagcaaattgataactgaagctctatccgtgagtcaggaacgggttggcatgagtcttgtcgctcttaagaaagccctcgccgctgctgggtatgatgtcgaaaaaaacaactcccgtataaaactctcactcaagtcgcttgtcaacaagggaattttagtgcaaacaaggggcacaggcgcctctgggtcatttaaactttccaaaaaggtgatccctaaaagcacgaggtctaaggccaaaaagtccgtcagcgccaaaaccaagaagctggttctctctagggacagcaaatctcctaagaccgcaaaaacaaataagcgagcaaagaagccgagggctacaacccccaagactgtccgctctggtcggaaagcgaagggagccaaggggaagcagcaacagaaaagtcctgtgaaggcacgcgcttccaagagtaagctcacacaacaccatgaggtgaacgtaagaaaggcgactagcaagaaatag

SEQ ID NO: 154914 - DNA, 725 bp, Artificial Sequence
  derived and/or modified sequence
catgcttttcgctggttattacatcttgcgtttctctgttgttatgtctgaaaccgtgcctgcagcttctgccagtgctggtgtagccgctatggagaaacttccaaccaagaagcgagggaggaagccggctggcttgataagtgcaagtcgcaaagtgccgaacctctctgtgtccaagttgatcaccgaggccctttcagtgtcacaggaacgagtaggtatgtctttggttgcgctcaagaaggcattggccgctgctggctacgacgtagagaagaataacagccgcatcaaactgtccctcaagagcttagtgaacaagggaatcctggtgcaaaccaggggtactggtgcttccggttcctttaagcttagtaagaaggtgattcctaaatctaccagaagcaaggctaaaaagtcagtttctgccaagaccaagaagctggttttatccagggactccaagtcaccaaagactgctaaaaccaataagagagccaagaagccgagagcgacaactcctaaaactgttaggagcgggagaaaggctaaaggagccaagggtaagcaacagcagaagagcccagtgaaggcaagggcttcgaagtcaaaattgacccaacatcatgaagttaatgttagaaaggccacatctaagaagtaaagagctttccgggaggccaatttggaaagaacccaaaggctcttttaagagccaccca

SEQ ID NO: 154915 - DNA, 624 bp, Artificial Sequence
  derived and/or modified sequence
atgtctgagaccgtgcctgctgccagcgccagcgctggggtggccgccatggagaagctgcccaccaagaagaggggcaggaagccagctggcctcatcagcgccagcaggaaggtgcccaacctgtctgtgtccaagctgatcacagaggccctgtctgtgtcccaggagcgggtgggcatgagcctggtggccctgaagaaggccctggccgctgctggctatgatgtggagaagaacaacagccgcatcaagctgagcctgaagagcctggtgaacaagggcatcctggtgcagacccggggcactggagccagcggcagcttcaagctgagcaagaaggtgatccccaagagcaccaggagcaaggccaagaagtctgtgtctgccaagaccaagaagctggtgctgagccgggacagcaagagccccaagacagccaagaccaacaagagggccaagaagccccgggccaccacccccaagacagtgcgcagcggcaggaaggccaagggggccaagggcaagcagcagcagaagagccctgtgaaggcccgggccagcaagagcaagctgacccagcaccacgaggtgaatgtgaggaaggccaccagcaagaagtag

SEQ ID NO: 154916 - DNA, 624 bp, Artificial Sequence
  derived and/or modified sequence
atgagcgagaccgtgcccgccgccagcgccagcgccggcgtggccgccatggaaaagctgcctaccaaaaaaaggggccgaaaacctgccggcttgattagcgcctctcgaaaggtgcccaaccttagtgtgagcaagctgatcacagaggccttatccgtatcccaagaacgggtcggcatgtccttagtcgctttgaagaaggcactcgcagctgccggttatgacgtggagaaaaacaactcaaggatcaaactctcccttaagagcctagtaaataagggcatcttggtgcagactagggggacaggagcgagtggttctttcaagctcagcaagaaggtgattcccaaatcaacacgatccaaagcaaagaaaagcgtgtccgctaagacaaagaagctggtgcttagccgtgactccaaatccccaaaaacggccaagactaataaacgcgctaaaaaaccaagggctacgacgcccaagactgtgcgcagcggtcggaaggcaaagggggccaagggcaagcagcagcagaagagtccagtcaaagcccgagcctccaagtctaaacttacacagcaccatgaagtgaatgtgcgcaaggcaacctccaaaaaatag

SEQ ID NO: 154917 - DNA, 624 bp, Artificial Sequence
  derived and/or modified sequence
atgtccgagaccgttccagcggcttccgcaagtgcgggtgtcgctgccatggaaaagctcccaaccaagaaaagaggaagaaagcccgcagggttgatttctgcgtcccgcaaagttcctaatttaagcgtgtcgaagctgatcacggaggcattgtcggtctcacaagagcgcgttggaatgtctttggttgcgcttaaaaaggccctcgcggctgccggatacgatgtggaaaagaacaatagtaggattaagctttcacttaaatcccttgtgaacaaggggattttggtacagacgcgcggtaccggagcaagtggttccttcaaattgagtaaaaaggtgatacccaaatcaaccagatcaaaagcgaagaagagcgtctcagctaagacgaagaaacttgtattgtccagggactccaagtcccccaagaccgccaagacaaacaagagggcaaaaaaaccccgagcaaccacccctaagaccgtgcgctctgggaggaaagccaagggagcaaaaggcaaacagcaacagaaaagcccagtgaaggccagagcatcaaagtccaaactgactcagcaccacgaggttaatgtgaggaaggccacctccaagaagtag

SEQ ID NO: 154918 - DNA, 624 bp, Artificial Sequence
  derived and/or modified sequence
atgagcgagaccgtgcccgccgccagcgccagcgccggcgtggccgccatggagaagctgcccaccaagaagagaggcagaaagcccgccggcctgatcagcgccagcagaaaggtgcccaacctgagcgtgagcaagctgatcaccgaggccctgagcgtgagccaggagagagtgggcatgagcctggtggccctgaagaaggccctggccgccgccggctacgacgtggagaagaacaacagcagaatcaagctgagcctgaagagcctggtgaacaagggcatcctggtgcagaccagaggcaccggcgccagcggcagcttcaagctgagcaagaaggtgatccccaagagcaccagaagcaaggccaagaagagcgtgagcgccaagaccaagaagctggtgctgagcagagacagcaagagccccaagaccgccaagaccaacaagagagccaagaagcccagagccaccacccccaagaccgtgagaagcggcagaaaggccaagggcgccaagggcaagcagcagcagaagagccccgtgaaggccagagccagcaagagcaagctgacccagcaccacgaggtgaacgtgagaaaggccaccagcaagaagtag

SEQ ID NO: 154919 - protein, 136 aa, Artificial Sequence
  derived and/or modified sequence
MARTKQTARKSTGGKAPRKQLATKAARKSAPSTGGVKKPHRYRPGTVALREIRRYQKSTELLIRKLPFQRLVREIAQDFKTDLRFQSAAIGALQEASEAYLVGLFEDTNLCAIHAKRVTIMPKDIQLARRIRGERA

SEQ ID NO: 154920 - protein, 123 aa, Artificial Sequence
  derived and/or modified sequence
MARTKQTARKSTGGKAPRKQLATKAARKSAPSTGGVKKPHRYRPGTVALREIRRYQKSTELLIRKLPFQRLVREIAQDFKTDLRFQSAAIGALQVKWWVGRLRVCIPVVYQEQFQIVACAYII

SEQ ID NO: 154921 - DNA, 411 bp, Artificial Sequence
  derived and/or modified sequence
atggctcgcacaaaacagactgcccgcaaaagtaccggtggtaaggccccccggaaacagttggcaactaaggccgctcgcaagagcgcccctagcacgggcggcgtgaagaaaccacacaggtaccgcccaggtactgtagcacttagggaaatccgccggtatcagaagagcacggagcttctgatccgtaagctgccgtttcagaggctggtacgggagatcgcccaagatttcaagacagacttgcggtttcaatccgcagctatcggagccctccaggaagcatcagaggcatacctcgtgggcctgtttgaggacacaaacttgtgtgcgatccacgcaaaacgtgtgaccatcatgcccaaggacattcagttggcccgaaggatcagaggagagagagcatag

SEQ ID NO: 154922 - DNA, 372 bp, Artificial Sequence
  derived and/or modified sequence
atggccagaactaaacagacagcaaggaagtctactgggggaaaagcgccaagaaaacaactcgcaacaaaggcggccagaaaatctgctccaagcactggaggggtgaagaagcctcatcgatataggcctgggaccgtggccctacgcgaaattcggagataccagaaatccactgagctcctgataagaaagctgccgtttcaacgattggtgcgcgaaattgcacaagattttaaaactgaccttcgctttcagtccgccgccatcggcgcccttcaagtgaaatggtgggtgggtcgcttacgcgtgtgtatacccgtcgtttatcaggagcaatttcaaatcgtagcatgcgcatatatcatctag

SEQ ID NO: 154923 - DNA, 411 bp, Artificial Sequence
  derived and/or modified sequence
atggctcgaactaagcagacagcaagaaaaagtaccggaggcaaagcaccaagaaagcagcttgccaccaaggctgcccgaaagagtgccccatccaccggcggggtcaagaagccacaccgctatcgcccaggaaccgtggcactgagagagattcgccggtatcaaaagtctacggaactgctaataaggaaacttcccttccagcgccttgtaagggaaattgcccaagactttaagaccgacctgcgattccagtctgctgcaataggtgcattacaggaggcctcagaggcgtatcttgtggggttgttcgaggacactaatctgtgcgctatccatgccaaacgggtgaccatcatgcccaaagatattcagctggctaggcggattagaggagagcgggcctag

SEQ ID NO: 154924 - DNA, 411 bp, Artificial Sequence
  derived and/or modified sequence
atggccaggactaagcagactgcacgaaagagcaccggtggcaaagctccccgcaaacagctggcaacaaaagctgccaggaaaagcgccccttctacaggcggggtgaagaaacctcatcgataccgtccaggcaccgttgccctgagggaaatccggagatatcagaaaagcactgaactcttgatcagaaaactgcccttccagcgcctagttcgcgagattgctcaggacttcaagactgacttaagatttcagtcagcagcaatcggtgcattgcaggaagcatctgaggcatacctcgttggcctattcgaagacaccaatctgtgtgccatacacgctaagcgcgtcactatcatgccgaaggatatccaactcgcccgccggattagaggggagagagcctag

SEQ ID NO: 154925 - DNA, 411 bp, Artificial Sequence
  derived and/or modified sequence
atggcaagaacaaagcagacagcacgaaagagcactgggggaaaggcaccacgcaaacagctcgctacaaaggcagctcgaaaatccgccccaagcaccggcggcgttaagaaacctcatcgctatcgaccaggcaccgtggctctgagggaaatcagacgctatcagaaatccacagagttgcttatccgaaagctgcccttccagcggttggtgcgcgaaatcgcccaggacttcaaaactgaccttcggttccagagtgctgccatcggggctctgcaggaggcctcagaagcctatctggtggggttattcgaggacaccaacctttgcgccatccatgctaagcgtgttactatcatgcccaaggacatccagctagcacggaggatcaggggtgagagagcctag

SEQ ID NO: 154926 - DNA, 1308 bp, Artificial Sequence
  derived and/or modified sequence
ttttcttttgacttgtttgtggatggaatgtttacagacatttctaattactgctttaattaaataaattggatcaaaggccgttcgaggtatttttgttttgccgtttgtcgctcagaattggcattttgagaggtgattgatactgctaacaattttctagtactctagtttgtttcaagaagagattttgggtagacgtaatcttcaccctttcaaattatataacaatacgaacattattttttatactgatcataatttccagatttggggagggggtgatcgtggcaggaaaagttgtatgtttggtagttgcatatggtgatttttgatttttcaatgctggtaggtaagtaaggaggtctctgtaccatggctcgtacaaagcagactgcccgcaaatcgaccggtggtaaagcacccaggaagcaactggctacaaaagccgctcgcaagagtgcgccctctactggaggggtgaagaaacctcatcgttacaggcctggtactgtggcgctccgtgaaattagacgttatcagaagtccactgaacttctgattcgcaaacttcccttccagcgtctggtgcgagaaattgctcaggactttaaaacagatctgcgcttccagagcgcagctatcggtgctttgcaggaggcaagtgaggcctatctggttggcctttttgaagacaccaacctgtgtgctatccatgccaaacgtgtaacaattatgccaaaagacatccagctagcacgccgcatacgtggagaacgtgcttaagaatccactatgatgggaaacatttcattctcaaaaaaaaaaaaaaaaatttctcttcttcctgttattggtagttctgaacgttagatattttttttccatggggtcaaaaggtacctaagtatatgattgcgagtggaaaaataggggacagaaatcaggtattggcagtttttccattttcatttgtgtgtgaatttttaatataaatgcggagacgtaaagcattaatgcaagttaaaatgtttcagtgaacaagtttcagcggttcaactttataataattataaataaacctgttaaatttttctggacaatgccagcatttggatttttttaaaacaagtaaatttcttattgatggcaactaaatggtgtttgtagcatttttatcatacagtagattccatccattcactatacttttctaactgagttgtcctacatgcaagtacatgtttttaatgttgtctgtcttctgtgctgttcctgtaagtttgctattaaaatacattaaactat

SEQ ID NO: 154927 - DNA, 1863 bp, Artificial Sequence
  derived and/or modified sequence
atctttcaattgtgttcgcagccgccgccgcgccgccgtcgctctccaacgccagcgccgcctctcgctcgccgagctccagccgaaggagaaggggggtaagtaaggaggtctctgtaccatggctcgtacaaagcagactgcccgcaaatcgaccggtggtaaagcacccaggaagcaactggctacaaaagccgctcgcaagagtgcgccctctactggaggggtgaagaaacctcatcgttacaggcctggtactgtggcgctccgtgaaattagacgttatcagaagtccactgaacttctgattcgcaaacttcccttccagcgtctggtgcgagaaattgctcaggactttaaaacagatctgcgcttccagagcgcagctatcggtgctttgcaggtaaaatggtgggtgggaagactcagagtttgtattcctgttgtgtaccaagaacagttccaaattgttgcatgtgcttatatcatttaatcacaagcctgtcaggtagttgatattgttacttcactgttgagacttcagaaaggttaaattgctcaaggtcatacacgtagaaaatggcaaaaccataatttgaacctatttgactccaaggcttagtgcacattccattataccatttaaaattttgaaacattgcactaaaaacaatatttaaagaaaatcctctggtttggtttatggatgctgcaggacattaagaagaacttgagactagaggtctatatttgtagtaacaatttcaaacaacagtgcctagaataaaagaaatgtctcttcaggtcctgaagaaacatataggtagagagagcttaatacctaggatgggaataggcagtattaaaaaattatgcattaagacgtaaaaggagcagtgagtggaggataggattggattggcaagattgggggaacggtgcttaaaggtgatactggacgtgtaaaggggccaggatttgccttgtggtttcctaaaggggattagggattgccacttacatgtggagcatattgaatttaatcttaatctctagcatgtcaggacttagagaaatactgttctagagatatttatgtatttgagatatttgtggtttaagttaagaccaaaacttgaaattcctacaagatacttgataaaggtatgtagacgtcattaacatcagtcacttaagtaacctattttatattgtgtggttggattctttagttgcaagtatcccagaatacagtaaagctaccacctccatcagaagcatgcagttgggggtcgttaaaaatgctgattgttaggcaccattgcagacctgaatcattctgggggtggggagggggcatccagaatctaagtacattccattggaggattttcaaggctgctgttgctgtgctgggcttttgctttatgtatgagaaagataggataggtggattccaccctgaagtgtaattggtcgagctgtttctatggttaatctaaacttcatttgattggtgaattccaggagtaggcatccattaaattctcagtgagttgctgaaatttcaactactaaaatcttccatgtttttacttaaaactttattttctgttttaatagccgattatcttcagttcttatttattactaaatacagaaatgttactaagattcgtaagcattggtacaaagctgctaatattttctagttagaactgtgcttaaagaacaatactgtacttgaaaagtgtagcgtttttagcttaaatgtcaataatgtagccttttaaattgaatttactaaacaatctgggtaaaagactcatctttctaaaattattcacatgtaaacttccattg

SEQ ID NO: 154928 - DNA, 1088 bp, Artificial Sequence
  derived and/or modified sequence
ggcggcgtgtgttgggggatagcctcggtgtcagccatctttcaattgtgttcgcagccgccgccgcgccgccgtcgctctccaacgccagcgccgcctctcgctcgccgagctccagccgaaggagaaggggggtaagtaaggaggtctctgtaccatggctcgtacaaagcagactgcccgcaaatcgaccggtggtaaagcacccaggaagcaactggctacaaaagccgctcgcaagagtgcgccctctactggaggggtgaagaaacctcatcgttacaggcctggtactgtggcgctccgtgaaattagacgttatcagaagtccactgaacttctgattcgcaaacttcccttccagcgtctggtgcgagaaattgctcaggactttaaaacagatctgcgcttccagagcgcagctatcggtgctttgcaggaggcaagtgaggcctatctggttggcctttttgaagacaccaacctgtgtgctatccatgccaaacgtgtaacaattatgccaaaagacatccagctagcacgccgcatacgtggagaacgtgcttaagaatccactatgatgggaaacatttcattctcaaaaaaaaaaaaaaaaatttctcttcttcctgttattggtagttctgaacgttagatattttttttccatggggtcaaaaggtacctaagtatatgattgcgagtggaaaaataggggacagaaatcaggtattggcagtttttccattttcatttgtgtgtgaatttttaatataaatgcggagacgtaaagcattaatgcaagttaaaatgtttcagtgaacaagtttcagcggttcaactttataataattataaataaacctgttaaatttttctggacaatgccagcatttggatttttttaaaacaagtaaatttcttattgatggcaactaaatggtgtttgtagcatttttatcatacagtagattccatccattcactatacttttctaactgagttgtcctacatgcaagtacatgtttttaatgttgtctgtcttctgtgctgttcctgtaagtttgctattaaaatacattaaact

SEQ ID NO: 154929 - DNA, 799 bp, Artificial Sequence
  derived and/or modified sequence
cgcgacacagccatcttgcgtcgggggcccgggcccgggaggagagcgagccccgtcccctgatcccggaggccaacaccggcgaggggctgccctgcacgcaggcggccggcccaggagtcttagcggatcaagttgtctacggcggactcgggccggtcccgcaggacccggccgcacttggccgagcgcgcaggcgggaaggaggccgtcggtccgcccctcccgctgccgcagcggccagccgccgccgcgccgccgtcgctctccaacgccagcgccgcctctcgctcgccgagctccagccgaaggagaaggggggtaagtaaggaggtctctgtaccatggctcgtacaaagcagactgcccgcaaatcgaccggtggtaaagcacccaggaagcaactggctacaaaagccgctcgcaagagtgcgccctctactggaggggtgaagaaacctcatcgttacaggcctggtactgtggcgctccgtgaaattagacgttatcagaagtccactgaacttctgattcgcaaacttcccttccagcgtctggtgcgagaaattgctcaggactttaaaacagatctgcgcttccagagcgcagctatcggtgctttgcaggaggcaagtgaggcctatctggttggcctttttgaagacaccaacctgtgtgctatccatgccaaacgtgtaacaattatgccaaaagacatccagctagcacgccgcatacgtggagaacgtgcttaagaatccactatgatgggaaacatttcattctcaaaaaaaaaaaa

SEQ ID NO: 154930 - DNA, 2703 bp, Artificial Sequence
  derived and/or modified sequence
gagcgcagagcggtttggtcgttcgttgggcggtgctggtttttcgctcgtcgactgcggctcttcctcgggcagcggaagcggcgcggcggtcggagaagtggcctaaaacttcggcgttgggtgaaagaaaatggcccgaaccaagcagactgctcgtaagtccaccggtgggaaagccccccgcaaacagctggccacgaaagccgccaggaaaagcgctccctctaccggcggggtgaagaagcctcatcgctacaggcccgggaccgtggcgcttcgagagattcgtcgttatcagaagtcgaccgagctgctcatccggaagctgcccttccagaggttggtgagggagatcgcgcaggatttcaaaaccgacctgaggtttcagagcgcagccatcggtgcgctgcaggaggctagcgaagcgtacctggtgggtctgttcgaagataccaacctgtgtgccatccacgctaagagagtcaccatcatgcccaaagacatccagttggctcgccggatacggggagagagagcttaagtgaaggcagtttttatggcgttttgtagtaaattctgtaaaatactttggtttaatttgtgactttttttgtaagaaattgtttataatatgttgcatttgtacttaagtcattccatctttcactcaggatgaatgcgaaaagtgactgttcacagacctcagtgatgtgagcactgttgctcaggagtgacaagttgctaatatgcagaagggatgggtgatacttcttgcttctcatgatgcatgtttctgtatgttaatgacttgttgggtagctattaaggtactagagttgataaatgtgtacagggtccttttgcaataaaactggttatgacttgatccaagtgtttaacaattggggctgttaagtctgaccatacatcactgtgatagaatgtgggctttttcaagggtgaagatacaagtcttaaccacagtgtaacttacagtttcctttaaaaaaaaaaaaagtaaacctggcagctatagaatacactatgtgcatttataatagctattttatatattgtagtatcaacatttttaaattaaatgttttacattcacaagtggtggggagtcttgtcattaaggtgtgtgtaatttagagtccagttggttttcttctgactgcacttgttctcatagtagtaaaatgctatgcgcatttataccttgcataagtcctcattctaccacatgttaaccctctagctgataatgcaaacactaactgggggattttatttataagggctctagaaaaaacgagttattcacaccagcatcatcttaactaacattctgaactagttagtgcagcttttcattgtgttgtgtggttggtctcataactaggttgagtttttctcctctgctgaggaaacagtaccgaagttctttttcttgtggcatttgtattataaaaacttggtgtgggggaggagcacaaaactccagcccactgaacctctgccaattaagatggtgttgggttaggttacatctggttactgtcctgggaaaatcatttttatagagatggccttccaagtggttttaaaatttactgaagtttttaggtcaattatgtatgttgactaaatttacaaataaacttgtttatccaactaagtgtccaaaacctaaattgaatgtactaagttttcacatgtcccattatctaggtccttgtatactaatgttttgaacttagatcatttcaggtgttgtttggtggataaaggaaccttttatttataaagatactgtagaaagcatgtgaacagctctctgcttgattaagatgccataatagtgctgtatttgcagtgtgggctaagacaaagtatattaataagcttttcagcccccccactcccgttccgtagtgtagaagcccacaggtgtagaactcagtcttaaacttcagtatgaaaccagtttccttgtgcgatgatggccactaaagcatagtacgtggatgtcagtgagacagcatgagagccagcagtcatcaaagcgttccacgtttgaagttagcaactgcttaaagttataccccattaaaattgctttctcaaaagtttgggttagtttcaaatgtgatattttggagggaaggtaaagtaggtatctttcaggtcgtgataatgagctcctatgaaaggatgcaatataatgacccgcttttctagaaagttcataatcagctctggaacaagcacacttgattcctcactgtgcttcagaatgagattaagatcagatgttggaacgtgctatgctgtagcgtgtctggaaacaaagtacacaaacctggctacggtgatgagttagcttctgcttactacctgtgacaacccaagtgggtgacactagtgaaccttctccagtctgcaggctggcatagaaggctcttagattatattgggcagcttgcaatctgccgaagcagtgacttgcatttccacacttggcttgagcactcaacccagaaggcgaagatagcttttggttgtaggcggcttcctgtatgggatatccctcggtaagggtaaaggagcagaggcaaaggagaaaagcagaagttgcagctgatgcaggtatcctatgcccttgatggatgagactaaaataaaatttttgaagtt

SEQ ID NO: 154931 - DNA, 411 bp, Artificial Sequence
  derived and/or modified sequence
atggcccggaccaagcagacagccaggaagagcactggaggcaaggcccccaggaagcagctggccaccaaggccgccaggaagagcgcccccagcactggaggagtgaagaagccccaccgctaccggcccggcaccgtggccctgcgggagatccgccgctaccagaagagcacagagctgctgatcaggaagctgcccttccagaggctggtgcgggagatcgcccaggacttcaagacagacctgcgcttccagagcgctgccatcggggccctgcaggaggccagcgaggcctacctggtgggcctgtttgaggacaccaacctgtgtgccatccacgccaagagggtgaccatcatgcccaaggacatccagctggcccggcgcatccggggggagcgggcctag

SEQ ID NO: 154932 - DNA, 372 bp, Artificial Sequence
  derived and/or modified sequence
atggcccggaccaagcagacagccaggaagagcactggaggcaaggcccccaggaagcagctggccaccaaggccgccaggaagagcgcccccagcactggaggagtgaagaagccccaccgctaccggcccggcaccgtggccctgcgggagatccgccgctaccagaagagcacagagctgctgatcaggaagctgcccttccagaggctggtgcgggagatcgcccaggacttcaagacagacctgcgcttccagagcgctgccatcggggccctgcaggtgaagtggtgggtgggccgcctgcgggtgtgcatccctgtggtgtaccaggagcagttccagatcgtggcctgtgcctacatcatctag

SEQ ID NO: 154933 - DNA, 411 bp, Artificial Sequence
  derived and/or modified sequence
atggcccggaccaagcagaccgcccggaagagcaccggcggcaaggctcctcggaagcagctggctactaaagccgctaggaaatcagccccgagcacagggggtgtgaagaagccacacagatatcggccaggcactgtggctttgagggaaatccgaagataccaaaaatcaaccgaactcctgatccggaagctcccgttccaacgcctggttagggagatagcccaggacttcaagacagacctgagattccagtctgccgcgatcggggccctccaagaggccagcgaagcctacctcgtgggtctgttcgaagataccaatctctgtgcaattcatgccaagcgagtaaccatcatgcccaaagatattcagctggctcggcgcattagaggcgaaagagcgtag

SEQ ID NO: 154934 - DNA, 372 bp, Artificial Sequence
  derived and/or modified sequence
atggcccggaccaagcagaccgcccggaagagcaccggcggcaaggctccaagaaagcagcttgcaactaaggcggctcggaagagcgcgccctccaccggcggggtaaagaagccacaccgttacagacccggcacagtcgctctgcgcgaaattaggcggtaccaaaaaagcacagagcttttaatacgaaaactcccatttcagcgcctggtgagggaaatcgcacaagattttaagactgacctccggttccaatccgccgccattggggctctccaggtcaagtggtgggttggccgcctacgcgtgtgtatccccgtggtgtatcaagaacaatttcagattgtagcttgcgcctacatcatatag

SEQ ID NO: 154935 - DNA, 411 bp, Artificial Sequence
  derived and/or modified sequence
atggcccggaccaagcagaccgcccggaagagcaccggcggcaaggcccctcgcaaacaactggccacaaaggccgcgcgaaaatcagcgccctccaccgggggcgtcaagaagccgcatagataccggcctggaacagtggctctgagggagatccgaagataccagaagtccacagagctgcttattagaaagctgccttttcagcgcctggttagagagattgcacaggatttcaagacagacctgagatttcagtcggcagccattggtgccctccaggaggcatcagaagcttacctcgtcggactattcgaggatacgaatctatgcgcgatccacgcaaagcgggtgactattatgccaaaggacattcagctggcacggcgcattagaggcgagcgggcatag

SEQ ID NO: 154936 - DNA, 411 bp, Artificial Sequence
  derived and/or modified sequence
atggcccggaccaagcagaccgcccggaagagcaccggcggcaaggcacctcgcaaacagttggctactaaagccgcccgtaagtcagcaccctcaacggggggcgtaaaaaagcctcaccgctacagaccggggaccgtcgctctgagagaaatccggaggtaccagaagtccactgaattactcattaggaagctcccctttcaacgactggttcgtgaaatcgcgcaggattttaagaccgatctgaggtttcagagcgctgccattggagctttacaggaagcttctgaggcttaccttgtgggactattcgaagacactaacctgtgcgcaatccacgcgaagagagtcactataatgcctaaggacatacagctcgcgcgtagaatcaggggagagcgtgcttag

SEQ ID NO: 154937 - DNA, 411 bp, Artificial Sequence
  derived and/or modified sequence
atggcccggaccaagcagaccgcccggaagagcaccggcggcaaggcccctcggaaacaactggctaccaaggccgccagaaagtcagccccttccaccggtggagtgaaaaagccacatcggtacaggccggggacagtcgctctgcgcgaaattaggcgctatcagaagtctactgaattgctgatccgaaagctcccttttcagagactggtccgtgagatcgctcaggactttaaaactgaccttcggttccagagtgcggcaatcggtgcattgcaagaggcgtccgaagcttacttggtagggctattcgaggacactaacctctgtgctatccatgcgaaacgcgtgacaattatgcccaaagatatccagctggcgaggagaattaggggggagagggcttag

SEQ ID NO: 154938 - DNA, 411 bp, Artificial Sequence
  derived and/or modified sequence
atggctcggactaaacagacagcgagaaaatccaccgggggtaaagctcctcggaagcagcttgcaaccaaggccgctagaaagtccgccccttccaccggaggagtgaagaaaccgcataggtatcggcctggcaccgtggctctcagggaaattcgcaggtaccagaagagtaccgaattactgattagaaaattgccattccagcgtcttgtcagggaaatcgcacaagatttcaaaacagatttgaggttccagagtgccgctatcggagctcttcaggaagcttccgaggcctacctcgtcggcctgttcgaggatactaacctctgcgcgattcatgcaaaacgggttaccataatgccaaaggatatacagctggctcgaaggatccgcggagagcgggcttag

SEQ ID NO: 154939 - DNA, 372 bp, Artificial Sequence
  derived and/or modified sequence
atggccagaaccaagcagacagccagaaaaagcaccggaggtaaggcccctcgcaaacagcttgctaccaaggcggctaggaagtctgctccaagcactgggggagtcaagaaacctcacagataccgaccagggacagtggctctgcgcgaaattagacgttaccagaaatctactgaacttttaattaggaaactgccgtttcagaggctggtgagggagattgcccaggacttcaaaacagacctgcgatttcagtccgctgccattggtgccctgcaggtcaaatggtgggtggggaggttgagagtgtgcatacccgtcgtttaccaggagcagtttcaaatagtcgcttgtgcttacatcatctag

SEQ ID NO: 154940 - DNA, 411 bp, Artificial Sequence
  derived and/or modified sequence
atggcccgaacaaaacagacagccagaaaatcgacaggcggaaaagctcctcgcaagcagctggccaccaaggccgcaagaaagagcgccccttctactggtggagttaaaaaacctcatagataccgcccaggaacagtggccctgagggagatccgcagatatcaaaagtctaccgagctgctgattagaaaattaccatttcagagactcgtgcgtgagatcgctcaggacttcaagaccgacctgagattccaatccgccgcaatcggggctctgcaagaggctagtgaggcttacctagtggggctgttcgaggacacgaacctgtgtgcaattcacgccaaacgagttaccataatgcccaaggacatccagttggctcgcaggatcaggggcgagagggcgtag

SEQ ID NO: 154941 - DNA, 411 bp, Artificial Sequence
  derived and/or modified sequence
atggcacggacgaagcagacagccaggaagtcaacgggcggaaaggctccccgaaagcagctagccacaaaggccgctcggaagagtgcaccttccaccgggggagtcaagaaaccccaccgatatcgtccgggtaccgtcgccttgcgcgagatcagaaggtaccagaagagcaccgagttgctgataagaaaactcccattccagaggctcgtgagggaaattgcacaggattttaagaccgacctacggttccaaagtgctgcaatcggtgccctgcaggaagcgtctgaagcatatctggtgggactttttgaggatactaatttgtgtgcgatccacgcgaaacgggtcactatcatgcccaaggacatccagcttgcacggagaatccgcggagaacgtgcctag

SEQ ID NO: 154942 - DNA, 411 bp, Artificial Sequence
  derived and/or modified sequence
atggcgaggaccaagcaaactgccagaaaatccaccggtggcaaggctcctaggaagcagttggccacgaaagcggctcggaaatctgcaccaagcacaggaggcgtcaagaaacctcatcggtaccgccctgggactgtggccctacgagagatcaggagataccagaagtctacggagttgctgattcggaaattacctttccagagacttgttcgagagatcgctcaagacttcaagacagacctgcggttccaatcagctgctataggcgcattacaggaggcctctgaggcgtacctcgtggggttgtttgaggataccaatttatgcgcaatccacgctaaacgagtgaccattatgccaaaggacattcaacttgccaggcgaataaggggtgaacgcgcttag

SEQ ID NO: 154943 - DNA, 411 bp, Artificial Sequence
  derived and/or modified sequence
atggccagaaccaagcagaccgccagaaagagcaccggcggcaaggcccccagaaagcagctggccaccaaggccgccagaaagagcgcccccagcaccggcggcgtgaagaagccccacagatacagacccggcaccgtggccctgagagagatcagaagataccagaagagcaccgagctgctgatcagaaagctgcccttccagagactggtgagagagatcgcccaggacttcaagaccgacctgagattccagagcgccgccatcggcgccctgcaggaggccagcgaggcctacctggtgggcctgttcgaggacaccaacctgtgcgccatccacgccaagagagtgaccatcatgcccaaggacatccagctggccagaagaatcagaggcgagagagcctag

SEQ ID NO: 154944 - DNA, 372 bp, Artificial Sequence
  derived and/or modified sequence
atggccagaaccaagcagaccgccagaaagagcaccggcggcaaggcccccagaaagcagctggccaccaaggccgccagaaagagcgcccccagcaccggcggcgtgaagaagccccacagatacagacccggcaccgtggccctgagagagatcagaagataccagaagagcaccgagctgctgatcagaaagctgcccttccagagactggtgagagagatcgcccaggacttcaagaccgacctgagattccagagcgccgccatcggcgccctgcaggtgaagtggtgggtgggcagactgagagtgtgcatccccgtggtgtaccaggagcagttccagatcgtggcctgcgcctacatcatctag

SEQ ID NO: 154945 - protein, 215 aa, Artificial Sequence
  derived and/or modified sequence
MSETVPPAPAASAAPEKPLAGKKAKKPAKAAAASKKKPAGPSVSELIVQAASSSKERGGVSLAALKKALAAAGYDVEKNNSRIKLGIKSLVSKGTLVQTKGTGASGSFKLNKKASSVETKPGASKVATKTKATGASKKLKKATGASKKSVKTPKKAKKPAATRKSSKNPKKPKTVKPKKVAKSPAKAKAVKPKAAKARVTKPKTAKPKKAAPKKK

SEQ ID NO: 154946 - DNA, 648 bp, Artificial Sequence
  derived and/or modified sequence
atgagcgagaccgtcccaccggcccctgccgcttccgcggcacccgagaaacccctggcaggtaagaaagccaagaagcccgcaaaggctgcggctgcctccaagaagaaaccggctggcccctccgtgtcagagctcatcgtacaggccgccagcagctcgaaggaaagaggaggagtgagtttagccgccctgaaaaaagccctcgcggccgcaggatacgatgtggagaagaacaacagcagaataaagctcggtatcaagagcctcgtttcaaagggaaccctggtgcagactaagggtactggcgcctcaggcagctttaagttaaacaaaaaggcttctagtgtagagacaaagcctggagcctccaaggtggccaccaaaacaaaagcaactggggcttccaagaagttgaaaaaagcaacaggggcctctaagaagagtgtgaaaactcccaagaaagccaagaagcctgccgccacacgcaagtcatccaaaaatccaaagaaaccaaaaactgttaagccgaaaaaggtcgccaaaagcccggcaaaagccaaggccgtcaaaccaaaggccgcaaaagcccgggtcactaaacccaagactgccaaacctaagaaggctgcccctaaaaagaagtag

SEQ ID NO: 154947 - DNA, 781 bp, Artificial Sequence
  derived and/or modified sequence
taggctgcgttggggcctttttttcgcatcctgcttcgtcaggtttataccactttatttggtgtgctgtgttagtcaccatgtctgaaacagtgcctcccgcccccgccgcttctgctgctcctgagaaacctttagctggcaagaaggcaaagaaacctgctaaggctgcagcagcctccaagaaaaaacccgctggcccttccgtgtcagagctgatcgtgcaggctgcttcctcctctaaggagcgtggtggtgtgtcgttggcagctcttaaaaaggcgctggcggccgcaggctacgacgtggagaagaacaacagccgcattaagctgggcattaagagcctggtaagcaagggaacgttggtgcagacaaagggtaccggagcctcgggttccttcaagctcaacaagaaggcgtcctccgtggaaaccaagcccggcgcctcaaaggtggctacaaaaactaaggcaacgggtgcatctaaaaagctcaaaaaggccacgggggctagcaaaaagagcgtcaagactccgaaaaaggctaaaaagcctgcggcaacaaggaaatcctccaagaatccaaaaaaacccaaaactgtaaagcccaagaaagtagctaaaagccctgctaaagctaaggctgtaaaacccaaggcggccaaggctagggtgacgaagccaaagactgccaaacccaagaaagcggcacccaagaaaaagtaaattcagttagaagtttcttctagtaacccaacggctcttttaagagccaccta

SEQ ID NO: 154948 - DNA, 648 bp, Artificial Sequence
  derived and/or modified sequence
atgtctgagaccgtgcccccagccccagctgccagcgctgcccctgagaagcccctggccggcaagaaggccaagaagccagccaaggctgctgctgccagcaagaagaagccagctggccccagcgtgtctgagctgattgtgcaggccgccagcagcagcaaggagcggggcggcgtgtccctggccgccctgaagaaggccctggccgccgccggctatgatgtggagaagaacaacagccgcatcaagctgggcatcaagagcctggtgtccaagggcaccctggtgcagaccaagggcaccggggccagcggcagcttcaagctgaacaagaaggccagctctgtggagaccaagccaggggccagcaaggtggccaccaagaccaaggccactggagccagcaagaagctgaagaaggccactggagccagcaagaagtctgtgaagacccccaagaaggccaagaagccagctgccaccaggaagagcagcaagaaccccaagaagcccaagacagtgaagcccaagaaggtggccaagagccctgccaaggccaaggctgtgaagcccaaggccgccaaggcccgggtgaccaagcccaagacagccaagcccaagaaggccgcccccaagaagaagtag

SEQ ID NO: 154949 - DNA, 648 bp, Artificial Sequence
  derived and/or modified sequence
atgagcgagaccgtgccccccgcccccgccgccagcgccgcccccgagaagcccctggcagggaagaaagccaaaaaacctgcaaaggccgccgccgccagtaagaaaaagccggccggtccatcagtcagtgaactgatcgtgcaagctgcctcctccagtaaagaaaggggtggtgtgtctcttgccgcccttaaaaaggccctggccgctgccggttacgacgtcgaaaagaacaattcccgaataaaactcggcattaaatccttggtgtcaaaggggacactggttcagacgaaagggaccggagcatccggttcctttaaactgaacaaaaaagctagttccgtagagaccaagcctggagcgtccaaagttgctaccaaaaccaaggctaccggagcgagtaagaaactgaaaaaagccactggtgcctctaaaaagtctgtaaaaacccctaagaaagctaaaaaacccgctgcgactcgaaagagctcaaagaatccgaagaagccaaagaccgttaaacccaagaaggtggcaaaatccccagccaaagccaaagctgtcaagccgaaggcggcaaaagctagagtaactaaaccgaaaactgccaaacctaagaaagctgcgcccaagaaaaagtag

SEQ ID NO: 154950 - DNA, 648 bp, Artificial Sequence
  derived and/or modified sequence
atgagtgagactgtgccccctgctccagctgctagtgcagcccctgaaaagcccctggccggaaaaaaagccaagaagcccgcaaaagccgctgccgcttccaagaagaaacccgctgggccttcagtgtctgagttgatcgtgcaggccgctagctccagtaaggagagagggggagtgagtctcgcagcgttgaagaaagctctggcagctgcaggctacgatgttgagaagaacaactctcgcatcaaactaggtattaaaagtctggtatcgaagggcacactggttcaaactaagggcacaggcgcatctggatcattcaaattaaataaaaaggctagctccgtcgagaccaaaccaggcgcatctaaagttgctacgaagaccaaagccaccggagcttcgaaaaagttgaagaaggcaaccggcgcatctaagaagtctgtcaaaactccaaaaaaggctaagaagccagccgcaacccgcaaatccagtaagaatccaaagaagcctaagacagtgaagcctaaaaaggtcgcaaaatcgccggctaaggcaaaagccgtcaagcccaaagcagcgaaagcaagggtgactaagcctaaaacggccaaaccaaaaaaggctgcgcctaaaaaaaaatag

SEQ ID NO: 154951 - DNA, 648 bp, Artificial Sequence
  derived and/or modified sequence
atgagcgagaccgtgccccccgcccccgccgccagcgccgcccccgagaagcccctggccggcaagaaggccaagaagcccgccaaggccgccgccgccagcaagaagaagcccgccggccccagcgtgagcgagctgatcgtgcaggccgccagcagcagcaaggagagaggcggcgtgagcctggccgccctgaagaaggccctggccgccgccggctacgacgtggagaagaacaacagcagaatcaagctgggcatcaagagcctggtgagcaagggcaccctggtgcagaccaagggcaccggcgccagcggcagcttcaagctgaacaagaaggccagcagcgtggagaccaagcccggcgccagcaaggtggccaccaagaccaaggccaccggcgccagcaagaagctgaagaaggccaccggcgccagcaagaagagcgtgaagacccccaagaaggccaagaagcccgccgccaccagaaagagcagcaagaaccccaagaagcccaagaccgtgaagcccaagaaggtggccaagagccccgccaaggccaaggccgtgaagcccaaggccgccaaggccagagtgaccaagcccaagaccgccaagcccaagaaggccgcccccaagaagaagtag

SEQ ID NO: 154952 - protein, 260 aa, Artificial Sequence [sequence omitted]

SEQ ID NO: 154953 - protein, 308 aa, Artificial Sequence
  derived and/or modified sequence
MVVGRGLLGRRSLAALGAACARRGLGPALLGVFCHTDLRKNLTVDEGTMKVEVLPALTDNYMYLVIDDETKEAAIVDPVQPQKVVDAARKHGVKLTTVLTTHHHWDHAGGNEKLVKLESGLKVYGGDDRIGALTHKITHLSTLQVGSLNVKCLATPCHTSGHICYFVSKPGGSEPPAVFTGDTLFVAGCGKFYEGTADEMCKALLEVLGRLPPDTRVYCGHEYTINNLKFARHVEPGNAAIREKLAWAKEKYSIGEPTVPSTLAEEFTYNPFMRVREKTVQQHAGETDPVTTMRAVRREKDQFKMPRD

SEQ ID NO: 154954 - DNA, 927 bp, Artificial Sequence
  derived and/or modified sequence
atggtggtgggccgggggttactgggcagacgctctcttgccgcgctgggtgctgcatgcgcgcggcgcggcttagggccggccctgcttggtgtgttttgccataccgatctgcgcaagaacctaacagtggacgagggcacgatgaaggtggaggtcttgcctgctcttacagataattatatgtatctggtcatcgatgacgaaaccaaggaagcagccattgttgacccagttcagccacagaaggtcgttgatgccgcccgtaagcatggcgtgaagctcaccaccgtgttgactacccatcaccactgggaccacgccggcgggaacgaaaagctggtgaaactcgagagtggcctcaaagtatacgggggggacgaccgcatcggggcgctgacccacaaaataactcatttgtcaacactgcaggtggggtcgttaaatgtcaaatgcctcgccaccccatgccacactagcggccacatctgctattttgtgtctaagcctggaggtagcgaaccaccagccgtgttcacaggcgacacactgttcgtggccgggtgcggcaagttctatgagggtacagctgacgagatgtgtaaggccttgctggaagtgctcggccggctccctccagacaccagggtgtattgcggacacgagtacactatcaacaacctgaaatttgcacgacatgtggaaccaggcaatgcggctattcgggaaaagttggcttgggccaaagagaagtattctataggcgagcccaccgtgccatccaccttggcagaggagtttacatacaacccttttatgcgggtcagagagaagaccgtgcagcagcacgcaggcgaaacggacccggtgacgactatgagggcggtgcgacgggagaaagatcaatttaagatgcctagagactag

SEQ ID NO: 154955 - DNA, 1257 bp, Artificial Sequence
  derived and/or modified sequence
gacgccggtgttttgcagtcctgggcagctcggcagtccagcccggcccgggtcatggtggtgggccgagggctgctcggccgccgcagcctcgccgcgctgggagccgcctgcgcccgccgaggcctcggtgcctaaggccgcgctgccgggctcgagcggaggcggcgcaggcgctgaggctggcgcggagcgggcgcggggccgcgggtgcggaaagcgctaggtccagccctgctgggagttttctgccacacagatttgcggaagaacctgaccgtggacgagggcaccatgaaggtagaggtgctgcctgccctgaccgacaactacatgtacctggtcattgatgatgagaccaaggaggctgccattgtggatccggtgcagccccagaaggtcgtggacgcggcgagaaagcacggggtgaaactgaccacagtgctcaccacccaccaccactgggaccatgctggcgggaatgagaaactggtcaagctggagtcgggactgaaggtgtacgggggtgacgaccgtatcggggccctgactcacaagatcactcacctgtccacactgcaggtggggtctctgaacgtcaagtgcctggcgaccccgtgccacacttcaggacacatttgttacttcgtgagcaagcccggaggctcggagccccctgccgtgttcacaggtgacaccttgtttgtggctggctgcgggaagttctatgaagggactgcggatgagatgtgtaaagctctgctggaggtcttgggccggctccccccggacacaagagtctactgtggccacgagtacaccatcaacaacctcaagtttgcacgccacgtggagcccggcaatgccgccatccgggagaagctggcctgggccaaggagaagtacagcatcggggagcccacagtgccatccaccctggcagaggagtttacctacaaccccttcatgagagtgagggagaagacggtgcagcagcacgcaggtgagacggacccggtgaccaccatgcgggccgtgcgcagggagaaggaccagttcaagatgccccgggactgaggccgccctgcaccttcagcggatttggggattaggctcttttaggtaactggctttcctgctggtccgtgcgggaaattcagtcttgatttaaccttaattttacagcccttggcttgtgttatcggacattctaatgcatatttataagagaagtttaacaagtatttattcccataa

SEQ ID NO: 154956 - DNA, 1481 bp, Artificial Sequence
  derived and/or modified sequence
ctgcctcggaacgctgtcccccgcagcgacggcccgttccacctcgcgatctgccgggtacccgggcggcgtggcgctcggcctccagggatccactgtgcggtgccaaaaaagaggcggaggctcgcggcacagctctcccggcgcagctctcgggccgccgccgccgctcccaggcccgtctcccggcccgtggcagtcggggctcgcggacaaaacaagttgagcgcgagcgcgttgattggttggcggacggtgcgaggtggacgctgattggctgagggcagcgcgaggcgggcgctgattggctgcgacgcgccgacgccggtgttttgcagtcctgggcagctcggcagtccagcccggcccgggtcatggtggtgggccgagggctgctcggccgccgcagcctcgccgcgctgggagccgcctgcgcccgccgaggcctcggtccagccctgctgggagttttctgccacacagatttgcggaagaacctgaccgtggacgagggcaccatgaaggtagaggtgctgcctgccctgaccgacaactacatgtacctggtcattgatgatgagaccaaggaggctgccattgtggatccggtgcagccccagaaggtcgtggacgcggcgagaaagcacggggtgaaactgaccacagtgctcaccacccaccaccactgggaccatgctggcgggaatgagaaactggtcaagctggagtcgggactgaaggtgtacgggggtgacgaccgtatcggggccctgactcacaagatcactcacctgtccacactgcaggtggggtctctgaacgtcaagtgcctggcgaccccgtgccacacttcaggacacatttgttacttcgtgagcaagcccggaggctcggagccccctgccgtgttcacaggtgacaccttgtttgtggctggctgcgggaagttctatgaagggactgcggatgagatgtgtaaagctctgctggaggtcttgggccggctccccccggacacaagagtctactgtggccacgagtacaccatcaacaacctcaagtttgcacgccacgtggagcccggcaatgccgccatccgggagaagctggcctgggccaaggagaagtacagcatcggggagcccacagtgccatccaccctggcagaggagtttacctacaaccccttcatgagagtgagggagaagacggtgcagcagcacgcaggtgagacggacccggtgaccaccatgcgggccgtgcgcagggagaaggaccagttcaagatgccccgggactgaggccgccctgcaccttcagcggatttggggattaggctcttttaggtaactggctttcctgctggtccgtgcgggaaattcagtcttgatttaaccttaattttacagcccttggcttgtgttatcggacattctaatgcatatttataagagaagtttaacaagtatttattcccataa

SEQ ID NO: 154957 - DNA, 1276 bp, Artificial Sequence
  derived and/or modified sequence
gtgttttgcagtcctgggcagctcggcagtccagcccggcccgggtcatggtggtgggccgagggctgctcggccgccgcagcctcgccgcgctgggagccgcctgcgcccgccgaggcctcggtccagccctgctgggagttttctgccacacagatttgcggaagaacctgaccgtggacgagggcaccatgaaggtagaggtgctgcctgccctgaccgacaactacatgtacctggtcattgatgatgagaccaaggaggctgccattgtggatccggtgcagccccagaaggtcgtggacgcggcgagaaagcacggggtgaaactgaccacagtgctcaccacccaccaccactgggaccatgctggcgggaatgagaaactggtcaagctggagtcgggactgaaggtgtacgggggtgacgaccgtatcggggccctgactcacaagatcactcacctgtccacactgcaggtgacaccttgtttgtggctggctgcgggaagttctatgaagggactgcggatgagatgtgtaaagctctgctggaggtcttgggccggctccccccggacacaagagtctactgtggccacgagtacaccatcaacaacctcaagtttgcacgccacgtggagcccggcaatgccgccatccgggagaagctggcctgggccaaggagaagtacagcatcggggagcccacagtgccatccaccctggcagaggagtttacctacaaccccttcatgagagtgagggagaagacggtgcagcagcacgcaggtgagacggacccggtgaccaccatgcgggccgtgcgcagggagaaggaccagttcaagatgccccgggactgaggccgccctgcaccttcagcggatttggggattaggctcttttaggtaactggctttcctgctggtccgtgcgggaaattcagtcttgatttaaccttaattttacagcccttggcttgtgttatcggacattctaatgcatatttataagagaagtttaacaagtatttattcccataacttccccttgcagactgttttcttctggcctttaggcctctgcttgtcccctcgggcctccttcctcctccgtgagccactgcagtccccccacccacgcttcaggtcaggcgtgagccggtgcctttgctgtggccttggctgggtgctgatgggactgtcaggcccactgctgcggtcggtacctttgcagcctgtgcttgtggtctgatctgctcaggcccccggcag

SEQ ID NO: 154958 - DNA, 927 bp, Artificial Sequence
  derived and/or modified sequence
atggtggtgggccggggcctgctgggccgccgcagcctggccgccctgggcgccgcctgtgcccggcggggcctgggccctgccctgctgggcgtcttctgccacacagacctgaggaagaacctgactgtggatgagggcaccatgaaggtggaggtgctgcctgccctgacagacaactacatgtacctggtgattgatgatgagaccaaggaggccgccatcgtggaccctgtgcagccccagaaggtggtggatgctgccaggaagcatggagtgaagctgaccaccgtgctgaccacccaccaccactgggaccacgccggcggcaatgagaagctggtgaagctggagagcggcctgaaggtgtatggaggagatgaccgcatcggggccctgacccacaagatcacccacctgagcaccctgcaggtgggcagcctgaatgtgaagtgcctggccaccccctgccacaccagcggccacatctgctactttgtgtccaagccaggcggcagcgagcccccagctgtgttcaccggggacaccctgtttgtggccggctgcggcaagttctatgagggcacagcagatgagatgtgcaaggccctgctggaggtgctgggccgcctgcccccagacaccagggtgtactgcggccacgagtacaccatcaacaacctgaagtttgcccggcacgtggagcctggaaatgctgccatccgggagaagctggcctgggccaaggagaagtacagcatcggggagcccaccgtgcccagcaccctggccgaggagttcacctacaaccccttcatgagggtgcgggagaagacagtgcagcagcacgccggggagacagatcctgtgaccaccatgagagctgtgagaagagagaaggaccagttcaagatgccccgggactag

SEQ ID NO: 154959 - DNA, 927 bp, Artificial Sequence
  derived and/or modified sequence
atggtggtgggccggggcctgctgggccggcggagcctggccgccctcggagcagcatgtgctcgccgaggtctgggcccagcattactgggcgttttttgccacacagatctgcgcaagaatctgactgtagatgagggaaccatgaaagtggaagtgctgcctgctctgacagataattatatgtacctggtgattgacgacgagactaaggaggccgctatcgtggatcctgtgcagcctcagaaagtcgtcgacgctgccaggaagcacggggtgaagttgactaccgttcttacaacccaccaccactgggaccacgccgggggcaacgagaaactggtaaaattagagtctggtctcaaagtttacgggggcgacgatagaatcggggccctcactcacaagatcacccacttgtctacactgcaggttggcagcttgaatgttaagtgtttggcaaccccatgtcacacaagcggtcacatctgctacttcgtcagtaaacccggtggttcggagccacccgctgtgttcactggggacactctttttgtggccgggtgcggaaagttctacgaaggaacagccgatgaaatgtgtaaagccctgctggaagtcctggggcgactcccacccgatacgagagtctactgcggacacgagtacacgatcaataatttgaaatttgccagacatgttgaaccgggtaatgctgcaatacgcgaaaagctggcctgggcaaaagaaaaatacagcattggggagcctactgtcccgtcgacgctggccgaagagttcacttataatcctttcatgagagtgcgcgagaaaactgtgcagcaacatgccggggagacagatccagtgaccaccatgcgtgccgtgaggagggagaaggaccagtttaagatgccgcgggattag

SEQ ID NO: 154960 - DNA, 927 bp, Artificial Sequence
  derived and/or modified sequence
atggtcgtgggcagaggcctcctcggcaggcgatccctcgccgcactgggagctgcatgtgcaaggcgaggactgggacccgcacttcttggcgttttctgccatactgacttacgaaagaacctgacggtggacgaaggcacgatgaaggtggaggtcctgccagccctcacagacaactatatgtacctcgtcattgacgacgaaaccaaagaggcagctatagtggacccagtccagccccagaaggtggtggatgccgcacgcaaacacggcgtcaagctcactaccgttctgaccacccaccatcactgggaccatgctggcggtaatgagaagctcgtcaagcttgagagcggcctgaaagtatatggcggagacgaccgtattggggcattgacacacaaaatcacacacctgtcaaccttgcaggtgggctctttaaatgtcaaatgtctcgcgacaccctgccacacttctggacatatttgttactttgtgagtaaaccaggagggtccgaacctcccgcagtctttacaggcgacaccctgttcgtcgccggttgtggtaagttttacgaggggacagccgatgagatgtgcaaagctctgcttgaggtgttgggtcgcttgcccccagatacacgggtatattgcggccacgagtacaccatcaacaaccttaagttcgctagacacgtggaacctggaaacgccgcaatccgtgagaagctggcctgggctaaagaaaaatactccatcggcgaacctacagttcctagcacattagctgaagaatttacctataaccccttcatgcgcgtgagggagaaaacggttcagcagcacgccggagaaacagatcctgtaaccaccatgagggctgtgagacgcgaaaaggaccagtttaagatgcccagagattag

SEQ ID NO: 154961 - DNA, 927 bp, Artificial Sequence
  derived and/or modified sequence
atggtggtgggcagaggcctgctgggcagaagaagcctggccgccctgggcgccgcctgcgccagaagaggcctgggccccgccctgctgggcgtgttctgccacaccgacctgagaaagaacctgaccgtggacgagggcaccatgaaggtggaggtgctgcccgccctgaccgacaactacatgtacctggtgatcgacgacgagaccaaggaggccgccatcgtggaccccgtgcagccccagaaggtggtggacgccgccagaaagcacggcgtgaagctgaccaccgtgctgaccacccaccaccactgggaccacgccggcggcaacgagaagctggtgaagctggagagcggcctgaaggtgtacggcggcgacgacagaatcggcgccctgacccacaagatcacccacctgagcaccctgcaggtgggcagcctgaacgtgaagtgcctggccaccccctgccacaccagcggccacatctgctacttcgtgagcaagcccggcggcagcgagccccccgccgtgttcaccggcgacaccctgttcgtggccggctgcggcaagttctacgagggcaccgccgacgagatgtgcaaggccctgctggaggtgctgggcagactgccccccgacaccagagtgtactgcggccacgagtacaccatcaacaacctgaagttcgccagacacgtggagcccggcaacgccgccatcagagagaagctggcctgggccaaggagaagtacagcatcggcgagcccaccgtgcccagcaccctggccgaggagttcacctacaaccccttcatgagagtgagagagaagaccgtgcagcagcacgccggcgagaccgaccccgtgaccaccatgagagccgtgagaagagagaaggaccagttcaagatgcccagagactag

SEQ ID NO: 154962 - protein, 314 aa, Artificial Sequence
  derived and/or modified sequence
MAFVTRQFMRSVSSSSTASASAKKIIVKHVTVIGGGLMGAGIAQVAAATGHTVVLVDQTEDILAKSKKGIEESLRKVAKKKFAENLKAGDEFVEKTLSTIATSTDAASVVHSTDLVVEAIVENLKVKNELFKRLDKFAAEHTIFASNTSSLQITSIANATTRQDRFAGLHFFNPVPVMKLVEVIKTPMTSQKTFESLVDFSKALGKHPVSCKDTPGFIVNRLLVPYLMEAIRLYERGDASKEDIDTAMKLGAGYPMGPFELLDYVGLDTTKFIVDGWHEMDAENPLHQPSPSLNKLVAENKFGKKTGEGFYKYK

SEQ ID NO: 154963 - DNA, 945 bp, Artificial Sequence
  derived and/or modified sequence
atggccttcgtgacaaggcaattcatgcggagcgtatcttctagttccaccgcctctgcaagcgccaaaaagataatagtgaagcatgtgactgtcataggaggggggctgatgggtgctgggattgcccaggtggcagccgccaccgggcacaccgtagtgttagtcgatcagacagaagacattctcgccaaatcaaaaaagggaatcgaagagtccctgcggaaggttgcaaagaaaaaattcgcggaaaatctcaaggcaggggacgagttcgtcgagaagaccttgtcaacaattgctacaagtacggatgcagcaagcgtagtccattcgaccgatctcgtcgtggaggctatcgtagaaaacttgaaggtgaagaatgaactgttcaaacgccttgataagtttgccgctgagcatactatctttgcatccaataccagttctttgcagatcacgtcaatcgcgaatgccacgacacgtcaagatcgtttcgcagggctgcacttcttcaatcccgtgcctgtcatgaaactcgtggaggttataaagactccaatgactagccaaaagacatttgagtccctagtggatttcagcaaagcattaggaaagcatccagtctcctgcaaagacacacccggctttatagtgaatcgcttattggttccatacttaatggaggccatccgactttacgaaaggggagacgccagcaaggaagacattgataccgccatgaagcttggggccggttaccctatgggtccctttgaattactggattacgtggggctggataccaccaaattcatcgtggacgggtggcatgaaatggacgctgagaacccactgcaccaaccgtccccttctctgaataaactggtagccgagaacaagtttgggaagaaaacaggcgaaggattctataagtataaatag

SEQ ID NO: 154964 - DNA, 945 bp, Artificial Sequence
  derived and/or modified sequence
atggcctttgtgacccggcagttcatgaggtctgtgagcagcagcagcacagccagcgccagcgccaagaagatcatcgtgaagcacgtgacagtgattggaggcggcctgatgggcgccggcatcgcccaggtggccgccgccaccggccacacagtggtgctggtggaccagacagaggacatcctggccaagagcaagaagggcatcgaggagagcctgaggaaggtggccaagaagaagtttgctgagaacctgaaggctggagatgaatttgtggagaagaccctgagcaccatcgccaccagcacagatgctgcctctgtggtgcacagcacagacctggtggtggaggccatcgtggagaacctgaaggtgaagaatgagctgttcaagaggctggacaagtttgctgctgagcacaccatctttgccagcaacaccagcagcctgcagatcaccagcatcgccaatgccaccacccggcaggacagatttgctggcctgcacttcttcaaccctgtgcctgtgatgaagctggtggaggtgatcaagacccccatgaccagccagaagacctttgagagcctggtggacttcagcaaggccctgggcaagcaccctgtgtcctgcaaggacaccccaggcttcatcgtgaaccggctgctggtgccctacctgatggaggccatccggctgtatgaaagaggagatgccagcaaggaggacatcgacacagccatgaagctgggcgccggctaccccatgggcccctttgagctgctggactatgtgggcctggacaccaccaagttcatcgtggatggctggcatgagatggatgctgagaaccccctgcaccagcccagccccagcctgaacaagctggtggccgagaacaagtttgggaagaagacaggagagggcttctacaagtacaagtag

SEQ ID NO: 154965 - DNA, 945 bp, Artificial Sequence
  derived and/or modified sequence
atggccttcgtgacccggcagttcatgcggagcgtgagcagcagctccaccgcttccgcctctgccaaaaagattatcgtgaaacacgtcaccgtcatcgggggtggcctgatgggggccgggattgcccaggtcgcagctgcaaccggacatactgtggtgttagtggaccagaccgaggacatcctggccaagagcaagaagggcattgaagaaagcctcagaaaagttgcaaagaagaagtttgctgagaatttgaaggccggagacgaatttgtcgagaaaaccctgtccacaatagcaacgtctaccgacgcagcatccgtggtccactcaactgaccttgtggtggaagcgatcgtggaaaatctaaaagtgaagaacgaactgtttaaacggctggacaagttcgccgcagaacataccatctttgcctccaataccagttcacttcagatcacatccattgccaacgctacaacaaggcaggacagattcgccggactgcattttttcaatcccgtgccggtcatgaaattagtggaggttattaagaccccgatgacatctcaaaaaacgtttgaatctctggtggacttctctaaagccttaggcaagcatcccgtatcatgtaaggataccccaggcttcattgttaataggctgctggtgccttatctgatggaggctatacgattgtacgagcggggagatgctagcaaggaggacatagacacagcaatgaaactaggagccggctacccaatggggccatttgagctgctggactatgttggcctggatacgaccaagttcatcgtggatggttggcacgaaatggatgcagagaatccgttgcaccagcccagtccttctctaaacaaactagtggcagaaaacaaattcgggaaaaagaccggggaaggattctacaagtataagtag

SEQ ID NO: 154966 - DNA, 945 bp, Artificial Sequence
  derived and/or modified sequence
atggcctttgtgacgcggcagtttatgcgatctgtatcatcttcttcaaccgctagcgctagtgcgaagaaaatcattgtgaagcatgtgaccgtcattggcggaggtttgatgggtgcagggatagctcaggtcgcagccgcaacaggtcacacagtggtattggtcgaccagaccgaggatattcttgctaagagtaaaaagggtatcgaggagagcttgcggaaagtggccaaaaagaagttcgcagagaacctaaaggccggtgatgaatttgtagaaaaaacactgtccacgatcgcaactagtaccgacgctgccagtgttgttcattctactgacctcgtcgtggaagcaatcgtggagaacttgaaagtgaaaaacgagctgttcaagcggcttgacaagttcgccgctgagcatactatctttgctagcaatacaagttcgttacagattacatcaattgctaatgccaccacgaggcaggaccgattcgctgggcttcactttttcaaccccgtccctgtcatgaaactcgtcgaggttatcaaaacgccaatgacgtcacagaaaacatttgagagcctggtggacttttcaaaggcgctcggcaagcacccagtaagttgtaaggatactccaggatttatcgtcaatcgccttttagtgccataccttatggaggctatccgcctgtacgagagaggagatgcttctaaggaagatattgacacggctatgaagttaggtgctgggtatcccatgggtccattcgagctgctggactacgttggcctcgacacaacgaaatttatagtggacgggtggcacgagatggacgcagaaaatccgctccaccagcctagccctagcctgaacaaactagttgctgagaataagtttggtaaaaaaaccggcgaaggcttttacaagtataagtag

SEQ ID NO: 154967 - DNA, 1912 bp, Artificial Sequence
  derived and/or modified sequence
ccccgccttgtggcgtcacggggacgccgggggcgcgcgggctgcagggccgcgtaggtccccgcccccagagtctggctttccgcggctgcccgcctcgcgcgtcttccctgcccgggtctcctcgctgtcgccgccgctgccacaccatggccttcgtcaccaggcagttcatgcgttccgtgtcctcctcgtccaccgcctcggcctcggccaagaagataatcgtcaagcacgtgacggtcatcggcggcgggctgatgggcgccggcattgcccaggttgctgcagcaactggtcacacagtagtgttggtagaccagacagaggacatcctggcaaaatccaaaaagggaattgaggaaagccttaggaaagtggcaaagaagaagtttgcagaaaaccttaaggccggcgatgaatttgtggagaagaccctgagcaccatagcgaccagcacggatgcagcctccgttgtccacagcacagacttggtggtggaagccatcgtggagaatctgaaggtgaaaaacgagctcttcaaaaggctggacaagtttgctgctgaacatacaatctttgccagcaacacttcctccttgcagattacaagcatagctaatgccaccaccagacaagaccgattcgctggcctccatttcttcaacccagtgcctgtcatgaaacttgtggaggtcattaaaacaccaatgaccagccagaagacatttgaatctttggtagactttagcaaagccctaggaaagcatcctgtttcttgcaaggacactcctgggtttattgtgaaccgcctcctggttccatacctcatggaagcaatcaggctgtatgaacgaggtgacgcatccaaagaagacattgacactgctatgaaattaggagccggttaccccatgggcccatttgagcttctagattatgtcggactggatactacgaagttcatcgtggatgggtggcatgaaatggatgcagagaacccattacatcagcccagcccatccttaaataagctggtagcagagaacaagttcggcaagaagactggagaaggattttacaaatacaagtgatgtgcagcttctccggctctgagaagaacacctgagagcgctttccagccagtgccccgagtgcctgtgggaatgctctttggtcagacattccctcacacagtacagtttaataaatgtgcattttgattgtaatctatcgaagtgattattacaccagttacagcagtaatagattctccattaagaaataattcccttttttagtctgttcatttctgtgtattttctaaacagctttacacccttggtgccttggagcaaacatgttttttgaaccttgtcatttttgtgaagaattgcctagattccttctctcatcaacgggaaagtacttcctctgagagtgcgagtgcaccatgctcactgttgctgcgtgggagagtcacaagccactggcaagcaagtggtatagtctgtgaagcactgcagcgagcagcacctggatcttgcctttataagaacattttactacctgcagctttgagtcttgccctacattttgggcatgacataagatgtgtctttattcagctcgtcgtgaagatgctgctgctgaatgggtcagcatatctctgtttgcatggtttgcaggaggtcggttttcatggtcattcagttccacagatctgaatgattactgtctgtctgtgtcttttttccatgagaaatcactgttgcaaattgcctataaattgactctactaaaataacaatgtttcagtctgaaaatttgaattgaaaaaaatgtataatataaaattgtaatacactcaaatgattataaaagtaaaagttggtaatttaggcagaagcta

SEQ ID NO: 154968 - DNA, 945 bp, Artificial Sequence
  derived and/or modified sequence
atggccttcgtgaccagacagttcatgagaagcgtgagcagcagcagcaccgccagcgccagcgccaagaagatcatcgtgaagcacgtgaccgtgatcggcggcggcctgatgggcgccggcatcgcccaggtggccgccgccaccggccacaccgtggtgctggtggaccagaccgaggacatcctggccaagagcaagaagggcatcgaggagagcctgagaaaggtggccaagaagaagttcgccgagaacctgaaggccggcgacgagttcgtggagaagaccctgagcaccatcgccaccagcaccgacgccgccagcgtggtgcacagcaccgacctggtggtggaggccatcgtggagaacctgaaggtgaagaacgagctgttcaagagactggacaagttcgccgccgagcacaccatcttcgccagcaacaccagcagcctgcagatcaccagcatcgccaacgccaccaccagacaggacagattcgccggcctgcacttcttcaaccccgtgcccgtgatgaagctggtggaggtgatcaagacccccatgaccagccagaagaccttcgagagcctggtggacttcagcaaggccctgggcaagcaccccgtgagctgcaaggacacccccggcttcatcgtgaacagactgctggtgccctacctgatggaggccatcagactgtacgagagaggcgacgccagcaaggaggacatcgacaccgccatgaagctgggcgccggctaccccatgggccccttcgagctgctggactacgtgggcctggacaccaccaagttcatcgtggacggctggcacgagatggacgccgagaaccccctgcaccagcccagccccagcctgaacaagctggtggccgagaacaagttcggcaagaagaccggcgagggcttctacaagtacaagtag

SEQ ID NO: 154969 - protein, 553 aa, Artificial Sequence
  derived and/or modified sequence
MPVQLTTALRVVGTSLFALAVLGGILAAYVTGYQFIHTEKHYLSFGLYGAILGLHLLIQSLFAFLEHRRMRRAGQALKLPSPRRGSVALCIAAYQEDPDYLRKCLRSAQRISFPDLKVVMVVDGNRQEDAYMLDIFHEVLGGTEQAGFFVWRSNFHEAGEGETEASLQEGMDRVRDVVRASTFSCIMQKWGGKREVMYTAFKALGDSVDYIQVCDSDTVLDPACTIEMLRVLEEDPQVGGVGGDVQILNKYDSWISFLSSVRYWMAFNVERACQSYFGCVQCISGPLGMYRNSLLQQFLEDWYHQKFLGSKCSFGDDRHLTNRVLSLGYRTKYTARSKCLTETPTKYLRWLNQQTRWSKSYFREWLYNSLWFHKHHLWMTYESVVTGFFPFFLIATVIQLFYRGRIWNILLFLLTVQLVGIIKATYACFLRGNAEMIFMSLYSLLYMSSLLPAKIFAIATINKSGWGTSGRKTIVVNFIGLIPVSIWVAVLLGGLAYTAYCQDLFSETELAFLVSGAILYGCYWVALLMLYLAIIARRCGKKPEQYSLAFAEV

SEQ ID NO: 154970 - DNA, 1662 bp, Artificial Sequence
  derived and/or modified sequence
atgcctgtccagctgaccacagccctccgcgtggttggaacctccctcttcgccctggcagtactcggaggcatcctagcagcatatgtgaccggctaccagttcatacataccgaaaagcattatctgtccttcggcctctatggagccatcttgggtctgcatctccttatccagagccttttcgccttccttgaacatcgtcgtatgcgaagagccgggcaagccctgaagctcccctcgccacggcgcgggtctgtagcactatgtatcgcggcgtatcaagaagatcctgactatctccgaaagtgtctgcggagcgctcagcgaatatcatttcccgaccttaaagttgtcatggtggtggacggcaacagacaagaggacgcctacatgttggatatcttccacgaagttctcggtggtaccgagcaggccggattcttcgtttggcggtcgaacttccatgaggccggcgagggcgaaaccgaggcctcacttcaggagggaatggatagagttcgggatgttgtgcgggcttccaccttcagctgcattatgcagaagtggggggggaagcgagaggtcatgtacacggcttttaaagccctgggagacagcgtcgattacatacaggtctgcgatagcgacacagtccttgaccctgcgtgtactatagagatgttgcgggttttagaggaggacccccaggtgggtggagtcggcggggacgtgcagattttgaataagtatgattcctggatatcatttctcagctcagttaggtactggatggcgttcaacgttgagcgggcctgccaatcctattttggctgtgtccagtgcattagtggaccattaggcatgtatcgaaatagtctgcttcagcagtttctagaagattggtatcatcagaagtttcttggcagcaagtgctcatttggtgatgatagacacctgacaaatcgcgtgctgtccctgggctacaggactaagtacacagcccgctctaagtgcctgacagaaacacctacaaaatatttaaggtggctgaaccagcagacccgatggtctaaaagctactttagagaatggttgtacaactctttgtggtttcacaagcatcatttgtggatgacgtacgaatccgttgtcactggtttttttccttttttcctcatcgcaactgtaattcagctgttttatagaggaagaatctggaatatactcctgtttcttctgacagtgcagctcgtgggaataattaaagcaacttacgcctgcttcttacggggtaatgctgaaatgatattcatgtctctttacagcttgttatacatgtccagtttgctgcctgcgaagatttttgcaattgctacgattaacaaaagcggatggggcactagcgggaggaaaaccattgttgtgaacttcattggcctgatcccggtatctatctgggtagccgtcctcctcgggggcctggcctacacagcgtactgccaggatctcttttccgaaaccgagctagccttccttgtaagtggggccatcctctatggatgctactgggtcgcgcttttgatgttgtatcttgcaattatcgcacgcagatgcggaaaaaagccagaacagtatagtctggcgtttgctgaagtctag

SEQ ID NO: 154971 - DNA, 4220 bp, Artificial Sequence
  derived and/or modified sequence
gagtgcgttcgcggctgctttgacctggtgggcgccgcctccggcactgcaccgaggcggggcgccagcgcccaggttgctgggctggccttggcgcccccttcccctacccagagcgcaggcaggcaggggggtcccgccgcgccccttcagcatatgccggtgcagctgacgacagccctgcgtgtggtgggcaccagcctgtttgccctggcagtgctgggtggcatcctggcagcctatgtgacgggctaccagttcatccacacggaaaagcactacctgtccttcggcctgtacggcgccatcctgggcctgcacctgctcattcagagcctttttgccttcctggagcaccggcgcatgcgacgtgccggccaggccctgaagctgccctccccgcggcggggctcggtggcactgtgcattgccgcataccaggaggaccctgactacttgcgcaagtgcctgcgctcggcccagcgcatctccttccctgacctcaaggtggtcatggtggtggatggcaaccgccaggaggacgcctacatgctggacatcttccacgaggtgctgggcggcaccgagcaggccggcttctttgtgtggcgcagcaacttccatgaggcaggcgagggtgagacggaggccagcctgcaggagggcatggaccgtgtgcgggatgtggtgcgggccagcaccttctcgtgcatcatgcagaagtggggaggcaagcgcgaggtcatgtacacggccttcaaggccctcggcgattcggtggactacatccaggtgtgcgactctgacactgtgctggatccagcctgcaccatcgagatgcttcgagtcctggaggaggatccccaagtagggggagtcgggggagatgtccagatcctcaacaagtacgactcatggatttccttcctgagcagcgtgcggtactggatggccttcaacgtggagcgggcctgccagtcctactttggctgtgtgcagtgtattagtgggcccttgggcatgtaccgcaacagcctcctccagcagttcctggaggactggtaccatcagaagttcctaggcagcaagtgcagcttcggggatgaccggcacctcaccaaccgagtcctgagccttggctaccgaactaagtataccgcgcgctccaagtgcctcacagagacccccactaagtacctccggtggctcaaccagcaaacccgctggagcaagtcttacttccgggagtggctctacaactctctgtggttccataagcaccacctctggatgacctacgagtcagtggtcacgggtttcttccccttcttcctcattgccacggttatacagcttttctaccggggccgcatctggaacattctcctcttcctgctgacggtgcagctggtgggcattatcaaggccacctacgcctgcttccttcggggcaatgcagagatgatcttcatgtccctctactccctcctctatatgtccagccttctgccggccaagatctttgccattgctaccatcaacaaatctggctggggcacctctggccgaaaaaccattgtggtgaacttcattggcctcattcctgtgtccatctgggtggcagttctcctgggagggctggcctacacagcttattgccaggacctgttcagtgagacagagctagccttccttgtctctggggctatactgtatggctgctactgggtggccctcctcatgctatatctggccatcatcgcccggcgatgtgggaagaagccggagcagtacagcttggcttttgctgaggtgtgacatggcccccaagcagagcgggtaaagtgcaatgggtaagggagggaaggggaatggaagagaaaagacagggtgggagggaggagggagtgctgtgttttagtctcttaatggtccaaaggacaaatctaaaatgcaaagaacggtgatgtagtatggcctgacagctctgtttagaggaggcaacactgatcccccagatgcagggctgcaggggattctgtgttttcagactgcctgtctgcttgcatctgcacataggcagtagcctcctcctgggctccagagggcactcagaagttgtgctaaaccaagttaagtcccattcagtggcaacttgtgataggtacctgagtgacggcaacctgcggaaggaggttctcccagcccatctgaacacaaccagaggtggcaggagaatttctactgagcgagctgggccggttagtgtatgtcacccccaccccacccctaagtagtcatcaatgcaataagattgcgcctgagatacaaggcccagaagcctgatctttgggcatcagaaaacagggtccaggaatggtgctttatgtgagataccccactccacatcaacattccagggatgagccaaaccagcagggagttagcactgaactgcttttaaaagtgcacattaaaaaggaaagtttgccaggaggaacaaagagattgtggtggtgctaaaggaggccataagctacacagaggccttgggtgttccacctggaaactgctcagacgtctagatgggttcttagcttgtctgtgatctctgctggggagataaaaagattaagccccaacatgttcagaaaagaagtgaagtcttgggtattttaacctgtatactcttgaattcctctcaaattcagctctgatctgaggctaagacacactccccacttcactttcttcaaagccacattttttgaggtatcactgcagtcacctcttctaccctcatcatcataggtaaggttttcaaggtggcaattggggcggagccccggctcttatagaagcttcagcaggaggcaagcgtgttctcagcacatatgggaactatgaggagcctctgatcaaattggctacaatcttggagctgcttggacggattccttggcagccgggttagcatgtgtgactttcaggctactgttcttgacaatcatctccaatggaaagcttttcagtgttcccaaagtgaactctcaaatccaaaatggttatctttgagaccatccattctcctcagtggcttctccagggaattcttacagccaagttgtgacagtcactgcatttgcctgcttctttccagaaaccaaactaggagatgaaactggttcctacatcctaaggttcttgctttctctctcatgcctcctgaggctgtttttggctgttttccctctgctgcttttggggaatgaggggaagccattttccagtgacttgcaatccaggctgttctcagcgttttgagtttaaaacctgggatcctgactaagcctttgacttaagggttgcttgcttgccctccaaatgtcctttctcagaggggccagctaacccgtgcagaaccagcactaaggtggacagcagacaagagggcaagcctctagtgtaccaagtgcttcctacaaagacgcaaggtgtgctctgagccacagatgggcaaaccctggtgctttccttcatctcccacgaactcaagggttttccaggtgtagctaacagttgccacatcacacagacctcgagtttctggtaagactgctggttgacatcagacccaacccatgaaggctggaaggcagcaggcatttgctaaggcagctgatccaggcaatcgttctgctggccaagaagttaaactattttgagcattagaatggaggaaatccggtcagccaagtgcagagttcagacttcgctaagggcttgtttttcttcagcatttacttgaagattaatgtaggatgacaggctctcctggctgtcctaccatcagctctgccttgcactgtggtcgtcaactttcctcaaatcaaaaacaggcaggtacaggtagtgggctcacaacgtttgacctcgactggtttttctaagttattttgtacatttttcagcagcaaaaccaaactgggtcttcagctttatccccgtttcttgcaagggaagagcctttatacaattggacgcattttggtttttcctcattgagaattcaaatcctcttttgtattgtttctacaataatttgtaaacatatttatttttacctgcttttttttttttttttaattttcaggtcaagttttttatactgcacttatttgtcaaaataaagattctcacatatgccggttatctcgaaa

SEQ ID NO: 154972 - DNA, 1662 bp, Artificial Sequence
  derived and/or modified sequence
atgcctgtgcagctgaccacagccctgcgggtggtgggcaccagcctgtttgccctggccgtgctgggcggcatcctggccgcctacgtgacaggctaccagttcatccacacagagaagcactacctgagctttggcctgtatggagccatcctgggcctgcacctgctgatccagagcctgtttgccttcctggagcacaggaggatgagaagagctggccaggccctgaagctgcccagcccccggcggggctctgtggccctgtgcatcgccgcctaccaggaggaccctgactacctgaggaagtgcctgcggagcgcccagaggatctccttcccagacctgaaggtggtgatggtggtggatggcaaccggcaggaggatgcctacatgctggacatcttccacgaggtgctgggcggcacagagcaggccggcttctttgtgtggaggagcaacttccacgaggccggggagggggagacagaggccagcctgcaggagggcatggacagagtgagagatgtggtgcgggccagcaccttcagctgcatcatgcagaagtggggcggcaagcgggaggtgatgtacacagccttcaaggccctgggggacagcgtggactacatccaggtgtgtgacagcgacacagtgctggaccctgcctgcaccatcgagatgctgcgggtgctggaggaggacccccaggtgggcggcgtgggcggagatgtgcagatcctgaacaagtatgacagctggatctccttcctgagctctgtgcgctactggatggccttcaacgtggagcgggcctgccagagctacttcggctgtgtgcagtgcatcagcggccccctgggcatgtacagaaacagcctgctgcagcagttcctggaggactggtaccaccagaagttcctgggcagcaaatgttcctttggagatgacagacacctgaccaacagagtgctgagcctgggctaccgcaccaagtacacagcccggagcaagtgcctgacagagacccccaccaagtacctgcgctggctgaaccagcagacccgctggagcaagagctacttccgggagtggctgtacaacagcctgtggttccacaagcaccacctgtggatgacctatgaatctgtggtgacaggcttcttccccttcttcctgattgccaccgtcatccagctgttctaccggggccgcatctggaacatcctgctcttcctgctgactgtgcagctggtgggcatcatcaaggccacctacgcctgcttcctgcggggaaatgctgagatgatcttcatgagcctgtacagcctgctgtacatgagcagcctgctgcctgccaagatctttgccatcgccaccatcaacaagagcggctggggcaccagcggcaggaagaccatcgtggtgaacttcatcggcctcatccctgtgtccatctgggtggccgtgctgctgggcggcctggcctacacagcctactgccaggacctcttcagcgagacagagctggccttcctggtgtctggggccatcctgtatggctgctactgggtggccctgctgatgctgtacctggccatcatcgcccggcgctgtgggaagaagccagagcagtacagcctggcctttgctgaggtgtag

SEQ ID NO: 154973 - DNA, 1662 bp, Artificial Sequence
  derived and/or modified sequence
atgcccgtgcagctgaccaccgccctgcgggtggtgggcaccagcctttttgccctggcagtcctgggagggatcttggccgcctacgtgactggctaccagttcatccacaccgagaaacactacctcagtttcgggctctatggcgcaatcctgggtctgcacttactcattcagagtctattcgctttcctggagcatcggcgcatgaggagggccggacaggctctgaaactgcctagcccccggcgggggtcagttgcactgtgcatcgcggcttatcaagaggacccagattacctgaggaaatgcctcagatctgcccagcgcatttcttttcctgacttaaaagtggtgatggtggttgacggcaacaggcaggaggacgcttatatgctggacatctttcacgaagtcctgggcggcacagagcaagccggcttttttgtgtggaggtcaaacttccatgaagctggagagggcgaaaccgaggccagcctgcaggagggtatggatcgagtcagggatgtagtgcgggcgtctacatttagctgcattatgcagaagtggggcggcaagagagaagtaatgtacaccgcattcaaggcacttggggatagcgtggactacatccaggtgtgcgacagtgataccgtcctggacccggcatgtaccattgagatgctgcgtgtgctggaagaggacccccaggtgggaggagttggtggagacgtgcaaattctgaacaagtacgacagctggatctctttcttgtctagcgtgagatattggatggcattcaatgtggaacgggcctgccaatcgtatttcgggtgtgtgcagtgcatcagtgggcccctaggcatgtatcggaattcactgctgcagcagttcctcgaagactggtaccaccagaaatttctgggctctaagtgcagctttggcgacgatcgtcacctaactaatcgcgttctttccctcgggtaccgcactaaatatactgctcgaagtaagtgtctgaccgaaacccctaccaagtatttgagatggctaaaccaacaaacacgttggagcaagtcttattttagagagtggttgtataactctctttggtttcacaagcatcacctctggatgacctatgagagtgtggtgacaggcttttttccgtttttcctgatcgccaccgtcatccagctgttttatcggggtcggatatggaatatactcctgttcttactaacagtgcaactggttggcattattaaagctacgtatgcatgtttcttgcggggcaatgcagaaatgatattcatgtccctctactccctcctgtatatgtcatcattgttgccagccaaaatcttcgcaattgcgaccattaacaaatcaggctggggtacatctgggcgaaaaacgatcgtggtcaatttcatcggacttatccccgtgagtatttgggttgccgtcctgctgggtggactggcctataccgcgtactgccaagacctgttctccgaaacagaattggcctttctggtgagcggagccatcttgtacgggtgttattgggttgcattgctcatgttgtatctggccattatcgctagacggtgcggaaaaaaacctgagcaatacagcctggcctttgcagaagtgtag

SEQ ID NO: 154974 - DNA, 1662 bp, Artificial Sequence
  derived and/or modified sequence
atgccagttcagcttaccactgccttgagggtggtggggacatccctgttcgcacttgcggtcctgggcggaattctggctgcctatgtgaccggctaccaatttattcatactgagaaacactacctcagtttcggcctgtacggcgcaatcttgggactgcatctgctcatccaaagcctctttgccttcttagagcatcgcagaatgcggagagcagggcaggcgttaaagcttccctccccccgacgcggaagcgtggccctctgcattgctgcttaccaagaagatcctgactacttaagaaagtgtctaagatctgctcagcgtatcagcttccctgatcttaaagtggtgatggtcgtggatggtaatcgacaggaagacgcgtacatgcttgacatatttcacgaagttctggggggaacggagcaagctgggttttttgtgtggcgttctaattttcatgaggctggggaaggagaaaccgaggcctccctgcaggaaggtatggaccgtgtgcgtgatgtcgtcagagctagcaccttttcttgcatcatgcagaagtggggtggtaagcgggaggtcatgtacactgctttcaaagccctgggggatagtgtggactatatccaagtgtgtgacagcgataccgtgctggacccagcttgcacaattgagatgctcagagtccttgaagaagacccccaggtgggcggagtaggtggtgatgtgcagattctgaataaatatgactcctggatttcattcctttcctctgtgcggtactggatggcattcaacgtggaacgggcttgccagtcttactttggttgtgttcagtgtatttctgggccactgggtatgtatcgaaactccctgctccagcagttcctggaggactggtatcatcagaaattcctgggtagcaagtgtagtttcggcgatgaccgccaccttaccaaccgtgtcctatccctgggatatcggaccaaatataccgctcggtctaagtgccttacagagacgccaacaaagtaccttagatggctaaatcagcagacaagatggagcaagagctatttcagagagtggctctataattctctgtggtttcacaaacaccacctgtggatgacttatgagagtgtggtaacgggctttttcccatttttcttgatcgcaacagtcattcagctgttctatcgagggaggatttggaatattttgctcttcctcctcaccgttcaactggttggcatcattaaggccacatacgcctgtttcctccggggtaatgcagagatgatatttatgagtctgtatagtctcctttatatgagctccctacttccagcaaagatctttgcaattgccactataaacaaatccggctggggaacgtcagggagaaaaacgatcgtggtgaattttatcggtctcatccctgtcagcatctgggtagctgtgctgctgggtggtctagcgtataccgcttattgtcaagatctgttctccgaaactgagttggcttttttggttagcggggcaatactgtatggatgctactgggtggcacttctgatgctttacctggccataatcgctcgcagatgcggaaagaaaccagagcagtatagtttggctttcgcagaggtctag

SEQ ID NO: 154975 - DNA, 1662 bp, Artificial Sequence
  derived and/or modified sequence
atgcccgtgcagctgaccaccgccctgagagtggtgggcaccagcctgttcgccctggccgtgctgggcggcatcctggccgcctacgtgaccggctaccagttcatccacaccgagaagcactacctgagcttcggcctgtacggcgccatcctgggcctgcacctgctgatccagagcctgttcgccttcctggagcacagaagaatgagaagagccggccaggccctgaagctgcccagccccagaagaggcagcgtggccctgtgcatcgccgcctaccaggaggaccccgactacctgagaaagtgcctgagaagcgcccagagaatcagcttccccgacctgaaggtggtgatggtggtggacggcaacagacaggaggacgcctacatgctggacatcttccacgaggtgctgggcggcaccgagcaggccggcttcttcgtgtggagaagcaacttccacgaggccggcgagggcgagaccgaggccagcctgcaggagggcatggacagagtgagagacgtggtgagagccagcaccttcagctgcatcatgcagaagtggggcggcaagagagaggtgatgtacaccgccttcaaggccctgggcgacagcgtggactacatccaggtgtgcgacagcgacaccgtgctggaccccgcctgcaccatcgagatgctgagagtgctggaggaggacccccaggtgggcggcgtgggcggcgacgtgcagatcctgaacaagtacgacagctggatcagcttcctgagcagcgtgagatactggatggccttcaacgtggagagagcctgccagagctacttcggctgcgtgcagtgcatcagcggccccctgggcatgtacagaaacagcctgctgcagcagttcctggaggactggtaccaccagaagttcctgggcagcaagtgcagcttcggcgacgacagacacctgaccaacagagtgctgagcctgggctacagaaccaagtacaccgccagaagcaagtgcctgaccgagacccccaccaagtacctgagatggctgaaccagcagaccagatggagcaagagctacttcagagagtggctgtacaacagcctgtggttccacaagcaccacctgtggatgacctacgagagcgtggtgaccggcttcttccccttcttcctgatcgccaccgtgatccagctgttctacagaggcagaatctggaacatcctgctgttcctgctgaccgtgcagctggtgggcatcatcaaggccacctacgcctgcttcctgagaggcaacgccgagatgatcttcatgagcctgtacagcctgctgtacatgagcagcctgctgcccgccaagatcttcgccatcgccaccatcaacaagagcggctggggcaccagcggcagaaagaccatcgtggtgaacttcatcggcctgatccccgtgagcatctgggtggccgtgctgctgggcggcctggcctacaccgcctactgccaggacctgttcagcgagaccgagctggccttcctggtgagcggcgccatcctgtacggctgctactgggtggccctgctgatgctgtacctggccatcatcgccagaagatgcggcaagaagcccgagcagtacagcctggccttcgccgaggtgtag

SEQ ID NO: 154976 - protein, 147 aa, Artificial Sequence
  derived and/or modified sequence
MVHFTAEEKAAVTSLWSKMNVEEAGGEALGRLLVVYPWTQRFFDSFGNLSSPSAILGNPKVKAHGKKVLTSFGDAIKNMDNLKPAFAKLSELHCDKLHVDPENFKLLGNVMVIILATHFGKEFTPEVQAAWQKLVSAVAIALAHKYH

SEQ ID NO: 154977 - protein, 87 aa, Artificial Sequence
  derived and/or modified sequence
MVHFTAEEKAAVTSLWSKMNVEEAGGEALGRLLVVYPWTQRFFDSFGNLSSPSAILGNPKVKAHGKKVLTSFGDAIKNMDNLKPAFA

SEQ ID NO: 154978 - DNA, 444 bp, Artificial Sequence
  derived and/or modified sequence
atggtacactttaccgccgaggagaaagccgccgtgacctccttgtggagtaagatgaacgtagaagaggctggcggggaggccttagggagactgctggttgtttacccttggacccagcggttcttcgactcgttcggtaacctttcaagtccatccgccatcttaggtaacccaaaggtgaaagctcacggaaaaaaggtgctgacaagttttggggatgccattaagaacatggataatctgaaacctgcattcgcaaagctaagcgagttgcattgcgacaaactgcatgtcgacccagagaattttaagctgctgggaaatgtaatggtcattatcctcgcaacccactttggtaaggagtttacccccgaggtgcaggctgcttggcagaaactcgtgagcgcggtggccatcgccctcgcccacaagtaccactag

SEQ ID NO: 154979 - DNA, 444 bp, Artificial Sequence
  derived and/or modified sequence
atggttcacttcaccgccgaggaaaaggcggctgtgacttccctgtggagcaaaatgaatgtagaggaggcaggaggagaagcgctaggcagacttcttgtagtttatccgtggacccagcgatttttcgatagtttcggaaacctttcctctccttccgcgatacttgggaacccaaaagtgaaggcgcatggcaagaaagtgttaacatctttcggagacgctattaagaatatggacaatctaaagccagcgtttgctaagctgagcgagctgcattgtgataaacttcacgtcgatcctgaaaatttcaaactcctgggcaacgtgatggtgataatcctggctacacatttcggaaaagagtttaccccagaggtccaggcagcatggcagaaactagtttctgcggtggcgattgcactggcccacaaatatcactag

SEQ ID NO: 154980 - DNA, 264 bp, Artificial Sequence
  derived and/or modified sequence
atggtccattttaccgcggaggaaaaagctgcggtcacctccctgtggtcaaaaatgaatgtagaagaagccggtggtgaggcacttggccgcctgttggttgtgtatccatggacacagcgattcttcgactccttcggcaacctgtcaagtcccagtgccattctgggaaatcctaaagtgaaggcgcacgggaaaaaggtcctgaccagctttggagatgccatcaaaaatatggacaatctcaaacctgcattcgcatag

SEQ ID NO: 154981 - DNA, 827 bp, Artificial Sequence
  derived and/or modified sequence
agatagatgaggagccaacaaaaaagagcctcaggatccagcacacattatcacaaacttagtgtccatccatcactgctgaccctctccggacctgactccacccctgagggacacaggtcagccttgaccaatgacttttaagtaccatggagaacagggggccagaacttcggcagtaaagaataaaaggccagacagagaggcagcagcacatatctgcttccgacacagctgcaatcactagcaagctctcaggcctggcatcatggtgcattttactgctgaggagaaggctgccgtcactagcctgtggagcaagatgaatgtggaagaggctggaggtgaagccttgggcagactcctcgttgtttacccctggacccagagattttttgacagctttggaaacctgtcgtctccctctgccatcctgggcaaccccaaggtcaaggcccatggcaagaaggtgctgacttcctttggagatgctattaaaaacatggacaacctcaagcccgcctttgctaagctgagtgagctgcactgtgacaagctgcatgtggatcctgagaacttcaagctcctgggtaacgtgatggtgattattctggctactcactttggcaaggagttcacccctgaagtgcaggctgcctggcagaagctggtgtctgctgtcgccattgccctggcccataagtaccactgagttctcttccagtttgcaggtgttcctgtgaccctgacaccctccttctgcacatggggactgggcttggccttgagagaaagccttctgtttaataaagtacattttcttcagt

SEQ ID NO: 154982 - DNA, 906 bp, Artificial Sequence
  derived and/or modified sequence
gccatggttgtgaggcctccccagctatgtggaactagacttcaagaagttaagcaacttgctcaagatcatctaagaaatagatgaggagccaacaaaaaagagcctcaggatccagcacacattatcacaaacttagtgtccatccatcactgctgaccctctccggacctgactccacccctgagggacacaggtcagccttgaccaatgacttttaagtaccatggagaacagggggccagaacttcggcagtaaagaataaaaggccagacagagaggcagcagcacatatctgcttccgacacagctgcaatcactagcaagctctcaggcctggcatcatggtgcattttactgctgaggagaaggctgccgtcactagcctgtggagcaagatgaatgtggaagaggctggaggtgaagccttgggcagactcctcgttgtttacccctggacccagagattttttgacagctttggaaacctgtcgtctccctctgccatcctgggcaaccccaaggtcaaggcccatggcaagaaggtgctgacttcctttggagatgctattaaaaacatggacaacctcaagcccgcctttgctaagctgagtgagctgcactgtgacaagctgcatgtggatcctgagaacttcaagctcctgggtaacgtgatggtgattattctggctactcactttggcaaggagttcacccctgaagtgcaggctgcctggcagaagctggtgtctgctgtcgccattgccctggcccataagtaccactgagttctcttccagtttgcaggtgttcctgtgaccctgacaccctccttctgcacatggggactgggcttggccttgagagaaagccttctgtttaataaagtacattttcttcagtaa

SEQ ID NO: 154983 - DNA, 578 bp, Artificial Sequence
  derived and/or modified sequence
cttgcttctcctggccatggttgtgaggcctccccagctatgtggaactatagatgaggagccaacaaaaaagagcctcaggatccagcacacattatcacaaacttagtgtccatccatcactgctgaccctctccggacctgactccacccctgagggacacaggtcagccttgaccaatgacttttaagtaccatggagaacagggggccagaacttcggcagtaaagaataaaaggccagacagagaggcagcagcacatatctgcttccgacacagctgcaatcactagcaagctctcaggcctggcatcatggtgcattttactgctgaggagaaggctgccgtcactagcctgtggagcaagatgaatgtggaagaggctggaggtgaagccttgggcagactcctcgttgtttacccctggacccagagattttttgacagctttggaaacctgtcgtctccctctgccatcctgggcaaccccaaggtcaaggcccatggcaagaaggtgctgacttcctttggagatgctattaaaaacatggacaacctcaagcccgcctttgctaa

SEQ ID NO: 154984 - DNA, 444 bp, Artificial Sequence
  derived and/or modified sequence
atggtgcacttcaccgctgaggagaaggctgctgtgaccagcctgtggagcaagatgaatgtggaggaggccggcggggaggccctgggccgcctgctggtggtgtacccctggacccagcgcttctttgacagctttggaaacctgagcagccccagcgccatcctgggcaaccccaaggtgaaggcccacggcaagaaggtgctgaccagctttggagatgccatcaagaacatggacaacctgaagccagcctttgccaagctgtctgagctgcactgtgacaagctgcacgtggaccctgagaacttcaagctgctgggcaatgtgatggtgatcatcctggccacccactttgggaaggagttcaccccagaggtgcaggccgcctggcagaagctggtgtctgctgtggccatcgccctggcccacaagtaccactag

SEQ ID NO: 154985 - DNA, 264 bp, Artificial Sequence
  derived and/or modified sequence
atggtgcacttcaccgctgaggagaaggctgctgtgaccagcctgtggagcaagatgaatgtggaggaggccggcggggaggccctgggccgcctgctggtggtgtacccctggacccagcgcttctttgacagctttggaaacctgagcagccccagcgccatcctgggcaaccccaaggtgaaggcccacggcaagaaggtgctgaccagctttggagatgccatcaagaacatggacaacctgaagccagcctttgcctag

SEQ ID NO: 154986 - DNA, 444 bp, Artificial Sequence
  derived and/or modified sequence
atggtgcacttcaccgccgaggagaaggccgccgtgaccagcctgtggtcaaagatgaatgtagaagaagccggtggagaagcccttggaaggttgttggtggtgtacccatggacccagcgcttcttcgattcctttggaaatctgtcctcccccagcgcaattctcggcaacccaaaagtgaaggcgcacgggaagaaagtacttacttcttttggagacgccataaaaaacatggacaatctaaaaccggcttttgcaaaactctctgaacttcactgcgataaattgcatgtcgaccctgaaaatttcaaactgttgggaaacgtgatggtaattattctagcaacccacttcgggaaagaatttacgccagaggtgcaggccgcctggcagaagttggtcagcgctgtggcaattgccctggcccataaataccactag

SEQ ID NO: 154987 - DNA, 444 bp, Artificial Sequence
  derived and/or modified sequence
atggtgcacttcaccgccgaggagaaggccgccgtgaccagcctgtggtcaaagatgaacgtggaagaggctggcggagaagcgctgggccgcttactggttgtgtatccctggactcagagatttttcgacagtttcggaaatctttctagcccctcagccatcctgggtaaccccaaggttaaagcacacggcaaaaaagtgctcaccagtttcggcgacgctataaaaaacatggataatcttaagcctgcttttgcaaaattgtccgaattgcactgcgacaagttgcacgtagatcctgagaactttaaactgctcggaaacgtgatggtgatcatcctggccacccactttggcaaggagttcacccctgaggtgcaggctgcctggcagaagctcgtctcagctgtagctatagccctcgcacacaaataccactag

SEQ ID NO: 154988 - DNA, 264 bp, Artificial Sequence
  derived and/or modified sequence
atggtgcacttcaccgccgaggagaaggccgccgtgaccagcctgtggagcaagatgaacgtcgaggaggccggtggcgaagccctgggcagactactggtggtgtatccttggacgcagaggttttttgattcttttggaaatttgtcatctcctagcgctatcctgggtaatcccaaggtgaaggcacacggtaagaaagttctgacatcttttggggacgctattaagaacatggataatttgaaaccagccttcgcctag

SEQ ID NO: 154989 - DNA, 444 bp, Artificial Sequence
  derived and/or modified sequence
atggttcacttcactgccgaggaaaaagcagccgtgacttctctgtggtccaagatgaatgttgaggaggccggaggagaagcactcggcaggttgctagtggtctacccctggacgcagcgcttttttgactcgtttgggaacttgagctccccttccgccatacttggtaaccctaaagtcaaggcccacgggaagaaagtactgacctcgtttggtgacgccattaagaacatggacaatctgaaaccagcctttgcgaaactttccgaactgcattgcgataagttgcatgtggatcctgagaactttaagcttctggggaatgtcatggtgatcatcctggctactcactttgggaaagaattcaccccagaggtgcaggccgcttggcagaagcttgtctccgctgtagcgatcgccctcgcccataagtaccactag

SEQ ID NO: 154990 - DNA, 444 bp, Artificial Sequence
  derived and/or modified sequence
atggtgcacttcacagctgaggagaaggcagccgtcacatctttatggagtaagatgaatgtggaagaggccggaggcgaggcgctggggagattgctggttgtgtacccctggacgcagaggttcttcgattctttcggcaatctgtcctctccatcggctattctaggaaatcctaaggtgaaggcccacggtaaaaaagttctgacttcctttggcgacgctattaaaaacatggacaatctgaagcccgcttttgctaagctgagtgagctgcattgtgacaagctgcatgtggatccagagaattttaagctcctcggaaatgtaatggttataatcctggcaacacactttgggaaggaattcactcccgaggttcaggccgcttggcagaagctggtgagcgctgtcgccattgccttggcacacaagtatcactag

SEQ ID NO: 154991 - DNA, 264 bp, Artificial Sequence
  derived and/or modified sequence
atggttcattttacagcagaggaaaaggccgctgtgacaagcttgtggagtaaaatgaatgttgaggaagcgggtggagaggctcttgggcgtctgctggtggtgtacccttggacccagagattctttgacagcttcggcaatctgtcttcgccaagcgcgattctgggtaaccccaaggtgaaggcccacgggaagaaagtcctgactagtttcggggacgctattaagaatatggataacttgaagccagctttcgcatag

SEQ ID NO: 154992 - DNA, 444 bp, Artificial Sequence
  derived and/or modified sequence
atggtgcacttcaccgccgaggagaaggccgccgtgaccagcctgtggagcaagatgaacgtggaggaggccggcggcgaggccctgggcagactgctggtggtgtacccctggacccagagattcttcgacagcttcggcaacctgagcagccccagcgccatcctgggcaaccccaaggtgaaggcccacggcaagaaggtgctgaccagcttcggcgacgccatcaagaacatggacaacctgaagcccgccttcgccaagctgagcgagctgcactgcgacaagctgcacgtggaccccgagaacttcaagctgctgggcaacgtgatggtgatcatcctggccacccacttcggcaaggagttcacccccgaggtgcaggccgcctggcagaagctggtgagcgccgtggccatcgccctggcccacaagtaccactag

SEQ ID NO: 154993 - DNA, 264 bp, Artificial Sequence
  derived and/or modified sequence
atggtgcacttcaccgccgaggagaaggccgccgtgaccagcctgtggagcaagatgaacgtggaggaggccggcggcgaggccctgggcagactgctggtggtgtacccctggacccagagattcttcgacagcttcggcaacctgagcagccccagcgccatcctgggcaaccccaaggtgaaggcccacggcaagaaggtgctgaccagcttcggcgacgccatcaagaacatggacaacctgaagcccgccttcgcctag

SEQ ID NO: 154994 - protein, 142 aa, Artificial Sequence
  derived and/or modified sequence
MALSAEDRALVRALWKKLGSNVGVYTTEALERTFLAFPATKTYFSHLDLSPGSSQVRAHGQKVADALSLAVERLDDLPHALSALSHLHACQLRVDPASFQLLGHCLLVTLARHYPGDFSPALQASLDKFLSHVISALVSEYR

SEQ ID NO: 154995 - DNA, 429 bp, Artificial Sequence
  derived and/or modified sequence
atggcactgagcgccgaggacagggcattagtccgcgctctgtggaagaaactgggatccaacgttggtgtatacactacagaagcgctcgagcggaccttccttgcgtttcctgcaactaaaacttacttctcacacctggacctgtcccccggttcgagccaggtgagggcccacggtcagaaggtagctgatgccctgagtctggccgtcgagcgactggacgatctcccccacgctctaagtgccctttcacatctgcacgcttgccagctgcgcgtggacccagctagcttccagctccttggacattgtcttctggtcaccctggcgcgccattacccgggtgacttcagcccggccttgcaagcttctctcgacaaattcctgtctcacgtgatatccgccctcgtgtccgaataccgttag

SEQ ID NO: 154996 - DNA, 536 bp, Artificial Sequence
  derived and/or modified sequence
ggggtcgcagggcgcggcgggttccagcgcggggatggcgctgtccgcggaggaccgggcgctggtgcgcgccctgtggaagaagctgggcagcaacgtcggcgtctacacgacagaggccctggaaaggaccttcctggctttccccgccacgaagacctacttctcccacctggacctgagccccggctcctcacaagtcagagcccacggccagaaggtggcggacgcgctgagcctcgccgtggagcgcctggacgacctaccccacgcgctgtccgcgctgagccacctgcacgcgtgccagctgcgagtggacccggccagcttccagctcctgggccactgcctgctggtaaccctcgcccggcactaccccggagacttcagccccgcgctgcaggcgtcgctggacaagttcctgagccacgttatctcggcgctggtttccgagtaccgctgaactgtgggtgggtggccgcgggatccccaggcgaccttccccgtgtttgagtaaagcctctcccaggagcagc

SEQ ID NO: 154997 - DNA, 429 bp, Artificial Sequence
  derived and/or modified sequence
atggccctgtctgctgaggaccgggccctggtgcgggccctgtggaagaagctgggcagcaatgtgggcgtgtacaccacagaggccctggagaggaccttcctggccttccctgccaccaagacctacttcagccacctggacctgagccctggcagcagccaggtgcgggcccacggccagaaggtggctgatgccctgagcctggccgtggagcggctggatgacctgccccacgccctgagcgccctgagccacctgcacgcctgccagctgcgggtggaccctgccagcttccagctgctgggccactgcctgctggtgaccctggcccggcactacccaggggacttcagccctgccctgcaggccagcctggacaagttcctgagccacgtgatcagcgccctggtgtctgagtacagatag

SEQ ID NO: 154998 - DNA, 429 bp, Artificial Sequence
  derived and/or modified sequence
atggccctgagcgccgaggaccgggccctggtgcgggccctgtggaagaagttaggtagcaacgtgggggtgtacaccaccgaggccctcgagaggacgttcctcgccttcccggcaactaaaacctattttagccatttagacctaagtccaggaagcagccaggtgcgagcgcatggacagaaagtcgccgatgcactatccctcgccgtggagcggctcgacgacctgcctcatgctctcagcgccctgagccacctacacgcctgccagttaagggttgaccccgcttcattccagctgcttgggcactgtctgctcgtcaccctggctcgccactaccctggagatttctcacccgccctgcaggcttccctggacaagttccttagtcacgttattagtgccctggtctcagagtataggtag

SEQ ID NO: 154999 - DNA, 429 bp, Artificial Sequence
  derived and/or modified sequence
atggcactgtctgccgaggatcgcgctcttgtgagagctctgtggaaaaaactcggctccaatgtcggagtctacaccacggaggccctggagcgaacctttctggcctttccggcaaccaagacttatttctcacacctcgatttgtccccaggaagttcgcaggtgcgagcacacgggcaaaaggttgctgatgctctgtcactggccgtggagcgcctggacgacctacctcatgctctaagcgccctgtctcatctgcatgcgtgtcagttgagagtagaccctgcctcattccaactcctgggccattgcctactggtcaccctggctcgacattatcccggtgattttagccctgcccttcaggcatctctcgacaagtttctgtcccacgtaatttcagcccttgtgtccgaatacagatag

SEQ ID NO: 155000 - DNA, 429 bp, Artificial Sequence
  derived and/or modified sequence
atggccctgagcgccgaggacagagccctggtgagagccctgtggaagaagctgggcagcaacgtgggcgtgtacaccaccgaggccctggagagaaccttcctggccttccccgccaccaagacctacttcagccacctggacctgagccccggcagcagccaggtgagagcccacggccagaaggtggccgacgccctgagcctggccgtggagagactggacgacctgccccacgccctgagcgccctgagccacctgcacgcctgccagctgagagtggaccccgccagcttccagctgctgggccactgcctgctggtgaccctggccagacactaccccggcgacttcagccccgccctgcaggccagcctggacaagttcctgagccacgtgatcagcgccctggtgagcgagtacagatag

SEQ ID NO: 155001 - protein, 142 aa, Artificial Sequence
  derived and/or modified sequence
MSLTKTERTIIVSMWAKISTQADTIGTETLERLFLSHPQTKTYFPHFDLHPGSAQLRAHGSKVVAAVGDAVKSIDDIGGALSKLSELHAYILRVDPVNFKLLSHCLLVTLAARFPADFTAEAHAAWDKFLSVVSSVLTEKYR

SEQ ID NO: 155002 - DNA, 429 bp, Artificial Sequence
  derived and/or modified sequence
atgagcctcaccaagacggaacgaaccatcatcgtgagcatgtgggcaaaaatttcaacacaggccgacacgatagggacagagacacttgagcggttgtttttatcccacccccagaccaaaacctattttccccactttgacttgcaccccggcagcgcccagttacgagcccacggcagtaaggtagtcgcagcggtcggcgatgccgtcaagagcatcgatgatatcgggggagccctgtccaagctgtcagaactgcacgcctacatccttcgcgtggacccagtcaactttaagctgctctcccactgcctcttggtgactctggccgcaaggttccctgccgacttcacggcagaagcgcatgccgcctgggataagtttctcagcgtcgtgtcctctgtcctgacggagaaatatagatag

SEQ ID NO: 155003 - DNA, 429 bp, Artificial Sequence
  derived and/or modified sequence
atgagcctgaccaagacagagaggaccatcatcgtgtccatgtgggccaagatcagcacccaggccgacaccatcggcacagagaccctggagcggctcttcctgagccacccccagaccaagacctacttcccccactttgacctgcaccctggcagcgcccagctgcgggcccacggcagcaaggtggtggccgctgtgggagatgctgtgaagagcattgatgacattggaggagccctgagcaagctgtctgagctgcacgcctacatcctgcgggtggaccctgtgaacttcaagctgctgagccactgcctgctggtgaccctggccgcccgcttccctgctgacttcaccgctgaggcccacgccgcctgggacaagttcctgtctgtggtgtcctctgtgctgacagagaagtacagatag

SEQ ID NO: 155004 - DNA, 429 bp, Artificial Sequence
  derived and/or modified sequence
atgagcctgaccaagaccgagcggaccatcatcgtgagcatgtgggccaagatcagtacccaggccgacaccattggcaccgaaactttggagaggctgtttctcagtcacccacagaccaaaacatattttccacattttgacctgcacccagggagtgctcagctgcgggcacacgggtcaaaggtggttgccgccgttggagacgctgttaaatctatcgatgacataggcggagcgctcagcaagctctctgaactccatgcttacatccttcgggtggaccctgtgaactttaaattgctctctcactgtctgctagtgacccttgcagctcgcttcccggccgattttaccgcggaggcacatgcagcttgggacaagtttcttagcgtcgtgagtagcgtgctcacagaaaagtaccggtag

SEQ ID NO: 155005 - DNA, 429 bp, Artificial Sequence
  derived and/or modified sequence
atgagcctgactaaaacggaacggacaattattgtctccatgtgggctaagatcagcactcaggcagacaccatcggtaccgagacactggagcgcctatttctgagtcacccccagacaaaaacctacttcccgcacttcgacttacacccaggatctgcccaactgcgtgcgcacgggtccaaagtggtagccgctgtcggggatgctgttaagtcgattgatgatattggcggtgcactgtccaagttgagcgagctacacgcttacattctgcgcgtggaccccgtcaactttaaactgctgagccattgtctactggtaacgctggccgctcgtttccctgccgactttacggcagaagcccatgcggcatgggacaagtttttatccgtcgtttccagcgtcctcaccgaaaaatacaggtag

SEQ ID NO: 155006 - DNA, 429 bp, Artificial Sequence
  derived and/or modified sequence
atgagcctgaccaagaccgagagaaccatcatcgtgagcatgtgggccaagatcagcacccaggccgacaccatcggcaccgagaccctggagagactgttcctgagccacccccagaccaagacctacttcccccacttcgacctgcaccccggcagcgcccagctgagagcccacggcagcaaggtggtggccgccgtgggcgacgccgtgaagagcatcgacgacatcggcggcgccctgagcaagctgagcgagctgcacgcctacatcctgagagtggaccccgtgaacttcaagctgctgagccactgcctgctggtgaccctggccgccagattccccgccgacttcaccgccgaggcccacgccgcctgggacaagttcctgagcgtggtgagcagcgtgctgaccgagaagtacagatag

SEQ ID NO: 155007 - protein, 2035 aa, Artificial Sequence
  derived and/or modified sequence
MASAVSPANLPAVLLQPRWKRVVGWSGPVPRPRHGHRAVAIKELIVVFGGGNEGIVDELHVYNTATNQWFIPAVRGDIPPGCAAYGFVCDGTRLLVFGGMVEYGKYSNDLYELQASRWEWKRLKAKTPKNGPPPCPRLGHSFSLVGNKCYLFGGLANDSEDPKNNIPRYLNDLYILELRPGSGVVAWDIPITYGVLPPPRESHTAVVYTEKDNKKSKLVIYGGMSGCRLGDLWTLDIDTLTWNKPSLSGVAPLPRSLHSATTIGNKMYVFGGWVPLVMDDVKVATHEKEWKCTNTLACLNLDTMAWETILMDTLEDNIPRARAGHCAVAINTRLYIWSGRDGYRKAWNNQVCCKDLWYLETEKPPPPARVQLVRANTNSLEVSWGAVATADSYLLQLQKYDIPATAATATSPTPNPVPSVPANPPKSPAPAAAAPAVQPLTQVGITLLPQAAPAPPTTTTIQVLPTVPGSSISVPTAARTQGVPAVLKVTGPQATTGTPLVTMRPASQAGKAPVTVTSLPAGVRMVVPTQSAQGTVIGSSPQMSGMAALAAAAAATQKIPPSSAPTVLSVPAGTTIVKTMAVTPGTTTLPATVKVASSPVMVSNPATRMLKTAAAQVGTSVSSATNTSTRPIITVHKSGTVTVAQQAQVVTTVVGGVTKTITLVKSPISVPGGSALISNLGKVMSVVQTKPVQTSAVTGQASTGPVTQIIQTKGPLPAGTILKLVTSADGKPTTIITTTQASGAGTKPTILGISSVSPSTTKPGTTTIIKTIPMSAIITQAGATGVTSSPGIKSPITIITTKVMTSGTGAPAKIITAVPKIATGHGQQGVTQVVLKGAPGQPGTILRTVPMGGVRLVTPVTVSAVKPAVTTLVVKGTTGVTTLGTVTGTVSTSLAGAGGHSTSASLATPITTLGTIATLSSQVINPTAITVSAAQTTLTAAGGLTTPTITMQPVSQPTQVTLITAPSGVEAQPVHDLPVSILASPTTEQPTATVTIADSGQGDVQPGTVTLVCSNPPCETHETGTTNTATTTVVANLGGHPQPTQVQFVCDRQEAAASLVTSTVGQQNGSVVRVCSNPPCETHETGTTNTATTATSNMAGQHGCSNPPCETHETGTTNTATTAMSSVGANHQRDARRACAAGTPAVIRISVATGALEAAQGSKSQCQTRQTSATSTTMTVMATGAPCSAGPLLGPSMAREPGGRSPAFVQLAPLSSKVRLSSPSIKDLPAGRHSHAVSTAAMTRSSVGAGEPRMAPVCESLQGGSPSTTVTVTALEALLCPSATVTQVCSNPPCETHETGTTNTATTSNAGSAQRVCSNPPCETHETGTTHTATTATSNGGTGQPEGGQQPPAGRPCETHQTTSTGTTMSVSVGALLPDATSSHRTVESGLEVAAAPSVTPQAGTALLAPFPTQRVCSNPPCETHETGTTHTATTVTSNMSSNQDPPPAASDQGEVESTQGDSVNITSSSAITTTVSSTLTRAVTTVTQSTPVPGPSVPPPEELQVSPGPRQQLPPRQLLQSASTALMGESAEVLSASQTPELPAAVDLSSTGEPSSGQESAGSAVVATVVVQPPPPTQSEVDQLSLPQELMAEAQAGTTTLMVTGLTPEELAVTAAAEAAAQAAATEEAQALAIQAVLQAAQQAVMGTGEPMDTSEAAATVTQAELGHLSAEGQEGQATTIPIVLTQQELAALVQQQQLQEAQAQQQHHHLPTEALAPADSLNDPAIESNCLNELAGTVPSTVALLPSTATESLAPSNTFVAPQPVVVASPAKLQAAATLTEVANGIESLGVKPDLPPPPSKAPMKKENQWFDVGVIKGTNVMVTHYFLPPDDAVPSDDDLGTVPDYNQLKKQELQPGTAYKFRVAGINACGRGPFSEISAFKTCLPGFPGAPCAIKISKSPDGAHLTWEPPSVTSGKIIEYSVYLAIQSSQAGGELKSSTPAQLAFMRVYCGPSPSCLVQSSSLSNAHIDYTTKPAIIFRIAARNEKGYGPATQVRWLQETSKDSSGTKPANKRPMSSPEMKSAPKKSKADGQ

SEQ ID NO: 155008 - DNA, 6108 bp, Artificial Sequence
  derived and/or modified sequence
atggcatccgccgtctccccagccaatcttccagctgtgttactccaaccaaggtggaagcgcgtcgtcggatggtctggacccgtccccagaccacggcatgggcatcgcgctgtggctatcaaagaactaatcgtggtgttcggcggagggaatgaaggaattgtcgacgagttgcacgtgtataataccgctacgaaccagtggttcattccagccgtgcgcggcgatattccacccggctgcgccgcttatggtttcgtctgtgacggaacacgcctactagtcttcggagggatggtggagtacgggaagtactccaacgatttgtacgagcttcaggcatctagatgggagtggaaacggttaaaagctaaaacgccaaaaaatggacctcctccatgccctagactcgggcattcgttctccctggttggcaataagtgctatttattcggaggccttgctaacgatagtgaagaccccaagaataacattcccaggtatctgaacgatctttatattctcgagcttcgcccgggtagcggcgtcgtggcatgggatattcccattacctacggcgttctgcctccaccacgcgagagtcacaccgctgttgtgtacactgagaaggacaataagaagtcaaaactggtcatctatggaggaatgagcggatgcaggctcggagacctctggaccttggatatcgacaccctgacatggaacaagcccagtctgtcaggagtcgcacccctgccacgatctctgcacagcgctacaaccattgggaataagatgtacgtgttcggcggatgggtacctttggtgatggatgacgtcaaagtggcaacccacgagaaggagtggaaatgtacaaacacgctggcctgtctgaatctggatacaatggcctgggaaacgattctgatggacacactagaggacaacatcccccgggcacgcgctggccactgcgcggtggcgataaacacgagactatacatttggagcgggcgcgacggctatcggaaagcctggaacaatcaggtgtgctgtaaagacctgtggtacctagagaccgaaaagccccccccccccgctcgggtccagttggtaagagcaaacacaaattccttggaggtcagttggggggccgtggcgaccgcagactcatacctcttgcagctgcagaagtacgatatccccgctactgccgcgacagctacctcccctactcctaatccagtgccatccgtgccagcgaaccctcccaagtctcctgctccggctgccgccgcaccagctgtgcagcccctgacccaggttggcattaccttgctccctcaagcagcccccgctcctcctaccacgaccactatccaggtcttacccactgtgccgggcagttctatttccgtgcccaccgcggctaggacccagggagtccccgccgtgttaaaggtgaccggaccacaggcaaccaccgggacacccttggtgacaatgcgccctgcatcccaagccggtaaagcacctgtaactgttacgagcttgcctgctggagtgaggatggtcgtgcctacccaaagtgcccaaggcactgtcattggctctagtccacaaatgagcggaatggcagcactagcagctgccgcagctgccacacaaaaaatacctccttcaagcgcacctactgtcctctctgttcccgcagggaccaccatcgtcaagactatggccgttacgccaggaactacaacattgcccgctacggttaaagtagcatctagcccagtcatggtgagtaatccagccaccagaatgctgaaaaccgcagctgctcaggtggggacaagtgtttcatcagccaccaacacctcaacacggccgattatcacagtccacaaatccggcaccgtcacagtggctcagcaagctcaggtcgtgaccacagtggtgggaggtgtgacaaaaacgattacattagtgaaaagccctatttccgtcccaggaggttctgctttgatttccaacctgggcaaggttatgtccgtcgtccagacaaagcctgtccagacatccgctgtaactggtcaagcttctaccggccccgttacacagatcattcagaccaaaggaccacttcccgcaggaaccattctgaaattggttactagtgcagacgggaagccaactactattatcacaacaacacaggcctctggcgcaggaaccaaacccacaattctggggatttcaagcgtctccccttctactactaaaccagggactactaccatcattaagaccatcccaatgtcggctattattacccaggccggagccacgggcgtgaccagtagcccaggaatcaagtctcctatcacaataattaccacaaaggttatgacatctggcacaggtgccccagccaagatcatcaccgccgtgcctaagatcgctacaggacacggccaacagggagtcactcaggtcgtgttaaaaggcgcccctgggcagccaggaacaatcctgaggactgtgcccatgggtggtgtccgcctggtcacccccgtgaccgtgagtgcagtcaaaccggcagtgacaaccctcgtggtaaagggaacgacgggcgtaacaaccctgggaaccgtaacagggacagtgtccacaagcctagctggcgccggaggtcactccacatctgcttcacttgccacacctatcaccacactgggaaccattgctaccctcagttcccaggtcatcaatcccacagcaataaccgtgtccgcggcgcagactacgctcacagcggctggagggttgactacgcccactatcaccatgcagcccgtttcccagccgactcaggtgaccctgatcactgcccccagtggggtggaggcccagccggtacatgaccttcccgttagcattcttgccagccccactactgaacaacccacagcaactgtgacaatcgctgacagcgggcagggggacgttcagccaggcaccgtgacactggtgtgctccaatcctccctgcgagacccatgagacaggaactacaaacacggcgaccaccacagtggtcgccaacttgggaggacatcctcagccaacgcaggtacagtttgtgtgcgatcgacaggaagcagcagcatcattggtgaccagtacggtgggacagcagaacggctcagtggtgcgagtctgctccaatccaccctgtgagactcatgagaccgggaccactaacacagcaacaactgctacgtcgaacatggcaggacagcacgggtgcagcaatcctccctgtgagacccatgagaccggtacgactaatactgcaaccaccgccatgagtagcgtgggagccaaccaccaacgagatgccagaagggcctgcgcagccggcacaccagcggttattaggataagtgttgctactggggcactcgaagccgctcaagggagtaaatcccagtgccagacacgtcagacaagtgctacatcaaccacgatgaccgttatggccacaggcgctccatgcagcgccggccctctgctgggaccctctatggctcgggagccgggaggcagaagcccggcctttgtccaactggctcccctctcctctaaggtgcgcctttctagcccatcaatcaaggatttgcccgccggacgacactcacatgctgttagcaccgcggccatgacacgttcttctgtaggggcgggtgagcctcgcatggcccccgtttgtgaaagtcttcaaggtggctctccttcgacgaccgtgactgttacagcccttgaggcattgctctgtccttctgcaactgtgacccaggtgtgtagcaaccccccatgcgaaacccatgaaacagggacgactaataccgccaccacatccaacgcagggagtgcacagcgggtgtgcagtaaccccccctgtgagacccacgaaacagggactactcataccgcgaccactgccacatccaacggggggaccggccagcccgaggggggacagcagccgcccgccggcagaccctgcgaaacccatcaaactacctccacaggtacaacaatgagcgtctccgtgggagcactcttgcccgacgctacctcgagccaccgaacggtcgaaagcggtctggaggttgctgcggctccctccgtcaccccccaggccggcactgctttactggctcctttccctacgcagcgcgtgtgtagcaatcccccttgcgaaacccacgaaaccggtactacccacacagcaaccacagtgacatctaatatgtcgagtaatcaggacccccctccagcagcttcagaccagggggaggtagaatctactcagggtgacagtgttaacattacctccagttctgccattacaacaactgtttctagcaccctgactagggcggtcaccacagtgacccaatctacaccggtgcctggcccctccgtgccaccaccagaagagctacaggtaagtcctgggcctcggcaacagctgcctcctcgccagttgcttcagagtgccagcactgctctgatgggagagtccgcagaggtcctctccgcttcacagacccctgagttaccggcagctgtcgatctgagttctaccggagagccatcatcggggcaggagagtgctgggagcgccgtcgtggctacggtcgtagttcagccaccacctccgacacagtctgaagtcgatcagctgtcccttcctcaggagctcatggccgaagctcaagcggggaccacaaccctgatggttacgggcctgaccccagaggagctcgctgtcacagcggcagcagaagcggccgcgcaagctgctgcaactgaggaagcccaggctttggccatccaggccgtgctgcaggccgcccaacaggccgtcatgggaacaggcgagcctatggacacctccgaagctgccgctaccgtgacacaggctgagctgggacacctctcagccgagggacaggaaggacaggccactaccatcccaatagtactgacccagcaagaactcgccgcactcgtccagcaacagcaattgcaagaggcccaggcgcagcagcaacaccatcacctccctaccgaggctctcgccccggcagatagcctcaacgatcccgccatcgaaagcaactgcctcaacgaactcgctggaactgtgcccagcaccgttgccctactgccatcaacagccacggagtccttggcgccctctaacacctttgtcgcacctcaacccgtggtcgtggcctcccctgctaaactacaagcagcagctacattgaccgaagtggccaacggcattgagagcttgggagtcaaaccagatctgccaccaccaccatccaaggctcccatgaaaaaggagaaccagtggtttgacgttggggtcattaagggcacaaacgtgatggttactcactacttcttaccccctgatgatgcggtcccttcagacgacgatctaggcactgttccagactacaaccaactgaagaaacaggaactccagccaggcactgcatataaattccgggtggctggcatcaatgcatgtggcaggggtcctttctctgaaatctcagcgttcaaaacttgtctgcccggcttcccaggcgctccctgtgctatcaagatttccaaatcgccagatggtgctcacctcacatgggaacccccatctgtgacaagcggaaaaatcattgagtactctgtgtacctggccattcagtcctcacaggccggcggagaattaaagtcttccaccccagctcaacttgcgtttatgcgagtatactgcgggcctagtccttcatgcctggttcaatcgagtagcttgagcaatgcacatattgactatacaaccaagcccgccatcattttccggattgccgcacggaatgagaaaggctatgggccagcaacacaggtgaggtggctccaggagacttccaaagattcaagcggaacaaaaccagccaataagagacctatgtcaagtccggaaatgaagagcgctcctaaaaaatccaaggccgatggacaatag

SEQ ID NO: 155009 - DNA, 5901 bp, Artificial Sequence
  derived and/or modified sequence
atggccagtgctgtgtccccggctaatttgcctgccgtgctcctgcaacccaggtggaagagagtcgttgggtggtctggcccagtccctaggccacggcacgggcaccgagctgtcgccataaaagagctgatcgtggtttttggaggaggcaatgagggaatagtggatgaactgcatgtgtacaacacagcaaccaaccagtggtttataccagcagtgcgaggcgatatccctcccggctgtgctgcctacgggttcgtatgtgatgggaccaggctgctcgttttcggcggcatggttgagtatgggaaatactccaacgacctgtacgaacttcaagctagcagatgggagtggaagaggctaaaggctaaaacaccaaaaaacgggcctcccccgtgtccccgactaggccattccttctcccttgtcggcaataagtgttatctcttcggtggcctcgccaacgattctgaggacccgaagaataacattcctaggtatctgaatgatctgtacatcctcgaactcaggcctggatccggcgtggtggcctgggatatcccaattacatacggcgttctgcctcctcccagggaaagtcacacagctgtggtgtacacggaaaaagacaataagaagtctaagctggtcatctacggaggcatgagcggctgccgcctgggagacctgtggaccttggatatcgatacccttacttggaataagccgtcccttagcggcgtggcaccgttaccaaggagcctgcattcagccaccacaatcgggaataagatgtacgtttttggcggatgggtacccctggttatggatgacgtcaaagtggctacacacgaaaaagaatggaaatgcacaaataccttggcttgtcttaatttggacaccatggcatgggagaccatcctcatggacaccttggaagataacattccaagagcccgagccgggcattgtgcagtggcaatcaacaccagactgtatatttggtcaggtcgagacgggtataggaaggcgtggaataaccaagtatgttgtaaggatttatggtacctagagactgaaaaacctcccccacctgcacgggtccagcttgtgcgtgcgaataccaactctcttgaggcggcccctgcacctccaacgaccactacaattcaagtattgccgactgttccgggctcgtcaatctccgtgccaaccgccgccaggacccagggcgtgcccgcagtcctcaaggtgaccggccctcaggccacaactgggacaccattggtgacgatgcggcccgctagccaagctggaaaagctcccgtcacagtcaccagcttgcccgcaggcgtccgtatggttgtgccaacacagtccgctcagggtacagtaataggaagttctccccaaatgagcggtatggccgccctcgctgcggccgcagcagccacacagaagatccctccctccagtgcccctactgtgctcagcgtccccgctggaaccaccatcgtgaaaaccatggctgttacccctggcacaactacgttgcctgccacagtaaaggtcgctagttcaccggttatggtgagcaacccagccacaaggatgctgaagaccgctgccgctcaagtgggaacaagcgtctcaagtgccacaaataccagtacccgccccattattaccgtgcacaagtccggaaccgtgaccgtggcccagcaagctcaagtcgtgacaaccgtggtcggcggcgtcaccaaaaccatcacgctggtgaaatcccctatcagcgttccaggaggttctgcactcatctctaacctggggaaagtaatgtcagtggtgcagactaaaccagtgcagacctctgctgtgaccggccaggccagcacagggcccgtcacacaaatcatacagaccaaaggcccattgcccgccggcacaatcctgaagttagtgacttccgctgatggcaagcctacaactatcattactacaacgcaagcctcgggtgctggcacaaagcctacgattctcggcatttctagcgtgtcaccctcaacaactaagcccggaaccaccactattattaaaactatcccaatgagcgccattattacccaggcaggagcaacaggcgtaaccagctcccccggcattaagtctcccatcaccatcattaccacgaaagttatgacctccggaacaggcgcccccgcgaaaattattaccgctgtacccaagatagcaacaggtcacggacagcaaggagtgacccaggtcgtgctgaaaggagctcccggacagcctgggactatacttagaacggtgcctatggggggagttcgccttgtaactcctgtcacggtcagcgcagttaaaccagccgtgacaaccctggtggtgaaagggaccacaggtgttacgaccctgggaaccgtcaccgggactgtctcaacctccttggcgggcgcaggggggcactccacatcagcttctcttgcgactcctattaccactctaggtactattgccactctgagttcgcaggtgattaacccaactgccatcacagtatcagccgcacagaccaccttgacagctgccgggggtctaaccacccccaccatcaccatgcaaccagtttctcagcctactcaagttacattaatcacagccccttcaggagtggaggcccaaccagttcacgacctccctgtgtcaatcctggcttctcctactaccgaacaacccaccgcaactgtgactattgctgattctggccagggcgatgtccagccaggcacagtgactctggtttgttcgaaccccccgtgcgaaacacacgagaccggcaccacaaatacagctactacgactgttgtggcaaaccttgggggacaccctcagcccactcaggtgcaatttgtttgtgatcgccaggaggcggccgcatcattagtgacctctaccgtaggccagcagaacgggagtgtggtgcgggtgtgcagtaatcctccctgcgaaacccacgagaccggcacaacaaataccgcaaccaccgccaccagcaacatggcaggccagcatgggtgctcaaacccaccctgcgaaacacacgagactggtactaccaatacagcgactacagcaatgagctccgtcggtgccaatcatcagcgggatgctcgaagggcttgcgccgccggaactcctgccgtgattcgaataagtgtggcaacaggtgctctggaggccgcacaaggctctaaatctcagtgccagacgcggcagactagtgcaacaagcacaactatgacagtgatggccactggtgccccgtgctctgcaggaccgctgctgggaccaagcatggctcgggaacctggtggtcgctcacccgcgttcgtgcagctcgcgccactgtcttctaaagtgcgtttatctagcccttctataaaggatctcccagcgggcaggcactcacatgctgtcagcactgccgccatgacaagatcatctgtgggcgcaggagagcctcggatggcccctgtctgcgagtcgctccagggaggtagcccttcaaccactgtgaccgtcactgcattagaagctctcctgtgcccatctgccaccgtgacacaagtctgtagcaatcctccctgtgaaacccacgaaactggtactactaacactgccactactagtaacgctgggtcagctcagagagtatgttctaaccccccatgcgagactcatgagacaggcactacacatacagccactactgccaccagcaacgggggcacaggacagcccgaaggaggccagcaaccccctgcaggccggccgtgtgagactcaccagaccacatcaaccggaacaacgatgagcgtgtctgtaggggctcttctgcccgatgctacttcctctcatcgtacagtggagagcggcctggaagtcgctgcggcgcccagcgttacacctcaggccgggacagccctactggcgcctttccctactcagagggtatgttcaaaccctccatgcgagactcatgagacaggtacgactcatacagccactacggtgaccagcaatatgagctccaatcaggatccccctcccgcagcatcagaccagggggaggtggagtcgactcaaggagattctgtcaatatcacatctagctccgcgattaccacaacagtgtctagtactctgacacgcgcggttactactgtgactcagtccacacccgtgcccggaccctccgtaccaccacccgaggagctgcaggtctcaccagggcccaggcagcagcttcctcctaggcagctactgcagtctgcttccacagccctgatgggtgagtcagccgaggtgctgtctgcatcccagaccccagagttacctgcagccgtagatctgtcatccaccggcgaaccttcatccggccaagaaagcgctggctccgccgtagttgccacagtggtggttcagccccccccgcctacgcagagcgaggtcgaccaactctctctcccgcaagaactaatggccgaagcccaggccggaacaaccaccctgatggtgaccggtctgacgcccgaagaactggcagtgaccgcagctgcggaggccgctgcccaggctgccgccacagaggaagcccaggccctcgcaatccaagccgtactgcaagccgcccagcaagcagtgatgggcaccggtgaaccaatggacacatctgaagctgcagccaccgtgacccaagccgagctgggtcatctcagtgctgagggacaggaggggcaagctacaactattcctattgtcttaacccaacaagaactggccgccttggtccagcaacaacaattgcaggaggcccaggcacaacagcaacaccaccatctgccaactgaagcactggctcctgcggatagtctcaatgatcccgccatcgagagcaattgtctgaacgagttggccggaacagttccttccaccgtggctctactgcctagcactgccactgaatcccttgctccttctaacaccttcgtagcgccccaaccagttgtggtggcatctccagctaagctgcaagcagcagccacccttacagaagttgccaacggcatcgagtctctgggagttaaaccagatctgccaccgccgcccagcaaagcccccatgaagaaggagaatcagtggttcgatgttggggttatcaaaggcaccaatgtcatggtcacccactactttttgccacctgatgatgccgtgccgtctgacgatgatttaggaactgtgcccgactacaaccagctaaagaaacaagaattacagccgggtactgcttataaatttcgtgtggccggcatcaacgcatgcgggagggggccatttagcgaaatctccgcgttcaaaacttgcctcccagggttcccgggggcaccatgtgctattaagattagcaagagcccagacggagcgcatcttacctgggagcccccctccgtaacatcagggaagataattgagtactctgtttatttggccattcagtctagccaggccgggggagagctaaaatcctctacgcccgcacagctggcctttatgcgtgtgtactgtggaccctcaccaagttgtctggtgcaatcatcctccctctcgaacgcccatattgactacactaccaagcctgcaatcatctttcgcatcgctgcccgtaacgaaaaaggatatgggccagccacccaggtccggtggttgcaagagacttctaaagattcttccggaactaagccagcaaacaagagacctatgagtagcccggagatgaagtctgctcctaaaaagtctaaagccgatggtcagtag

SEQ ID NO: 155010 - DNA, 8869 bp, Artificial Sequence
  derived and/or modified sequence
cggctcccagggaggaggcatgagcgccctgccgttaccgcttcttctgccgtacagttgccgcttcggggcctaactctagctctttgaagcggctcctgtgggaaggagtcataaggcgggaagtgaggatcggacaccgccttgagtttggtgtgcagtggaagaactgacctaggaggaagagaataggggggaacggggagctagtctcaagatggcggctcccacggcggcaggcgcagcctgagcagcagaggcggactaaggggagaggcgcgagacttcacaagccgtacggcgcgagcccccaaacggccctcgagagctcgagctggttccaccggcctccggcccgcctccattcgttaggtgtgtcgaggctgtttcgggagcggcggctgcactaaggcgctgggcggggaagcgggacggtctcaagatggcggctcccacaattgtggtctgagcgccggcggggctgcgacgaccgcggcgcttgtggctcctttccacccgccccggaagccggccagtgctggggacttgggggtgtgggaaccgggccggggctccgccatttccggcgggggagggctacgactgaggaagggaggagagagaggcggctcaagatggcggctcccagggcctcccgcccgagcttgtaagcgggagcgcccggacaagtagtcggggcgacgggactcagcggcctccagcttcttgagcctaggcgctcgacagtttcgggcggctcttgcggagacggggtgagcgagaagaaagggaagagccaaagggaaggagggcagttaagatggcggcctccatggagtcgtctaccgctgtgtgagaaaccgcttctccgtgagagctgccttagacgaaagggggtgtgtgaaaggaattgaggggctcccttcccgcttgttgacttctccccaccgcaccctttcccggaactatggcttcggccgtgtcgcccgccaacttgccagcggtgcttctgcagccccgctggaagcgagtggtgggctggtcgggtccggtgccacggccccgccacggccaccgcgccgtggccatcaaggagctcatcgtggtgtttggcggcggcaacgagggaatagtggacgaactgcacgtgtacaacacggcaaccaaccagtggttcatcccagccgtgaggggggacattccccctgggtgtgcagcctatggcttcgtgtgtgacgggactcgcctcctggtgtttggtgggatggtggagtatgggaaatacagcaatgacctctacgaactccaggcgagccggtgggagtggaagagactcaaagcaaagacgcccaaaaacgggccccctccgtgtcctcgactcgggcacagcttctcccttgtgggcaacaaatgctacctgtttgggggtctggccaatgatagcgaggacccaaagaacaacattccaaggtacctgaatgacttatatatcctggaattacggccaggctctggagtggtagcctgggacattcccatcacttacggggtcctaccaccaccccgggagtcacatactgccgtggtctacaccgaaaaagacaataagaagtccaagctggtgatctacggcgggatgagtggctgcaggctgggggacctgtggaccctagatattgacaccctgacgtggaataagcccagtctcagcggggtggcgcctcttcctcgcagtctccactcggcaaccaccatcggaaataaaatgtacgtgtttggtggctgggtgcctctcgtcatggatgacgtcaaagtggccacacacgagaaggagtggaagtgtaccaacacgctggcttgtctcaacctggataccatggcctgggagaccatcctgatggatacactggaggacaacatcccccgtgctcgggctggccactgcgcagtcgccatcaacacccgcctgtacatttggagtgggcgtgacggctaccgcaaggcctggaacaaccaggtctgctgcaaggacctctggtacctagagacagaaaagccaccacccccagcccgagtacaactggtacgcgccaacaccaactccctggaggtgagctggggggcagtggcaacagccgacagctaccttctccagctccagaaatatgacattcctgccacggctgctactgccacctcccctacacccaatccggtcccatctgtgcctgccaaccctcccaagagccctgccccagcagcagccgcacctgctgtgcagccgctgacccaagtaggcatcacgctcctgccccaggctgcccccgcacccccgaccaccaccaccatccaggtcttgccaacggtgcctggcagctccatttctgtgcccaccgcagccaggactcaaggtgtccctgctgttctcaaagtgaccggtcctcaggctacaacaggaactccattggtcaccatgcgacctgccagccaggctgggaaagcccctgtcaccgtgacctcccttcccgccggagtgcggatggttgtgccaacacagagtgcccagggaacggtgattggcagtagcccacagatgagtgggatggccgcactggccgctgcggccgctgccacccagaagatccccccttcctcggcacccacggtgctgagtgtcccagcgggtaccaccatcgtgaagaccatggctgtgacacctggcactaccaccctcccagccactgtgaaggtggcctcctcgccagtcatggtgagcaaccctgccactcgcatgctgaagactgcagccgcccaggtggggacatcggtttcctccgccaccaacacgtctacccgccctatcatcacagtgcacaagtcaggcactgtgacagtggcccagcaagcccaggtggtgaccacagttgtgggcggggtcaccaagaccatcaccctggtgaagagccccatctctgtcccaggaggcagtgctctgatttccaatctgggcaaagtgatgtcggtggtccagaccaaaccagttcagacttcagcagtcacaggccaggcgtccacgggtcctgtgactcagatcatccagaccaaagggcccctgccagcgggaacaatcctgaagctggtgacctcagcagatggcaagcccaccaccatcatcactaccacgcaggccagtggggcggggaccaagcccaccatcctgggcatcagcagcgtctcccccagtaccaccaagcccggcacgaccaccatcatcaaaaccatccccatgtcggccatcatcacccaggcgggcgccacgggtgtgaccagcagtcctggcatcaagtcccccatcaccatcatcaccaccaaggtgatgacttcaggaactggagcacctgcgaaaatcatcactgctgtccccaaaattgccactggccacgggcagcagggagtgacccaggtggtgcttaagggggccccgggacagccaggcaccatcctccgcactgtgcccatggggggtgttcgcctggtcacacccgtcaccgtctccgccgtcaagccagccgtcaccacgttggttgtgaaaggcaccacaggtgtcacgaccctaggcacagtgacaggcaccgtctccaccagccttgccggggcggggggccacagcactagtgcttccctggccacgcccatcaccaccttgggcaccattgccaccctctcaagccaggtgatcaaccccactgccatcactgtgtcggccgcacagaccacgctgacagcggcaggcgggctcacaaccccaaccatcaccatgcagcccgtgtcccagcccacccaggtaactctgatcacggcacctagtggggtggaggcccagcctgtgcatgacctccctgtgtccattctggcctccccgactacagaacagcccaccgccacagttaccatcgccgactcaggccagggtgatgtgcagcctggcactgtcaccttggtgtgctccaacccaccctgtgagacccacgagactggcaccaccaacacggccaccactactgttgtggctaaccttgggggacacccccagcccacccaagtgcagttcgtctgtgacagacaggaggcagctgcttctcttgtgacctcgactgtgggccagcagaatggtagcgtggtccgagtctgttcgaacccgccctgcgagacccacgagacgggcaccaccaacaccgccaccaccgccacctccaacatggccgggcagcatggctgctcaaacccaccctgcgagacccacgagacgggcaccaccaacactgccactacagccatgtcgagcgtcggcgccaaccaccagcgagatgcccgtcgggcctgtgcagctggcacccctgccgtgatccggatcagtgtggccactggggcgctggaggcagcccagggctctaagtcccagtgccaaacccgccagaccagcgcgaccagcaccaccatgactgtgatggccaccggggccccgtgctcggccggcccactccttgggccgagcatggcacgggagcccgggggccgcagccctgcttttgtgcagttggcccctctgagcagcaaagtcaggctgagcagcccaagcattaaggaccttcctgcggggcgccacagccatgcggtcagcaccgctgccatgacccgttccagcgtgggtgctggggagccccgcatggcacctgtgtgcgagagcctccagggtggctcgcccagcaccacagtgactgtgacagccctggaggcactgctgtgcccctcggccaccgtgacccaagtctgctccaacccaccatgtgagacccacgagacaggcaccaccaacaccgccactacctcgaatgcaggcagcgcccagagggtgtgctccaacccgccatgcgagacccacgagacgggcaccacccacacggccaccaccgctacttcaaacgggggcacgggccagcccgagggtgggcagcagccccctgctggtcgcccctgtgagacacaccagaccacttccactggcaccaccatgtcggtcagcgtgggtgccctgcttcccgacgccacttcttcccacaggaccgtggagtctggcctagaggtggcggcggcacccagcgtcaccccccaggctggcaccgcgctgctggctcctttcccaacacagagggtgtgctccaaccccccctgtgagacccacgagacgggcaccactcacacggccaccactgtcacttccaacatgagttcaaaccaagaccccccacctgctgccagcgatcagggagaggtggagagcacccagggcgacagcgtgaacatcaccagctccagtgccatcacgacaaccgtgtcctccacactgacgcgggctgtgaccaccgtgacgcagtccacaccggtcccgggcccctctgtgccgcccccagaggaactccaggtgtcgccaggtcctcgccagcagctgccgccacggcagcttctgcagtcggcttccacagccctgatgggggagtccgccgaggtcctgtcagcctcccagacccctgagctcccggccgccgtggatctgagcagcacaggggagccatcttcgggccaggagtctgccggctctgcggtggtggccactgtggtggtccagccacccccacccacacagtccgaagtagaccagttatcacttccccaagagctaatggccgaggcccaagctggcaccaccaccctcatggtaacggggctcacccccgaggagctggcagtgacggctgctgcagaagcagctgcccaggccgcagccacggaggaagcccaggccctggccatccaggcggtgctccaggccgcgcagcaggccgtcatgggcaccggcgagcccatggacacctccgaggcagcagcaaccgtgactcaggcggagctggggcacctgtcggccgagggtcaggagggccaggccaccaccatacccattgtgctgacacagcaggagctggctgccctggtgcagcagcagcagctgcaggaggcccaggcccagcagcagcatcaccacctccccactgaggccctggcccctgccgacagtctcaacgacccagccattgagagcaattgcctcaatgagctggccggcacggtccccagcactgtggcgctgctgccctcaacggccactgagagcctggctccatccaacacatttgtggccccccagccggttgtggtggccagcccagccaagctgcaggctgcagctaccctgaccgaagtggccaatggcatcgagtccctgggtgtgaagccagacctgccgcccccacccagcaaagcccccatgaagaaggaaaaccagtggtttgatgtgggagtcattaagggcaccaatgtaatggtgacacactatttcctgccaccagatgatgctgtcccatcagacgatgatttgggcaccgtccctgactataaccagctgaagaagcaggagctgcagccaggcacagcctataagtttcgtgttgccggaatcaatgcctgtggccgggggcccttcagcgaaatctcagcctttaagacgtgcctgcctggtttcccaggggccccttgtgccattaaaatcagcaaaagtccggatggtgctcacctcacctgggagccaccctctgtgacctccggcaagattatcgagtactccgtgtacctggccatccagagctcacaggctgggggcgagctcaagagctccaccccggcccagctggccttcatgcgggtgtactgcgggcccagcccctcctgcctggtgcagtcctccagcctttccaacgcccacatcgactacaccaccaagcccgccatcatcttccgcatcgccgcccgcaatgagaagggctatggcccggccacacaagtgaggtggctgcaggaaaccagtaaagacagctctggcaccaagccagccaacaagcggcccatgtcctctccagaaatgaaatctgctccaaagaaatctaaggccgatggtcagtgagaggaagctgactagcccctggattcttctccagacccccctgcttcaggaacacccgccagggcccacccctcccaccccgtcccagcattcgcacttcaccctcgcgagccgctgttcactcctctcccctttctctttctctctgtttttaaaataatctaaagaaagcacattttaccattgctgttgggaggaagcagaggcagatgggaaagcagagagaggagcgcgcttcctttcctccccgctgccgcccaccctggggagagacttttgcggggagggaaggcggagctgaggacagccagctccgccctcccaaggctgtgcgttcctgagggccaggtcgggggcaggcatggaggggaggaaaggcgtccctcttggccctccccagagtggctttcctggcaccctggcctgggtgtctggttctgttttcttttcttccccttgtgtttccagtcacctaacttcccttcctcaggctcccccggcccaccctgctcagtgaccccacaggaagcttacacattttctcagaggcctttgtgctcccacctcttctaccctccccctcttctttcccattttaaaaaagaaaagaaggaaaaagaaaaaaggggcaaggagccccgcggcggcctgggcagcgcctgtgcagacctccctgcaggccgcactgccaactgctgcatttgttgtgttttttaggttgcaattggtgaagttcacactttcattgtaattttagcgtgtggggttttgtcccttttttgttgttgttagctgtgtacagaatgtgtaatcttttttcttttctcttttttttgttttgttttgttttgtttttgtttttttacttttttcttcttggctaattcttggcagggatctttctggaggaaaagctggggccagccagggcaggagaggtgtgaaatctgccacgaggggcctgctgtttgccacccagcccaacttcctgttgctggcccctgccctctgcccttttgcctgtcctcaggccgctggaacaaaggaaggacagctcattcctcatgggcgatcactccgcatctatagggtcgagcctaggggagcttgagggagggctggggcctccttgtcctggatttccagctctccccatgccccctccctgagcaccaccggcaccgcctcccaaacagggctgctggtttccgcagccactgctccacctcccccaaatcgtcatggaaagggtggagaatggaggggaaccaggcgtccttggaggcagcttgggagggtgactgtgtagtgtcacccacaagggaggctagggcaatggagcaggccaccagcagcagctgtgcagcatggaactcaggccaggctccgaggctgggggatctgcttggagttttctgccccccaccccaaacttctgtcgaggagcaaggcttgccagcaagtcagaaggatttgaaccgagcagccaatctttccagccctcccctaccgacctctgcctggagacgcagcagcctgtgtcctccagggcctctggtttgttgtattatagtatatttcgctgtggaaaatgtcacgtttagtcaccttggagcccactcacctggtcctgttgttttaccccatcccttctctcgcgcgcctattgatttgtttctgaggagagtacaccgttcactattgtagagtaacccctgtgactcaatattaccatagtgcgatgtcgttttgtgctattttgaacaattaaaagactttttttgaaataaccac

SEQ ID NO: 155011 - DNA, 8213 bp, Artificial Sequence
  derived and/or modified sequence
aagatggcggctcccacaattgtggtctgagcgccggcggggctgcgacgaccgcggcgcttgtggctcctttccacccgccccggaagccggccagtgctggggacttgggggtgtgggaaccgggccggggctccgccatttccggcgggggagggctacgactgaggaagggaggagagagaggcggctcaagatggcggctcccagggcctcccgcccgagcttgtaagcgggagcgcccggacaagtagtcggggcgacgggactcagcggcctccagcttcttgagcctaggcgctcgacagtttcgggcggctcttgcggagacggggtgagcgagaagaaagggaagagccaaagggaaggagggcagttaagatggcggcctccatggagtcgtctaccgctgtgtgagaaaccgcttctccgtgagagctgccttagacgaaagggggtgtgtgaaaggaattgaggggctcccttcccgcttgttgacttctccccaccgcaccctttcccggaactatggcttcggccgtgtcgcccgccaacttgccagcggtgcttctgcagccccgctggaagcgagtggtgggctggtcgggtccggtgccacggccccgccacggccaccgcgccgtggccatcaaggagctcatcgtggtgtttggcggcggcaacgagggaatagtggacgaactgcacgtgtacaacacggcaaccaaccagtggttcatcccagccgtgaggggggacattccccctgggtgtgcagcctatggcttcgtgtgtgacgggactcgcctcctggtgtttggtgggatggtggagtatgggaaatacagcaatgacctctacgaactccaggcgagccggtgggagtggaagagactcaaagcaaagacgcccaaaaacgggccccctccgtgtcctcgactcgggcacagcttctcccttgtgggcaacaaatgctacctgtttgggggtctggccaatgatagcgaggacccaaagaacaacattccaaggtacctgaatgacttatatatcctggaattacggccaggctctggagtggtagcctgggacattcccatcacttacggggtcctaccaccaccccgggagtcacatactgccgtggtctacaccgaaaaagacaataagaagtccaagctggtgatctacggcgggatgagtggctgcaggctgggggacctgtggaccctagatattgacaccctgacgtggaataagcccagtctcagcggggtggcgcctcttcctcgcagtctccactcggcaaccaccatcggaaataaaatgtacgtgtttggtggctgggtgcctctcgtcatggatgacgtcaaagtggccacacacgagaaggagtggaagtgtaccaacacgctggcttgtctcaacctggataccatggcctgggagaccatcctgatggatacactggaggacaacatcccccgtgctcgggctggccactgcgcagtcgccatcaacacccgcctgtacatttggagtgggcgtgacggctaccgcaaggcctggaacaaccaggtctgctgcaaggacctctggtacctagagacagaaaagccaccacccccagcccgagtacaactggtacgcgccaacaccaactccctggaggctgcccccgcacccccgaccaccaccaccatccaggtcttgccaacggtgcctggcagctccatttctgtgcccaccgcagccaggactcaaggtgtccctgctgttctcaaagtgaccggtcctcaggctacaacaggaactccattggtcaccatgcgacctgccagccaggctgggaaagcccctgtcaccgtgacctcccttcccgccggagtgcggatggttgtgccaacacagagtgcccagggaacggtgattggcagtagcccacagatgagtgggatggccgcactggccgctgcggccgctgccacccagaagatccccccttcctcggcacccacggtgctgagtgtcccagcgggtaccaccatcgtgaagaccatggctgtgacacctggcactaccaccctcccagccactgtgaaggtggcctcctcgccagtcatggtgagcaaccctgccactcgcatgctgaagactgcagccgcccaggtggggacatcggtttcctccgccaccaacacgtctacccgccctatcatcacagtgcacaagtcaggcactgtgacagtggcccagcaagcccaggtggtgaccacagttgtgggcggggtcaccaagaccatcaccctggtgaagagccccatctctgtcccaggaggcagtgctctgatttccaatctgggcaaagtgatgtcggtggtccagaccaaaccagttcagacttcagcagtcacaggccaggcgtccacgggtcctgtgactcagatcatccagaccaaagggcccctgccagcgggaacaatcctgaagctggtgacctcagcagatggcaagcccaccaccatcatcactaccacgcaggccagtggggcggggaccaagcccaccatcctgggcatcagcagcgtctcccccagtaccaccaagcccggcacgaccaccatcatcaaaaccatccccatgtcggccatcatcacccaggcgggcgccacgggtgtgaccagcagtcctggcatcaagtcccccatcaccatcatcaccaccaaggtgatgacttcaggaactggagcacctgcgaaaatcatcactgctgtccccaaaattgccactggccacgggcagcagggagtgacccaggtggtgcttaagggggccccgggacagccaggcaccatcctccgcactgtgcccatggggggtgttcgcctggtcacacccgtcaccgtctccgccgtcaagccagccgtcaccacgttggttgtgaaaggcaccacaggtgtcacgaccctaggcacagtgacaggcaccgtctccaccagccttgccggggcggggggccacagcactagtgcttccctggccacgcccatcaccaccttgggcaccattgccaccctctcaagccaggtgatcaaccccactgccatcactgtgtcggccgcacagaccacgctgacagcggcaggcgggctcacaaccccaaccatcaccatgcagcccgtgtcccagcccacccaggtaactctgatcacggcacctagtggggtggaggcccagcctgtgcatgacctccctgtgtccattctggcctccccgactacagaacagcccaccgccacagttaccatcgccgactcaggccagggtgatgtgcagcctggcactgtcaccttggtgtgctccaacccaccctgtgagacccacgagactggcaccaccaacacggccaccactactgttgtggctaaccttgggggacacccccagcccacccaagtgcagttcgtctgtgacagacaggaggcagctgcttctcttgtgacctcgactgtgggccagcagaatggtagcgtggtccgagtctgttcgaacccgccctgcgagacccacgagacgggcaccaccaacaccgccaccaccgccacctccaacatggccgggcagcatggctgctcaaacccaccctgcgagacccacgagacgggcaccaccaacactgccactacagccatgtcgagcgtcggcgccaaccaccagcgagatgcccgtcgggcctgtgcagctggcacccctgccgtgatccggatcagtgtggccactggggcgctggaggcagcccagggctctaagtcccagtgccaaacccgccagaccagcgcgaccagcaccaccatgactgtgatggccaccggggccccgtgctcggccggcccactccttgggccgagcatggcacgggagcccgggggccgcagccctgcttttgtgcagttggcccctctgagcagcaaagtcaggctgagcagcccaagcattaaggaccttcctgcggggcgccacagccatgcggtcagcaccgctgccatgacccgttccagcgtgggtgctggggagccccgcatggcacctgtgtgcgagagcctccagggtggctcgcccagcaccacagtgactgtgacagccctggaggcactgctgtgcccctcggccaccgtgacccaagtctgctccaacccaccatgtgagacccacgagacaggcaccaccaacaccgccactacctcgaatgcaggcagcgcccagagggtgtgctccaacccgccatgcgagacccacgagacgggcaccacccacacggccaccaccgctacttcaaacgggggcacgggccagcccgagggtgggcagcagccccctgctggtcgcccctgtgagacacaccagaccacttccactggcaccaccatgtcggtcagcgtgggtgccctgcttcccgacgccacttcttcccacaggaccgtggagtctggcctagaggtggcggcggcacccagcgtcaccccccaggctggcaccgcgctgctggctcctttcccaacacagagggtgtgctccaaccccccctgtgagacccacgagacgggcaccactcacacggccaccactgtcacttccaacatgagttcaaaccaagaccccccacctgctgccagcgatcagggagaggtggagagcacccagggcgacagcgtgaacatcaccagctccagtgccatcacgacaaccgtgtcctccacactgacgcgggctgtgaccaccgtgacgcagtccacaccggtcccgggcccctctgtgccgcccccagaggaactccaggtgtcgccaggtcctcgccagcagctgccgccacggcagcttctgcagtcggcttccacagccctgatgggggagtccgccgaggtcctgtcagcctcccagacccctgagctcccggccgccgtggatctgagcagcacaggggagccatcttcgggccaggagtctgccggctctgcggtggtggccactgtggtggtccagccacccccacccacacagtccgaagtagaccagttatcacttccccaagagctaatggccgaggcccaagctggcaccaccaccctcatggtaacggggctcacccccgaggagctggcagtgacggctgctgcagaagcagctgcccaggccgcagccacggaggaagcccaggccctggccatccaggcggtgctccaggccgcgcagcaggccgtcatgggcaccggcgagcccatggacacctccgaggcagcagcaaccgtgactcaggcggagctggggcacctgtcggccgagggtcaggagggccaggccaccaccatacccattgtgctgacacagcaggagctggctgccctggtgcagcagcagcagctgcaggaggcccaggcccagcagcagcatcaccacctccccactgaggccctggcccctgccgacagtctcaacgacccagccattgagagcaattgcctcaatgagctggccggcacggtccccagcactgtggcgctgctgccctcaacggccactgagagcctggctccatccaacacatttgtggccccccagccggttgtggtggccagcccagccaagctgcaggctgcagctaccctgaccgaagtggccaatggcatcgagtccctgggtgtgaagccagacctgccgcccccacccagcaaagcccccatgaagaaggaaaaccagtggtttgatgtgggagtcattaagggcaccaatgtaatggtgacacactatttcctgccaccagatgatgctgtcccatcagacgatgatttgggcaccgtccctgactataaccagctgaagaagcaggagctgcagccaggcacagcctataagtttcgtgttgccggaatcaatgcctgtggccgggggcccttcagcgaaatctcagcctttaagacgtgcctgcctggtttcccaggggccccttgtgccattaaaatcagcaaaagtccggatggtgctcacctcacctgggagccaccctctgtgacctccggcaagattatcgagtactccgtgtacctggccatccagagctcacaggctgggggcgagctcaagagctccaccccggcccagctggccttcatgcgggtgtactgcgggcccagcccctcctgcctggtgcagtcctccagcctttccaacgcccacatcgactacaccaccaagcccgccatcatcttccgcatcgccgcccgcaatgagaagggctatggcccggccacacaagtgaggtggctgcaggaaaccagtaaagacagctctggcaccaagccagccaacaagcggcccatgtcctctccagaaatgaaatctgctccaaagaaatctaaggccgatggtcagtgagaggaagctgactagcccctggattcttctccagacccccctgcttcaggaacacccgccagggcccacccctcccaccccgtcccagcattcgcacttcaccctcgcgagccgctgttcactcctctcccctttctctttctctctgtttttaaaataatctaaagaaagcacattttaccattgctgttgggaggaagcagaggcagatgggaaagcagagagaggagcgcgcttcctttcctccccgctgccgcccaccctggggagagacttttgcggggagggaaggcggagctgaggacagccagctccgccctcccaaggctgtgcgttcctgagggccaggtcgggggcaggcatggaggggaggaaaggcgtccctcttggccctccccagagtggctttcctggcaccctggcctgggtgtctggttctgttttcttttcttccccttgtgtttccagtcacctaacttcccttcctcaggctcccccggcccaccctgctcagtgaccccacaggaagcttacacattttctcagaggcctttgtgctcccacctcttctaccctccccctcttctttcccattttaaaaaagaaaagaaggaaaaagaaaaaaggggcaaggagccccgcggcggcctgggcagcgcctgtgcagacctccctgcaggccgcactgccaactgctgcatttgttgtgttttttaggttgcaattggtgaagttcacactttcattgtaattttagcgtgtggggttttgtcccttttttgttgttgttagctgtgtacagaatgtgtaatcttttttcttttctcttttttttgttttgttttgttttgtttttgtttttttacttttttcttcttggctaattcttggcagggatctttctggaggaaaagctggggccagccagggcaggagaggtgtgaaatctgccacgaggggcctgctgtttgccacccagcccaacttcctgttgctggcccctgccctctgcccttttgcctgtcctcaggccgctggaacaaaggaaggacagctcattcctcatgggcgatcactccgcatctatagggtcgagcctaggggagcttgagggagggctggggcctccttgtcctggatttccagctctccccatgccccctccctgagcaccaccggcaccgcctcccaaacagggctgctggtttccgcagccactgctccacctcccccaaatcgtcatggaaagggtggagaatggaggggaaccaggcgtccttggaggcagcttgggagggtgactgtgtagtgtcacccacaagggaggctagggcaatggagcaggccaccagcagcagctgtgcagcatggaactcaggccaggctccgaggctgggggatctgcttggagttttctgccccccaccccaaacttctgtcgaggagcaaggcttgccagcaagtcagaaggatttgaaccgagcagccaatctttccagccctcccctaccgacctctgcctggagacgcagcagcctgtgtcctccagggcctctggtttgttgtattatagtatatttcgctgtggaaaatgtcacgtttagtcaccttggagcccactcacctggtcctgttgttttaccccatcccttctctcgcgcgcctattgatttgtttctgaggagagtacaccgttcactattgtagagtaacccctgtgactcaatattaccatagtgcgatgtcgttttgtgctattttgaacaattaaaagactttttttg

SEQ ID NO: 155012 - DNA, 6108 bp, Artificial Sequence
  derived and/or modified sequence
atggccagcgctgtgtccccagccaacctgcctgctgtgctgctgcagccccgctggaagagggtggtgggctggagcggccctgtgccccggcccaggcatggccacagagctgtggccatcaaggagctgattgtggtgtttggaggcggcaatgaaggaattgtggatgagctgcacgtgtacaacacagccaccaaccagtggttcatcccagctgtgcggggggacatccccccaggctgtgccgcctacggctttgtgtgtgatggcacccggctgctggtgtttggaggcatggtggagtatggcaagtacagcaatgacctgtatgagctgcaggccagccgctgggagtggaagaggctgaaggccaagacccccaagaatggccccccaccctgcccccggctgggccacagcttcagcctggtgggcaacaagtgctacctgtttggaggcctggccaatgattctgaggaccccaagaacaacatcccccgctacctgaatgacctgtacatcctggagctgcggcccggcagcggcgtggtggcctgggacatccccatcacctatggagtgctgcccccaccccgggagagccacacagctgtggtgtacacagagaaggacaacaagaagagcaagctggtgatctatggaggcatgagcggctgccgcctgggggacctgtggaccctggacatcgacaccctgacctggaacaagcccagcctgagcggcgtggcccccctgcccaggagcctgcacagcgccaccaccatcggcaacaagatgtatgtgtttggaggctgggtgcccctggtgatggatgatgtgaaggtggccacccatgagaaggagtggaagtgcaccaacaccctggcctgcctgaacctggacaccatggcctgggagaccatcctgatggacaccctggaggacaacatcccccgggcccgggccggccactgtgctgtggccatcaacacccggctgtacatctggagcggcagagatggctacaggaaggcctggaacaaccaggtgtgctgcaaggacctgtggtacctggagacagagaagcccccacctccagcccgggtgcagctggtgcgggccaacaccaacagcctggaggtgtcctggggcgctgtggccacagctgacagctacctgctgcagctgcagaagtatgacatcccagccacagctgccacagccaccagccccacccccaaccctgtgcccagcgtgcctgccaacccccccaagagccctgccccagctgctgctgccccagctgtgcagcccctgacccaggtgggcatcaccctgctgccccaggccgccccagccccacccaccaccaccaccatccaggtgctgcccaccgtgcccggcagcagcatctctgtgcccacagctgcccggacccagggcgtgcctgctgtgctgaaggtgacaggcccccaggccaccaccggcacccccctggtgaccatgaggcctgccagccaggccggcaaggcccctgtgacagtgaccagcctgcctgctggggtgaggatggtggtgcccacccagagcgcccagggcaccgtgattggcagcagcccccagatgagcggcatggccgccctggccgctgctgctgctgccacccagaagatcccccccagcagcgcccccaccgtgctgtctgtgcctgctggcaccaccatcgtgaagaccatggctgtgaccccaggcaccaccaccctgcctgccaccgtgaaggtggccagcagccctgtgatggtgagcaacccagccaccaggatgctgaagacagctgctgcccaggtgggcacctctgtgtcctctgccaccaacaccagcacccggcccatcatcaccgtgcacaagagcggcaccgtgacagtggcccagcaggcccaggtggtgaccaccgtggtgggcggcgtgaccaagaccatcaccctggtgaagagccccatctctgtgcctgggggcagcgccctgatcagcaacctgggcaaggtgatgtctgtggtgcagaccaagcctgtgcagaccagcgctgtgacaggccaggccagcactggacctgtgacccagatcatccagaccaagggccccctgcctgctggcaccatcctgaagctggtgaccagcgcagatggcaagcccaccaccatcatcaccaccacccaggccagcggggccggcaccaagcccaccatcctgggcatcagctctgtgagccccagcaccaccaagccaggcaccaccaccatcatcaagaccatccccatgtctgccatcatcacccaggccggggccaccggggtgaccagcagccctggcatcaagagccccatcaccatcatcaccaccaaggtgatgaccagcggcaccggggccccagccaagatcatcacagctgtgcccaagatcgccactggacatggccagcagggcgtgacccaggtggtgctgaagggggcccctggccagcccggcaccatcctgaggacagtgcccatgggcggcgtgcggctggtgacccctgtgacagtgtctgctgtgaagccagctgtgaccaccctggtggtgaagggcaccaccggggtgaccaccctgggcaccgtgactggaacagtgtccaccagcctggccggggccggcggccacagcaccagcgccagcctggccacccccatcaccaccctgggcaccatcgccaccctgagcagccaggtgatcaaccccacagccatcaccgtgtctgctgcccagaccaccctgacagctgctgggggcctgaccacccccaccatcaccatgcagcctgtgtcccagcccacccaggtgaccctcatcacagcccccagcggcgtggaggcccagcctgtgcatgacctgcctgtgtccatcctggccagccccaccacagagcagcccacagccaccgtgaccatcgctgacagcggccagggagatgtgcagcccggcaccgtgaccctggtgtgcagcaaccccccctgtgagacccatgaaacaggcaccaccaacacagccaccaccaccgtggtggccaacctgggcggccacccccagcccacccaggtgcagtttgtgtgtgaccggcaggaggccgccgccagcctggtgaccagcacagtgggccagcagaatggatctgtggtgcgggtgtgcagcaaccccccctgtgagacccatgaaacaggcaccaccaacacagccaccacagccaccagcaacatggccggccagcacggctgcagcaaccccccctgtgagacccatgagaccggcaccaccaacacagccaccacagccatgagctctgtgggcgccaaccaccagagagatgcccggcgggcctgtgccgccggcaccccagctgtgatccgcatctctgtggccactggagccctggaggccgcccagggcagcaagagccagtgccagacccggcagaccagcgccaccagcaccaccatgacagtgatggccactggagccccctgcagcgctggccccctgctgggccccagcatggcccgggagcccggcggccgcagccctgcctttgtgcagctggcccccctgagcagcaaggtgcggctgagcagccccagcatcaaggacctgcctgctggccgccacagccatgctgtgtccacagctgccatgaccaggagctctgtgggcgctggggagcccaggatggcccctgtgtgtgagagcctgcagggcggcagccccagcaccaccgtgacagtgacagccctggaggccctgctgtgccccagcgccaccgtgacccaggtgtgcagcaaccccccctgtgagacccatgaaacaggcaccaccaacacagccaccaccagcaatgccggcagcgcccagagggtgtgcagcaaccccccctgtgagacccatgaaacaggcaccacccacacagccaccacagccaccagcaatggaggcaccggccagcctgagggcggccagcagcccccagctggccggccctgtgagacccaccagaccaccagcacaggcaccaccatgtctgtgtctgtgggcgccctgctgcctgatgccaccagcagccacaggacagtggagagcggcctggaggtggccgccgcccccagcgtgaccccccaggccggcacagccctgctggcccccttccccacccagagggtgtgcagcaaccccccctgtgagacccatgaaacaggcaccacccacacagccaccaccgtgaccagcaacatgagcagcaaccaggaccccccacctgctgccagtgaccagggcgaggtggagagcacccagggcgacagcgtgaacatcaccagcagcagcgccatcaccaccaccgtgagcagcaccctgaccagggctgtgaccaccgtgacccagagcacccctgtgcccggccccagcgtgcccccacctgaggagctgcaggtgtccccaggcccccggcagcagctgcccccccggcagctgctgcagagcgccagcacagccctgatgggagagagcgctgaggtgctgagcgccagccagaccccagagctgcctgctgctgtggacctgagcagcactggagagcccagcagcggccaggagagcgctggcagcgctgtggtggccaccgtggtggtgcagcccccaccacccacccagagcgaggtggaccagctgagcctgccccaggagctgatggccgaggcccaggccggcaccaccaccctgatggtgacaggcctgaccccagaggagctggccgtgacagctgctgctgaggccgccgcccaggccgccgccacagaggaggcccaggccctggccatccaggccgtgctgcaggccgcccagcaggccgtgatgggcactggagagcccatggacaccagcgaggccgccgccaccgtgacccaggccgagctgggccacctgtctgctgagggccaggagggccaggccaccaccatccccatcgtgctgacccagcaggagctggccgccctggtgcagcagcagcagctgcaggaggcccaggcccagcagcagcaccaccacctgcccacagaggccctggccccagctgacagcctgaatgaccctgccatcgagagcaactgcctgaatgagctggccggcaccgtgcccagcacagtggccctgctgcccagcacagccacagagagcctggcccccagcaacacctttgtggccccccagcctgtggtggtggccagccctgccaagctgcaggccgccgccaccctgacagaggtggccaacggcatcgagagcctgggcgtgaagccagacctgcccccaccacccagcaaggcccccatgaagaaggagaaccagtggtttgatgtgggcgtcatcaagggcaccaacgtgatggtgacccactacttcctgcccccagatgatgctgtgcccagtgatgatgacctgggcaccgtgcctgactacaaccagctgaagaagcaggagctgcagcccggcacagcctacaagttccgggtggccggcatcaatgcctgtggccggggccccttcagcgagatcagcgccttcaagacctgcctgcccggcttccctggggccccctgtgccatcaagatcagcaagagcccagatggagcccacctgacctgggagccccccagcgtgaccagcggcaagatcatcgagtacagcgtgtacctggccatccagagcagccaggccggcggggagctgaagagcagcaccccagcccagctggccttcatgagggtgtactgcggccccagccccagctgcctggtgcagagcagcagcctgagcaatgcccacatcgactacaccaccaagccagccatcatcttcagaattgctgccagaaatgagaagggctacggccctgccacccaggtgcgctggctgcaggagaccagcaaggacagcagcggcaccaagccagccaacaagaggcccatgagcagccctgagatgaagagcgcccccaagaagagcaaggcagatggccagtag

SEQ ID NO: 155013 - DNA, 5901 bp, Artificial Sequence
  derived and/or modified sequence
atggccagcgctgtgtccccagccaacctgcctgctgtgctgctgcagccccgctggaagagggtggtgggctggagcggccctgtgccccggcccaggcatggccacagagctgtggccatcaaggagctgattgtggtgtttggaggcggcaatgaaggaattgtggatgagctgcacgtgtacaacacagccaccaaccagtggttcatcccagctgtgcggggggacatccccccaggctgtgccgcctacggctttgtgtgtgatggcacccggctgctggtgtttggaggcatggtggagtatggcaagtacagcaatgacctgtatgagctgcaggccagccgctgggagtggaagaggctgaaggccaagacccccaagaatggccccccaccctgcccccggctgggccacagcttcagcctggtgggcaacaagtgctacctgtttggaggcctggccaatgattctgaggaccccaagaacaacatcccccgctacctgaatgacctgtacatcctggagctgcggcccggcagcggcgtggtggcctgggacatccccatcacctatggagtgctgcccccaccccgggagagccacacagctgtggtgtacacagagaaggacaacaagaagagcaagctggtgatctatggaggcatgagcggctgccgcctgggggacctgtggaccctggacatcgacaccctgacctggaacaagcccagcctgagcggcgtggcccccctgcccaggagcctgcacagcgccaccaccatcggcaacaagatgtatgtgtttggaggctgggtgcccctggtgatggatgatgtgaaggtggccacccatgagaaggagtggaagtgcaccaacaccctggcctgcctgaacctggacaccatggcctgggagaccatcctgatggacaccctggaggacaacatcccccgggcccgggccggccactgtgctgtggccatcaacacccggctgtacatctggagcggcagagatggctacaggaaggcctggaacaaccaggtgtgctgcaaggacctgtggtacctggagacagagaagcccccacctccagcccgggtgcagctggtgcgggccaacaccaacagcctggaggccgccccagccccacccaccaccaccaccatccaggtgctgcccaccgtgcccggcagcagcatctctgtgcccacagctgcccggacccagggcgtgcctgctgtgctgaaggtgacaggcccccaggccaccaccggcacccccctggtgaccatgaggcctgccagccaggccggcaaggcccctgtgacagtgaccagcctgcctgctggggtgaggatggtggtgcccacccagagcgcccagggcaccgtcatcggcagcagcccccagatgagcggcatggccgccctggccgctgctgctgctgccacccagaagatcccccccagcagcgcccccaccgtgctgtctgtgcctgctggcaccaccatcgtgaagaccatggctgtgaccccaggcaccaccaccctgcctgccaccgtgaaggtggccagcagccctgtgatggtgagcaacccagccaccaggatgctgaagacagctgctgcccaggtgggcacctctgtgagcagcgccaccaacaccagcacccggcccatcatcaccgtgcacaagtctggaacagtgacagtggcccagcaggcccaggtggtgaccaccgtggtgggcggcgtgaccaagaccatcaccctggtgaagagccccatctctgtgcctgggggcagcgccctgatcagcaacctgggcaaggtgatgtctgtggtgcagaccaagcctgtgcagaccagcgctgtgacaggccaggccagcacaggccctgtgacccagatcatccagaccaagggccccctgcctgctggcaccatcctgaagctggtgaccagcgcagatggcaagcccaccaccatcatcaccaccacccaggccagcggggccggcaccaagcccaccatcctgggcatcagctctgtgagccccagcaccaccaagccaggcaccaccaccatcatcaagaccatccccatgtctgccatcatcacccaggccggggccactggagtgaccagcagccctggcatcaagagccccatcaccatcatcaccaccaaggtgatgaccagcggcactggagccccagccaagatcatcacagctgtgcccaagatcgccaccggccacggccagcagggcgtgacccaggtggtgctgaagggggcccctggccagcccggcaccatcctgaggacagtgcccatgggcggcgtgcggctggtgacccctgtgacagtgtctgctgtgaagccagctgtgaccaccctggtggtgaagggcaccactggagtgaccaccctgggcaccgtgacaggcaccgtgtccaccagcctggccggggccggcggccacagcaccagcgccagcctggccacccccatcaccaccctgggcaccatcgccaccctgagcagccaggtgatcaaccccacagccatcaccgtgtctgctgcccagaccaccctgacagctgctgggggcctgaccacccccaccatcaccatgcagcctgtgtcccagcccacccaggtgaccctcatcacagcccccagcggcgtggaggcccagcctgtgcatgacctgcctgtgtccatcctggccagccccaccacagagcagcccacagccaccgtgaccatcgctgacagcggccagggagatgtgcagcccggcaccgtgaccctggtgtgcagcaaccccccctgtgagacccatgagaccggcaccaccaacacagccaccaccaccgtggtggccaacctgggcggccacccccagcccacccaggtgcagtttgtgtgtgaccggcaggaggccgccgccagcctggtgaccagcacagtgggccagcagaatggatctgtggtgcgggtgtgcagcaaccccccctgtgagacccatgagaccggcaccaccaacacagccaccacagccaccagcaacatggccggccagcacggctgcagcaaccccccctgtgagacccatgaaacaggcaccaccaacacagccaccacagccatgagctctgtgggcgccaaccaccagagagatgcccggcgggcctgtgccgccggcaccccagctgtgatccgcatctctgtggccaccggggccctggaggccgcccagggcagcaagagccagtgccagacccggcagaccagcgccaccagcaccaccatgacagtgatggccaccggggccccctgcagcgctggccccctgctgggccccagcatggcccgggagcccggcggccgcagccctgcctttgtgcagctggcccccctgagcagcaaggtgcggctgagcagccccagcatcaaggacctgcctgctggccgccacagccatgctgtgtccacagctgccatgaccaggagctctgtgggcgctggggagcccaggatggcccctgtgtgtgagagcctgcagggcggcagccccagcaccaccgtgacagtgacagccctggaggccctgctgtgccccagcgccaccgtgacccaggtgtgcagcaaccccccctgtgagacccatgagaccggcaccaccaacacagccaccaccagcaatgccggcagcgcccagagggtgtgcagcaaccccccctgtgagacccatgagaccggcaccacccacacagccaccacagccaccagcaatggaggcaccggccagcctgagggcggccagcagcccccagctggccggccctgtgagacccaccagaccaccagcacaggcaccaccatgtctgtgtctgtgggcgccctgctgcctgatgccaccagcagccacaggacagtggagagcggcctggaggtggccgccgcccccagcgtgaccccccaggccggcacagccctgctggcccccttccccacccagagggtgtgcagcaaccccccctgtgagacccatgagaccggcaccacccacacagccaccaccgtgaccagcaacatgagcagcaaccaggaccccccacctgctgccagtgaccagggcgaggtggagagcacccagggcgacagcgtgaacatcaccagcagcagcgccatcaccaccaccgtgagcagcaccctgaccagggctgtgaccaccgtgacccagagcacccctgtgcccggccccagcgtgcccccacctgaggagctgcaggtgtccccaggcccccggcagcagctgcccccccggcagctgctgcagagcgccagcacagccctgatgggagagagcgctgaggtgctgagcgccagccagaccccagagctgcctgctgctgtggacctgagcagcactggagagcccagcagcggccaggagagcgctggcagcgctgtggtggccaccgtggtggtgcagcccccaccacccacccagagcgaggtggaccagctgagcctgccccaggagctgatggccgaggcccaggccggcaccaccaccctgatggtgacaggcctgaccccagaggagctggccgtgacagctgctgctgaggccgccgcccaggccgccgccacagaggaggcccaggccctggccatccaggccgtgctgcaggccgcccagcaggccgtgatgggcaccggggagcccatggacaccagcgaggccgccgccaccgtgacccaggccgagctgggccacctgtctgctgagggccaggagggccaggccaccaccatccccatcgtgctgacccagcaggagctggccgccctggtgcagcagcagcagctgcaggaggcccaggcccagcagcagcaccaccacctgcccacagaggccctggccccagctgacagcctgaatgaccctgccatcgagagcaactgcctgaatgagctggccggcaccgtgcccagcacagtggccctgctgcccagcacagccacagagagcctggcccccagcaacacctttgtggccccccagcctgtggtggtggccagccctgccaagctgcaggccgccgccaccctgacagaggtggccaatggaattgagagcctgggcgtgaagccagacctgcccccaccacccagcaaggcccccatgaagaaggagaaccagtggtttgatgtgggcgtcatcaagggcaccaacgtgatggtgacccactacttcctgcccccagatgatgctgtgcccagtgatgatgacctgggcaccgtgcctgactacaaccagctgaagaagcaggagctgcagcctggaacagcctacaagttccgggtggccggcatcaatgcctgtggccggggccccttcagcgagatcagcgccttcaagacctgcctgcccggcttccctggggccccctgtgccatcaagatcagcaagagcccagatggagcccacctgacctgggagcccccatctgtgaccagcggcaagatcatcgagtacagcgtgtacctggccatccagagcagccaggccggcggggagctgaagagcagcaccccagcccagctggccttcatgagggtgtactgcggccccagccccagctgcctggtgcagagcagcagcctgagcaatgcccacatcgactacaccaccaagccagccatcatcttcagaattgctgccagaaatgagaagggctacggccctgccacccaggtgcgctggctgcaggagaccagcaaggacagcagcggcaccaagccagccaacaagaggcccatgagcagccctgagatgaagagcgcccccaagaagagcaaggcagatggccagtag

SEQ ID NO: 155014 - DNA, 6108 bp, Artificial Sequence
  derived and/or modified sequence
atggccagcgccgtgagccccgccaacctgcccgccgtgctgctgcagcctaggtggaaaagagtggtaggctggagtgggccagtgccccgtccccgccatggtcatagggccgtcgctataaaggagctgatcgtagtgttcggggggggcaatgagggcatcgttgatgagctacacgtctacaataccgctacaaatcaatggtttattccggcggtgcgaggagacatcccaccaggatgtgccgcttacggctttgtatgcgatggtacgcggctgctggttttcgggggaatggtggagtatggcaagtattccaacgacctgtacgaactccaggcaagccggtgggaatggaagagactaaaggccaaaacaccaaaaaacggacctcccccctgtcccaggctgggtcatagcttctcccttgtgggcaacaagtgttatctctttgggggcctggccaacgactccgaagatcccaaaaataacatccccaggtatttgaacgatctgtatatcctcgagcttagacctggcagcggagtcgtagcctgggacattccaatcacatacggtgtactgcccccacccagagaatctcacactgctgttgtatatacggagaaggataacaaaaaaagcaaactggtgatttatgggggcatgagtggctgccgcctaggcgacttatggaccttagatattgacacgctgacctggaacaagccaagtctgtcaggagtggcacccctcccaagaagtctgcactccgctacgactatcggcaacaagatgtacgtcttcggcggctgggttcctctcgtgatggacgacgtgaaggtggccacccacgagaaagaatggaagtgcaccaacacacttgcctgtctgaatctggacactatggcatgggaaactattctgatggacaccctggaggataacatcccccgagcaagagctggacactgcgctgtggccatcaatacaaggttatacatatggtcagggagggatgggtatcggaaagcctggaacaatcaggtctgttgcaaagacctatggtacctagaaacagagaagccacctccacctgctcgagtccagctcgtgagagcaaacacaaactccctcgaggtgtcatggggtgccgttgctacagcagattcctatttgctgcagctgcaaaaatatgatatccctgccacagctgctaccgctaccagccctactcctaatcctgtaccaagcgtacctgcaaatccccctaagagtccagcacccgccgcagccgcccctgccgtccaaccgcttacacaggtaggaattaccctgcttcctcaggctgcaccagccccgcccacaactactactatacaggttctcccgacagtcccaggatcatccatctccgtccccactgccgctcgaacacagggtgtgcccgccgtcctgaaggtgaccggcccccaagctaccactggcacaccacttgtgaccatgaggccggctagtcaagctggtaaggctcccgtgactgtcacgagtctgccagctggtgtacggatggttgttcctacccagtctgcgcagggcaccgtaatcgggtcaagtccacagatgtcaggaatggctgccctggcggccgccgcagcggcgacacagaagatccccccttcatccgcacctactgttctgagcgttccagccggcacaacaattgtaaaaaccatggcagttacccctggcacaacaacgctgccagcaacagtgaaggtggctagttcaccagtaatggtgagtaatccggcaaccagaatgctcaagactgctgccgcgcaggtcggaactagcgtatcgtcagcgacaaacacttctacaagacccatcatcaccgtccataagagcggtactgttaccgtcgctcagcaagcacaggtagtgacaactgtggtgggcggggtcactaagacgattaccctggtgaagagcccgatcagtgttccaggcggttcggccctgatttccaacctgggtaaggtgatgagcgtggtgcagaccaaaccggtacagaccagtgctgtcaccggtcaggccagtacaggtcccgtcacgcagatcatacagacaaagggacctctgcccgccggaacaatcctgaagcttgtgacaagcgccgacggaaaaccgacgaccattattacaaccacacaggccagcggtgcagggaccaagcctacaatcttgggtattagctcagtctcccctagcactaccaaacccgggacaactacgatcatcaagactatccctatgagcgctatcatcacgcaggccggagcaaccggtgtgacttccagtccagggatcaagtcccctattaccatcattactaccaaggtaatgacgagcgggacaggcgccccagccaagattatcaccgctgtaccgaagatcgctacgggccacgggcagcagggtgttactcaggttgtgctgaagggcgcacctggccagcctgggaccatcctgagaacggtgcctatgggaggagtgcgccttgtgacccccgtcacagtctcggccgttaagccggccgtgactaccctcgtcgtaaaggggacaaccggagtgacaactctaggaactgtgacaggaacagtctccactagcctcgccggggccggtggtcacagtacctccgccagcctggctactcccatcacaacccttggaacaattgccactctgagttctcaggtgataaatcctacggcaatcactgtgagtgcagcccaaaccaccctgacagccgcaggcggcttgacaacacccacaataaccatgcagcccgtctctcagccaactcaagtaaccttaatcactgccccttctggcgtagaagcccagccagtccacgatctccctgtctctattcttgcctcacccaccacagagcaacccactgccacagtaaccattgcagattcaggccagggggatgttcagccaggcaccgtaactctggtatgctccaacccgccctgcgagactcacgaaacaggtaccaccaataccgctaccaccactgtggtcgctaacctgggaggacaccctcagcccacacaagtacagttcgtctgtgatcgccaggaggcagcggcatccttggtgactagcacagtgggccagcaaaacggaagtgtcgttagggtctgttcaaatcccccgtgtgagacccatgagacaggcactactaataccgccaccacagctactagcaatatggctggacagcacgggtgttctaacccgccttgcgaaacacatgaaaccggaactaccaacacagccacaacggccatgagctcagtcggcgccaaccatcaaagggacgcaagacgagcttgcgcagccggcaccccggcggtgatccggatcagcgtggctacaggcgcattagaggccgctcagggatcaaagtcccagtgccagacgcgccaaacatccgccacatccaccaccatgaccgtcatggcaaccggggccccctgttctgctggtcccttgctgggccctagcatggctcgtgaacccggagggcgcagccccgctttcgtccagctggctcctctcagtagtaaggtgagactctcgtctccatctatcaaagacctgcccgccgggagacattcacatgcagtgagcaccgctgccatgacccggagcagcgtgggcgcaggagagccacgtatggccccggtctgcgagtccctgcagggaggaagtccctctacaaccgtgactgttacagcgttagaggctctgctgtgcccctcggccactgtgacccaggtctgtagcaaccccccttgtgagacgcatgaaacaggcactaccaacacagccaccacatccaatgcggggtccgcccagagagtctgttccaaccccccctgcgaaactcacgaaactggcacaacccacacagccacgacagccacctccaacgggggaaccggacagcccgagggaggtcaacaacctcccgcgggtcgaccatgtgagacacaccagaccacttccacgggtactacaatgtcagtgtccgttggcgcactgctccccgatgctacttccagccaccggaccgtcgagagtggcctggaagtcgcagccgcaccctccgtgacacctcaggctggaacagccctgttagctcccttccccacgcagcgtgtttgttcaaatcctccctgcgaaacacacgaaacaggaacgacccatactgcgacaactgttacaagcaatatgagctcaaatcaggatcctcctccagccgcttcagatcagggggaagtggagtctacacagggcgattctgtcaacattaccagcagttccgccataaccaccactgtgtcctctacccttacaagagcagtcacaactgttacccaaagtactcccgtacctggcccatccgttccaccccccgaagagctgcaggtgtcaccaggtccccgccagcaactccccccccgtcaactgctgcagtccgctagcaccgctctgatgggtgagtccgctgaggtgctgtcagcctctcaaacaccagaattgccagcagctgtggacctatctagcactggcgaaccttctagcggccaggagtcggccggttccgctgtggtcgccacagtggtggttcagcctccaccccctacccagagcgaggtggatcaactatctctacctcaggagctgatggctgaagcccaggcaggaacaactactctcatggttacaggactgacgcctgaggaactggctgttactgcagctgctgaggcagccgcacaggctgcggcgacagaggaagctcaagctctcgcgattcaggcggttttgcaggctgctcagcaggccgtaatgggcactggggaacccatggacacatccgaggccgcagcgaccgtgacacaggccgagctggggcatctgtcggccgagggccaagaaggacaggccacgacgatcccaattgtactgactcagcaggagctagctgcactcgtgcagcagcagcaactgcaggaggcccaggcccaacagcagcatcaccatctgcctaccgaggcactggcacctgcagactcgctcaacgaccctgccattgaatctaattgtctgaacgagctggctgggactgtaccaagcactgtcgctctcctgcctagcacagcaactgaaagcttagccccaagtaacacttttgtagcaccacagcccgtggtggtagcaagtcctgctaagctgcaagcggctgcgactctgacagaagtcgccaacgggattgagtccctaggagtgaagcctgatttgccccctcctccatccaaggccccgatgaagaaagaaaaccagtggtttgatgttggtgttatcaaggggacaaacgttatggtaacacattactttctgccaccagacgacgcggttcctagtgacgatgacctgggcactgtccctgattataaccaactgaagaaacaggagctgcagccaggcactgcgtacaagttcagggtggctggaatcaacgcttgtgggcgcgggcccttcagtgaaatttcggcctttaagacatgcttaccaggattcccgggtgccccttgtgccatcaagataagtaaaagtcccgatggagcccacctcacttgggaacccccatccgttacctcaggaaagatcatcgaatacagcgtctacctggcaattcagtcctctcaggccgggggcgagctaaagtccagcacccccgcgcagcttgctttcatgcgcgtgtattgtggtccaagtcccagttgcctggtgcaaagttcatctctcagcaatgcccatatcgactacactacaaagccggctataatatttaggatagcggcacggaacgagaaggggtatggcccagctactcaggtgagatggctccaagagacaagcaaggatagctccggaacaaagccggctaataagaggcccatgagtagccccgaaatgaagtccgctcctaagaagtcgaaggcagatggacagtag

SEQ ID NO: 155015 - DNA, 5901 bp, Artificial Sequence
  derived and/or modified sequence
atggccagcgccgtgagccccgccaacctgcccgccgtgctgctgcagcctcggtggaagcgggtggtgggttggtctggacctgttcctaggcccaggcatggacacagagccgtggctatcaaggaacttatagtagtctttgggggtggcaacgagggcattgtcgacgagttacacgtatacaacacagccacgaaccagtggttcatcccagcagttcggggggatatacctcctggttgcgccgcatacggctttgtatgcgatggaacacggctgctggtatttgggggtatggttgaatacggcaagtacagcaatgacctgtatgaacttcaagcctcccggtgggagtggaagagactcaaagcaaagacaccaaaaaacgggcccccaccctgcccgcgtcttggccacagtttttctctagtggggaataaatgttatctgttcgggggcctcgcgaacgatagcgaggatccgaaaaataacatacctaggtacctcaacgatttatacatcttggaattgagacccggctctggagtcgttgcttgggatatccccatcacgtacggagtcttgcccccacccagagagagtcacacagctgtggtttatacagaaaaagataataaaaaatcaaaacttgtgatctacggtgggatgagcggctgcagattaggggatctgtggacactcgacatcgataccctgacatggaataagccctcactgtccggggtggcgcccctgcccagatccttgcacagtgctaccacaatcggcaacaagatgtacgtgttcgggggttgggtccccctcgttatggacgatgtcaaggtagccactcacgaaaaggagtggaaatgtactaatactctggcttgtttaaatctcgataccatggcctgggagacaatcttaatggatacattagaggacaatattccccgcgcccgcgccgggcactgtgccgttgcgattaacactagactctacatctggtcaggtagagacgggtatcggaaggcatggaacaaccaagtgtgttgcaaagacctgtggtatcttgaaacagagaagccgccgccacctgccagagtccaattggtgagagctaatacaaattctctagaagcggccccggctccccccacaaccacaaccattcaggtcctgcccactgtccccggaagctctattagcgtgcccaccgctgcgaggacacagggagtgcctgcagtactgaaggtgaccggcccccaggcaacgaccggcacacccttggtgacgatgcgtccagcttcgcaggcaggcaaagctcctgtgaccgtcaccagcctcccagctggtgtccggatggttgtgccaactcagtcagcccagggaacagtcattggctcctctccccagatgagcggcatggccgctctggcagctgctgctgctgccacacagaagattccaccctcatcagcccctaccgttttgtcagtgcccgcaggaactaccatcgtcaagactatggctgtgacccctggaactacgaccctgcctgctacagtaaaggtggccagtagcccagttatggtgagcaacccagcaacaagaatgctgaagaccgccgccgcacaagttggaacctcggtctccagcgctaccaacacctctacaaggcctatcataactgtccataagtcaggcaccgttacagtggctcagcaggcgcaagtggtcaccaccgtggtgggcggcgtgaccaagacgatcactctggttaagagcccaataagcgtcccagggggtagcgccctcattagcaatctgggtaaggtcatgtcagtggtccagaccaaaccagttcagacttcggcagtgacgggccaggccagtactggaccggtgactcagattatacaaaccaaggggcctctacccgccgggacaattctgaaacttgtgacctcagccgacgggaaacctactaccatcatcacgactactcaggccagcggagccggaactaaacctacaatcctcggcatcagttctgtgagccccagtaccactaaacctggcaccacaactatcatcaagacaatccccatgtccgcaatcatcacacaggcaggggcaacaggggtgacatcaagcccaggcattaagtcacccataactattattacaacaaaagtgatgaccagcggcaccggcgcccccgccaaaataataactgctgtgccaaagatcgctacagggcatggccaacaaggtgttactcaggttgtgcttaaaggcgcacctggacaaccaggtactatcctcaggactgtgcccatggggggtgtccgccttgtgaccccggtcaccgtctcagccgttaaacctgccgtcactaccctggtagtcaaagggaccacgggagtgacaactttgggcactgtgaccggtactgtgagcaccagcttagctggcgctggcggccactccacctccgcttcccttgccacgccaataaccactctggggactatcgccaccctgtcaagtcaagtgatcaacccaactgctatcacggtaagcgccgcgcagactactctgacagcagccggtgggctgactacgcccaccattaccatgcagcccgtcagtcagcccactcaggtgactctcatcacagccccctccggcgttgaggcacagcccgtgcacgacctccccgtgagtattttagcgagcccgacgactgaacaacctaccgcaacagtaaccatcgccgacagcgggcagggtgatgtccaaccagggacagttacattagtgtgctcaaatccaccctgtgaaacccacgaaacagggaccacaaataccgctaccacaactgttgtcgcaaacctgggaggacaccctcagcctacccaggtgcaatttgtgtgcgatcgacaggaggctgccgccagtctggtaacatctacagttgggcagcagaatggctcagtggtgcgggtgtgttcaaatcctccctgtgagactcatgagaccggcactaccaacactgccacgaccgctacaagtaatatggctggccaacacggttgctctaatcctccatgcgagactcatgagaccggcactaccaacactgccacaactgcgatgtcaagcgttggtgccaatcatcagagagacgccagacgagcctgtgctgcaggcacccctgctgtcatccgtataagtgtcgctacgggtgctctagaagccgctcagggcagtaaaagccagtgccagacgagacagaccagcgctacatctactacaatgaccgtgatggccacaggtgcaccttgcagtgctggccctctcctcggcccctcaatggcccgcgaaccgggcgggcgatcccccgcatttgttcaattggctcctttatcctctaaggtaagattaagtagtcctagcattaaagatctgccggcggggcgacattcacatgctgtttccaccgcagcaatgaccagaagttccgtaggtgctggcgagccccgtatggcccccgtatgcgaatctttacaggggggatcacccagcacgacagtcaccgtgactgccttggaggctctcttatgcccttcagccaccgtgactcaggtttgctcaaatccaccctgcgaaacacacgaaacaggtaccactaatacggctacaactagcaatgctggtagcgcacagagagtttgtagcaaccccccctgcgagacccacgaaacgggtactacgcataccgcaaccacagctacttctaatggcggaacaggtcagcctgagggcggccaacagccacccgcgggacgtccctgtgaaacccatcagaccacaagcaccggcactactatgtctgttagtgtgggtgcccttctccctgacgctacttcttcacacagaactgtggagagcggattggaggtcgccgccgctcccagcgttacgccccaggctgggacagctctgctcgcaccctttccaacccagagggtctgcagcaacccaccatgcgaaacccatgagactggtactacccatactgcaaccaccgtcacctccaatatgagctccaaccaggatcccccaccggcggcttcggaccagggggaagtggagtctacacagggcgatagtgtcaacattactagctcctccgctatcactaccactgtaagctccacgctcacccgtgccgtgacaacagtcacccaatcaacacctgtccctggccctagcgtgccaccaccagaagagctgcaggtctccccagggcccaggcagcagctgccccctcggcagctgctccagtctgcctcaaccgctttaatgggcgaatcagctgaagtcctgtctgcaagtcagacccccgagctgccggcagccgtggacctgtcctctacgggcgagccttcttccgggcaggagtctgcgggcagcgcggtggtggctactgtcgtggtgcagccacctcccccgacccagagcgaggtggaccaactgtcgctgccccaggagctaatggctgaggcacaggctgggactacaacactgatggttaccggactaacccccgaagaactggccgtgactgccgccgccgaggccgcagctcaggcggccgccaccgaggaggcgcaggcactcgctatccaagctgtgctgcaggcggcgcagcaagctgtgatgggcactggagagccaatggacaccagtgaagccgccgcaaccgtgacacaggccgagcttggtcatttgagcgccgagggacaggaaggtcaggccacaacaattcccatcgttcttacacaacaggaattggcagccctggtgcagcagcaacaacttcaggaagcccaggcccaacagcagcatcaccatctccctactgaagcactggcccccgccgattcactcaatgaccccgccattgagtctaattgccttaacgagctcgccggaaccgtcccttcaacggtggcccttctgccttctaccgccactgaatcacttgccccttccaataccttcgtggctccccagcccgtcgtggtcgcctcaccggcaaagctgcaagccgcggcgactttaacagaggtggcgaacggaattgagagtcttggggtgaagcctgatctgcccccacccccttctaaggctcctatgaagaaagagaaccagtggtttgatgttggggtgattaaaggcacaaacgtcatggtgacacactactttttgccacctgatgatgcggtaccgtccgatgacgatctggggaccgttcccgattacaatcaattaaagaagcaagaactacagccaggtacagcatacaagtttagagtagccggcatcaacgcctgtggccgggggccattttctgagatctcagcattcaagacgtgtttaccggggttcccgggtgcaccttgcgccattaaaataagcaagtctcccgacggagcccacctcacatgggagccaccgtccgttaccagtggaaaaattatcgagtactctgtgtacctggctattcagtcatcgcaagcaggaggcgagttaaagagttcgacaccggcgcagctcgctttcatgagggtctattgcggtccgtcccccagctgtctggttcagtcctctagtctgtcaaacgcccacatcgactacactaccaaacccgccataattttccgcattgcagcacggaacgagaagggatacggaccggccacccaggtgcggtggctgcaggagacttctaaggactcatccggcacaaagcccgccaacaaacgcccgatgtcaagcccagaaatgaagagtgcaccaaaaaaatccaaggcagacggccagtag

SEQ ID NO: 155016 - DNA, 6107 bp, Artificial Sequence
  derived and/or modified sequence
atggccagcgctgtaagcccagctaatctgcccgcagtactgctccagcccagatggaagcgcgtggttgggtggagcggcccagtgcccaggccgagacacggacacagggccgtggctatcaaggagcttattgtcgtttttggcggaggtaacgaaggcatcgttgacgagctacacgtgtacaataccgctaccaatcaatggttcatccctgcagtaaggggcgacattccccctggatgtgccgcatacggttttgtgtgtgatggaaccaggctcttggtttttggaggtatggtagagtacggcaaatactcaaacgacttgtacgagctgcaagcgagccgatgggagtggaagcggctcaaggctaagacccctaagaacgggccacctccctgtcctaggcttgggcacagtttctcactagttggaaataaatgctacctatttgggggtctcgctaacgattccgaggatcccaaaaataacattcctagatacctgaacgacctctatattctggaattaagaccaggaagcggcgttgtagcgtgggacatacccatcacgtacggagtactccctccacctagagagtctcacacagccgtggtgtatacagaaaaagataacaagaaaagcaaactggtaatctacgggggtatgagtggttgtcggctgggcgacctgtggactctggacatcgacacactgacatggaacaaaccatccctttcgggcgtggcccctctgcctcggtctttacacagtgccaccacgattggtaataagatgtacgtgtttggcggatgggtccccctggttatggacgacgtgaaagtggctacacacgaaaaagaatggaaatgtactaatacactggcttgccttaacctggacaccatggcatgggagacaatactgatggacactctcgaagataatattcccagagcgagggctggacattgcgccgtggccataaacacaaggttgtacatatggtcgggaagagatgggtaccgcaaagcctggaacaaccaggtttgttgtaaagatttgtggtatctggagaccgagaaacctcctccaccagccagagttcagctcgtgagagcgaataccaactcccttgaagtcagttggggggcagtggccaccgcagattcttatctgctccagcttcagaagtacgacatccctgccaccgcggctactgctacaagccccactccaaatccagtacccagtgtgcctgcaaaccccccaaagtcacccgcacctgccgcagccgcacctgctgtgcaacccttaactcaggttggaattacactacttccccaggccgcacccgctccaccaactacaactactatccaagttcttcccacagtgcctggctcttccattagcgttccaacagcagctcgtacccaaggcgtcccagctgtgctgaaggtgaccggtccgcaagctaccactggaacccctcttgtcactatgaggcccgctagtcaggctggtaaagctccagttaccgttacatcattgcccgctggagtgagaatggtggtccctacacagagcgctcagggtaccgtgatcggcagcagccctcagatgagcggcatggctgcgctcgcagcagccgcagctgctacccagaagataccgccaagctctgctcctactgtcctctccgttcccgctgggacaacaattgtaaaaaccatggcagtcacacctgggacgacaactctacccgcaactgtcaaggtggcttcctctccggtcatggttagtaatcccgctactcgtatgttaaaaaccgccgctgcacaggtgggtacctccgtgtcaagtgcaaccaacacctctactcgccctatcatcactgttcacaagtctggcactgtgacagtggctcagcaagctcaggtcgtgactaccgtggtgggcggtgtgacgaagacaatcaccctcgtcaagtctcccatctctgtgccaggcggatctgctcttatatctaatctcgggaaagttatgtcggtggtgcaaactaagcccgtgcagacctccgctgttaccggtcaggccagcacaggcccagtaactcagattattcagacaaaaggcccactgcccgctggtactatccttaagctggtaacatcagccgacggcaaaccaacgaccattatcaccactacacaagctagcggggctggtacaaaacccacgatcctgggcatcagtagcgtgagcccatcaacaactaagccgggaacaacgactataatcaaaaccatccctatgtcagccatcattacccaggctggtgcaacaggagtaactagcagccccggaatcaagtctcctatcacgattatcactacgaaagtgatgaccagcggtactggcgctcctgccaaaattatcactgctgtgcctaagatcgccacgggacacggacagcaaggcgtgacacaggtggttctcaaaggggcacctggtcagccgggtacaatcctgcgtaccgtccccatgggtggtgtaaggctggtgacccccgtgactgtcagcgccgttaagccggctgtgaccactttggtggtcaagggaactactggcgtgacaactctagggaccgtgactggtacagtctccactagcctcgcaggcgcagggggacacagtacctccgccagtttggccaccccgattacaacccttggaaccattgccacactcagtagccaggtgatcaatcctacagctattacagtctcagcagcccagaccacattgactgccgcaggtggccttaccaccccgactatcacaatgcagccagtctcccaacctactcaggtaactctgattactgccccaagtggggtggaagcacaacctgtgcacgatctcccagttagcatacttgcctcccccactaccgagcagcccacagcgacagtgacaattgccgattccggccagggcgatgttcagcccggaaccgtcaccctggtttgttctaaccctccttgtgaaactcatgagacaggcaccaccaatactgcaacaactacagtggttgccaacttaggcggacaccctcagcctactcaagtgcagttcgtttgtgatagacaggaggccgcagctagcctggtcactagtacagtcggccagcagaacggctctgtggtgcgtgtgtgctccaatcctccttgtgagacacatgaaaccgggacaactaataccgctactactgcaacatcgaacatggcgggacagcatggatgcagtaatcctccttgcgaaacccacgaaacaggcacaacaaatactgctacaaccgctatgtcaagtgtaggagccaatcaccagagggacgctcggagggcatgtgctgcaggaacccccgcagtgattaggatttcagtggctactggagcccttgaggccgcacagggtagcaagtcccagtgtcagactcgacagacaagtgccacctcaactacaatgactgtgatggccaccggggctccctgcagtgcaggcccattgttgggaccctccatggcgagggaacccggagggcgatctcctgccttcgtccagctggccccattatctagcaaagttcgcctgtcctctcctagtattaaggacctccctgccggtaggcatagtcacgccgttagcacagcggctatgactagatcatcagttggtgctggcgagcctcgcatggcccctgtgtgtgaatcccttcaaggcggttccccatccacaactgtcactgtgaccgcattggaggcattactgtgcccaagtgcaaccgtcacccaggtatgcagcaatccaccttgtgaaacacatgagaccggaacgactaatacagctaccacaagcaacgcaggttctgcccagcgtgtgtgctctaatcccccatgtgagacccatgagacaggaacgacacatacagcgacaactgccacctctaatggaggaacaggccagccggagggcggacaacagccaccggctggccgtccatgtgagacccaccagactacatcaacaggtaccacaatgtccgtgtcggtgggcgctcttcttcccgacgcaactagtagtcacagaaccgtggaatcaggcctggaggtcgccgcagccccttccgtcactccgcaggcagggaccgctcttttagcacccttcccaacccaacgagtctgcagtaatcccccatgcgaaactcatgagaccgggaccacccacacagctactacggttacctctaacatgagctccaaccaggatccacccccagccgcaagtgaccagggtgaggtagagtccactcaaggggatagcgttaatattacatcctcgtccgcaatcacaaccacagtgtcctcaacgcttactagagctgtgaccacagtgacgcagtccacacctgttcctggcccatccgtgccccctcctgaggagctacaggtctctccgggtccgaggcagcagctgcctcctaggcaactcctacaatcagccagcaccgcgctcatgggggaatccgccgaagttctgagcgcatcccaaacacccgagcttccggctgccgtggatctgagtagcaccggggaaccatcctctgggcaggagagcgccggtagcgcagtcgtcgctacagtggtagttcagcctcctccacctacccaatctgaggtagaccaactgagcctgccacaggagctgatggctgaggcacaggccggtacgaccaccctcatggtgaccggcctgactcccgaggaactcgctgtaaccgctgcagctgaagccgctgcccaggctgccgctaccgaagaagcacaggcgctggccatacaagccgtcctccaggcggcacagcaggctgtgatgggtaccggggaacccatggacactagcgaggctgccgcaactgttactcaagccgagctcggtcatttatctgccgaggggcaggagggacaggctacaaccatccctatagtcctaacccagcaggagctggcagctcttgtacagcagcaacagttgcaggaggctcaagcccagcagcagcaccaccacctgccaacagaggcactggcgccagccgacagtctcaacgatcccgctatcgagtcgaactgcctcaacgagttggccggaaccgtgccttctaccgtcgctcttctgccctccactgctaccgagagtctcgccccaagcaataccttcgtggcaccacagcccgtcgtggtggctagtccggctaagctgcaagctgccgcaaccttgacagaagtggccaatggaatagagtccctgggcgtaaagcccgacctgcctcctcctccctcgaaagcaccgatgaaaaaggagaatcagtggttcgacgtgggagtgatcaaaggaacaaatgtgatggtgacacactattttctgcctcccgacgatgccgtgccgtccgatgacgatctgggcaccgtgcccgactataatcagttgaagaagcaggaattgcaaccgggtaccgcctacaagttccgagtagccggaattaatgcttgtgggagaggccctttcagtgagataagcgcatttaaaacatgtctgccaggattccccggagcgccttgcgccattaaaatcagcaaaagccccgacggggctcatctgacctgggagccgccatctgtgactagcggtaaaatcatcgaatacagtgtttatctggcaattcagagttctcaggccggaggcgagctcaagagcagcacgcccgcacagctggcctttatgcgcgtgtattgtggtccctcccccagctgcctcgtgcaaagcagcagcctgtctaacgctcatattgattacacaactaaacccgcaatcatctttcggatcgccgctaggaacgaaaaaggatacggtccggctacacaggtgagatggcttcaggagaccagcaaggattcctcaggaaccaaaccagctaataagagaccaatgtcatcccccgagatgaaaagcgctcccaagaagtccaaggctgatggccagta

SEQ ID NO: 155017 - DNA, 5900 bp, Artificial Sequence
  derived and/or modified sequence
atggcttccgccgttagccctgcgaatctgcccgctgtgctcctgcagcccagatggaagcgggtggtgggatggagtggccctgtcccccgacctcggcacggccatagggctgtggcaattaaagagttgattgtagtgttcggtggcggaaatgaggggatcgttgacgaacttcacgtttacaatacagccaccaaccaatggttcatcccagccgtaaggggcgacatccctccagggtgcgccgcttacggcttcgtgtgcgatgggacgcggctccttgtctttggcggaatggtcgaatacggaaaatactccaatgatttatatgagttacaggcgtctaggtgggaatggaagaggctgaaagcaaaaacccctaaaaatggcccacctccatgtcctaggctggggcactcgttctcactcgtgggcaataagtgctacctttttggcggactggcaaacgattcagaggatcccaagaacaacattcccagataccttaacgacctgtacatcttggagctcagaccgggtagtggcgtggtcgcatgggatatcccaattacttatggagttcttcccccacccagggagtcccataccgctgttgtatacaccgagaaggataacaagaagtccaagctggtgatttatggaggaatgtccggttgccggctaggcgacctgtggaccctggatatcgacaccctcacatggaataaaccgagcctgtccggggtcgcacccctgcccagaagtctgcattcagcgactactattgggaataagatgtatgtgttcggtggctgggtccctctggtgatggatgatgtgaaggtcgctacccatgagaaagaatggaaatgcacaaatacactcgcatgtctgaaccttgacacaatggcctgggagactatattaatggacacgctcgaagacaatattccgcgtgcacgcgcagggcattgcgcagtggcaattaacacacgtctatacatttggagcgggagagatgggtacaggaaggcgtggaacaaccaggtttgctgtaaggatctatggtatctcgagacagagaaaccgcctcctcccgctcgcgtccagctcgtgagagcgaacaccaacagtctggaagccgcacccgcaccaccaaccacaaccacaatccaggtcttgcccacagtcccgggaagcagcatctctgtcccgacagcagcccgtactcagggggtccctgccgtgctcaaagttaccgggccacaggccactaccgggacgccactggtgaccatgagaccagcatcgcaggctgggaaggctccagtgactgtgacctcactacctgccggagtgcgaatggtggttcctacccagtcagctcagggcaccgtcatcggctcttcacctcaaatgagtggcatggctgctctggctgccgctgcggctgctacccaaaaaattcctccgtctagtgcacccaccgtcctgtccgtgcctgcaggtacaaccatcgtcaaaaccatggccgtgaccccgggaacaaccacactgcctgccactgtaaaggttgccagttcgcccgttatggtttctaacccggctactcgaatgctgaaaactgccgctgcacaggtgggaacgtctgtgtccagtgctactaacaccagtacaagacctatcatcacagtgcacaagtcaggaacggttaccgtagctcagcaggcacaggtggtgactacagtggttggaggagtaaccaagacaattactctggtgaagtctcctatttccgtgcctggcggaagcgctctcatctctaatcttggaaaagtaatgtctgtcgtccagacaaagcctgtgcagacctctgccgtgaccggacaggcttctacaggacctgttacccagattatccagacaaaaggtccgttaccggcaggaacaatactcaaactggtgaccagtgctgacggaaagcccacaacgataatcactacaacccaggcaagcggtgccggaaccaagccaaccattctgggaatctcctctgtgtcaccttcgaccactaaacccggtactacgaccatcatcaaaacaataccgatgtcggcaattatcacacaggctggcgcaacaggagtgactagcagcccaggaattaagtcaccaatcactatcattaccaccaaggttatgacttcaggaaccggagcccctgctaagattataaccgcggttcccaagatcgctaccggacacggccagcagggagtaacacaagtcgtcctcaagggagcacccggtcaaccaggaacaattttaagaaccgtccccatggggggagtgaggctcgtcacaccagttacggtgagtgctgtcaagcccgctgtgacaacattggttgtcaagggtactacgggagtaacaacgttaggcacagtcacagggacagtcagcacctctctggccggagccggaggccactcaacttctgccagcctggccacaccaattaccaccctgggaacaatcgccactctgtcctcccaggtgatcaatccaacagctatcaccgtgtccgctgcccagacaacgctgaccgctgctgggggtctgaccaccccaaccatcacaatgcaacccgtgagccagcctacccaagtcacgctcatcaccgcaccctctggcgttgaggctcagccggtccacgatcttcctgtttccatcctagcttccccaacgactgagcagcccactgcgaccgtgactatcgcagactccgggcagggtgacgtgcagcctggcacagtaacccttgtgtgttcaaatcccccatgcgagactcacgagactgggactacaaatacagccacgactacagtcgtggctaatctgggaggccaccctcagccaacgcaagtgcaattcgtgtgtgataggcaggaagctgccgcatccttggtcacttcaacagttggccagcagaacgggagcgtggtccgtgtgtgctcaaatcccccatgtgagacccacgagaccggaactaccaataccgcaaccacggcaacctcaaatatggccggtcagcacggctgttccaatcccccttgtgagactcatgaaactggcacaaccaataccgccaccactgctatgtcatccgtgggcgctaaccatcagagggatgctcgccgagcctgcgcagcgggaacgcccgcagttattagaataagcgtagcaactggggcactcgaagccgcacaggggtcaaagtctcagtgccagaccaggcagacttcggcgacttctactactatgactgtcatggcaactggcgcaccttgctctgcaggaccgctgttgggaccatccatggcccgagagccagggggtaggagccccgcttttgtccagctggcaccactttcctctaaggtccggttgtcctcaccaagcatcaaggacctgcccgctggacggcattcccatgctgtgtcaactgccgctatgacccgcagctctgtgggcgctggagaaccacggatggctccggtctgcgaaagcctgcaaggcggatctcccagcacaaccgtgacagtgacagctcttgaagctctactttgcccttctgcaacagtgacccaggtgtgtagcaatccgccttgtgaaacccacgaaaccggaacaacaaatacagcaaccaccagtaatgcgggatctgctcaacgtgtctgtagcaaccccccttgtgaaacccatgagacaggaactactcacactgctaccacagcgacctcaaacggaggcacaggacaaccggaagggggacagcagcctcctgccggacggccttgtgaaacgcatcagacaacctcaaccggtaccacaatgagcgtcagtgttggggcactactcccagatgcgacctcttcccatagaacagtcgagtctggcctcgaggttgccgcagccccttccgtgactccccaggccggaacagctcttctggcaccttttccgacccagagggtgtgtagcaatcctccgtgcgagacgcatgaaactggcaccacgcacacagccaccacagtgacctccaacatgtcttcaaaccaagatcccccaccggcagcaagcgaccagggcgaagtcgagtctactcagggtgacagtgtgaatatcacttcaagctctgcaatcaccactaccgttagctctaccctcaccagggcggttaccaccgtaacacagtccaccccagtcccaggcccatccgtgccacccccagaggaactccaggtgagccccggacccagacaacaactgccacctcgccaactgctccagtccgccagcactgccttgatgggcgagtcagccgaggtcttgtccgcctcacagacccctgaactcccagccgcagtagacctctctagcacaggcgaaccttcctccgggcaggagtccgctgggagcgcagtcgtcgcaactgtcgttgtgcagccccctccaccgacacagtcagaagtggatcagctgtccctgccccaggagttaatggccgaggctcaggctggaacaaccacattaatggtgactggtctgactcccgaagagcttgcagttacagctgcggctgaggccgcagcgcaggccgcagcaaccgaggaggcccaggccctggcaatccaggccgtgttgcaggctgctcagcaagctgtcatggggactggagaaccaatggatacctccgaggcagccgctactgtgacccaggcagagctcggacatttgtccgcggaggggcaagaagggcaggccacaacaataccgatcgtcctcacacagcaggaactcgcagccctcgtgcaacagcaacaacttcaggaagctcaggcgcagcagcagcaccatcacctgcctaccgaggctctggcccctgctgacagtcttaatgatccagccatagaatcaaactgcctaaacgagctggccggtacagtgcccagcactgtggccctgcttcctagcaccgcaactgaatcgctggcacccagtaacactttcgtcgccccacaacccgtggtcgttgccagcccagccaagctgcaggccgctgccaccctgacagaagttgcgaacggcattgaatcacttggtgttaagcccgacctccctcctccgcctagtaaggctccaatgaaaaaggaaaatcagtggtttgacgtgggtgtaattaaaggaacaaatgtgatggtgacccattactttctcccacccgacgatgctgttcctagcgatgatgacctggggacagtgcccgactataaccagctcaagaaacaggagctgcagcccggtactgcttataagtttcgggtagccggtattaatgcttgcgggagggggcctttttccgaaatcagcgcctttaaaacatgtctgcctggtttccctggcgctccatgcgccatcaaaatatccaagtcgccagacggcgcacacttaacatgggaacccccatctgtaacatccggcaaaatcattgaatattcagtgtaccttgccatccagtccagccaggcaggaggtgagctgaaaagttcaactccagctcagctggccttcatgcgagtgtactgtgggcctagtccgtcctgccttgtgcagtcgtcatcactgtctaacgcacacattgactacaccactaaacctgctataatctttcgtattgccgctcggaatgagaagggatacggcccagccactcaggtccgctggctgcaggaaacttcaaaagattcctctggtaccaagccagcgaacaagagacccatgtcttcgccggaaatgaagtcggccccaaagaaatcaaaggccgacggccagta

SEQ ID NO: 155018 - DNA, 6108 bp, Artificial Sequence
  derived and/or modified sequence
atggccagcgccgtgagccccgccaacctgcccgccgtgctgctgcagcccagatggaagagagtggtgggctggagcggccccgtgcccagacccagacacggccacagagccgtggccatcaaggagctgatcgtggtgttcggcggcggcaacgagggcatcgtggacgagctgcacgtgtacaacaccgccaccaaccagtggttcatccccgccgtgagaggcgacatcccccccggctgcgccgcctacggcttcgtgtgcgacggcaccagactgctggtgttcggcggcatggtggagtacggcaagtacagcaacgacctgtacgagctgcaggccagcagatgggagtggaagagactgaaggccaagacccccaagaacggcccccccccctgccccagactgggccacagcttcagcctggtgggcaacaagtgctacctgttcggcggcctggccaacgacagcgaggaccccaagaacaacatccccagatacctgaacgacctgtacatcctggagctgagacccggcagcggcgtggtggcctgggacatccccatcacctacggcgtgctgcccccccccagagagagccacaccgccgtggtgtacaccgagaaggacaacaagaagagcaagctggtgatctacggcggcatgagcggctgcagactgggcgacctgtggaccctggacatcgacaccctgacctggaacaagcccagcctgagcggcgtggcccccctgcccagaagcctgcacagcgccaccaccatcggcaacaagatgtacgtgttcggcggctgggtgcccctggtgatggacgacgtgaaggtggccacccacgagaaggagtggaagtgcaccaacaccctggcctgcctgaacctggacaccatggcctgggagaccatcctgatggacaccctggaggacaacatccccagagccagagccggccactgcgccgtggccatcaacaccagactgtacatctggagcggcagagacggctacagaaaggcctggaacaaccaggtgtgctgcaaggacctgtggtacctggagaccgagaagccccccccccccgccagagtgcagctggtgagagccaacaccaacagcctggaggtgagctggggcgccgtggccaccgccgacagctacctgctgcagctgcagaagtacgacatccccgccaccgccgccaccgccaccagccccacccccaaccccgtgcccagcgtgcccgccaacccccccaagagccccgcccccgccgccgccgcccccgccgtgcagcccctgacccaggtgggcatcaccctgctgccccaggccgcccccgccccccccaccaccaccaccatccaggtgctgcccaccgtgcccggcagcagcatcagcgtgcccaccgccgccagaacccagggcgtgcccgccgtgctgaaggtgaccggcccccaggccaccaccggcacccccctggtgaccatgagacccgccagccaggccggcaaggcccccgtgaccgtgaccagcctgcccgccggcgtgagaatggtggtgcccacccagagcgcccagggcaccgtgatcggcagcagcccccagatgagcggcatggccgccctggccgccgccgccgccgccacccagaagatcccccccagcagcgcccccaccgtgctgagcgtgcccgccggcaccaccatcgtgaagaccatggccgtgacccccggcaccaccaccctgcccgccaccgtgaaggtggccagcagccccgtgatggtgagcaaccccgccaccagaatgctgaagaccgccgccgcccaggtgggcaccagcgtgagcagcgccaccaacaccagcaccagacccatcatcaccgtgcacaagagcggcaccgtgaccgtggcccagcaggcccaggtggtgaccaccgtggtgggcggcgtgaccaagaccatcaccctggtgaagagccccatcagcgtgcccggcggcagcgccctgatcagcaacctgggcaaggtgatgagcgtggtgcagaccaagcccgtgcagaccagcgccgtgaccggccaggccagcaccggccccgtgacccagatcatccagaccaagggccccctgcccgccggcaccatcctgaagctggtgaccagcgccgacggcaagcccaccaccatcatcaccaccacccaggccagcggcgccggcaccaagcccaccatcctgggcatcagcagcgtgagccccagcaccaccaagcccggcaccaccaccatcatcaagaccatccccatgagcgccatcatcacccaggccggcgccaccggcgtgaccagcagccccggcatcaagagccccatcaccatcatcaccaccaaggtgatgaccagcggcaccggcgcccccgccaagatcatcaccgccgtgcccaagatcgccaccggccacggccagcagggcgtgacccaggtggtgctgaagggcgcccccggccagcccggcaccatcctgagaaccgtgcccatgggcggcgtgagactggtgacccccgtgaccgtgagcgccgtgaagcccgccgtgaccaccctggtggtgaagggcaccaccggcgtgaccaccctgggcaccgtgaccggcaccgtgagcaccagcctggccggcgccggcggccacagcaccagcgccagcctggccacccccatcaccaccctgggcaccatcgccaccctgagcagccaggtgatcaaccccaccgccatcaccgtgagcgccgcccagaccaccctgaccgccgccggcggcctgaccacccccaccatcaccatgcagcccgtgagccagcccacccaggtgaccctgatcaccgcccccagcggcgtggaggcccagcccgtgcacgacctgcccgtgagcatcctggccagccccaccaccgagcagcccaccgccaccgtgaccatcgccgacagcggccagggcgacgtgcagcccggcaccgtgaccctggtgtgcagcaaccccccctgcgagacccacgagaccggcaccaccaacaccgccaccaccaccgtggtggccaacctgggcggccacccccagcccacccaggtgcagttcgtgtgcgacagacaggaggccgccgccagcctggtgaccagcaccgtgggccagcagaacggcagcgtggtgagagtgtgcagcaaccccccctgcgagacccacgagaccggcaccaccaacaccgccaccaccgccaccagcaacatggccggccagcacggctgcagcaaccccccctgcgagacccacgagaccggcaccaccaacaccgccaccaccgccatgagcagcgtgggcgccaaccaccagagagacgccagaagagcctgcgccgccggcacccccgccgtgatcagaatcagcgtggccaccggcgccctggaggccgcccagggcagcaagagccagtgccagaccagacagaccagcgccaccagcaccaccatgaccgtgatggccaccggcgccccctgcagcgccggccccctgctgggccccagcatggccagagagcccggcggcagaagccccgccttcgtgcagctggcccccctgagcagcaaggtgagactgagcagccccagcatcaaggacctgcccgccggcagacacagccacgccgtgagcaccgccgccatgaccagaagcagcgtgggcgccggcgagcccagaatggcccccgtgtgcgagagcctgcagggcggcagccccagcaccaccgtgaccgtgaccgccctggaggccctgctgtgccccagcgccaccgtgacccaggtgtgcagcaaccccccctgcgagacccacgagaccggcaccaccaacaccgccaccaccagcaacgccggcagcgcccagagagtgtgcagcaaccccccctgcgagacccacgagaccggcaccacccacaccgccaccaccgccaccagcaacggcggcaccggccagcccgagggcggccagcagccccccgccggcagaccctgcgagacccaccagaccaccagcaccggcaccaccatgagcgtgagcgtgggcgccctgctgcccgacgccaccagcagccacagaaccgtggagagcggcctggaggtggccgccgcccccagcgtgaccccccaggccggcaccgccctgctggcccccttccccacccagagagtgtgcagcaaccccccctgcgagacccacgagaccggcaccacccacaccgccaccaccgtgaccagcaacatgagcagcaaccaggaccccccccccgccgccagcgaccagggcgaggtggagagcacccagggcgacagcgtgaacatcaccagcagcagcgccatcaccaccaccgtgagcagcaccctgaccagagccgtgaccaccgtgacccagagcacccccgtgcccggccccagcgtgcccccccccgaggagctgcaggtgagccccggccccagacagcagctgccccccagacagctgctgcagagcgccagcaccgccctgatgggcgagagcgccgaggtgctgagcgccagccagacccccgagctgcccgccgccgtggacctgagcagcaccggcgagcccagcagcggccaggagagcgccggcagcgccgtggtggccaccgtggtggtgcagccccccccccccacccagagcgaggtggaccagctgagcctgccccaggagctgatggccgaggcccaggccggcaccaccaccctgatggtgaccggcctgacccccgaggagctggccgtgaccgccgccgccgaggccgccgcccaggccgccgccaccgaggaggcccaggccctggccatccaggccgtgctgcaggccgcccagcaggccgtgatgggcaccggcgagcccatggacaccagcgaggccgccgccaccgtgacccaggccgagctgggccacctgagcgccgagggccaggagggccaggccaccaccatccccatcgtgctgacccagcaggagctggccgccctggtgcagcagcagcagctgcaggaggcccaggcccagcagcagcaccaccacctgcccaccgaggccctggcccccgccgacagcctgaacgaccccgccatcgagagcaactgcctgaacgagctggccggcaccgtgcccagcaccgtggccctgctgcccagcaccgccaccgagagcctggcccccagcaacaccttcgtggccccccagcccgtggtggtggccagccccgccaagctgcaggccgccgccaccctgaccgaggtggccaacggcatcgagagcctgggcgtgaagcccgacctgccccccccccccagcaaggcccccatgaagaaggagaaccagtggttcgacgtgggcgtgatcaagggcaccaacgtgatggtgacccactacttcctgccccccgacgacgccgtgcccagcgacgacgacctgggcaccgtgcccgactacaaccagctgaagaagcaggagctgcagcccggcaccgcctacaagttcagagtggccggcatcaacgcctgcggcagaggccccttcagcgagatcagcgccttcaagacctgcctgcccggcttccccggcgccccctgcgccatcaagatcagcaagagccccgacggcgcccacctgacctgggagccccccagcgtgaccagcggcaagatcatcgagtacagcgtgtacctggccatccagagcagccaggccggcggcgagctgaagagcagcacccccgcccagctggccttcatgagagtgtactgcggccccagccccagctgcctggtgcagagcagcagcctgagcaacgcccacatcgactacaccaccaagcccgccatcatcttcagaatcgccgccagaaacgagaagggctacggccccgccacccaggtgagatggctgcaggagaccagcaaggacagcagcggcaccaagcccgccaacaagagacccatgagcagccccgagatgaagagcgcccccaagaagagcaaggccgacggccagtag

SEQ ID NO: 155019 - DNA, 5901 bp, Artificial Sequence
  derived and/or modified sequence
atggccagcgccgtgagccccgccaacctgcccgccgtgctgctgcagcccagatggaagagagtggtgggctggagcggccccgtgcccagacccagacacggccacagagccgtggccatcaaggagctgatcgtggtgttcggcggcggcaacgagggcatcgtggacgagctgcacgtgtacaacaccgccaccaaccagtggttcatccccgccgtgagaggcgacatcccccccggctgcgccgcctacggcttcgtgtgcgacggcaccagactgctggtgttcggcggcatggtggagtacggcaagtacagcaacgacctgtacgagctgcaggccagcagatgggagtggaagagactgaaggccaagacccccaagaacggcccccccccctgccccagactgggccacagcttcagcctggtgggcaacaagtgctacctgttcggcggcctggccaacgacagcgaggaccccaagaacaacatccccagatacctgaacgacctgtacatcctggagctgagacccggcagcggcgtggtggcctgggacatccccatcacctacggcgtgctgcccccccccagagagagccacaccgccgtggtgtacaccgagaaggacaacaagaagagcaagctggtgatctacggcggcatgagcggctgcagactgggcgacctgtggaccctggacatcgacaccctgacctggaacaagcccagcctgagcggcgtggcccccctgcccagaagcctgcacagcgccaccaccatcggcaacaagatgtacgtgttcggcggctgggtgcccctggtgatggacgacgtgaaggtggccacccacgagaaggagtggaagtgcaccaacaccctggcctgcctgaacctggacaccatggcctgggagaccatcctgatggacaccctggaggacaacatccccagagccagagccggccactgcgccgtggccatcaacaccagactgtacatctggagcggcagagacggctacagaaaggcctggaacaaccaggtgtgctgcaaggacctgtggtacctggagaccgagaagccccccccccccgccagagtgcagctggtgagagccaacaccaacagcctggaggccgcccccgccccccccaccaccaccaccatccaggtgctgcccaccgtgcccggcagcagcatcagcgtgcccaccgccgccagaacccagggcgtgcccgccgtgctgaaggtgaccggcccccaggccaccaccggcacccccctggtgaccatgagacccgccagccaggccggcaaggcccccgtgaccgtgaccagcctgcccgccggcgtgagaatggtggtgcccacccagagcgcccagggcaccgtgatcggcagcagcccccagatgagcggcatggccgccctggccgccgccgccgccgccacccagaagatcccccccagcagcgcccccaccgtgctgagcgtgcccgccggcaccaccatcgtgaagaccatggccgtgacccccggcaccaccaccctgcccgccaccgtgaaggtggccagcagccccgtgatggtgagcaaccccgccaccagaatgctgaagaccgccgccgcccaggtgggcaccagcgtgagcagcgccaccaacaccagcaccagacccatcatcaccgtgcacaagagcggcaccgtgaccgtggcccagcaggcccaggtggtgaccaccgtggtgggcggcgtgaccaagaccatcaccctggtgaagagccccatcagcgtgcccggcggcagcgccctgatcagcaacctgggcaaggtgatgagcgtggtgcagaccaagcccgtgcagaccagcgccgtgaccggccaggccagcaccggccccgtgacccagatcatccagaccaagggccccctgcccgccggcaccatcctgaagctggtgaccagcgccgacggcaagcccaccaccatcatcaccaccacccaggccagcggcgccggcaccaagcccaccatcctgggcatcagcagcgtgagccccagcaccaccaagcccggcaccaccaccatcatcaagaccatccccatgagcgccatcatcacccaggccggcgccaccggcgtgaccagcagccccggcatcaagagccccatcaccatcatcaccaccaaggtgatgaccagcggcaccggcgcccccgccaagatcatcaccgccgtgcccaagatcgccaccggccacggccagcagggcgtgacccaggtggtgctgaagggcgcccccggccagcccggcaccatcctgagaaccgtgcccatgggcggcgtgagactggtgacccccgtgaccgtgagcgccgtgaagcccgccgtgaccaccctggtggtgaagggcaccaccggcgtgaccaccctgggcaccgtgaccggcaccgtgagcaccagcctggccggcgccggcggccacagcaccagcgccagcctggccacccccatcaccaccctgggcaccatcgccaccctgagcagccaggtgatcaaccccaccgccatcaccgtgagcgccgcccagaccaccctgaccgccgccggcggcctgaccacccccaccatcaccatgcagcccgtgagccagcccacccaggtgaccctgatcaccgcccccagcggcgtggaggcccagcccgtgcacgacctgcccgtgagcatcctggccagccccaccaccgagcagcccaccgccaccgtgaccatcgccgacagcggccagggcgacgtgcagcccggcaccgtgaccctggtgtgcagcaaccccccctgcgagacccacgagaccggcaccaccaacaccgccaccaccaccgtggtggccaacctgggcggccacccccagcccacccaggtgcagttcgtgtgcgacagacaggaggccgccgccagcctggtgaccagcaccgtgggccagcagaacggcagcgtggtgagagtgtgcagcaaccccccctgcgagacccacgagaccggcaccaccaacaccgccaccaccgccaccagcaacatggccggccagcacggctgcagcaaccccccctgcgagacccacgagaccggcaccaccaacaccgccaccaccgccatgagcagcgtgggcgccaaccaccagagagacgccagaagagcctgcgccgccggcacccccgccgtgatcagaatcagcgtggccaccggcgccctggaggccgcccagggcagcaagagccagtgccagaccagacagaccagcgccaccagcaccaccatgaccgtgatggccaccggcgccccctgcagcgccggccccctgctgggccccagcatggccagagagcccggcggcagaagccccgccttcgtgcagctggcccccctgagcagcaaggtgagactgagcagccccagcatcaaggacctgcccgccggcagacacagccacgccgtgagcaccgccgccatgaccagaagcagcgtgggcgccggcgagcccagaatggcccccgtgtgcgagagcctgcagggcggcagccccagcaccaccgtgaccgtgaccgccctggaggccctgctgtgccccagcgccaccgtgacccaggtgtgcagcaaccccccctgcgagacccacgagaccggcaccaccaacaccgccaccaccagcaacgccggcagcgcccagagagtgtgcagcaaccccccctgcgagacccacgagaccggcaccacccacaccgccaccaccgccaccagcaacggcggcaccggccagcccgagggcggccagcagccccccgccggcagaccctgcgagacccaccagaccaccagcaccggcaccaccatgagcgtgagcgtgggcgccctgctgcccgacgccaccagcagccacagaaccgtggagagcggcctggaggtggccgccgcccccagcgtgaccccccaggccggcaccgccctgctggcccccttccccacccagagagtgtgcagcaaccccccctgcgagacccacgagaccggcaccacccacaccgccaccaccgtgaccagcaacatgagcagcaaccaggaccccccccccgccgccagcgaccagggcgaggtggagagcacccagggcgacagcgtgaacatcaccagcagcagcgccatcaccaccaccgtgagcagcaccctgaccagagccgtgaccaccgtgacccagagcacccccgtgcccggccccagcgtgcccccccccgaggagctgcaggtgagccccggccccagacagcagctgccccccagacagctgctgcagagcgccagcaccgccctgatgggcgagagcgccgaggtgctgagcgccagccagacccccgagctgcccgccgccgtggacctgagcagcaccggcgagcccagcagcggccaggagagcgccggcagcgccgtggtggccaccgtggtggtgcagccccccccccccacccagagcgaggtggaccagctgagcctgccccaggagctgatggccgaggcccaggccggcaccaccaccctgatggtgaccggcctgacccccgaggagctggccgtgaccgccgccgccgaggccgccgcccaggccgccgccaccgaggaggcccaggccctggccatccaggccgtgctgcaggccgcccagcaggccgtgatgggcaccggcgagcccatggacaccagcgaggccgccgccaccgtgacccaggccgagctgggccacctgagcgccgagggccaggagggccaggccaccaccatccccatcgtgctgacccagcaggagctggccgccctggtgcagcagcagcagctgcaggaggcccaggcccagcagcagcaccaccacctgcccaccgaggccctggcccccgccgacagcctgaacgaccccgccatcgagagcaactgcctgaacgagctggccggcaccgtgcccagcaccgtggccctgctgcccagcaccgccaccgagagcctggcccccagcaacaccttcgtggccccccagcccgtggtggtggccagccccgccaagctgcaggccgccgccaccctgaccgaggtggccaacggcatcgagagcctgggcgtgaagcccgacctgccccccccccccagcaaggcccccatgaagaaggagaaccagtggttcgacgtgggcgtgatcaagggcaccaacgtgatggtgacccactacttcctgccccccgacgacgccgtgcccagcgacgacgacctgggcaccgtgcccgactacaaccagctgaagaagcaggagctgcagcccggcaccgcctacaagttcagagtggccggcatcaacgcctgcggcagaggccccttcagcgagatcagcgccttcaagacctgcctgcccggcttccccggcgccccctgcgccatcaagatcagcaagagccccgacggcgcccacctgacctgggagccccccagcgtgaccagcggcaagatcatcgagtacagcgtgtacctggccatccagagcagccaggccggcggcgagctgaagagcagcacccccgcccagctggccttcatgagagtgtactgcggccccagccccagctgcctggtgcagagcagcagcctgagcaacgcccacatcgactacaccaccaagcccgccatcatcttcagaatcgccgccagaaacgagaagggctacggccccgccacccaggtgagatggctgcaggagaccagcaaggacagcagcggcaccaagcccgccaacaagagacccatgagcagccccgagatgaagagcgcccccaagaagagcaaggccgacggccagtag

SEQ ID NO: 155020 - protein, 486 aa, Artificial Sequence
  derived and/or modified sequence
MWKSVVGHDVSVSVETQGDDWDTDPDFVNDISEKEQRWGAKTIEGSGRTEHINIHQLRNKVSEEHDVLRKKEMESGPKASHGYGGRFGVERDRMDKSAVGHEYVAEVEKHSSQTDAAKGFGGKYGVERDRADKSAVGFDYKGEVEKHTSQKDYSRGFGGRYGVEKDKWDKAALGYDYKGETEKHESQRDYAKGFGGQYGIQKDRVDKSAVGFNEMEAPTTAYKKTTPIEAASSGTRGLKAKFESMAEEKRKREEEEKAQQVARRQQERKAVTKRSPEAPQPVIAMEEPAVPAPLPKKISSEAWPPVGTPPSSESEPVRTSREHPVPLLPIRQTLPEDNEEPPALPPRTLEGLQVEEEPVYEAEPEPEPEPEPEPENDYEDVEEMDRHEQEDEPEGDYEEVLEPEDSSFSSALAGSSGCPAGAGAGAVALGISAVAVYDYQGEGSDELSFDPDDVITDIEMVDEGWWRGRCHGHFGLFPANYVKLLE

SEQ ID NO: 155021 - DNA, 1461 bp, Artificial Sequence
  derived and/or modified sequence
atgtggaagagtgtcgtggggcatgacgtgtccgtgtctgtggagacccagggtgacgattgggataccgatccggattttgtaaatgatattagcgaaaaggagcagcgctggggagcaaaaacaatagaaggaagcggtcggaccgaacatatcaatattcatcagctgcgcaacaaagtgagtgaggaacatgacgtcctccgcaaaaaagagatggaatctggcccaaaggcatcccacggctatggtgggcggtttggcgtggaacgcgacaggatggacaagtccgccgtgggtcacgagtatgtcgcggaagtcgagaagcatagctcacagactgatgcagcgaaaggatttggcggcaaatacggggtggagcgcgacagggctgacaagtcagctgtgggattcgattacaagggcgaagtggagaagcacactagtcagaaagattacagccgcggctttggtggaagatacggagtggaaaaagacaagtgggataaagccgccctcggatacgactataagggagagactgagaaacacgaaagccagcgagattatgctaagggctttggtggccagtacggcatccaaaaagacagagtcgataaaagtgccgtggggttcaatgaaatggaggctcctaccaccgcgtacaaaaaaaccacgcccattgaagcggcttcttccggcacaagaggcctgaaggcgaagtttgaatccatggctgaggagaaacggaagagggaggaggaagagaaagctcagcaagtcgccaggaggcagcaggagcggaaagcggtgaccaagcggagtcccgaggcaccccagccagtgatagcgatggaagaacccgccgtgccagccccccttcccaaaaagatcagttcggaagcctggccgccggtcggaaccccaccttctagcgagagcgagccggtccgcacgtccagagagcacccagtgccactgctacccatcaggcagactcttccagaagacaatgaggaaccccctgccttacccccgcgcacactcgagggtctacaggtggaggaggagcctgtctacgaagctgagccggaacccgagccagagcccgagccagagccagagaatgattacgaggacgtagaggagatggaccgacacgaacaggaggacgaaccagagggcgactacgaggaggtgctggagccagaagactcctcttttagctcagctctcgccgggtctagtggctgtccggcaggcgccggcgccggggccgtggctctcggcatctccgcggttgctgtctacgactatcagggcgagggctccgatgagctgtcattcgaccctgatgatgtcatcacggacattgagatggtggacgaagggtggtggcggggaagatgtcacggacactttggattattccccgcaaactacgtcaaactcctagagtag

SEQ ID NO: 155022 - DNA, 2000 bp, Artificial Sequence
  derived and/or modified sequence
agtttctcactccgaagtggcagcagccagagagggagtcggtgtggacgcgaggagccgggcgcttagaacagaggcttgcacaggtggagatgtggaagtctgtagtgggccatgatgtgtctgtttccgtggagacccagggtgatgattgggacacagatcctgactttgtgaatgacatctctgaaaaggagcaacgatggggagccaagaccatcgaggggtctggacgcacagaacacatcaacatccaccagctgaggaacaaagtatcagaggagcatgatgttctcaggaagaaagagatggagtcagggcccaaagcatcccatggctatggaggtcggtttggagtagaaagagaccgaatggacaagagtgcagtgggccatgagtatgttgccgaggtggagaagcactcttctcagacggatgctgccaaaggctttgggggcaagtacggagttgagagggacagggcagacaagtcagcagtcggctttgattataaaggagaagtggagaagcacacatctcagaaagattactctcgtggctttggtggccggtacggggtggagaaggataaatgggacaaagcagctctgggatatgactacaagggagagacggagaaacacgagtcccagagagattatgccaagggctttggtggccagtatggaatccagaaggaccgagtggataagagcgctgtcggcttcaatgaaatggaggccccgaccacagcttataagaagacgacgcccatagaagccgcttctagtggtacccgtgggctgaaggcgaaatttgagtccatggctgaggagaagaggaagcgagaggaagaggagaaggcacagcaggtggccaggaggcaacaggagcgaaaggctgtgacaaagaggagccctgaggctccacagccagtgatagctatggaagagccagcagtaccggccccactgcccaagaaaatctcctcagaggcctggcctccagttgggactcctccatcatcagagtctgagcctgtgagaaccagcagggaacacccagtgcccttgctgcccattaggcagactctcccggaggacaatgaggagcccccagctctgccccctaggactctggaaggcctccaggtggaggaagagccagtgtacgaagcagagcctgagcctgagcccgagcctgagcccgagcctgagaatgactatgaggacgttgaggagatggacaggcatgagcaggaggatgaaccagagggggactatgaggaggtgctcgagcctgaagattcttctttttcttctgctctggctggatcatcaggctgcccggctggggctggggctggggctgtggctctggggatctcagctgtggctgtatatgattaccaaggagagggaagtgatgagctttcctttgatccggacgacgtaatcactgacattgagatggtggacgagggctggtggcggggacgttgccatggccactttggactcttccctgcaaattatgtcaagcttctggagtgactagagctcactgtctactgcaactgtgatttcccatgtccaaagtggctctgcctccaccccctccctattcctgctgcaaatgtctaaccagatgaggttctggacagacttccctctcctgcttcattaagggcttggggcagagacagcatggggaaggaggtccccttccccaagagtcctctctatcctggatgagctcatgaacatttctcttgtgttcctgactccttcccaatgaacacctctctgccaccccaagctctgctctcctcctctgtgagctctgggcttcccagtttgtttacccgggaaagtacgtctagattgtgtggtttgcctcattgtgctatttgcccactttccttccctgaagaaatatctgaaccttctttctgttcagtcctaaaattcgaaataaagtgagactatggttcacctgta

SEQ ID NO: 155023 - DNA, 1461 bp, Artificial Sequence
  derived and/or modified sequence
atgtggaagtctgtggtgggccatgatgtgtctgtgtctgtggagacccagggagatgactgggacacagatcctgactttgtgaatgacatcagcgagaaggagcagcgctggggcgccaagaccatcgagggcagcggccgcacagagcacatcaacatccaccagctgaggaacaaggtgtctgaggagcatgatgtgctgaggaagaaggagatggagagcggccccaaggccagccacggctatggaggccgctttggagtggagcgggacaggatggacaagtctgctgtgggccatgaatatgtggccgaggtggagaagcacagcagccagacagatgctgccaagggctttggaggcaagtatggagtggagcgggacagagctgacaagtctgctgtgggctttgactacaagggggaggtggagaagcacaccagccagaaggactacagccggggctttggaggccgctatggagtggagaaggacaagtgggacaaggccgccctgggctatgactacaagggggagacagagaagcatgagagccagagggactatgccaagggctttggaggccagtatggcatccagaaggacagagtggacaagtctgctgtgggcttcaatgagatggaggcccccaccacagcctacaagaagaccacccccatcgaggccgccagcagcggcacccggggcctgaaggccaagtttgagagcatggccgaggagaagaggaagcgggaggaggaggagaaggcccagcaggtggcccggcggcagcaggagaggaaggctgtgaccaagaggagccctgaggccccccagcctgtgattgccatggaggagcctgctgtgcctgcccccctgcccaagaagatcagcagcgaggcctggccccctgtgggcaccccacccagcagcgagagcgagcctgtgaggaccagccgggagcaccctgtgcccctgctgcccatccggcagaccctgcctgaggacaatgaggagcccccagccctgccccccaggaccctggagggcctgcaggtggaggaggagcctgtgtatgaggccgagcctgagcctgagcctgagcctgagcctgagccagaaaatgactatgaagatgtggaggagatggacagacatgagcaggaggatgagcctgagggggactatgaggaggtgctggagcctgaggacagcagcttcagcagcgccctggccggcagcagcggctgcccagctggggccggggccggggctgtggccctgggcatctctgctgtggccgtgtatgactaccagggcgagggcagtgatgagctgagctttgatcctgatgatgtgatcacagacatcgagatggtggatgagggctggtggaggggccgctgccacggccacttcggcctcttccctgccaactacgtgaagctgctggagtag

SEQ ID NO: 155024 - DNA, 1461 bp, Artificial Sequence
  derived and/or modified sequence
atgtggaagagcgtggtgggccacgacgtgagcgtgagcgtggagacgcagggagacgattgggacacagacccggactttgttaacgacatcagtgaaaaggagcagaggtggggcgccaagaccatcgaagggagcggaagaaccgaacatattaatatccatcagctccgaaacaaggtctccgaagaacacgatgtgctgaggaaaaaagaaatggaatcgggtccaaaagctagccatgggtatggaggacgcttcggcgtggaaagagaccggatggacaagagcgccgtcggtcatgaatatgttgcggaggtggagaagcacagttctcaaacagacgcagctaagggctttggaggaaagtacggtgtggaacgcgatcgtgccgataagtccgctgtgggctttgattacaaaggcgaggtcgagaaacacaccagtcagaaggattattccaggggcttcggcggacgctacggcgtagaaaaggacaaatgggataaagctgctctgggctatgactataagggagagaccgaaaaacatgagagccagcgggactatgctaaagggtttgggggccagtacgggatccagaaagaccgcgtcgacaaaagcgccgtcggtttcaacgagatggaggcccccactacagcttacaaaaagaccactccaattgaggccgcttcgtccggaacgaggggtctcaaggccaaatttgagagcatggccgaagagaaaagaaaacgcgaggaagaggaaaaagctcagcaggtcgcaaggcgccagcaagagcgaaaagccgtgactaaaagatctcccgaggctcctcagccggtgattgccatggaggagcctgccgtacctgccccgctgcctaagaagattagcagtgaagcctggcctcccgtcggaacccctccatccagtgagtccgagcccgtcagaacttccagagaacacccggtgcctctactccccatccggcaaacactgcctgaggacaatgaggaaccaccggccttgccccccaggaccctggaagggctgcaggtggaagaagagcctgtatacgaggctgaacccgaaccagaacccgaaccagagcctgaaccagaaaacgattatgaggacgtcgaggagatggatcggcacgaacaggaagatgaacccgagggcgattacgaggaagtgcttgaacctgaggattcatctttcagtagcgcccttgcaggaagcagcggatgtcccgccggggcgggcgccggcgcagtggccctgggcattagtgctgtggctgtgtatgattaccagggggaaggctcagatgaactcagttttgatcctgacgacgtaataactgatattgaaatggttgatgagggctggtggcgcgggagatgtcacggccatttcggcctgttcccagctaattacgttaagctgctcgagtag

SEQ ID NO: 155025 - DNA, 1461 bp, Artificial Sequence
  derived and/or modified sequence
atgtggaaatctgtcgttgggcatgacgtgtcagtctctgttgaaactcagggtgacgactgggacacagatccggacttcgttaacgatatttcagaaaaggagcaaaggtggggggctaagaccatcgaagggagtgggcgaaccgagcacattaacatccaccagttgaggaacaaggtgtccgaagagcatgacgtgctgcggaagaaggaaatggagagcgggcctaaggcttcgcatggatatggaggtaggttcggcgtggaaagagataggatggacaagtccgctgtgggccacgagtatgttgccgaggtcgagaagcatagcagtcagacagatgcagcaaaaggctttgggggtaagtacggcgttgagagagatcgcgctgacaaatctgcagtaggattcgattataaaggagaggtggaaaagcacacaagccagaaagactacagtagaggattcgggggaagatacggagtcgagaaagacaagtgggataaagcggcacttggttatgattataaaggcgagacggaaaaacacgaatctcagagagactacgccaaagggttcggcggacagtacggcattcagaaagaccgagtggataaatccgcggttgggtttaatgaaatggaggctccaactaccgcatacaagaagacgactcccatagaagcagcttcctctggaacaagaggtctgaaagccaagtttgaaagtatggcagaggagaagaggaaacgggaggaggaggagaaggcacaacaggtggccaggcggcagcaggaacgtaaagcagttaccaagcgtagtccagaagctcctcagcccgtgatcgcaatggaggagccagccgtgccggctccactgcctaagaagattagctctgaagcctggccccctgtcggcaccccccctagctccgagtccgagccagtgcgcacatcgcgggaacaccccgtgccactgctgcctatacggcaaaccctgcctgaagataacgaggaacctcctgccctgcctccgagaacgctcgagggtttacaggtggaggaggaacctgtatacgaagctgaacctgaacccgagccagagccggagcctgaacctgagaacgactatgaggacgtggaagagatggataggcacgaacaggaggacgaacctgaaggcgattacgaagaggttctggaaccggaagactcctcattctcctcagcattggctggatccagtggctgtcccgctggagccggtgccggtgccgttgctctggggataagcgctgtggccgtgtacgattatcagggagagggatccgatgagctgtcttttgacccagacgacgtgattactgacattgagatggtggatgagggatggtggagaggaaggtgccatggacattttggcctgttcccagccaactatgtgaagctgctagagtag

SEQ ID NO: 155026 - DNA, 1461 bp, Artificial Sequence
  derived and/or modified sequence
atgtggaagagcgtggtgggccacgacgtgagcgtgagcgtggagacccagggcgacgactgggacaccgaccccgacttcgtgaacgacatcagcgagaaggagcagagatggggcgccaagaccatcgagggcagcggcagaaccgagcacatcaacatccaccagctgagaaacaaggtgagcgaggagcacgacgtgctgagaaagaaggagatggagagcggccccaaggccagccacggctacggcggcagattcggcgtggagagagacagaatggacaagagcgccgtgggccacgagtacgtggccgaggtggagaagcacagcagccagaccgacgccgccaagggcttcggcggcaagtacggcgtggagagagacagagccgacaagagcgccgtgggcttcgactacaagggcgaggtggagaagcacaccagccagaaggactacagcagaggcttcggcggcagatacggcgtggagaaggacaagtgggacaaggccgccctgggctacgactacaagggcgagaccgagaagcacgagagccagagagactacgccaagggcttcggcggccagtacggcatccagaaggacagagtggacaagagcgccgtgggcttcaacgagatggaggcccccaccaccgcctacaagaagaccacccccatcgaggccgccagcagcggcaccagaggcctgaaggccaagttcgagagcatggccgaggagaagagaaagagagaggaggaggagaaggcccagcaggtggccagaagacagcaggagagaaaggccgtgaccaagagaagccccgaggccccccagcccgtgatcgccatggaggagcccgccgtgcccgcccccctgcccaagaagatcagcagcgaggcctggccccccgtgggcaccccccccagcagcgagagcgagcccgtgagaaccagcagagagcaccccgtgcccctgctgcccatcagacagaccctgcccgaggacaacgaggagccccccgccctgccccccagaaccctggagggcctgcaggtggaggaggagcccgtgtacgaggccgagcccgagcccgagcccgagcccgagcccgagcccgagaacgactacgaggacgtggaggagatggacagacacgagcaggaggacgagcccgagggcgactacgaggaggtgctggagcccgaggacagcagcttcagcagcgccctggccggcagcagcggctgccccgccggcgccggcgccggcgccgtggccctgggcatcagcgccgtggccgtgtacgactaccagggcgagggcagcgacgagctgagcttcgaccccgacgacgtgatcaccgacatcgagatggtggacgagggctggtggagaggcagatgccacggccacttcggcctgttccccgccaactacgtgaagctgctggagtag

SEQ ID NO: 155027 - protein, 1127 aa, Artificial Sequence
  derived and/or modified sequence
MSLTSAYQHKLAEKLTILNDRGQGVLIRMYNIKKTCSDPKSKPPFLLEKSMEPSLKYINKKFPNIDVRNSTQHLGPVHREKAEIIRFLTNYYQSFVDVMEFRDHVYELLNTIDACQCHFDINLNFDFTRSYLDLIVTYTSVILLLSRIEDRRILIGMYNCAHEMLHGHGDPSFARLGQMVLEYDHPLKKLTEEFGPHTKAVSGALLSLHFLFVRRNQGAEQWRSAQLLSLISNPPAMINPANSDTMACEYLSVEVMERWIIIGFLLCHGCLNSNSQCQKLWKLCLQGSLYITLIREDVLQVHKVTEDLFSSLKGYGKRVADIKESKEHVIANSGQFHCQRRQFLRMAVKELETVLADEPGLLGPKALFAFMALSFIRDEVTWLVRHTENVTKTKTPEDYADSSIAELLFLLEGIRSLVRRHIKVIQQYHLQYLARFDALVLSDIIQNLSVCPEEESIIMSSFVSILSSLNLKQVDNGEKFEFSGLRLDWFRLQAYTSVAKAPLHLHENPDLAKVMNLIVFHSRMLDSVEKLLVETSDLSTFCFHLRIFEKMFAMTLEESAMLRYAIAFPLICAHFVHCTHEMCPEEYPHLKNHGLHHCNSFLEELAKQTSNCVLEICAEQRNLSEQLLPKHCATTISKAKNKKTRKQRQTPRKGEPERDKPGAESHRKNRSIVTNMDKLHLNLTELALTMNHVYSFSVFEHTIFPSEYLSSHLEARLNRAIVWLAGYNATTQEIVRPSELLAGVKAYIGFIQSLAQFLGADASRVIRNALLQQTQPLDSCGEQTITTLYTNWYLESLLRQASSGTIILSPAMQAFVSLPREGEQNFSAEEFSDISEMRALAELLGPYGMKFLSENLMWHVTSQIVELKKLVVENMDILVQIRSNFSKPDLMASLLPQLTGAENVLKRMTIIGVILSFRAMAQEGLREVFSSHCPFLMGPIECLKEFVTPDTDIKVTLSIFELASAAGVGCDIDPALVAAIANLKADTSSPEEEYKVACLLLIFLAVSLPLLATDPSSFYSIEKDGYNNNIHCLTKAIIQVSAALFTLYNKNIETHLKEFLVVASVSLLQLGQETDKLKTRNRESISLLMRLVVEESSFLTLDMLESCFPYVLLRNAYREVSRAFHLN

SEQ ID NO: 155028 - protein, 1077 aa, Artificial Sequence
  derived and/or modified sequence
MEPSLKYINKKFPNIDVRNSTQHLGPVHREKAEIIRFLTNYYQSFVDVMEFRDHVYELLNTIDACQCHFDINLNFDFTRSYLDLIVTYTSVILLLSRIEDRRILIGMYNCAHEMLHGHGDPSFARLGQMVLEYDHPLKKLTEEFGPHTKAVSGALLSLHFLFVRRNQGAEQWRSAQLLSLISNPPAMINPANSDTMACEYLSVEVMERWIIIGFLLCHGCLNSNSQCQKLWKLCLQGSLYITLIREDVLQVHKVTEDLFSSLKGYGKRVADIKESKEHVIANSGQFHCQRRQFLRMAVKELETVLADEPGLLGPKALFAFMALSFIRDEVTWLVRHTENVTKTKTPEDYADSSIAELLFLLEGIRSLVRRHIKVIQQYHLQYLARFDALVLSDIIQNLSVCPEEESIIMSSFVSILSSLNLKQVDNGEKFEFSGLRLDWFRLQAYTSVAKAPLHLHENPDLAKVMNLIVFHSRMLDSVEKLLVETSDLSTFCFHLRIFEKMFAMTLEESAMLRYAIAFPLICAHFVHCTHEMCPEEYPHLKNHGLHHCNSFLEELAKQTSNCVLEICAEQRNLSEQLLPKHCATTISKAKNKKTRKQRQTPRKGEPERDKPGAESHRKNRSIVTNMDKLHLNLTELALTMNHVYSFSVFEHTIFPSEYLSSHLEARLNRAIVWLAGYNATTQEIVRPSELLAGVKAYIGFIQSLAQFLGADASRVIRNALLQQTQPLDSCGEQTITTLYTNWYLESLLRQASSGTIILSPAMQAFVSLPREGEQNFSAEEFSDISEMRALAELLGPYGMKFLSENLMWHVTSQIVELKKLVVENMDILVQIRSNFSKPDLMASLLPQLTGAENVLKRMTIIGVILSFRAMAQEGLREVFSSHCPFLMGPIECLKEFVTPDTDIKVTLSIFELASAAGVGCDIDPALVAAIANLKADTSSPEEEYKVACLLLIFLAVSLPLLATDPSSFYSIEKDGYNNNIHCLTKAIIQVSAALFTLYNKNIETHLKEFLVVASVSLLQLGQETDKLKTRNRESISLLMRLVVEESSFLTLDMLESCFPYVLLRNAYREVSRAFHLN

SEQ ID NO: 155029 - DNA, 3384 bp, Artificial Sequence
  derived and/or modified sequence
atgagcctgaccagcgcctaccagcacaagctggccgagaagctgaccatcctgaacgacagaggccagggcgtgctgatcagaatgtacaacatcaagaagacctgcagcgaccccaagagcaagccccccttcctgctggagaagagcatggagcccagcctgaagtacatcaacaagaagttccccaacatcgacgtgagaaacagcacccagcacctgggccccgtgcacagagagaaggccgagatcatcagattcctgaccaactactaccagagcttcgtggacgtgatggagttcagagaccacgtgtacgagctgctgaacaccatcgacgcctgccagtgccacttcgacatcaacctgaacttcgacttcaccagaagctacctggacctgatcgtgacctacaccagcgtgatcctgctgctgagcagaatcgaggacagaagaatcctgatcggcatgtacaactgcgcccacgagatgctgcacggccacggcgaccccagcttcgccagactgggccagatggtgctggagtacgaccaccccctgaagaagctgaccgaggagttcggcccccacaccaaggccgtgagcggcgccctgctgagcctgcacttcctgttcgtgagaagaaaccagggcgccgagcagtggagaagcgcccagctgctgagcctgatcagcaacccccccgccatgatcaaccccgccaacagcgacaccatggcctgcgagtacctgagcgtggaggtgatggagagatggatcatcatcggcttcctgctgtgccacggctgcctgaacagcaacagccagtgccagaagctgtggaagctgtgcctgcagggcagcctgtacatcaccctgatcagagaggacgtgctgcaggtgcacaaggtgaccgaggacctgttcagcagcctgaagggctacggcaagagagtggccgacatcaaggagagcaaggagcacgtgatcgccaacagcggccagttccactgccagagaagacagttcctgagaatggccgtgaaggagctggagaccgtgctggccgacgagcccggcctgctgggccccaaggccctgttcgccttcatggccctgagcttcatcagagacgaggtgacctggctggtgagacacaccgagaacgtgaccaagaccaagacccccgaggactacgccgacagcagcatcgccgagctgctgttcctgctggagggcatcagaagcctggtgagaagacacatcaaggtgatccagcagtaccacctgcagtacctggccagattcgacgccctggtgctgagcgacatcatccagaacctgagcgtgtgccccgaggaggagagcatcatcatgagcagcttcgtgagcatcctgagcagcctgaacctgaagcaggtggacaacggcgagaagttcgagttcagcggcctgagactggactggttcagactgcaggcctacaccagcgtggccaaggcccccctgcacctgcacgagaaccccgacctggccaaggtgatgaacctgatcgtgttccacagcagaatgctggacagcgtggagaagctgctggtggagaccagcgacctgagcaccttctgcttccacctgagaatcttcgagaagatgttcgccatgaccctggaggagagcgccatgctgagatacgccatcgccttccccctgatctgcgcccacttcgtgcactgcacccacgagatgtgccccgaggagtacccccacctgaagaaccacggcctgcaccactgcaacagcttcctggaggagctggccaagcagaccagcaactgcgtgctggagatctgcgccgagcagagaaacctgagcgagcagctgctgcccaagcactgcgccaccaccatcagcaaggccaagaacaagaagaccagaaagcagagacagacccccagaaagggcgagcccgagagagacaagcccggcgccgagagccacagaaagaacagaagcatcgtgaccaacatggacaagctgcacctgaacctgaccgagctggccctgaccatgaaccacgtgtacagcttcagcgtgttcgagcacaccatcttccccagcgagtacctgagcagccacctggaggccagactgaacagagccatcgtgtggctggccggctacaacgccaccacccaggagatcgtgagacccagcgagctgctggccggcgtgaaggcctacatcggcttcatccagagcctggcccagttcctgggcgccgacgccagcagagtgatcagaaacgccctgctgcagcagacccagcccctggacagctgcggcgagcagaccatcaccaccctgtacaccaactggtacctggagagcctgctgagacaggccagcagcggcaccatcatcctgagccccgccatgcaggccttcgtgagcctgcccagagagggcgagcagaacttcagcgccgaggagttcagcgacatcagcgagatgagagccctggccgagctgctgggcccctacggcatgaagttcctgagcgagaacctgatgtggcacgtgaccagccagatcgtggagctgaagaagctggtggtggagaacatggacatcctggtgcagatcagaagcaacttcagcaagcccgacctgatggccagcctgctgccccagctgaccggcgccgagaacgtgctgaagagaatgaccatcatcggcgtgatcctgagcttcagagccatggcccaggagggcctgagagaggtgttcagcagccactgccccttcctgatgggccccatcgagtgcctgaaggagttcgtgacccccgacaccgacatcaaggtgaccctgagcatcttcgagctggccagcgccgccggcgtgggctgcgacatcgaccccgccctggtggccgccatcgccaacctgaaggccgacaccagcagccccgaggaggagtacaaggtggcctgcctgctgctgatcttcctggccgtgagcctgcccctgctggccaccgaccccagcagcttctacagcatcgagaaggacggctacaacaacaacatccactgcctgaccaaggccatcatccaggtgagcgccgccctgttcaccctgtacaacaagaacatcgagacccacctgaaggagttcctggtggtggccagcgtgagcctgctgcagctgggccaggagaccgacaagctgaagaccagaaacagagagagcatcagcctgctgatgagactggtggtggaggagagcagcttcctgaccctggacatgctggagagctgcttcccctacgtgctgctgagaaacgcctacagagaggtgagcagagccttccacctgaactag

SEQ ID NO: 155030 - DNA, 3384 bp, Artificial Sequence
  derived and/or modified sequence
atgtccttgacaagcgcataccaacataagcttgctgagaagctgaccatcttgaatgacaggggacagggtgtcctcatacggatgtacaacatcaaaaagacctgctccgacccaaaaagtaagccaccgtttctgctggagaaaagcatggagcctagcctaaagtacattaacaagaaattccctaacattgacgtgcgcaactctacccagcacttgggacccgtccaccgggagaaagctgagattattagatttcttaccaactactatcaaagcttcgtcgacgtcatggagtttagagatcacgtgtacgaacttctgaataccatcgatgcctgtcaatgtcattttgatatcaatttaaatttcgactttacacgatcatatctggacctgatagtcacatataccagcgtgattttgcttctgagcaggatcgaggaccgacggattttaataggcatgtacaattgtgctcacgagatgctccacggacacggcgatcctagtttcgctcgccttggtcagatggtcctggagtacgatcaccccctgaagaagctcactgaagagtttggacctcacacaaaggcagtaagtggagccctcctgagcctgcactttctattcgtccgtcgcaaccagggagctgaacagtggaggtcagcacagctcctgtccctgatttccaacccgcctgcgatgatcaaccctgccaattcggacactatggcatgtgaatatttgtctgtggaggtcatggagcgctggatcatcattggcttcctgttgtgtcatgggtgtctcaattcaaatagccagtgccagaagctgtggaaactatgtctccaggggtctctgtatatcactctgatccgtgaagacgtgctccaggtgcacaaggtgaccgaagatcttttctcatcactgaaaggctatggcaaaagagtagctgacatcaaggagagcaaagagcatgtgatagccaactctgggcagttccactgccagaggaggcagttcctgcgcatggccgttaaggagctggagaccgtcttggccgacgagccaggtttgctgggccctaaggccctgtttgcttttatggccctgagcttcattcgagatgaagtcacctggttggtgagacacacagaaaatgtaacaaaaactaagactcccgaggattatgcggactcatctattgccgagctgctgtttctgctggaaggcattaggagcctagtccggagacacatcaaggtcattcaacagtatcatctgcaatacctggcccgctttgatgccctcgtgctaagtgatatcatccagaacctatccgtgtgcccagaggaagaatctatcatcatgtctagctttgtctccattctgtccagccttaacctaaagcaggtcgacaacggagaaaagtttgagttttcaggactgagactagattggtttcgactgcaagcttacacttccgtcgcaaaggcccccctgcacttacatgaaaatcctgatctggcgaaagtgatgaacttaatcgtttttcacagcaggatgttggacagtgttgagaagctactggtggagacatctgatttgagcactttctgtttccatctgagaatctttgagaagatgtttgccatgaccttggaggaatcagcgatgttgaggtatgccatagctttccccctaatctgcgctcactttgtccattgtacacacgaaatgtgtccagaggagtacccgcacctaaagaaccatggcctccaccactgcaactccttcctcgaggagctcgccaagcaaacctcaaactgtgtgctggagatttgtgccgaacagaggaatctatcagagcagcttctcccaaagcactgcgcgacgactatttccaaggctaagaataagaaaactcggaagcagcggcaaacccccagaaaaggggagcccgagagggataaaccgggggcagaaagccaccgcaagaatcgcagtatcgtgactaacatggataagctgcatctgaatctgactgagctggcactcacgatgaaccacgtctattctttttctgtgttcgaacacaccatttttccatccgagtatcttagttctcacttggaggcccggcttaatagagctatcgtatggctagccggctataatgctactactcaagaaatcgtgcggccatccgagctactagctggagtaaaggcttatataggctttatccaatctctggcccaattcctcggtgctgatgcatcccgtgtgattagaaacgctcttcttcagcaaacgcagcccctggacagctgtggggaacaaacaatcaccaccctgtacactaactggtacctggaatcactgctacgccaagcatcctccggaactatcatcctcagtccagctatgcaggcctttgtgagtctgccaagagagggagagcaaaatttttctgctgaagaattcagcgacatatccgagatgcgtgctctcgccgaactgttgggcccatacgggatgaaattcctgtccgaaaacctgatgtggcatgttactagccagattgtggaactcaaaaagttagtggtggaaaacatggatatactggtgcagatccgcagcaatttcagcaagcctgatcttatggctagtctgcttccgcaactcactggcgccgaaaatgttctgaaaaggatgaccatcatcggcgtgatcctgtcctttagggcgatggcacaagaaggccttagggaggtctttagcagccactgcccctttcttatggggcctatcgagtgcctgaaggaattcgtgacccccgatactgacatcaaggtcacactaagcatcttcgagctggcgtccgccgccggtgtggggtgcgatattgaccccgcattagtggctgcaattgccaatcttaaagccgatacttcctcccctgaggaggaatataaagtggcttgcttgctgctgatctttctggcggtcagcctgcccctcctggccaccgacccatccagcttctactccattgaaaaagatgggtacaataataacattcattgcttgacgaaggccatcatccaggtcagcgccgcattatttaccctctataataagaatattgaaacccacctaaaagagtttctggtggtggcctctgttagcttattacaactcggacaggagacagacaaattaaaaaccagaaaccgagaatcaatcagtctgcttatgagacttgttgtggaggagtcaagctttctgacattggacatgctagagtcatgcttcccgtacgtcctgcttaggaatgcctaccgagaggtctcccgggccttccatctgaattag

SEQ ID NO: 155031 - DNA, 3384 bp, Artificial Sequence
  derived and/or modified sequence
atgagcctgaccagcgcctaccagcacaagctggccgagaagctgaccatcctgaatgaccggggccagggcgtgctgatccgcatgtacaacatcaagaagacctgcagcgaccccaagagcaagccacccttcctgctggagaagtccatggagcccagcctgaagtacatcaacaagaagttccccaacattgatgtgaggaacagcacccagcacctgggccctgtgcaccgggagaaggccgagatcatccgcttcctgaccaactactaccagagctttgtggatgtgatggagttccgggaccacgtgtatgagctgctgaacaccattgatgcctgccagtgccactttgacatcaacctgaactttgacttcaccaggagctacctggacctgattgtgacctacaccagcgtcatcctgctgctgagcagaattgaagatcggcgcatcctgattggcatgtacaactgtgcccacgagatgctgcacggccacggggaccccagctttgcccggctgggccagatggtgctggagtatgaccaccccctgaagaagctgacagaggagtttggcccccacaccaaggctgtgtctggggccctgctgagcctgcacttcctgtttgtgagaagaaaccagggcgctgagcagtggaggtctgcccagctgctgagcctcatcagcaaccccccagccatgatcaacccagccaacagcgacaccatggcctgtgagtacctgtctgtggaggtgatggagcgctggatcatcatcggcttcctgctgtgccacggctgcctgaacagcaacagccagtgccagaagctgtggaagctgtgcctgcagggcagcctgtacatcaccctcatccgggaggatgtgctgcaggtgcacaaggtgacagaggacctcttcagcagcctgaagggctacggcaagagggtggccgacatcaaggagagcaaggagcacgtgattgccaacagcggccagttccactgccagaggcggcagttcctgaggatggctgtgaaggagctggagaccgtgctggctgatgagcccggcctgctgggccccaaggccctgtttgccttcatggccctgtccttcatcagagatgaggtgacctggctggtgcgccacacagaaaatgtgaccaagaccaagaccccagaagattatgctgacagcagcattgctgagctgctcttcctgctggagggcatccgcagcctggtgagaagacacatcaaggtgatccagcagtaccacctgcagtacctggccaggtttgatgccctggtgctgagtgacatcatccagaacctgtctgtgtgcccagaggaggagagcatcatcatgagcagctttgtgtccatcctgagcagcctgaacctgaagcaggtggacaacggggagaagtttgagttcagcggcctgcggctggactggttccggctgcaggcctacacctctgtggccaaggcccccctgcacctgcatgaaaatccagacctggccaaggtgatgaacctgattgtgttccacagcaggatgctggacagcgtggagaagctgctggtggagaccagtgacctgagcaccttctgcttccacctgcgcatctttgagaagatgtttgccatgaccctggaggagagcgccatgctgcgctatgccatcgccttccccctcatctgtgcccactttgtgcactgcacccatgagatgtgcccagaggagtacccccacctgaagaaccacggcctgcaccactgcaacagcttcctggaggagctggccaagcagaccagcaactgtgtgctggagatctgtgccgagcagaggaacctgtctgagcagctgctgcccaagcactgtgccaccaccatcagcaaggccaagaacaagaagaccaggaagcagaggcagacccccaggaaaggagagcctgagcgggacaagccaggagctgagagccacaggaagaacagaagcatcgtgaccaacatggacaagctgcacctgaacctgacagagctggccctgaccatgaaccacgtgtacagcttctctgtgtttgagcacaccatcttccccagcgagtacctgagcagccacctggaggcccggctgaacagagccatcgtgtggctggccggctacaatgccaccacccaggagatcgtgcggcccagcgagctgctggccggcgtgaaggcctacatcggcttcatccagagcctggcccagttcctgggcgcagatgccagcagggtcatcagaaatgccctgctgcagcagacccagcccctggacagctgtggggagcagaccatcaccaccctgtacaccaactggtacctggagagcctgctgcggcaggccagcagcggcaccatcatcctgagccctgccatgcaggcctttgtgtccctgccccgggagggggagcagaacttctctgctgaggagttcagtgacatcagcgagatgagggccctggccgagctgctgggcccctacggcatgaagttcctgtctgagaacctgatgtggcacgtgaccagccagatcgtggagctgaagaagctggtggtggagaacatggacatcctggtgcagatccgcagcaacttcagcaagccagacctgatggccagcctgctgccccagctgactggagcagaaaatgtgctgaagaggatgaccatcattggagtcatcctgtccttccgggccatggcccaggagggcctgcgggaggtgttcagcagccactgccccttcctgatgggccccattgaatgtctgaaggagtttgtgaccccagacacagacatcaaggtgaccctgagcatctttgagctggccagcgctgctggggtgggctgtgacatcgaccctgccctggtggccgccatcgccaacctgaaggctgacaccagcagccctgaggaggagtacaaggtggcctgcctgctgctgatcttcctggccgtgtccctgcccctgctggccacagaccccagcagcttctacagcattgagaaggatggctacaacaacaacatccactgcctgaccaaggccatcatccaggtgtctgctgccctcttcaccctgtacaacaagaacatcgagacccacctgaaggagttcctggtggtggcctctgtgtccctgctgcagctgggccaggagacagacaagctgaagaccaggaaccgggagagcatcagcctgctgatgaggctggtggtggaggagagcagcttcctgaccctggacatgctggagagctgcttcccctacgtgctgctgagaaatgcctaccgggaggtgtcccgggccttccacctgaactag

SEQ ID NO: 155032 - DNA, 4720 bp, Artificial Sequence
  derived and/or modified sequence
agagggtgtcaccatctaagctgaaagtgtttggggagatcagacattgctgtctggtgctcctctctcagtggccatcatgtctttgacatctgcttaccagcataaattagcagagaagctcactatcctgaatgatcgcggtcagggggttctcatccgtatgtataacatcaagaagacttgttcagaccccaaatctaagccacctttcttactggaaaagtccatggaaccatctctcaagtatatcaacaagaaatttcccaacatagatgtccgaaacagcacgcaacatttaggaccagtacatcgtgaaaaagccgagataattagattcctcaccaactactaccagtcatttgtggatgtcatggaatttcgggatcatgtatatgaacttctcaacaccattgatgcctgccagtgccattttgatatcaatctcaactttgatttcactcggagttacctggacttgattgtaacttacacctcagtcattttacttctgtcacggattgaagatcggcggatactcattggcatgtacaattgtgcccatgagatgctgcatgggcatggtgaccccagttttgcccgtctgggtcagatggtcttggagtatgaccaccctctgaagaagctgacagaagagtttgggcctcacacaaaggctgtgagtggagccctcctctctttgcatttcctctttgtccgaagaaaccagggggctgagcagtggcgcagtgcccaacttctaagcctcatcagcaaccccccagccatgattaaccctgctaattcagatacaatggcctgtgagtatctgtctgtggaagtaatggagcgctggattatcattgggtttcttctttgtcatgggtgcctcaactccaatagccagtgccagaagctgtggaagctgtgtctgcagggctccctctacatcacccttatccgtgaggatgtgctgcaggtgcacaaagtcaccgaggacctgtttagcagtttgaaagggtatggcaagagagtggcagacataaaggagagcaaggaacatgtaattgcaaacagtggccagtttcattgtcaacggcggcaatttctgcggatggcagtgaaggagctggagactgtgttggctgatgaaccgggactactgggtcctaaggctctttttgctttcatggccctgtccttcattcgtgatgaggtcacctggctggttcgccacacagagaatgtcaccaagacaaagacacctgaggactatgctgactcgagcattgcagagctacttttcttgttggaggggattaggtctctggtccgaagacacatcaaagtgatacagcaataccaccttcagtacttggcaagatttgatgctcttgtgctcagtgacatcattcagaacttgtctgtgtgtccagaggaggagtccatcatcatgtcctcattcgtcagtatcctctcctctctgaatctcaaacaagttgataatggagaaaaatttgaattctcaggattgaggctggactggttccgcctacaggcatacactagcgtggctaaggcccctctgcacctgcatgagaaccctgacttagccaaggtgatgaacctcattgtcttccactcccgaatgctggactccgtagaaaaattgctggtggaaacttctgatctgtctactttctgctttcatcttcgtatctttgagaagatgtttgccatgaccttggaggaatctgccatgttgcgttatgccattgctttccccctgatttgtgctcactttgtccactgcactcatgagatgtgcccagaggagtacccccacctcaagaaccatggtcttcaccactgcaactccttcctggaagagttggccaagcagaccagcaattgcgtcctggagatctgtgctgagcagcgaaacctgagcgagcagcttctacctaagcactgtgccactacaatcagcaaagccaagaacaagaaaaccaggaagcagaggcagactcccagaaaaggagagcccgagagggacaagccaggagctgagagtcaccggaagaaccgcagcattgtcaccaacatggacaagctacacctaaacttgacagaactggcactgacaatgaatcatgtatacagtttctccgtgtttgaacatactatcttcccttctgagtacctcagcagccacctggaggccagactcaacagagccattgtgtggctggctggctacaatgccacgacccaggagatcgtacggccttctgagctgttggcaggagtcaaagcatacattggtttcatacagtcactggcccagtttttgggtgcagatgcttccagagtcatccgcaacgccctcctgcagcagacacaaccactggattcctgtggggaacagacaatcaccacactctacacaaactggtacctggaaagtctgcttagacaggcaagcagtgggaccatcatcctctccccagccatgcaggccttcgtcagcctgcccagagaaggggagcagaacttcagtgcagaggagttctctgacatctctgagatgcgggccttggcagaactcctgggcccctatggcatgaagttcctgagtgaaaacctgatgtggcatgtgacctctcagattgtggagctgaagaagctggtggtggaaaacatggacatacttgttcagatcagatccaactttagcaagccggacttgatggcttccctgctgccccagctgacaggggctgaaaatgtgctaaagcgcatgaccatcattggggttatcctcagtttcagggccatggcccaagagggacttcgggaggttttctcctcccactgcccatttcttatgggtcccattgagtgcttgaaggagtttgtcactccagacacagacatcaaggtgaccttgagtatctttgagctggcatctgctgcaggtgtgggctgtgacattgacccagccttggtggctgccattgctaatctgaaagctgatacttcatctcctgaggaggaatataaggtggcctgcctgctcttgatctttctggcagtttccctcccactccttgccactgacccttcttccttttatagcattgagaaggatggttacaacaacaatattcattgcttgaccaaagccatcatccaggtgtctgctgccctcttcacgctctacaacaagaacattgaaactcacctcaaggaatttctggtggtggcctctgtcagcctcttgcagctgggccaggagactgacaagcttaaaaccagaaatcgagaatccatttctctgctcatgcgcttggtggtggaggagtcatccttcctgaccctggacatgctggagtcctgtttcccttatgtcctgcttcgaaatgcctatcgggaggtgtctcgggccttccacctaaactgaatgcctgccagtacccactgaagagccctttggaccttcctaaacccttgccatagtggaagctgtggtcactttcgcagggggtgggaatggggtggggtcactaaggagagagggtcaggagccagagttgatgagcagatctgtggaagaacaatccagggctgagaaatcgtagagcagtgaggcaggctgggagcatggaggacagcttatggaaaaagttagggcgtggggccacatgtgtgaattttacaatgaaaaaaggagtaacgtacaagtatattttctatcttctggtgacttgagcttgagctctgacaggcatgggcctctccgaccttcatcactattcttaggataatgctggcgggcagagatgatcaatcatcatattaaatcataatgagcttataatcctcccactggagctgctattgtctcctgcacattcattaggaccattatcttctctcttcctttttcaaatgtgttcagcaaacattcaacctgctcctactgcagagtagcagcaaaggagcccctcttttcctttgtggggctcttcgaggggtcattgggtctcttcctttgcccccagcttgactgcgtttcctactggggcaaggaggaagtgcccttcagagatgttcactgcccacctactctactacattgtttgttacaagttctctcttgctttaacccctcctgctttgatatctccacaacccagagcagagggtcagttagtctccgtcaattctaggttacatgacaactgattggcccagacttaggtgggttttccctcctgtaccatttgggggtactctgccttttattgggagggactaatttaaccccaaatccttttgtcagcctgggtatagctgttgctccaggaagggatttctcttctggatcttaaatttcacagacctcattaggttgtatggccctgagagtgggtatccttgagggagtacaagctgtttcaacttagcccttttctgcgctaattagaatttcaagcgtcacagagcctgggggctttcaagatagcactaaactaggtttacttaactccttggcaggaaatagtggcccccatgcatcacttctgtgaatccactgccagggagaagtggagaaacagatcatatatgtcacaggtctagagtggttggaattgacaaatataattagctagttggttaattagggtcatgtccatactttcatgatgaaagggaa

SEQ ID NO: 155033 - DNA, 3612 bp, Artificial Sequence
  derived and/or modified sequence
gtgctggggccaagcaggcattaaactctacccatcaagacaaaatgcctagacttgttcagaccccaaatctaagccacctttcttactggaaaagtccatggaaccatctctcaagtatatcaacaagaaatttcccaacatagatgtccgaaacagcacgcaacatttaggaccagtacatcgtgaaaaagccgagataattagattcctcaccaactactaccagtcatttgtggatgtcatggaatttcgggatcatgtatatgaacttctcaacaccattgatgcctgccagtgccattttgatatcaatctcaactttgatttcactcggagttacctggacttgattgtaacttacacctcagtcattttacttctgtcacggattgaagatcggcggatactcattggcatgtacaattgtgcccatgagatgctgcatgggcatggtgaccccagttttgcccgtctgggtcagatggtcttggagtatgaccaccctctgaagaagctgacagaagagtttgggcctcacacaaaggctgtgagtggagccctcctctctttgcatttcctctttgtccgaagaaaccagggggctgagcagtggcgcagtgcccaacttctaagcctcatcagcaaccccccagccatgattaaccctgctaattcagatacaatggcctgtgagtatctgtctgtggaagtaatggagcgctggattatcattgggtttcttctttgtcatgggtgcctcaactccaatagccagtgccagaagctgtggaagctgtgtctgcagggctccctctacatcacccttatccgtgaggatgtgctgcaggtgcacaaagtcaccgaggacctgtttagcagtttgaaagggtatggcaagagagtggcagacataaaggagagcaaggaacatgtaattgcaaacagtggccagtttcattgtcaacggcggcaatttctgcggatggcagtgaaggagctggagactgtgttggctgatgaaccgggactactgggtcctaaggctctttttgctttcatggccctgtccttcattcgtgatgaggtcacctggctggttcgccacacagagaatgtcaccaagacaaagacacctgaggactatgctgactcgagcattgcagagctacttttcttgttggaggggattaggtctctggtccgaagacacatcaaagtgatacagcaataccaccttcagtacttggcaagatttgatgctcttgtgctcagtgacatcattcagaacttgtctgtgtgtccagaggaggagtccatcatcatgtcctcattcgtcagtatcctctcctctctgaatctcaaacaagttgataatggagaaaaatttgaattctcaggattgaggctggactggttccgcctacaggcatacactagcgtggctaaggcccctctgcacctgcatgagaaccctgacttagccaaggtgatgaacctcattgtcttccactcccgaatgctggactccgtagaaaaattgctggtggaaacttctgatctgtctactttctgctttcatcttcgtatctttgagaagatgtttgccatgaccttggaggaatctgccatgttgcgttatgccattgctttccccctgatttgtgctcactttgtccactgcactcatgagatgtgcccagaggagtacccccacctcaagaaccatggtcttcaccactgcaactccttcctggaagagttggccaagcagaccagcaattgcgtcctggagatctgtgctgagcagcgaaacctgagcgagcagcttctacctaagcactgtgccactacaatcagcaaagccaagaacaagaaaaccaggaagcagaggcagactcccagaaaaggagagcccgagagggacaagccaggagctgagagtcaccggaagaaccgcagcattgtcaccaacatggacaagctacacctaaacttgacagaactggcactgacaatgaatcatgtatacagtttctccgtgtttgaacatactatcttcccttctgagtacctcagcagccacctggaggccagactcaacagagccattgtgtggctggctggctacaatgccacgacccaggagatcgtacggccttctgagctgttggcaggagtcaaagcatacattggtttcatacagtcactggcccagtttttgggtgcagatgcttccagagtcatccgcaacgccctcctgcagcagacacaaccactggattcctgtggggaacagacaatcaccacactctacacaaactggtacctggaaagtctgcttagacaggcaagcagtgggaccatcatcctctccccagccatgcaggccttcgtcagcctgcccagagaaggggagcagaacttcagtgcagaggagttctctgacatctctgagatgcgggccttggcagaactcctgggcccctatggcatgaagttcctgagtgaaaacctgatgtggcatgtgacctctcagattgtggagctgaagaagctggtggtggaaaacatggacatacttgttcagatcagatccaactttagcaagccggacttgatggcttccctgctgccccagctgacaggggctgaaaatgtgctaaagcgcatgaccatcattggggttatcctcagtttcagggccatggcccaagagggacttcgggaggttttctcctcccactgcccatttcttatgggtcccattgagtgcttgaaggagtttgtcactccagacacagacatcaaggtgaccttgagtatctttgagctggcatctgctgcaggtgtgggctgtgacattgacccagccttggtggctgccattgctaatctgaaagctgatacttcatctcctgaggaggaatataaggtggcctgcctgctcttgatctttctggcagtttccctcccactccttgccactgacccttcttccttttatagcattgagaaggatggttacaacaacaatattcattgcttgaccaaagccatcatccaggtgtctgctgccctcttcacgctctacaacaagaacattgaaactcacctcaaggaatttctggtggtggcctctgtcagcctcttgcagctgggccaggagactgacaagcttaaaaccagaaatcgagaatccatttctctgctcatgcgcttggtggtggaggagtcatccttcctgaccctggacatgctggagtcctgtttcccttatgtcctgcttcgaaatgcctatcgggaggtgtctcgggccttccacctaaactgaatgcctgccagtacccactgaagagccctttggaccttcctaaacccttgccatagtggaagctgtggtcactttcgcagggggtgggaatggggtggggtcactaaggagagagggtcaggagccagagttgatgagcagatctgtggaagaacaatccagggctgagaaatcgtagagcagtgaggcaggctgggagcatggaggacagcttatggaaaaagttagggcgtggggccacatgtgtgaattttacaatgaaaaaaggagtaacgtac

SEQ ID NO: 155034 - DNA, 3384 bp, Artificial Sequence
  derived and/or modified sequence
atgagcctgaccagcgcctaccagcacaagctggccgagaagctgacaatcttgaatgatcgggggcaaggcgtcctaatacgtatgtacaatattaagaaaacctgctccgaccccaagtcaaaaccacccttcttattggagaagtccatggagccgagcctaaagtatatcaataagaagtttcccaatattgatgtgagaaattccacccaacatctggggccggtgcaccgggagaaggctgaaatcataaggtttctcacaaactactaccagtcattcgtcgacgtgatggagtttcgcgaccatgtctatgaacttctgaataccatcgatgcgtgtcaatgccatttcgatataaatcttaacttcgactttacgcggagctacctggatcttattgtaacatacacaagtgtgatcttgctcctgagtcggattgaggatagacgtatcttgattggcatgtataattgcgcacatgagatgctgcatggccacggagatccatcatttgccagacttggccagatggtcctcgaatatgatcatcccttgaagaagttgaccgaagagtttgggccccacacaaaggccgtgtccggggccctattgtccctgcacttccttttcgtccggcgcaaccagggcgccgaacagtggagatccgcgcagctcttgtcactcatctccaatccaccagcgatgatcaaccccgctaattccgacactatggcctgtgagtatctgtccgtggaggtcatggagcgatggattatcatcggattcctactgtgtcacgggtgtctgaatagcaattcccaatgccagaaactgtggaagctgtgtttacaaggcagcctttacattacactcatccgcgaggatgtgctgcaggtgcataaggtgaccgaggatcttttttcttcactgaagggctatggcaagcgagtggcagacataaaggaaagcaaggaacacgtgatcgccaatagcgggcaattccattgtcaaaggagacagtttctgcgcatggccgtgaaggaactcgagaccgttttagcggatgaacctgggctcttgggcccaaaggctctatttgcgttcatggctctgtcattcattagagacgaggttacatggctcgtgcggcatactgaaaatgtcaccaaaacaaaaaccccggaggactatgcagatagcagcattgccgaactgttatttctcttagagggcatccgtagtctcgttcggaggcatattaaggtgatccaacagtaccacctccagtacttggccagattcgacgctctggtcctgagcgacattattcagaacttgagtgtgtgtcctgaggaagaatccattataatgtccagctttgtcagcatattgtcgtcactcaacctgaaacaggtcgataatggggagaaattcgaattttccggcctgagactggactggttcaggcttcaggcttacacatccgtcgcgaaagctcctctgcatctgcatgagaacccggatctagcgaaagtaatgaatctgatagtctttcactctagaatgctggattcagttgagaagctcctggttgagaccagtgatctgtctactttctgtttccaccttaggatcttcgaaaagatgttcgcaatgaccctcgaggagagcgccatgctgagatatgctatcgcgtttcctctgatctgtgcacacttcgtccactgtacacacgagatgtgtcccgaggagtatcctcaccttaagaatcatgggctgcaccactgcaactcctttttggaagagctggccaaacaaacctcaaattgcgtgttggaaatctgcgccgagcaaaggaatctctcagaacagcttctgccaaaacactgcgcgactactatcagtaaggcaaaaaacaagaaaacccgtaaacaacggcagacaccccgtaagggcgagccagaacgggataaacctggagctgagtcccacaggaaaaacaggtctattgtaaccaacatggacaagcttcacttgaacctcaccgagctggctctgactatgaatcacgtgtactccttcagcgtattcgagcacaccatcttcccctctgagtatcttagcagtcacctcgaagcgaggcttaaccgcgccattgtgtggctcgcaggttacaatgccacaactcaggagattgtgagaccctccgagttactggccggagtgaaggcgtacatcgggttcatacaaagcctggctcaatttttaggggcggatgcctcacgggtgatccgtaacgccctgctacagcagacgcagcctcttgactcctgtggagaacaaacaataacaaccctttacacaaactggtatctagaaagcttactcaggcaggcttcctctggtactattattttgtcaccagccatgcaggcgtttgttagcctccctagagaaggagagcagaatttcagcgctgaggaattttctgatatcagcgagatgcgcgcactggccgaactgctgggaccttatggcatgaagttcctgagcgaaaatctgatgtggcatgtcacatcccaaatcgttgaactgaaaaaactggtggtcgagaacatggatattctggtgcaaatcaggtcaaatttctccaaacccgatctgatggcaagcttgctacctcagctcaccggcgctgaaaacgtcctcaagaggatgactatcatcggggtcatcctgagcttccgtgccatggcccaggaaggcctaagggaagtcttctcatcacactgcccctttctaatggggccgatcgaatgcctcaaggagttcgtgactccagacactgatattaaagtgaccctgagcatctttgagctggccagtgccgccggcgtgggatgtgatatcgatccagctcttgtggccgccattgcgaacctaaaggctgatacttcttccccagaggaggagtacaaggttgcctgcctccttctgatcttcctcgcagtgtccctgccactactggccaccgaccctagtagtttctacagcatcgaaaaagacggctacaacaacaacatccactgccttactaaagccatcattcaggtgagcgccgcccttttcaccctgtataataagaatatcgaaacccatctgaaggaatttttggtagtggcctctgtgtccttgctccaactgggacaagagacagacaagcttaagaccagaaatcgagagtccattagcctcctcatgagactcgtagtggaagagagctctttcctgacacttgatatgttggaatcatgcttcccctacgtactgcttagaaatgcataccgagaggtttctcgggcctttcacctgaactag

SEQ ID NO: 155035 - DNA, 3384 bp, Artificial Sequence
  derived and/or modified sequence
atgagtttgacctccgcatatcagcacaagttagctgagaagctgacaattctgaatgatagaggacagggtgtcctcatccgaatgtacaacataaaaaaaacatgcagtgaccctaaatctaagccaccgttcctgctggaaaaaagcatggaaccgagcttgaagtacattaataagaagtttccaaacatagacgtgcggaacagtactcagcacctaggcccagtgcaccgggaaaaggctgaaattattcgattcctcacaaactattatcagtctttcgttgacgtgatggagttccgagaccatgtatacgaactcctcaatacgatcgatgcctgccagtgccattttgacatcaacctgaactttgactttaccaggtcatacctggatctgatcgtcacctacacttctgtcatcctcctcctgtctcggatagaagacagacggattctgataggaatgtacaactgtgcccacgagatgctccacggacatggagacccttccttcgccagattaggacaaatggtgttggagtatgaccatcccctgaagaagctgactgaggagttcggcccacacactaaagctgtcagcggcgctcttctgagcctccattttctgttcgtgagaaggaatcagggagctgaacagtggaggagtgctcagttactcagtctcatctccaacccacctgctatgattaatccagccaactctgatacaatggcctgtgaatatctaagtgtcgaagttatggagaggtggatcattattgggtttctgctctgccacggctgccttaactccaactcccaatgccagaaactgtggaaattatgcctgcaaggtagtttgtatattacactcattcgggaggacgttctgcaggtccataaggtgactgaggaccttttttcgagccttaaaggatacggcaaaagagtggctgacataaaggagtctaaagaacatgtgattgctaactctgggcagttccattgccagagaagacaatttctgcggatggctgtcaaagagctcgagacggttctcgctgatgagccaggcctcttggggccaaaggcccttttcgcctttatggcgttatccttcatcagggacgaggtaacgtggctggtccggcataccgagaacgtgacaaagaccaagacacctgaagattacgccgacagttctatagctgagctgctttttctactggaaggtatccggagcctggtgcgcagacacatcaaggtgatccagcaatatcacctgcaatacctggcacggtttgacgcgctggtgttatcagacattatacagaacctttctgtctgcccggaagaagagtccattataatgagcagttttgtttcgatacttagcagtctgaacctcaaacaggtggataatggggaaaagtttgaattctccggcctcaggcttgattggtttaggttgcaggcgtatacatccgtggctaaagccccactccatctgcatgaaaatcccgacctggcaaaagtgatgaacctgattgtcttccactcacgcatgttggattctgtggagaaactcctggtcgagacctctgatctgtccactttttgtttccatctccggattttcgagaagatgttcgcaatgaccctggaagaaagcgcaatgcttcggtatgccatagcatttccactcatttgtgcccatttcgttcactgcacccacgaaatgtgtccagaagaatacccccacctcaaaaaccacggactccaccactgcaactcattcctcgaggagctcgccaagcagaccagtaactgcgttctggaaatctgcgccgagcagcggaacctctccgagcaactcctacccaaacactgcgccacaacaatttcaaaagccaaaaataagaagacgcgcaagcagcgtcaaacacccagaaagggtgagcctgagcgggacaagccgggagccgaaagccacagaaaaaaccgatcaattgtcactaatatggacaaactgcaccttaacctgacagaattggctctaacgatgaaccacgtgtattccttttccgtctttgaacacacaatttttccaagcgagtaccttagcagtcaccttgaggcgaggttgaatcgcgctatcgtatggctagcagggtataacgcaacaacccaggagatcgtccgaccttctgaactgctggcaggcgtaaaagcttatatcggcttcattcagtcactagctcagtttctgggtgccgacgcttcgagggtcattagaaatgcacttttgcagcagactcagcctctcgacagctgtggcgaacagactattaccacactgtacaccaattggtacctcgaatctctgctgcgccaggcctcatccgggacgataattctgtcccctgccatgcaagctttcgtgagcctgccgcgagaaggagaacagaacttcagcgcggaggaatttagcgacatcagtgagatgcgggctctcgcggaactgctgggcccttacggcatgaagtttcttagcgagaacctcatgtggcacgtgacatcccagatcgttgagctcaagaaattagtggtggagaacatggacatactcgtgcaaataaggtccaactttagcaagccagacttaatggcttccctcctgccccaactcaccggagcggagaatgtcttaaagcggatgacaatcattggagtaatactgagcttccgggctatggcacaggaggggctccgagaagtcttctcgagccactgtccgtttctcatgggcccaattgagtgtctcaaggagttcgtgacgcctgacacagacatcaaagttactctgagtatattcgagctggcttccgcagcaggggtgggctgcgacatcgatcccgctcttgtggccgctatagctaaccttaaagccgatactagcagcccagaggaggagtataaggtggcgtgcttgcttttgatctttcttgccgtgagcctgcctcttttagccacagacccctccagcttctatagtatagagaaggacgggtacaataacaatatccattgtctgactaaagctattatccaggtgtccgctgccttgtttaccctatacaataaaaacattgagacacatctcaaggagttcttagtggtcgccagcgtctctctcctgcagctgggtcaagagactgataagctaaaaacccgcaaccgagagtccatctccttactgatgagactagtggttgaggagagtagctttctgactctcgatatgctggaaagctgctttccctacgtgctgctccgcaatgcctaccgtgaagtaagccgagcgttccatcttaactag

SEQ ID NO: 155036 - protein, 1037 aa, Artificial Sequence
  derived and/or modified sequence
MDRMASSMKQVPNPLPKVLSRRGVGAGLEAAERESFERTQTVSINKAINTQEVAVKEKHARTCILGTHHEKGAQTFWSVVNRLPLSSNAVLCWKFCHVFHKLLRDGHPNVLKDSLRYRNELSDMSRMWGHLSEGYGQLCSIYLKLLRTKMEYHTKNPRFPGNLQMSDRQLDEAGESDVNNFFQLTVEMFDYLECELNLFQTVFNSLDMSRSVSVTAAGQCRLAPLIQVILDCSHLYDYTVKLLFKLHSCLPADTLQGHRDRFMEQFTKLKDLFYRSSNLQYFKRLIQIPQLPENPPNFLRASALSEHISPVVVIPAEASSPDSEPVLEKDDLMDMDASQQNLFDNKFDDIFGSSFSSDPFNFNSQNGVNKDEKDHLIERLYREISGLKAQLENMKTESQRVVLQLKGHVSELEADLAEQQHLRQQAADDCEFLRAELDELRRQREDTEKAQRSLSEIERKAQANEQRYSKLKEKYSELVQNHADLLRKNAEVTKQVSMARQAQVDLEREKKELEDSLERISDQGQRKTQEQLEVLESLKQELATSQRELQVLQGSLETSAQSEANWAAEFAELEKERDSLVSGAAHREEELSALRKELQDTQLKLASTEESMCQLAKDQRKMLLVGSRKAAEQVIQDALNQLEEPPLISCAGSADHLLSTVTSISSCIEQLEKSWSQYLACPEDISGLLHSITLLAHLTSDAIAHGATTCLRAPPEPADSLTEACKQYGRETLAYLASLEEEGSLENADSTAMRNCLSKIKAIGEELLPRGLDIKQEELGDLVDKEMAATSAAIETATARIEEMLSKSRAGDTGVKLEVNERILGCCTSLMQAIQVLIVASKDLQREIVESGRGTASPKEFYAKNSRWTEGLISASKAVGWGATVMVDAADLVVQGRGKFEELMVCSHEIAASTAQLVAASKVKADKDSPNLAQLQQASRGVNQATAGVVASTISGKSQIEETDNMDFSSMTLTQIKRQEMDSQVRVLELENELQKERQKLGELRKKHYELAGVAEGWEEGTEASPPTLQEVVTEKE

SEQ ID NO: 155037 - DNA, 3114 bp, Artificial Sequence
  derived and/or modified sequence
atggaccgcatggcgagcagtatgaagcaggtccccaaccctctccccaaggtcctaagccggcgcggagtgggggccgggctcgaggccgccgagcgggaatcatttgaaagaacccaaaccgttagcataaataaagccattaatacacaggaagtggcagtcaaagagaagcacgcccggacatgtatcctagggacgcatcatgaaaaaggggctcagacattttggtcggtcgtcaatagactgcctttgtcatcgaacgctgtgctgtgctggaagttctgccacgtgttccataagctactgcgtgacggccatccaaacgttctgaaggactctctgcgttataggaacgagttgagcgacatgtcgcgtatgtggggccatttgtccgaagggtatggccagctgtgcagcatatacctgaaacttctgaggacaaaaatggagtaccacacaaagaatcctaggttccctgggaatctacagatgtcggacagacaactggacgaagccggcgagagcgacgtgaacaacttttttcagctaactgtggagatgtttgactatctggaatgcgagcttaatctctttcagacggtcttcaattcactcgatatgagcagaagcgtgtctgtgaccgcagccgggcagtgccgtctcgcaccgctcattcaggtgattcttgactgcagtcacctatacgactacactgtcaaactgcttttcaagcttcatagctgcctgccagccgataccctgcaggggcatagagatcgtttcatggagcagtttacaaagttaaaggatttgttttaccgttcttccaatttacagtactttaagcgccttatccagataccccaactgcctgagaacccaccaaacttcctgcgtgcaagtgcgctgagtgaacatatctcaccggtggtcgtgattccggctgaggcctcttctcctgattccgaacccgtgctagaaaaagacgacctgatggacatggacgctagtcagcagaatctgttcgataataagtttgacgatattttcggttcctctttttcaagtgatccattcaatttcaattctcagaacggcgtcaacaaagacgagaaagatcacctgatcgaacggctttacagagaaatctccggcttaaaggcgcagcttgaaaacatgaagaccgagtcccaacgggtggtgctgcagctgaaagggcacgtgtccgagcttgaggcagatttagctgagcagcagcacctgagacaacaggcagctgatgactgcgagttcttgagggccgagctggacgagcttcgacgtcagcgcgaggatacagagaaggctcagaggtcactttccgagatcgaaagaaaagctcaagctaacgagcagcggtactccaagctgaaagaaaaatacagcgaactagtccagaatcatgcagacctgctgagaaaaaacgccgaagtgactaaacaggtttccatggcgcggcaagcgcaggtcgacctcgagcgtgagaaaaaggagctggaggacagtctcgagaggatctctgaccaggggcagcgaaagacacaggaacagctcgaggttctcgaaagccttaagcaggagttggctacatcccagcgagagctccaggtgttgcagggaagtctggagacatcagctcagagcgaagcgaactgggctgccgaatttgccgagctggaaaaagaaagggattccttagttagcggagccgctcaccgggaggaagagctttctgcccttcgtaaagagctgcaagatacacagctcaagttagcgagcaccgaagaaagcatgtgccagctagctaaagaccagaggaaaatgctcctggttggctcccggaaggccgccgagcaagtgatccaagacgccttaaaccagctggaagagccaccacttataagctgtgctggatcagccgaccacctactctctactgtaactagtattagctcctgtatagaacagcttgaaaaatcctggagccagtatctggcatgtccagaagatattagcggtttgctgcactcaattacgttgctggctcatctgacctccgacgcgatagcccacggagctactacctgtctacgtgcccctccagagcccgccgacagcctgaccgaggcgtgcaagcagtatggtcgggagaccctggcctatctcgccagcctggaagaggagggctcccttgagaatgccgattccaccgccatgcggaactgtctgtctaaaattaaggccatcggggaggagctcttgcctcgagggctggacataaagcaggaagagctgggtgacttggtggacaaagaaatggccgccacatcggccgcaattgaaaccgccacagctcgcatcgaggaaatgctgtccaagtcccgagccggtgataccggtgttaaactcgaggtgaacgagagaatccttggctgctgcacgtccctcatgcaggctatccaagtcttgattgtcgcttccaaagatctccaaagagagatcgtagaatccggccgtggcaccgcttctcccaaggaattctatgccaaaaatagccggtggaccgaggggttgatttctgcttccaaagcggtgggctggggggccactgtcatggtggacgctgccgacttggtagtgcaaggaaggggaaaattcgaggaattgatggtctgcagccacgagattgctgccagcacagcccagcttgtggccgccagcaaagtgaaagcagataaagattcccctaacttggctcaactccagcaggcctcccggggcgtgaaccaagccacagcaggcgtcgtagcctccaccattagcggaaaatcccagattgaggagaccgacaacatggatttctctagtatgacattgacacagattaaaaggcaggagatggatagtcaagtccgggttttggagctcgaaaacgagcttcagaaagaaaggcaaaagctgggcgaactgagaaaaaaacactatgagttggcgggtgtggctgagggatgggaagaagggacagaggcaagtccaccaacgctgcaggaggtagtgaccgaaaaggagtag

SEQ ID NO: 155038 - DNA, 8013 bp, Artificial Sequence
  derived and/or modified sequence
gcccctgactcggctcctcgcggcgacatggatcggatggccagctccatgaagcaggtgcccaacccactgcccaaggtgctgagccggcgcggggtcggcgctgggctggaggcggcggagcgcgagagcttcgagcggactcagactgtcagcatcaataaggccattaatacgcaggaagtggctgtaaaggaaaaacacgccagaacgtgcatactgggcacccaccatgagaaaggggcacagaccttctggtctgttgtcaaccgcctgcctctgtctagcaacgcagtgctctgctggaagttctgccatgtgttccacaaactcctccgagatggacacccgaacgtcctgaaggactctctgagatacagaaatgaattgagtgacatgagcaggatgtggggccacctgagcgaggggtatggccagctgtgcagcatctacctgaaactgctaagaaccaagatggagtaccacaccaaaaatcccaggttcccaggcaacctgcagatgagtgaccgccagctggacgaggctggagaaagtgacgtgaacaactttttccagttaacagtggagatgtttgactacctggagtgtgaactcaacctcttccaaacagtattcaactccctggacatgtcccgctctgtgtccgtgacggcagcagggcagtgccgcctcgccccgctgatccaggtcatcttggactgcagccacctttatgactacactgtcaagcttctcttcaaactccactcctgcctcccagctgacaccctgcaaggccaccgggaccgcttcatggagcagtttacaaagttgaaagatctgttctaccgctccagcaacctgcagtacttcaagcggctcattcagatcccccagctgcctgagaacccacccaacttcctgcgagcctcagccctgtcagaacatatcagccctgtggtggtgatccctgcagaggcctcatcccccgacagcgagccagtcctagagaaggatgacctcatggacatggatgcctctcagcagaatttatttgacaacaagtttgatgacatctttggcagttcattcagcagtgatcccttcaatttcaacagtcaaaatggtgtgaacaaggatgagaaggaccacttaattgagcgactatacagagagatcagtggattgaaggcacagctagaaaacatgaagactgagagccagcgggttgtgctgcagctgaagggccacgtcagcgagctggaagcagatctggccgagcagcagcacctgcggcagcaggcggccgacgactgtgaattcctgcgggcagaactggacgagctcaggaggcagcgggaggacaccgagaaggctcagcggagcctgtctgagatagaaaggaaagctcaagccaatgaacagcgatatagcaagctaaaggagaagtacagcgagctggttcagaaccacgctgacctgctgcggaagaatgcagaggtgaccaaacaggtgtccatggccagacaagcccaggtagatttggaacgagagaaaaaagagctggaggattcgttggagcgcatcagtgaccagggccagcggaagactcaagaacagctggaagttctagagagcttgaagcaggaacttgccacaagccaacgggagcttcaggttctgcaaggcagcctggaaacttctgcccagtcagaagcaaactgggcagccgagttcgccgagctagagaaggagcgggacagcctggtgagtggcgcagctcatagggaggaggaattatctgctcttcggaaagaactgcaggacactcagctcaaactggccagcacagaggaatctatgtgccagcttgccaaagaccaacgaaaaatgcttctggtggggtccaggaaggctgcggagcaggtgatacaagacgccctgaaccagcttgaagaacctcctctcatcagctgcgctgggtctgcagatcacctcctctccacggtcacatccatttccagctgcatcgagcaactggagaaaagctggagccagtatctggcctgcccagaagacatcagtggacttctccattccataaccctgctggcccacttgaccagcgacgccattgctcatggtgccaccacctgcctcagagccccacctgagcctgccgactcactgaccgaggcctgtaagcagtatggcagggaaaccctcgcctacctggcctccctggaggaagagggaagccttgagaatgccgacagcacagccatgaggaactgcctgagcaagatcaaggccatcggcgaggagctcctgcccaggggactggacatcaagcaggaggagctgggggacctggtggacaaggagatggcggccacttcagctgctattgaaactgccacggccagaatagaggagatgctcagcaaatcccgagcaggagacacaggagtcaaattggaggtgaatgaaaggatccttggttgctgtaccagcctcatgcaagctattcaggtgctcatcgtggcctctaaggacctccagagagagattgtggagagcggcaggggtacagcatcccctaaagagttttatgccaagaactctcgatggacagaaggacttatctcagcctccaaggctgtgggctggggagccactgtcatggtggatgcagctgatctggtggtacaaggcagagggaaatttgaggagctaatggtgtgttctcatgaaattgctgctagcacagcccagcttgtggctgcatccaaggtgaaagctgataaggacagccccaacctagcccagctgcagcaggcctctcggggagtgaaccaggccactgccggcgttgtggcctcaaccatttccggcaaatcacagatcgaagagacagacaacatggacttctcaagcatgacgctgacacagatcaaacgccaagagatggattctcaggttagggtgctagagctagaaaatgaattgcagaaggagcgtcaaaaactgggagagcttcggaaaaagcactacgagcttgctggtgttgctgagggctgggaagaaggaacagaggcatctccacctacactgcaagaagtggtaaccgaaaaagaatagagccaaaccaacaccccatatgtcagtgtaaatccttgttacctatctcgtgtgtgttatttccccagccacaggccaaatccttggagtcccaggggcagccacaccactgccattacccagtgccgaggacatgcatgacacttccaaagactccctccatagcgacaccctttctgtttggacccatggtcatctctgttcttttcccgcctccctagttagcatccaggctggccagtgctgcccatgagcaagcctaggtacgaagaggggtggtggggggcagggccactcaacagagaggaccaacatccagtcctgctgactatttgacccccacaacaatgggtatccttaatagaggagctgcttgttgtttgttgacagcttggaaagggaagatcttatgccttttcttttctgttttcttctcagtcttttcagtttcatcatttgcacaaacttgtgagcatcagagggctgatggattccaaaccaggacactaccctgagatctgcacagtcagaaggacggcaggagtgtcctggctgtgaatgccaaagccattctccccctctttgggcagtgccatggatttccactgcttcttatggtggttggttgggttttttggttttgtttttttttttaagtttcactcacatagccaactctcccaaagggcacacccctggggctgagtctccagggccccccaactgtggtagctccagcgatggtgctgcccaggcctctcggtgctccatctccgcctccacactgaccaagtgctggcccacccagtccatgctccagggtcaggcggagctgctgagtgacagctttcctcaaaaagcagaaggagagtgagtgcctttccctcctaaagctgaatcccggcggaaagcctctgtccgcctttacaagggagaagacaacagaaagagggacaagagggttcacacagcccagttcccgtgacgaggctcaaaaacttgatcacatgcttgaatggagctggtgagatcaacaacactacttccctgccggaatgaactgtccgtgaatggtctctgtcaagcgggccgtctcccttggcccagagacggagtgtgggagtgattcccaactcctttctgcagacgtctgccttggcatcctcttgaataggaagatcgttccaccttctacgcaattgacaaacccggaagatcagatgcaattgctcccatcagggaagaaccctatacttggtttgctacccttagtatttattactaacctcccttaagcagcaacagcctacaaagagatgcttggagcaatcagaacttcaggtgtgactctagcaaggctcatctttctgcccggctacatcagccttcaagaatcagaagaaaggccaaggtgctggactgttactgacttggatcccaaagcaaggagatcatttggagctcttgggtcagagaaaatgagaaaggacagagccagcggctccaactcctttcagccacatgccccaggctctcgctgccctgtggacaggatgaggacagagggcacatgaacagcttgccagggatgggcagcccaacagcacttttcctcttctagatggaccccagcatttaagtgaccttctgatcttggaaaaacagcgtcttccttctttatctatagcaactcattggtggtagccatcaagcacttcccaggatctgctccaacagaatattgctaggttttgctacatgacgggttgtgagacttctgtttgatcactgtgaaccaacccccatctccctagcccacccccctccccaactccctctctgtgcattttctaagtgggacattcaaaaaactctctcccaggacctcggatgaccatactcagacgtgtgacctccatactgggctaaggaagtatcagcactagaaattgggcagtcttaatgttgaatgctgctttctgcttagtatttttttgattcaaggctcagaaggaatggtgcgtggcttccctgtcccagttgtggcaactaaaccaatcggtgtgttcttgatgcgggtcaacatttccaaaagtggctagtcctcacttctagatctcagccattctaactcatatgttcccaattaccaaggggtggccgggcacagtggctcacgcctgtaatcccagcactttgagaggctgaggtggtaggatcacctgaggtcaggagttcaagaccagcctgtccaacatggtgaaacccccatctctactaaaaataccaaaaattagccgagcgtagtgacgggtgcccgtaatcccagctactcaggaggctgagacaggagaatcacctgaaccccagaggcagaggttgcagtgagctgagatcacgccattgtactccagcctgggcaacaagagcaaaactccgtctcaaaaaaaaaaaaaaattacaaatggggcaaacagtctagtgtaatggatcaaattaagattctctgcccagccgggcacagtggcgcatgcctgtaatcccagaactttgggaggccaagacgggatgattgcttgagctcaggagtttgagaccaggctgggcatcatagcaagacctcatctctactaaaattcaaaaacaaaattagccgggcatgatggtgcatgcctgtagtctcagctagttggggagctaaggtgggagaattgcttgagcttgggaagtcgaggctgcagtcagccctgattgtgccagtgcactccggcctgggtgacagagtgagaccctgtctcaaaaaaaaaaagattctgtgtcagagcccagcccaggagtttgaggctgcaatgagccatgatttcccactgcactccagcctgagtgacagagcgagactccatctctttaaaaacaaacaaaaaattatctgaatgatcctgtctctaaaaagaagccacagaaatgtttaaaaacttcatcgacttagcctgagtcataacggttaagaaagcacttaaacagaagcagaggctaattcagtgtcacatgaggaagtagctgtcagatgtcacataattactttcgtaatagctcagattagaatggctaccccattctctagacaaaatcaaattgtcctattgtgactcttctaaaaatgaagatgaagagctatttaatgacacaccttggattaaaacgggaatcacatcttaaagctaaaaatgaacctgcaagccttctaaatgagtcactgagcatcactagtgacaagtctcgggtgagcgtaaatgggtcatgacaagatgggacagcaacaaaatcatggcttaggatcgacaagaagttaaaaaacagctgcatctgttacttaagtttgtaagacagtgccctgagacctctagagaaaagatgtttgtttacataagagaaagaggccagacatggtgtctcacacgtttaatcccagcactttgggaggcaggggcgggtggatcacctgaggtcaggagttcaagactagcctggccaacatggtgaaaccccgtctctactaaaaatacaaaaattagccgggcatggtggcaggcgcctataatcccagctactggggaggctgaggcaggagaatcacttgaacccgggggacagaggttgtagtgagccaagatcgcaccactgcactccagcctgggtcacagagtgagactccatctcaaaaaaaaaaaagagagagagagagaaagaaatagaagagaagagccatcttggcagggttattttatatctgagcaaggagtttaaatgagactagtttagattgtctgctgatgcagccgtccatagcagtacccctaaaatcccaccagaatacgggtccctctaacccagtggctggaagaaccactgtctagagcaacttttcttggaactgtcccagctaccaagtcagacaccaaggtttatgccaccaggtaacacgggaatcacaggtacatgtcgctccggtcagattagttggctttggcccctcgaccctgtgcaggagctagttctcagcttgcagctggaagttccctcttagctccttagtctagaggggtctcctggctccatttgaccctggtctttaataaccggtcagcatcttgctaccttctaccacctttccaaatctctggaaatcctgccagggaaagcctccagttccaacattggctttccaagcaaactggctttgccctctctctgccatccttgtcctccagagactgcaccacctgtagcatagaaaaccaccaccacggacctgccagccattggcgcagcaaaccagccagctgtttgctgccaaattccttcctctcccaggtccagaccaaatacaagatcagcaccacaccgtggtgttgtcaggagccaaagcaacaggaaacaattcaatgctgttgggttcgattctgagagtagatttttccagacatgtctttcaggtgaccctcaactacctcaggtttgaaggccctaaatgaaactgattaccactcatagggacaaaccgagggggttcggttacatcttggtgataatgcagttgtctcaaacttataacagactctttcacatttcagtttgcagggatagggttgggtttgtttttcttctgtttttaacctttcccctgggtttccattagggtagttccttgaaatgaatttcatttttcactgagtgcctaccttcccagggcaggtggccactggcttctgtttccctccaacaatacttttattatggtattaagacctttctttgtataatacattgcatctgtgttttcaatttttcaaataaatatttccgcctggc

SEQ ID NO: 155039 - DNA, 3114 bp, Artificial Sequence
  derived and/or modified sequence
atggacaggatggccagctccatgaagcaggtgcccaaccccctgcccaaggtgctgagcagaagaggagtgggcgccggcctggaggccgctgagcgggagagctttgagaggacccagacagtgtccatcaacaaggccatcaacacccaggaggtggccgtgaaggagaagcacgcccggacctgcatcctgggcacccaccacgagaagggggcccagaccttctggagcgtggtgaaccggctgcccctgagcagcaatgctgtgctgtgctggaagttctgccacgtgttccacaagctgctgagagatggccaccccaacgtgctgaaggacagcctgcgctacagaaatgagctgagtgacatgagcaggatgtggggccacctgtctgagggctacggccagctgtgcagcatctacctgaagctgctgcggaccaagatggagtaccacaccaagaacccccgcttccctggcaacctgcagatgtctgaccggcagctggatgaagctggggagagtgatgtgaacaacttcttccagctgactgtggagatgtttgactacctggagtgtgagctgaacctcttccagacagtgttcaacagcctggacatgagccgctctgtgtctgtgacagctgctggccagtgccgcctggcccccctcatccaggtgatcctggactgcagccacctgtatgactacacagtgaagctgctcttcaagctgcacagctgcctgcctgctgacaccctgcagggccaccgggaccgcttcatggagcagttcaccaagctgaaggacctcttctaccgcagcagcaacctgcagtacttcaagaggctcatccagatcccccagctgcctgaaaatccacccaacttcctgcgggccagcgccctgtctgagcacatcagccctgtggtggtgatcccagctgaggccagcagcccagattctgagcctgtgctggagaaggatgacctgatggacatggatgccagccagcagaacctgtttgacaacaagtttgatgacatcttcggcagcagcttcagcagtgaccccttcaacttcaacagccagaatggagtgaacaaggatgagaaggaccacctgattgagcggctgtaccgggagatcagcggcctgaaggcccagctggagaacatgaagacagagagccagagggtggtgctgcagctgaagggccacgtgtctgagctggaggccgacctggccgagcagcagcacctgcggcagcaggccgcagatgactgtgagttcctgcgggcagagctggatgagctgcggcggcagcgggaggacacagagaaggcccagaggagcctgtctgaaattgaaaggaaggcccaggccaatgagcagcgctacagcaagctgaaggagaagtacagcgagctggtgcagaaccacgccgacctgctgaggaagaatgctgaggtgaccaagcaggtgtccatggcccggcaggcccaggtggacctggagcgggagaagaaggagctggaggacagcctggagcgcatcagtgaccagggccagaggaagacccaggagcagctggaggtgctggagagcctgaagcaggagctggccaccagccagcgggagctgcaggtgctgcagggcagcctggagaccagcgcccagagcgaggccaactgggccgctgagtttgctgagctggagaaggagcgggacagcctggtgtctggggccgcccaccgggaggaggagctgagcgccctgaggaaggagctgcaggacacccagctgaagctggccagcacagaggagagcatgtgccagctggccaaggaccagaggaagatgctgctggtgggcagcaggaaggctgctgagcaggtgatccaggatgccctgaaccagctggaggagcccccactcatcagctgtgccggcagcgctgaccacctgctgagcacagtgaccagcatcagcagctgcatcgagcagctggagaagtcctggagccagtacctggcctgcccagaggacatcagcggcctgctgcacagcatcaccctgctggcccacctgaccagtgatgccatcgcccatggagccaccacctgcctgcgggcccctcctgagcctgctgacagcctgacagaggcctgcaagcagtatggccgggagaccctggcctacctggccagcctggaggaggagggcagcctggagaatgctgacagcacagccatgaggaactgcctgagcaagatcaaggccatcggggaggagctgctgccccggggcctggacatcaagcaggaggagctgggggacctggtggacaaggagatggccgccaccagcgctgccatcgagacagccacagccagaattgaggagatgctgagcaagagccgggccggggacacaggagtgaagctggaggtgaatgaaagaatcctgggctgctgcaccagcctgatgcaggccatccaggtgctgattgtggccagcaaggacctgcagcgggagatcgtggagagcggccggggcacagccagccccaaggagttctacgccaagaacagccgctggacagagggcctcatcagcgccagcaaggctgtgggctggggcgccaccgtgatggtggatgctgctgacctggtggtgcagggccggggcaagtttgaggagctgatggtgtgcagccatgaaattgctgccagcacagcccagctggtggccgccagcaaggtgaaggctgacaaggacagccccaacctggcccagctgcagcaggccagcagaggagtgaaccaggccacagctggggtggtggccagcaccatcagcggcaagagccagatcgaggagacagacaacatggacttcagctccatgaccctgacccagatcaagaggcaggagatggacagccaggtgcgggtgctggagctggagaatgagctgcagaaggagcggcagaagctgggggagctgaggaagaagcactatgagctggccggcgtggccgagggctgggaggagggcacagaggccagcccccccaccctgcaggaggtggtgacagagaaggagtag

SEQ ID NO: 155040 - DNA, 3114 bp, Artificial Sequence
  derived and/or modified sequence
atggaccggatggccagcagcatgaagcaggtgcccaaccccctgccaaaggtgcttagtagacggggggtgggcgctgggttggaagctgccgaacgagaatcttttgaaagaactcaaaccgtgtccattaataaggcaatcaatactcaggaagtcgcagttaaggaaaagcatgcaagaacttgcattctgggaacccatcatgagaagggagcacaaacgttctggtctgtagtgaatcggctccccctttctagtaacgctgtgttgtgctggaagttctgccatgtgtttcataagctcctgcgcgatggccaccccaacgttcttaaagattcactcagataccggaatgagctgagtgacatgtctagaatgtggggacacctaagtgaaggatacgggcagctttgtagtatttatttgaaactgctgcgaacgaagatggaataccatacgaaaaatcctcgtttccctggcaacctacagatgtccgaccgacagttggacgaagctggggagagcgacgtcaacaactttttccagctgaccgtggagatgttcgattaccttgaatgtgaactgaacctgtttcagaccgtctttaactcactggacatgagtcgctctgtctccgtaacagctgccggccagtgtagactagccccccttatacaagtgattcttgattgctcccacctatatgattataccgtgaaactgctctttaagctgcattcctgcttgcccgctgacaccctacaaggacaccgcgacaggttcatggagcaattcacgaaactgaaagatctgttctaccggtcaagcaacctgcagtattttaagcgcctgatccaaatcccacaactcccagagaacccacctaatttccttcgggcttcagccctcagcgaacacatttctccagtcgtggtcattcccgccgaagcgagctcccccgattcagaacccgtgctggaaaaagacgatctcatggatatggatgcctctcagcagaacctgtttgacaataagttcgacgatatcttcggcagcagtttttccagcgaccccttcaacttcaattctcagaacggcgtcaacaaagatgagaaagaccacctgatcgaacgcctgtatagggagatatctggcttaaaagcacagctggaaaatatgaaaactgaatcccagagggtggttctgcagctgaaaggacacgtctcagagctggaggcggatctcgctgagcaacaacacctgaggcagcaggccgctgacgactgtgaatttctgcgggctgagctcgacgagctgaggcggcagagagaggacacagaaaaagctcagcggtcattgtcagagatcgagagaaaagctcaggccaatgagcaaagatactcaaagctcaaggagaagtactctgaactcgttcaaaaccacgccgatttgcttagaaagaatgccgaggttacaaaacaggtctcaatggcgcgacaagcccaagttgatctagagagagagaagaaggaactcgaggactctctagaacgtatctccgaccagggccagagaaaaacgcaggagcagctggaggtcctggaaagcctcaaacaggagctcgccacaagccaaagagagttacaagttctccagggttcgcttgaaacatcggcacagtccgaggcaaactgggccgcagaattcgctgagttggaaaaggagagggacagccttgtcagcggagccgcacacagagaggaggagctgagtgccctgaggaaggagcttcaggatactcagctcaagttggcttcgactgaggaatctatgtgtcagctggctaaggaccaacgaaagatgctcctcgtgggatctcggaaggcggccgaacaggtcattcaggacgccctgaatcaactggaggagcctcctctgatttcctgcgcaggcagcgcagaccacttgttgagcactgtaacatccatttcatcgtgtatagagcagctcgagaaaagctggtctcaatatttagcctgccccgaggacatctcgggtctgctgcacagcataactcttttagcccatcttactagtgatgcaattgctcacggagctaccacatgcttgcgcgccccacccgaacctgcagattccctgacagaagcctgcaaacagtatggccgcgaaactttggcttacctggctagcctagaggaagagggatccctggaaaatgctgattctaccgcgatgagaaactgtctttccaagatcaaagccataggagaggagctgctgcccaggggcttggatattaagcaggaggagctcggcgatctggtagataaagagatggcggccacatcagccgctatagaaacggcaaccgcccgcatcgaggaaatgctgtccaagtcaagagcaggggacacaggcgttaaattagaagttaatgagagaattttggggtgttgcacctcgctgatgcaggccatccaggtattgatagtcgcttccaaggatctacaaagggaaattgttgagtcaggccgggggacagccagcccgaaggaattttacgctaaaaactcacgctggacagaaggcctgatttctgcttcaaaggctgttggctggggcgctaccgtgatggttgatgccgccgatttagtagtccaaggaagggggaagtttgaagagttaatggtgtgttcacatgagattgccgcgtccaccgcgcaattggtggcagcctctaaggtcaaggctgataaggatagtcctaacttggcacaactgcaacaggcgtccagaggtgttaaccaagccaccgccggagttgtcgcgtctaccatcagcggcaaaagtcagattgaggaaacggataatatggatttctctagtatgacccttacacagatcaagcgccaggaaatggattctcaggtgcgcgtactagagctggagaacgagctgcagaaagagagacagaagctaggcgagctgcgtaagaaacactacgagctagcaggcgtagcagaaggctgggaggaggggaccgaggccagtccccctaccttacaggaagttgtcaccgagaaggaatag

SEQ ID NO: 155041 - DNA, 3114 bp, Artificial Sequence
  derived and/or modified sequence
atggatcgaatggcatcaagcatgaagcaggtgcccaaccctcttcctaaagtgctgtcccgcagaggtgtgggtgctggcctcgaagctgctgaaagggagtcatttgagaggactcaaaccgtttccattaataaggctatcaacacacaggaagtggccgtgaaggaaaagcacgctcgaacatgcatacttggcactcaccacgaaaagggggctcagaccttctggtctgtggtgaacaggcttccactaagttccaacgcagttctgtgctggaaattctgccacgtctttcacaagctgctgagagatgggcaccctaatgtcctcaaggactcgcttcgatatagaaacgaactctctgacatgagcagaatgtgggggcacctctccgagggctatggtcaattgtgctccatttacctcaaattactgagaactaaaatggaataccacaccaagaatccaaggtttcctggaaacctgcagatgtcggaccggcagcttgacgaagctggggagagcgacgtgaataatttcttccagctaaccgtcgagatgtttgattaccttgagtgtgaactgaatctgttccaaacagtgtttaacagtctggatatgagccggtcagtgagcgtcacggccgcaggtcaatgcagactggctcctctcatccaggtgattctggattgctcccacctgtatgactatacagtcaagctactctttaagctgcactcatgtctccccgctgatacactgcaaggccatcgggataggtttatggaacagttcaccaagctaaaagacctgttctacagatcttcgaacctgcagtactttaagcgcttgatccagattcctcaactccccgagaaccctcctaacttcctgagagctagtgccctctccgagcatatttcccctgttgtcgtcattcccgctgaggctagcagtcctgacagcgagcctgtgctagaaaaagatgatcttatggacatggatgcaagccaacagaacctgtttgacaacaaatttgacgatatttttggcagttcgttctcctctgatcctttcaattttaattcacagaatggggtcaacaaggatgagaaggaccacctgatcgaaaggctgtatagagagatctccggattgaaagcccagcttgaaaatatgaaaactgagagccagcgggtggtcttacaattgaagggtcacgtctccgaactggaagcggatctggcagaacagcagcacctgcgccagcaggcagccgacgactgcgaattcctccgggctgaactagacgagctcaggcgccagcgtgaagacaccgaaaaggcccagcgctcgctgtcggagatcgagcgcaaagcacaggcgaatgaacagcggtactctaaattgaaagaaaaatactccgaactcgtgcagaatcacgcagatctcctgcgtaagaacgccgaggtgacaaagcaagtgtctatggcacgccaggctcaggtggatctcgaacgcgaaaaaaaggaactggaggactccctggagagaatcagtgatcaagggcagagaaaaacccaggaacagctcgaagtactggagagcttgaagcaggagctcgcaaccagtcaacgtgaactgcaggtgcttcaaggctcattggagaccagcgcccagtctgaggccaattgggccgctgaattcgcggagctcgaaaaggagagagattctcttgtgtccggcgctgcccatcgggaagaggagttatccgctctgaggaaagaactgcaagatacgcagctaaaactggcctccaccgaagagtccatgtgccaactggcgaaggatcagcggaagatgctgcttgtgggatcgaggaaggcagcggagcaggttatccaagatgcgctgaaccaactggaggagcctcctctgattagctgcgcagggtctgccgaccacctgctgtcaacggttacaagcatcagcagttgtattgaacaactggagaagtcttggtctcaatacctcgcttgccctgaggacatttcagggctccttcacagtatcaccttgctggcgcatctgacaagcgacgctattgcgcatggggctaccacgtgcttacgcgcaccacctgagccagccgactccctgactgaagcttgcaaacaatacgggagagagactctcgcatacctggcttctttagaagaggaaggctccctcgagaacgctgactccaccgccatgcgaaactgcctttccaaaataaaagccatcggagaagagctcttgcctagaggattggatattaagcaagaagagctgggagacttggtggataaggaaatggcagccacctctgcggcaatcgagaccgccaccgcaaggatcgaggaaatgctgtcaaaaagtagggctggagacacaggcgtgaaactggaggtcaacgagcgcatcttaggatgttgtaccagcttgatgcaggcaatccaggtgctgattgttgccagcaaagatttacaacgggagatcgtcgagtccggaagaggaacggcttcgccgaaagagttctacgcaaagaactccaggtggacggaggggttaatcagtgcgtccaaggccgtgggctggggcgctacagttatggttgatgccgctgacctcgtcgtgcagggtaggggcaagttcgaagaactgatggtgtgcagtcatgaaatcgccgctagtactgcccagctcgtggccgcttcaaaagtcaaagccgataaagacagtcccaacttggcccagttgcagcaggcctctaggggagtgaaccaggccaccgccggagttgttgcctcaaccatatcaggcaaaagccaaattgaagagacagataacatggactttagctccatgacactgacccaaattaaacggcaggagatggactcacaggtgcgcgtcctggagctggagaacgagttacaaaaggagcgacagaaattaggagaattgagaaagaagcattatgaactagcgggagtggccgagggctgggaggagggcacagaagcatctccccctaccctccaggaggtcgtgacggaaaaggagtag

SEQ ID NO: 155042 - DNA, 3114 bp, Artificial Sequence
  derived and/or modified sequence
atggacagaatggccagcagcatgaagcaggtgcccaaccccctgcccaaggtgctgagcagaagaggcgtgggcgccggcctggaggccgccgagagagagagcttcgagagaacccagaccgtgagcatcaacaaggccatcaacacccaggaggtggccgtgaaggagaagcacgccagaacctgcatcctgggcacccaccacgagaagggcgcccagaccttctggagcgtggtgaacagactgcccctgagcagcaacgccgtgctgtgctggaagttctgccacgtgttccacaagctgctgagagacggccaccccaacgtgctgaaggacagcctgagatacagaaacgagctgagcgacatgagcagaatgtggggccacctgagcgagggctacggccagctgtgcagcatctacctgaagctgctgagaaccaagatggagtaccacaccaagaaccccagattccccggcaacctgcagatgagcgacagacagctggacgaggccggcgagagcgacgtgaacaacttcttccagctgaccgtggagatgttcgactacctggagtgcgagctgaacctgttccagaccgtgttcaacagcctggacatgagcagaagcgtgagcgtgaccgccgccggccagtgcagactggcccccctgatccaggtgatcctggactgcagccacctgtacgactacaccgtgaagctgctgttcaagctgcacagctgcctgcccgccgacaccctgcagggccacagagacagattcatggagcagttcaccaagctgaaggacctgttctacagaagcagcaacctgcagtacttcaagagactgatccagatcccccagctgcccgagaacccccccaacttcctgagagccagcgccctgagcgagcacatcagccccgtggtggtgatccccgccgaggccagcagccccgacagcgagcccgtgctggagaaggacgacctgatggacatggacgccagccagcagaacctgttcgacaacaagttcgacgacatcttcggcagcagcttcagcagcgaccccttcaacttcaacagccagaacggcgtgaacaaggacgagaaggaccacctgatcgagagactgtacagagagatcagcggcctgaaggcccagctggagaacatgaagaccgagagccagagagtggtgctgcagctgaagggccacgtgagcgagctggaggccgacctggccgagcagcagcacctgagacagcaggccgccgacgactgcgagttcctgagagccgagctggacgagctgagaagacagagagaggacaccgagaaggcccagagaagcctgagcgagatcgagagaaaggcccaggccaacgagcagagatacagcaagctgaaggagaagtacagcgagctggtgcagaaccacgccgacctgctgagaaagaacgccgaggtgaccaagcaggtgagcatggccagacaggcccaggtggacctggagagagagaagaaggagctggaggacagcctggagagaatcagcgaccagggccagagaaagacccaggagcagctggaggtgctggagagcctgaagcaggagctggccaccagccagagagagctgcaggtgctgcagggcagcctggagaccagcgcccagagcgaggccaactgggccgccgagttcgccgagctggagaaggagagagacagcctggtgagcggcgccgcccacagagaggaggagctgagcgccctgagaaaggagctgcaggacacccagctgaagctggccagcaccgaggagagcatgtgccagctggccaaggaccagagaaagatgctgctggtgggcagcagaaaggccgccgagcaggtgatccaggacgccctgaaccagctggaggagccccccctgatcagctgcgccggcagcgccgaccacctgctgagcaccgtgaccagcatcagcagctgcatcgagcagctggagaagagctggagccagtacctggcctgccccgaggacatcagcggcctgctgcacagcatcaccctgctggcccacctgaccagcgacgccatcgcccacggcgccaccacctgcctgagagccccccccgagcccgccgacagcctgaccgaggcctgcaagcagtacggcagagagaccctggcctacctggccagcctggaggaggagggcagcctggagaacgccgacagcaccgccatgagaaactgcctgagcaagatcaaggccatcggcgaggagctgctgcccagaggcctggacatcaagcaggaggagctgggcgacctggtggacaaggagatggccgccaccagcgccgccatcgagaccgccaccgccagaatcgaggagatgctgagcaagagcagagccggcgacaccggcgtgaagctggaggtgaacgagagaatcctgggctgctgcaccagcctgatgcaggccatccaggtgctgatcgtggccagcaaggacctgcagagagagatcgtggagagcggcagaggcaccgccagccccaaggagttctacgccaagaacagcagatggaccgagggcctgatcagcgccagcaaggccgtgggctggggcgccaccgtgatggtggacgccgccgacctggtggtgcagggcagaggcaagttcgaggagctgatggtgtgcagccacgagatcgccgccagcaccgcccagctggtggccgccagcaaggtgaaggccgacaaggacagccccaacctggcccagctgcagcaggccagcagaggcgtgaaccaggccaccgccggcgtggtggccagcaccatcagcggcaagagccagatcgaggagaccgacaacatggacttcagcagcatgaccctgacccagatcaagagacaggagatggacagccaggtgagagtgctggagctggagaacgagctgcagaaggagagacagaagctgggcgagctgagaaagaagcactacgagctggccggcgtggccgagggctgggaggagggcaccgaggccagcccccccaccctgcaggaggtggtgaccgagaaggagtag

SEQ ID NO: 155043 - protein, 200 aa, Artificial Sequence
  derived and/or modified sequence
MANIAVQRIKREFKEVLKSEETSKNQIKVDLVDENFTELRGEIAGPPDTPYEGGRYQLEIKIPETYPFNPPKVRFITKIWHPNISSVTGAICLDILKDQWAAAMTLRTVLLSLQALLAAAEPDDPQDAVVANQYKQNPEMFKQTARLWAHVYAGAPVSSPEYTKKIENLCAMGFDRNAVIVALSSKSWDVETATELLLSN

SEQ ID NO: 155044 - DNA, 603 bp, Artificial Sequence
  derived and/or modified sequence
atggcgaacatcgctgtgcagcggatcaaaagagagtttaaggaggtcctaaaatcagaggaaacttctaagaaccagataaaagtcgacctggttgatgaaaattttacggaacttaggggagagatcgcaggcccccctgacaccccatatgagggaggaaggtatcagctggagatcaagatccctgagacctacccttttaatccgcctaaagtgagatttatcaccaagatctggcatcccaatatcagctcagttactggagccatttgccttgacattctcaaagaccagtgggctgccgccatgacactccgcactgtgctgttgtctctgcaagcccttctagctgctgctgagcctgatgacccccaggatgccgtggtggcgaatcagtacaagcagaaccccgaaatgttcaaacaaacagctagattgtgggcgcatgtatacgcgggagcccctgtatccagccctgaatacaccaagaagatcgagaacttgtgcgccatgggtttcgaccggaacgccgtgatcgtagcactctcatccaagtcgtgggatgtggaaaccgccacagagttgctgctcagcaactag

SEQ ID NO: 155045 - DNA, 603 bp, Artificial Sequence
  derived and/or modified sequence
atggccaacattgctgtgcagaggatcaagcgggagttcaaggaggtgctgaagtctgaggagaccagcaagaaccagatcaaggtggacctggtggatgagaacttcacagagctgcggggggagattgctggccccccagacaccccctatgaaggaggccgctaccagctggagatcaagatccctgagacctaccccttcaacccccccaaggtgcgcttcatcaccaagatctggcaccccaacatcagctctgtgactggagccatctgcctggacatcctgaaggaccagtgggccgccgccatgaccctgaggacagtgctgctgagcctgcaggccctgctggccgctgctgagccagatgacccccaggatgctgtggtggccaaccagtacaagcagaaccctgagatgttcaagcagacagcccggctgtgggcccacgtgtatgctggggcccctgtgagcagccctgagtacaccaagaagattgagaacctgtgtgccatgggctttgacagaaatgctgtgattgtggccctgagcagcaagtcctgggatgtggagacagccacagagctgctgctgagcaactag

SEQ ID NO: 155046 - DNA, 603 bp, Artificial Sequence
  derived and/or modified sequence
atggccaacatcgccgtgcagcggatcaagcgggagttcaaggaggtgctaaaaagcgaggaaaccagcaagaatcagataaaagtggacttagttgacgaaaactttaccgagctgaggggggagattgcaggcccacccgataccccctacgagggcggccggtatcagcttgaaatcaagattcccgagacataccccttcaatccacccaaggtccgctttattacaaagatttggcacccaaacattagcagcgtcaccggtgccatttgtcttgacattctcaaggatcaatgggccgcagctatgaccctgcggactgtccttctaagcttgcaagctttgctggccgcggcggagcccgacgaccctcaggatgctgttgtcgccaatcagtataaacaaaatcctgaaatgtttaagcagacagcgcggttatgggcccatgtgtacgcgggagcacccgtttcctcccccgaatatacaaaaaaaatagagaacctgtgtgccatgggattcgaccggaacgccgtgatagtggccctgtctagtaagagttgggacgtggagacggcgactgaactgctgttaagcaactag

SEQ ID NO: 155047 - DNA, 603 bp, Artificial Sequence
  derived and/or modified sequence
atggcaaatatagcggtgcagcgtatcaagcgtgagtttaaagaggtattgaaatctgaggaaaccagtaagaaccagattaaggtggatctggtggatgagaactttacggaactgcgcggagaaattgctggcccacctgacaccccatacgaggggggtcgataccagctggaaattaaaatccccgagacctaccctttcaatccacccaaagtccgctttattaccaagatctggcatcctaacatctctagcgtcaccggcgctatatgtctcgacattttgaaagaccagtgggccgctgctatgactttaagaaccgtgttgctgtcactccaagccctgctggccgctgcggaacccgacgaccctcaggacgccgtagttgcaaatcagtacaaacagaacccagaaatgttcaaacagacagccaggctctgggctcacgtttacgctggcgcacccgtgtcctcccccgaatatactaaaaagattgaaaatctctgcgctatgggattcgatcggaacgccgtcatagtagcgcttagcagtaagtcgtgggacgtcgaaactgcaactgagctgctgctctccaactag

SEQ ID NO: 155048 - DNA, 5245 bp, Artificial Sequence
  derived and/or modified sequence
acgcgagctcgtggctcgggcgtatgggggctccaacgggagcggctgcgccgcccggccgggtcaacgtcgtgcgcatgcgccgacccggcgccattttggtggccgggcgcggaggtgattccacactgaggcgagcgcggcggccggggtggtagtggcagtgttcgtgtgctcaggtctgaatcgccgagggaggaggcggtggaggaagaggtggcggcggtggcggtggtcgtagcggtggcggaggaggcgggtacgaatcagctgcgggcggagacatggccaacatcgcggtgcagcgaatcaagcgggagttcaaggaggtgctgaagagcgaggagacgagcaaaaatcaaattaaagtagatcttgtagatgagaattttacagaattaagaggagaaatagcaggacctccagacacaccatatgaaggaggaagataccaactagagataaaaataccagaaacatacccatttaatccccctaaggtccggtttatcactaaaatatggcatcctaatattagttccgtcacaggggctatttgtttggatatcctgaaagatcaatgggcagctgcaatgactctccgcacggtattattgtcattgcaagcactattggcagctgcagagccagatgatccacaggatgctgtagtagcaaatcagtacaaacaaaatcccgaaatgttcaaacagacagctcgactttgggcacatgtgtatgctggagcaccagtttctagtccagaatacaccaaaaaaatagaaaacctatgtgctatgggctttgataggaatgcagtaatagtggccttgtcttcaaaatcatgggatgtagagactgcaacagaattgcttctgagtaactgaggcatagagagctgctgatatagtcaagcttgcctcttcttgaggagcaccaacatctgttatttttaggattctgcatagatttcttttaaactggcattcttgcctaatgatgttatctaggcaccattggagactgaaaaaaaaaaatccctgctctgtaaataaagctaattaaacgtctgtgtaaatttaaaaaggggaaatactttaattttttttcttaatagtgtaaaaattccctgagctaagctaaaaccatggaagaaacatgctactttagtgtttagcagtgtaccaagactagcaagagtttgcttcaggattttgttgaataattaagataatattttgagtgtgtcagggccattcaaattgttggtgttgcatcacagctaccttaactgtttttaacatggatcctctgtgcctgtgaatttacttgcatgcttgtacttgacttcttaggatgggtagctgaaaagaccaccattttaagcatttgagaattcttaaatatgaaatttattcagaattgaagatggtgacctattcagagcctttttgtccttgtcaacagactgggacagtgtctgattcccccttcaccccccccacccccgccttgccacacacagctaatattctaatggtaaatttctctgtatcaggtggggaaatgtgctgaaggacagtatgtatcccttgcttcatttttaggtcgtaggtttggaatgtcttgtcccagttcttcaaacactcttaaatttttcttaagtaatgtaaaaatggaactgccaattttatttctcttgcaaaaatagtaaatacttgatgttacattattcccaggtttaatgaaagaacccaacttagtttttcagtgaatttgacacctattttttagtgatgaaatttttctttgagaactggcaaggatgcagtcagctgtttgcagtttttagcctgattttggggtctatagagattgctttattggatacttcaagtcattcttgcttgcacttcccctattgacacatgaaagctgtgttggtgttttattgtacatacttcagatgcacataggaatagaagtgtgttataaatctagctttctttatgatgtttctgataatacgagaattgaaaactttaccttctcttgtacatagtcagactatttgtattaaatttacatttcattctaagttcaaaagtttgaaaattattagttttgcaagatcacacactaatgtaaccattttatgaaggttgaagtggatttatgcaggcagttctatatatagaaatacaattctttttaaatttttaggaccaatacaaaataacaaaaatgtaatggaatcagactgaattaaagtaaggctgtatattgaaagtcatattataaaaggtttgctttctttaagtgttatttatcttaaattataatcgttaaatgtttggaagataatttttgaatcataacgtcagcataacttcatttgacttctcaataatcttgatactagaagcaataaaagaaccattattaaatatattgtaatgttaaagatgtgaaggttcttccaaaaatttgtaaggctttcctaattaacagtaaactcttatagctgatattattacatactaaacacaagttgctgttttttccccatatgtttgcttacgcatgtctttatacaatcacctctttttattgctgtagtttattttctaaagatgccaaaggaaacaagatttttctttatttattttaaatacctgaaacctcgtactttatattttgaagtaaggtgggattgtgtgaaaatgtggatggtttttctccagtgttggttagaactactttttttaagtggagggcaacttggtagtattagtagaatttgggtttaaaaatatcagacacatctacccagtttattttttgcctgtattatcagggtatatttaattgtcctgtggttaaacaaaggtgagagagctcagaggtttctaaaggtcaagcattttacatatatacatacatacatgctcttggaggcagctatatcctgctttgatttttatgcacatgagccctatagggttatatactcatctaactacacttcagcatccccagtgcccaagaaattggaaagtacaatatttggtttgagacattcttcataaaagattctttattataaaaatttacctcatttacatttaatgtgatgatcttttttttcctttctggtatatttcccactgtactgtttggtttttgttattctcttgtctgtgggtagatttagttacccaaacatagaaactaaagcaattgcttttttcctctggtcttaaatatgtttggacaaaaagacactaaaaggtcaggcctaggggaaaagtaccctggtggaaattatttttgtaattcttaatatttttgagttggctccgtttgtcagttttaaaagcctcaaaaattatgttaaaaaaaaaatccagtgaaatcccatttagggcaggccgatttgttagaagtcactgatgctccagtaggcttttgttataatcaggcctgtttcctgagtatgtgcctcttttaaaagaagaaataattagctgtatagtatttcagtactgatgaatgaatgaatgaatgaatggcagttagtggacccaaataagtattcagtggtatataaatatttgaggaactaggtactgaattaggtgctctgagttggcaccccgaaatgtttggaatcacgactatgatttacttaaacacgtaacacattcaaggatatataaatggagtctaagtattttgcttttgaagagaataatctatgaaatggaagacttgattttttttttcattttttagaagtaatacacatttatgattgttggcacataaaactatgcaaaataattctttttaagtatctgtaagaaagaattggcagtttaaacggattttgcttatttatgcactacagaatgcagcatactgtattactgttgaggctgcttaataagtttaccaatgtgaaaagcagatcttgggtataagtgtatgcctgatttgagcttttaaaactgtgcagtaggtgtatggtaatgttttacaatcctatgtagcaaaataggaaattatgaatttttgttgttattgttttaaagatttaagatggattggggtagggaacagctggagccaggtataccttctagtatgtagagggaaacaatgtttagataggaaaaaggaagccgtctgtttacagttaactttatttcatggacttctacaaaatgttgtattaatcactttttctagttcaaggaatttcaattccagggtacaaaccattgatttaaaaattacgtttccattctttttagtatcagtttaaagtaaatgcttaccatcagccagttgctgtcactgggaagaaggcaacttgaagtatttactgataaaatagcctttattcccaagtgtgacttttcttcagtgtctacatattatgtcacacgttctatttgcactgctgcaatatagatcaaagatcttgtggcataggggtaggggagtgttagtatctcccttgtcccatttgttctgttactgcttcattggactgatacaccctcatgaacttgcaatcacctaaatggaagtcttgaatgtgtcaccttttgcttggttatttcaaccatgctgctatatataatcaggtgtggcacagtttgtcagtttgattataggtgtgagtggatagaaatcattacactgtgctgttaacgatccttgtctgcttgctgttacctactttttacaggcatcataataaaagctagactatttctttggggggaaagagacttatttaatgtaatttaaaaaacttttccaatagaaaatgaaatattattgaaaataatatctattttttagctttcagcaattgatggtgctttgttgtggtgtctgctggaagtctactgccattatagggaaccttgcttgttagcttctctagatctctattctaaacaatctgttagtgatgataaattctgtaggagggtctattctgagccgttaacttcctgtaaggggaaaatgggtgggttaccagaaataccattgaagcagggtgggctgtggggtggaaggttggggtatttgtcttgagaattaaaaactacgaaacacttttgtacacaactgattttttaaaaaataaacacatttttaaagatgttgaatttttccccccttattgggaattcttaaaaataaatgcatgcatgttttcccctgaaaa

SEQ ID NO: 155049 - DNA, 603 bp, Artificial Sequence
  derived and/or modified sequence
atggccaacatcgccgtgcagagaatcaagagagagttcaaggaggtgctgaagagcgaggagaccagcaagaaccagatcaaggtggacctggtggacgagaacttcaccgagctgagaggcgagatcgccggcccccccgacaccccctacgagggcggcagataccagctggagatcaagatccccgagacctaccccttcaacccccccaaggtgagattcatcaccaagatctggcaccccaacatcagcagcgtgaccggcgccatctgcctggacatcctgaaggaccagtgggccgccgccatgaccctgagaaccgtgctgctgagcctgcaggccctgctggccgccgccgagcccgacgacccccaggacgccgtggtggccaaccagtacaagcagaaccccgagatgttcaagcagaccgccagactgtgggcccacgtgtacgccggcgcccccgtgagcagccccgagtacaccaagaagatcgagaacctgtgcgccatgggcttcgacagaaacgccgtgatcgtggccctgagcagcaagagctgggacgtggagaccgccaccgagctgctgctgagcaactag

SEQ ID NO: 155050 - protein, 126 aa, Artificial Sequence
  derived and/or modified sequence
MADEIAKAQVARPGGDTIFGKIIRKEIPAKIIFEDDRCLAFHDISPQAPTHFLVIPKKHISQISVAEDDDESLLGHLMIVGKKCAADLGLNKGYRMVVNEGSDGGQSVYHVHLHVLGGRQMHWPPG

SEQ ID NO: 155051 - DNA, 381 bp, Artificial Sequence
  derived and/or modified sequence
atggctgacgaaatagctaaggctcaggtagcacgacccgggggggatacgatcttcggcaagatcatcagaaaagagattccggccaagatcatcttcgaggatgatcgctgcctcgcattccatgacatctcacctcaggcccctacccacttcttggttattccaaagaaacacattagccagataagcgtagctgaggatgatgacgagagtctgttggggcatctgatgatagtgggaaaaaaatgcgcagccgacctgggtctcaacaaaggataccggatggtcgtaaatgagggttccgacgggggccagtctgtgtaccatgtgcacttacatgtcctgggcggcaggcagatgcattggcctcccggctag

SEQ ID NO: 155052 - DNA, 1081 bp, Artificial Sequence
  derived and/or modified sequence
gcattccccaggagacaagaaaggaggatagaaaaacgacttaggaatctccttggagctcaagaccaggaacttccccaagccggaggtccctgaggcgctctagcgcgctggccgcactcgcagcccaggtcgccagtgcgcacgcgcaagattaggtggggcgccagagccggggcacctgcgcaggcttggctgcgccctctcgcgccgcacgctctgcgggttcctcccttcttccgagcctctcctctggccgccgcgcgggagagaggccgagatggcagatgagattgccaaggctcaggtcgctcggcctggtggcgacacgatctttgggaagatcatccgcaaggaaataccagccaaaatcatttttgaggatgaccggtgccttgctttccatgacatttcccctcaagcaccaacacattttctggtgatacccaagaaacatatatcccagatttctgtggcagaagatgatgatgaaagtcttcttggacacttaatgattgttggcaagaaatgtgctgctgatctgggcctgaataagggttatcgaatggtggtgaatgaaggttcagatggtggacagtctgtctatcacgttcatctccatgttcttggaggtcggcaaatgcattggcctcctggttaagcacgttttggggataattttctcttctttaggcaatgattaagttaggcaatttccagtatgttaagtaacacacttatttttgcctgtgtatggagagattcaagaaataattttaaaaccgcatacataataaaagacattgttgcatggcttatagtctctctgagtgttgcgtttgatttgttattttaaaaacatatttgttggaatatgtgaaggtgggtttataattttggatgtttcttgctttttcttcccaaggaggactcaacatatgaacatcgcattgttttaatggtgttactagtctttgaagacaaataatgagagtttataaatttagctttaacttcgaaatatctttccaggctaaaataggtccaacttagatttttaagctaattctcacattttcta

SEQ ID NO: 155053 - DNA, 381 bp, Artificial Sequence
  derived and/or modified sequence
atggctgatgaaattgccaaggcccaggtggcccggcctggaggagacaccatctttgggaagatcatcaggaaggagatcccagccaagatcatctttgaagatgaccgctgcctggccttccatgacatcagcccccaggcccccacccacttcctggtgatccccaagaagcacatcagccagatctctgtggctgaagatgatgatgagagcctgctgggccacctgatgattgtgggcaagaagtgtgccgctgacctgggcctgaacaagggctacaggatggtggtgaatgaaggaagtgatggcggccagagcgtgtaccacgtgcacctgcacgtgctgggcggccggcagatgcactggcccccaggatag

SEQ ID NO: 155054 - DNA, 381 bp, Artificial Sequence
  derived and/or modified sequence
atggccgacgagatcgccaaggcccaggtggcccggcccggcggcgacaccattttcggcaaaatcattcggaaggagatcccagcaaaaataatcttcgaggatgataggtgtctggctttccacgatatttctccacaagcccccacccattttcttgtcatccccaagaagcacatctctcagatttccgtcgcagaagacgacgatgagtccctactgggacatctaatgatagtcggaaagaaatgcgctgcagatctgggcttgaataagggttataggatggttgtgaatgaaggcagcgatgggggccagagcgtttatcatgtgcaccttcacgtgttgggagggaggcaaatgcactggcctccgggctag

SEQ ID NO: 155055 - DNA, 381 bp, Artificial Sequence
  derived and/or modified sequence
atggctgacgagatagccaaagcacaagtggcaagacctggcggagacactatttttggaaagataatccgtaaggaaatcccagcaaagatcatctttgaggatgatcgctgtttagccttccacgatatcagtccccaagccccaactcatttcctggtgatcccgaagaagcacattagtcagatcagcgttgctgaagatgacgacgagagcttgttaggtcatcttatgatagtgggaaagaaatgcgccgctgacctgggcctgaataaagggtataggatggtcgtaaatgaaggctctgatgggggacaatcagtctaccacgtccacttgcatgtcctagggggacgccaaatgcattggcccccaggctag

SEQ ID NO: 155056 - DNA, 381 bp, Artificial Sequence
  derived and/or modified sequence
atggccgacgagatcgccaaggcccaggtggccagacccggcggcgacaccatcttcggcaagatcatcagaaaggagatccccgccaagatcatcttcgaggacgacagatgcctggccttccacgacatcagcccccaggcccccacccacttcctggtgatccccaagaagcacatcagccagatcagcgtggccgaggacgacgacgagagcctgctgggccacctgatgatcgtgggcaagaagtgcgccgccgacctgggcctgaacaagggctacagaatggtggtgaacgagggcagcgacggcggccagagcgtgtaccacgtgcacctgcacgtgctgggcggcagacagatgcactggccccccggctag

SEQ ID NO: 155057 - protein, 641 aa, Artificial Sequence
  derived and/or modified sequence
MAKAAAIGIDLGTTYSCVGVFQHGKVEIIANDQGNRTTPSYVAFTDTERLIGDAAKNQVALNPQNTVFDAKRLIGRKFGDPVVQSDMKHWPFQVINDGDKPKVQVSYKGETKAFYPEEISSMVLTKMKEIAEAYLGYPVTNAVITVPAYFNDSQRQATKDAGVIAGLNVLRIINEPTAAAIAYGLDRTGKGERNVLIFDLGGGTFDVSILTIDDGIFEVKATAGDTHLGGEDFDNRLVNHFVEEFKRKHKKDISQNKRAVRRLRTACERAKRTLSSSTQASLEIDSLFEGIDFYTSITRARFEELCSDLFRSTLEPVEKALRDAKLDKAQIHDLVLVGGSTRIPKVQKLLQDFFNGRDLNKSINPDEAVAYGAAVQAAILMGDKSENVQDLLLLDVAPLSLGLETAGGVMTALIKRNSTIPTKQTQIFTTYSDNQPGVLIQVYEGERAMTKDNNLLGRFELSGIPPAPRGVPQIEVTFDIDANGILNVTATDKSTGKANKITITNDKGRLSKEEIERMVQEAEKYKAEDEVQRERVSAKNALESYAFNMKSAVEDEGLKGKISEADKKKVLDKCQEVISWLDANTLAEKDEFEHKRKELEQVCNPIISGLYQGAGGPGPGGFGAQGPKGGSGSGPTIEEVD

SEQ ID NO: 155058 - protein, 476 aa, Artificial Sequence
  derived and/or modified sequence
MAKAAAIGIDLGTTYSCVGVFQHGKGERNVLIFDLGGGTFDVSILTIDDGIFEVKATAGDTHLGGEDFDNRLVNHFVEEFKRKHKKDISQNKRAVRRLRTACERAKRTLSSSTQASLEIDSLFEGIDFYTSITRARFEELCSDLFRSTLEPVEKALRDAKLDKAQIHDLVLVGGSTRIPKVQKLLQDFFNGRDLNKSINPDEAVAYGAAVQAAILMGDKSENVQDLLLLDVAPLSLGLETAGGVMTALIKRNSTIPTKQTQIFTTYSDNQPGVLIQVYEGERAMTKDNNLLGRFELSGIPPAPRGVPQIEVTFDIDANGILNVTATDKSTGKANKITITNDKGRLSKEEIERMVQEAEKYKAEDEVQRERVSAKNALESYAFNMKSAVEDEGLKGKISEADKKKVLDKCQEVISWLDANTLAEKDEFEHKRKELEQVCNPIISGLYQGAGGPGPGGFGAQGPKGGSGSGPTIEEVD

SEQ ID NO: 155059 - protein, 641 aa, Artificial Sequence
  derived and/or modified sequence
MAKAAAIGIDLGTTYSCVGVFQHGKVEIIANDQGNRTTPSYVAFTDTERLIGDAAKNQVALNPQNTVFDAKRLIGRKFGDPVVQSDMKHWPFQVINDGDKPKVQVSYKGDTKAFYPEEISSMVLTKMKEIAEAYLGYPVTNAVITVPAYFNDSQRQATKDAGVIAGLNVLRIINEPTAAAIAYGLDRTGKGERNVLIFDLGGGTFDVSILTIDDGIFEVKATAGDTHLGGEDFDNRLVNHFVEEFKRKHKKDISQNKRAVRRLRTACERAKRTLSSSTQASLEIDSLFEGIDFYTSITRARFEELCSDLFRSTLEPVEKALRDAKLDKAQIHDLVLVGGSTRIPKVQKLLQDFFNGRDLNKSINPDEAVAYGAAVQAAILMGDKSENVQDLLLLDVAPLSLGLETAGGVMTALIKRNSTIPTKQTQIFTTYSDNQPGVLIQVYEGERAMTKDNNLLGRFELSGIPPAPRGVPQIEVTFDIDANGILNVTATDKSTGKANKITITNDKGRLSKEEIERMVQEAEKYKAEDEVQRERVSAKNALESYAFNMKSAVEDEGLKGKISEADKKKVLDKCQEVISWLDANTLAEKDEFEHKRKELEQVCNPIISGLYQGAGGPGPGGFGAQGPKGGSGSGPTIEEVD

SEQ ID NO: 155060 - protein, 232 aa, Artificial Sequence
  derived and/or modified sequence
MAKAAAIGIDLGTTYSCVGVFQHGKVEIIANDQGNRTTPSYVAFTDTERLIGDAGVIAGLNVLRIINEPTAAAIAYGLDRTGKGERNVLIFDLGGGTFDVSILTIDDGIFEVKATAGDTHLGGEDFDNRLVNHFVEEFKRKHKKDISQNKRAVRRLRTACERAKRTLSSSTQASLEIDSLFEGIDFYTSITRARFEELCSDLFRSTLEPVEKAPPASPRCRSCCRTSSTGAT

SEQ ID NO: 155061 - protein, 550 aa, Artificial Sequence
  derived and/or modified sequence
MAKAAAIGIDLGTTYSCVGVFQHGKVQISSMVLTKMKEIAEAYLGYPVTNAVITVPAYFNDSQRQATKDAGVIAGLNVLRIINEPTAAAIAYGLDRTGKGERNVLIFDLGGGTFDVSILTIDDGIFEVKATAGDTHLGGEDFDNRLVNHFVEEFKRKHKKDISQNKRAVRRLRTACERAKRTLSSSTQASLEIDSLFEGIDFYTSITRARFEELCSDLFRSTLEPVEKALRDAKLDKAQIHDLVLVGGSTRIPKVQKLLQDFFNGRDLNKSINPDEAVAYGAAVQAAILMGDKSENVQDLLLLDVAPLSLGLETAGGVMTALIKRNSTIPTKQTQIFTTYSDNQPGVLIQVYEGERAMTKDNNLLGRFELSGIPPAPRGVPQIEVTFDIDANGILNVTATDKSTGKANKITITNDKGRLSKEEIERMVQEAEKYKAEDEVQRERVSAKNALESYAFNMKSAVEDEGLKGKISEADKKKVLDKCQEVISWLDANTLAEKDEFEHKRKELEQVCNPIISGLYQGAGGPGPGGFGAQGPKGGSGSGPTIEEVD

SEQ ID NO: 155062 - protein, 623 aa, Artificial Sequence
  derived and/or modified sequence
MAKAAAIGIDLGTTYSCVGVFQHGKVEIIANDQGNRTTPSYVAFTDTERLIGDAAKNQVALNPVVQSDMKHWPFQVINDGDKPKVQVSYKGETKAFYPEEISSMVLTKMKEIAEAYLGYPVTNAVITVPAYFNDSQRQATKDAGVIAGLNVLRIINEPTAAAIAYGLDRTGKGERNVLIFDLGGGTFDVSILTIDDGIFEVKATAGDTHLGGEDFDNRLVNHFVEEFKRKHKKDISQNKRAVRRLRTACERAKRTLSSSTQASLEIDSLFEGIDFYTSITRARFEELCSDLFRSTLEPVEKALRDAKLDKAQIHDLVLVGGSTRIPKVQKLLQDFFNGRDLNKSINPDEAVAYGAAVQAAILMGDKSENVQDLLLLDVAPLSLGLETAGGVMTALIKRNSTIPTKQTQIFTTYSDNQPGVLIQVYEGERAMTKDNNLLGRFELSGIPPAPRGVPQIEVTFDIDANGILNVTATDKSTGKANKITITNDKGRLSKEEIERMVQEAEKYKAEDEVQRERVSAKNALESYAFNMKSAVEDEGLKGKISEADKKKVLDKCQEVISWLDANTLAEKDEFEHKRKELEQVCNPIISGLYQGAGGPGPGGFGAQGPKGGSGSGPTIEEVD

SEQ ID NO: 155063 - protein, 708 aa, Artificial Sequence
  derived and/or modified sequence
LRSCCEGPLRLSRVTPAVPRLSRANLCGCRHRRVEFPAFRRTELLSRIPSAVSSPQSQSGAHRQGTGMAKAAAIGIDLGTTYSCVGVFQHGKVEIIANDQGNRTTPSYVAFTDTERLIGDAAKNQVALNPQNTVFDAKRLIGRKFGDPVVQSDMKHWPFQVINDGDKPKVQVSYKGETKAFYPEEISSMVLTKMKEIAEAYLGYPVTNAVITVPAYFNDSQRQATKDAGVIAGLNVLRIINEPTAAAIAYGLDRTGKGERNVLIFDLGGGTFDVSILTIDDGIFEVKATAGDTHLGGEDFDNRLVNHFVEEFKRKHKKDISQNKRAVRRLRTACERAKRTLSSSTQASLEIDSLFEGIDFYTSITRARFEELCSDLFRSTLEPVEKALRDAKLDKAQIHDLVLVGGSTRIPKVQKLLQDFFNGRDLNKSINPDEAVAYGAAVQAAILMGDKSENVQDLLLLDVAPLSLGLETAGGVMTALIKRNSTIPTKQTQIFTTYSDNQPGVLIQVYEGERAMTKDNNLLGRFELSGIPPAPRGVPQIEVTFDIDANGILNVTATDKSTGKANKITITNDKGRLSKEEIERMVQEAEKYKAEDEVQRERVSAKNALESYAFNMKSAVEDEGLKGKISEADKKKVLDKCQEVISWLDANTLAEKDEFEHKRKELEQVCNPIISGLYQGAGGPGPGGFGAQGPKGGSGSGPTIEEVD

SEQ ID NO: 155064 - protein, 624 aa, Artificial Sequence
  derived and/or modified sequence
MAKAAAIGIDLGTTYSCVGVFQHGKVEIIANDQGNRTTPSYVAFTDTERLIGDAAKNQVALNPPVVQSDMKHWPFQVINDGDKPKVQVSYKGETKAFYPEEISSMVLTKMKEIAEAYLGYPVTNAVITVPAYFNDSQRQATKDAGVIAGLNVLRIINEPTAAAIAYGLDRTGKGERNVLIFDLGGGTFDVSILTIDDGIFEVKATAGDTHLGGEDFDNRLVNHFVEEFKRKHKKDISQNKRAVRRLRTACERAKRTLSSSTQASLEIDSLFEGIDFYTSITRARFEELCSDLFRSTLEPVEKALRDAKLDKAQIHDLVLVGGSTRIPKVQKLLQDFFNGRDLNKSINPDEAVAYGAAVQAAILMGDKSENVQDLLLLDVAPLSLGLETAGGVMTALIKRNSTIPTKQTQIFTTYSDNQPGVLIQVYEGERAMTKDNNLLGRFELSGIPPAPRGVPQIEVTFDIDANGILNVTATDKSTGKANKITITNDKGRLSKEEIERMVQEAEKYKAEDEVQRERVSAKNALESYAFNMKSAVEDEGLKGKISEADKKKVLDKCQEVISWLDANTLAEKDEFEHKRKELEQVCNPIISGLYQGAGGPGPGGFGAQGPKGGSGSGPTIEEVD

SEQ ID NO: 155065 - protein, 618 aa, Artificial Sequence
  derived and/or modified sequence
MAKAAAIGIDLGTTYSCVGVFQHGKVEIIANDQGNRTTPSYVAFTDTERLIGDAAKNQVVQSDMKHWPFQVINDGDKPKVQVSYKGETKAFYPEEISSMVLTKMKEIAEAYLGYPVTNAVITVPAYFNDSQRQATKDAGVIAGLNVLRIINEPTAAAIAYGLDRTGKGERNVLIFDLGGGTFDVSILTIDDGIFEVKATAGDTHLGGEDFDNRLVNHFVEEFKRKHKKDISQNKRAVRRLRTACERAKRTLSSSTQASLEIDSLFEGIDFYTSITRARFEELCSDLFRSTLEPVEKALRDAKLDKAQIHDLVLVGGSTRIPKVQKLLQDFFNGRDLNKSINPDEAVAYGAAVQAAILMGDKSENVQDLLLLDVAPLSLGLETAGGVMTALIKRNSTIPTKQTQIFTTYSDNQPGVLIQVYEGERAMTKDNNLLGRFELSGIPPAPRGVPQIEVTFDIDANGILNVTATDKSTGKANKITITNDKGRLSKEEIERMVQEAEKYKAEDEVQRERVSAKNALESYAFNMKSAVEDEGLKGKISEADKKKVLDKCQEVISWLDANTLAEKDEFEHKRKELEQVCNPIISGLYQGAGGPGPGGFGAQGPKGGSGSGPTIEEVD

SEQ ID NO: 155066 - DNA, 1926 bp, Artificial Sequence
  derived and/or modified sequence
atggcaaaagccgctgccatcggaattgatcttggtacaacctatagttgtgtcggggtcttccagcacggaaaagtggaaattatcgctaacgaccagggcaacaggacaaccccctcctacgtggcgttcaccgatactgagcggctcattggagacgcagccaagaaccaggtggcactgaatccccagaatactgtgttcgacgcaaaacgcctgattgggcgaaagtttggcgacccagtggtccagtctgacatgaagcactggccatttcaggtgatcaatgacggcgacaagccaaaggtgcaagtgtcttataaaggcgagaccaaggcattttaccctgaagaaattagctccatggtgttaactaagatgaaggaaatcgcggaggcctaccttggttacccagtcactaatgctgtgattacagttccagcctatttcaacgacagccagaggcaggcgaccaaagacgctggggtgattgccggactgaatgtactgcgaataataaatgaacctacagccgccgccatagcatatggattagataggacggggaagggagaaaggaacgttttgattttcgacttaggaggagggactttcgatgttagcatccttaccattgatgacggtatctttgaggtgaaggccaccgccggagacacccatttgggcggtgaggattttgacaatcggttggttaaccacttcgtggaggaattcaaaaggaaacacaagaaggatatctcccaaaataaaagggcggtaaggcggctgaggaccgcgtgtgagcgagccaaacggaccctctctagttccacgcaggcgtcacttgagatcgactctctttttgagggcatcgacttctatactagtataacccgggcccgatttgaagagctctgctccgacctgttccggtctaccctagagcctgtggaaaaggccttgcgcgacgctaaactagacaaggcccaaatacacgatctggtcttggtcggtgggagtacaagaattcccaaggtgcagaagcttcttcaagatttctttaacggacgtgacctgaacaagagtattaatcccgacgaagcagtcgcatacggtgccgccgttcaggcagctatactgatgggcgataagtcagaaaacgtgcaggacttgttactcctggacgtggctcccctcagtcttggacttgaaaccgccggaggcgtgatgactgcgctcattaagcgtaacagtacaatccctactaagcagactcagatattcacaacctattcggataaccagcccggtgtactgattcaggtctatgagggcgaacgggcgatgaccaaagacaacaatcttctggggcgatttgagctttccggtatacccccagccccacggggtgtgccccagattgaagtgactttcgacatcgatgccaacggtatactcaatgtgacagccactgacaagtctaccggcaaggctaacaagataacgatcactaacgataaggggcgattatctaaggaagagatcgaacgcatggtacaggaagctgagaaatacaaggcagaggatgaagtgcagagggagcgcgtcagcgctaaaaacgccttggagtcttacgcttttaacatgaaatcagccgtggaggacgagggccttaagggcaaaataagtgaagccgacaagaaaaaggtgctcgacaaatgtcaggaagtgattagctggctggacgctaacactcttgcagaaaaggatgagttcgaacacaaacgaaaagaacttgaacaggtttgcaaccccattatctctgggctctatcagggcgccggaggaccaggcccaggaggatttggtgcccagggtcctaaggggggatccggaagtggcccaactatcgaagaggtcgattag

SEQ ID NO: 155067 - DNA, 1431 bp, Artificial Sequence
  derived and/or modified sequence
atggccaaggctgcagcaatcgggatcgatctcgggacaacctattcttgcgtgggggtgtttcagcacggcaagggggagcgcaacgtgctcatttttgacctcggaggagggacattcgacgtgtccatactcacgatagacgacggcatcttcgaagtcaaggccacagccggagatacccacttgggtggtgaggactttgataataggctcgtgaatcatttcgtggaagaattcaagagaaagcacaagaaggatataagtcagaacaaaagggccgttcggcgcttacgtactgcgtgtgaacgagccaagaggacactgagcagctccacacaggcaagcctagaaattgatagcttattcgaaggcatcgatttctatacctcgattactagggcccgtttcgaggaactgtgcagcgacctctttaggtctacacttgagcctgtagagaaggctcttagggacgccaaactggacaaagctcagatacatgacctggttctggtaggtggatctactcggatccctaaggttcaaaaactgttgcaagactttttcaatgggcgcgacctaaataagtctattaatcctgacgaggcagtagcgtacggtgcggcggttcaagcggccatactgatgggggataagagcgagaatgtgcaagatctcttgttgctggacgttgcgcccttgtcgcttgggctagaaactgccgggggagttatgactgctctgattaaacggaattccactattcctacgaagcagactcagatcttcactacttacagcgataaccagccgggggtgctcatccaggtatatgagggggagcgggccatgactaaggataacaatctgctgggtagatttgagttgtccgggattccaccagctcctcggggcgtgccacagatcgaggttacgtttgatatcgacgctaacgggatcctcaatgtgacagcgacagataaatctactggtaaggccaacaaaattactatcacaaatgataagggtcgcctcagcaaagaagaaatcgagagaatggttcaggaagctgaaaaatataaggcggaggatgaagtccagcgtgaaagagtatctgccaagaacgcgctcgaatcctacgccttcaatatgaaatctgctgtcgaggacgaaggcctgaagggaaaaatttccgaggcagacaaaaagaaggtgcttgataagtgccaagaagtcatatcatggctggatgccaatacactggcggaaaaagatgagttcgagcacaagagaaaagagctggagcaggtgtgcaaccccatcatttcaggcttataccagggcgctggaggtccaggcccaggggggttcggggcgcaaggccctaagggcggatcaggctcaggccccactattgaagaggtggactag

SEQ ID NO: 155068 - DNA, 1431 bp, Artificial Sequence
  derived and/or modified sequence
atggccaaagccgcggctataggaattgacctgggtaccacttacagctgcgtgggcgtgttccagcacgggaaaggggagcggaacgttctcattttcgacttaggcggcgggacattcgatgtcagcattctcaccattgacgatgggatcttcgaggtgaaggcgaccgcgggagatacacacctgggaggagaagactttgacaataggctcgtgaaccacttcgtggaagaatttaaaagaaagcacaagaaagacataagtcagaataagcgagcagtgcgtcgcctgcggacagcatgcgagagagccaaaagaaccctgagttccagtactcaagcttccctggagattgatagcttatttgaaggaattgatttctacacctctatcacgagggctagatttgaagaactctgtagcgacctgtttcgttccactttggagcctgtggagaaggccctgagagacgccaagctggacaaggcccagatccacgacctagtgttagtcggaggcagcacccggataccaaaggtccagaagctgctccaagattttttcaatggtagggatctgaacaagagcataaaccctgatgaagccgtcgcctatggtgccgcggtccaggccgccatattgatgggcgacaaatcagagaacgttcaggatctgctacttctagatgtggccccactctccttaggactggaaacggctggtggagtcatgaccgcacttattaaacgtaactcaacgatccctactaagcaaacacagatttttaccacatattctgataatcaacctggtgttctcatacaagtctacgaaggcgaacgggcgatgacaaaagataataatcttctgggtcgcttcgagctttcaggcattcctccagcccctagaggagtgcctcagattgaagttacttttgacattgacgccaacggtattttgaatgtgacagccaccgataagtccacaggaaaagcaaataaaatcacaattaccaacgacaaagggcgcctcagcaaagaggaaattgagagaatggtgcaggaggcagagaagtataaggcagaagatgaggtccaacgggaacgcgtgagtgcgaaaaacgccctggagagttatgcattcaacatgaagtccgctgtcgaggacgagggtttaaaggggaaaatttctgaggctgacaagaagaaagtcctcgataagtgccaggaagtgatcagctggctggatgctaacactctggcagagaaagatgaatttgagcacaaacggaaggagctggagcaggtctgtaatcccatcattagtggattgtaccagggcgccggtggtcctggccctggcggatttggagcacagggacccaaaggagggtcagggagtggacccacaatagaagaggttgactag

SEQ ID NO: 155069 - DNA, 1926 bp, Artificial Sequence
  derived and/or modified sequence
atggcaaaagccgccgccattggtattgacctgggtaccacatacagctgcgtcggagtttttcagcatggtaaggtcgaaatcatcgccaacgaccaaggtaaccgtacaactccttcttatgtggcctttacagatacagaacggctgatcggagatgcagccaagaaccaggttgccctgaacccccaaaataccgtcttcgatgccaaaagactcatcggtcggaaatttggcgaccccgtagttcagagcgatatgaaacattggcctttccaggtgattaacgacggcgataaacctaaggtccaagtgtcatataagggggatacaaaagccttttatcctgaagaaatcagtagcatggtgcttacaaaaatgaaagaaatagctgaggcttacttgggctatcctgtaaccaatgccgtaattacagtcccagcctactttaatgattcacagaggcaagcgaccaaagatgcaggtgtcatcgccgggctcaacgtgttaagaataatcaatgaacccactgcagccgcaattgcctacgggctcgaccggaccgggaagggagaacgcaacgtgctgattttcgatctgggcggcggcaccttcgatgtctcaatcttgactatcgatgatggtatcttcgaagtaaaggccactgctggagatactcatctgggcggggaggacttcgataacaggttagtaaaccactttgtagaagaattcaagaggaagcacaagaaagacatatcacagaacaagagggcagtccgacgcctgcgaacagcttgcgaacgagctaaaaggacgctgtcctcttccacgcaagccagcctggaaattgatagtttattcgaggggattgatttttacacctccattacccgggcacggttcgaagagctttgttcggatctcttccgatccaccttagagccagtagagaaggcgttgcgcgatgcaaagctagataaagcccaaattcacgaccttgtgcttgttggtgggtctacccggatcccaaaagtccagaagctcctgcaggactttttcaatggacgcgatctgaataaatcaatcaaccccgatgaagcagtcgcctatggagccgcggtgcaggctgccattctcatgggagataaatcggagaacgtccaggatctcctgctgcttgatgtggctccactgtcactggggctcgaaaccgccgggggcgtgatgacagcccttataaagcggaattcaactatcccaactaaacagacccagatcttcacaacatattcagacaaccaacccggggtactcatccaggtgtatgagggcgagcgggctatgactaaggacaataatctgctggggaggtttgagctgagcggtattccccccgccccgcgcggggtccctcaaattgaggtaacctttgatatcgacgccaacggaattctaaacgttacggctaccgacaaatctacaggtaaagcgaacaagattacgatcacaaatgataaagggagactgtccaaggaggagatagagaggatggtgcaagaagctgagaagtacaaggcagaagatgaggtacagagggaacgggtatcagcaaagaatgcactggaatcatatgcctttaacatgaaaagcgcggtagaagacgagggcttgaagggcaaaatctcagaagccgacaaaaagaaggttctggacaagtgtcaggaggtgatctcctggctggatgccaacactcttgcagagaaggacgagttcgagcacaaacgaaaggaactcgagcaggtgtgcaaccctattatttcgggcctctaccaaggggccggagggcctgggccaggcgggttcggagcccagggacctaagggtggcagcggttctgggccaaccattgaagaggttgattag

SEQ ID NO: 155070 - DNA, 1431 bp, Artificial Sequence
  derived and/or modified sequence
atggccaaagcagccgccataggcatcgatctgggcaccacatacagctgcgtgggagtgttccagcacggcaagggcgaaaggaacgtgctgatatttgatcttggaggcggcacattcgatgttagcatcctcacaatagacgatggcatattcgaggtgaaggcaaccgcaggggacacacatctaggaggcgaagatttcgataataggctggtgaatcattttgttgaggagttcaaacggaagcataagaaagatatctcgcagaacaagcgggctgtccgccggctgcgaaccgcatgcgagcgggcaaaaagaacactcagtagtagcacacaagctagtctggagatcgactcactgtttgagggcatcgacttttatactagtatcacacgagcaagatttgaggagctctgcagtgatctcttcaggtctacgctggaaccggttgagaaggcgctgcgggacgccaagctggacaaggctcagattcatgatctggtgctcgtcggaggctccacacggatccctaaggttcagaagcttttgcaggatttcttcaatggacgagatctgaataagagcatcaatcccgacgaggccgttgcctacggcgctgccgtgcaggccgctatcctcatgggagacaaatctgaaaacgtacaggatctactgctgctcgatgtcgcccctctctccctaggactggaaaccgccgggggagttatgacagccctgattaagcgcaattcaacgatccccacaaagcagacccaaatatttaccacatattccgacaaccagccgggagttctgattcaggtatacgaaggagagagagcaatgactaaggataacaacctgttggggaggtttgaactgagcggaatacctccagcgcctcgaggcgtgcctcagatcgaggtcacctttgatatagacgccaatggaattcttaatgtcaccgcaactgataagtctactggaaaggcaaataagattaccattaccaacgacaaaggtcgcctcagcaaagaggaaattgaacgaatggtgcaagaggctgagaagtacaaagccgaagacgaggtgcagagagagcgcgtgagtgccaagaatgcgctcgagagctacgctttcaacatgaaaagcgccgtggaggatgaagggctcaaaggtaagatctccgaagccgataagaaaaaggttctggataaatgccaggaggttatctcttggttagatgccaacacactggcagaaaaagacgagttcgagcacaagcgcaaagagttagagcaggtatgcaatcccatcattagcggcctgtatcagggggccggtggtcctggaccaggcggatttggtgcacagggacctaaaggaggaagtggtagtggcccgactatcgaagaggttgattag

SEQ ID NO: 155071 - DNA, 1926 bp, Artificial Sequence
  derived and/or modified sequence
atggccaaggccgcggcgattgggatagacttaggcaccacatactcttgtgtcggggtgttccagcacggaaaggttgagattattgctaatgaccagggcaatcggacaaccccctcttacgttgcttttacggacacagagcgactgattggtgatgccgctaaaaaccaggtggcgctcaaccctcagaatacagtctttgatgccaagcgattaatcggccgcaagtttggggatccggtggttcaaagtgacatgaagcattggccattccaagttattaatgatggggataagcccaaggtgcaggtgtcctacaaaggggagacaaaggccttctacccagaggagatcagctcaatggtgcttactaaaatgaaggagatcgcagaggcttatctgggatatccagttacaaacgcggtcatcactgtacctgcgtattttaacgattcacaaagacaagccacaaaagatgctggtgtcatcgccggactgaatgttctgcgtataattaatgaacccactgctgcagctattgcttacggcctggataggacaggcaagggtgagagaaatgtgctgattttcgatttaggaggcgggaccttcgacgtgagtattctcaccatagacgatggtatctttgaggtcaaagccaccgccggagatactcacctgggtggtgaagacttcgataacaggctggtgaatcatttcgtagaggagttcaaacggaaacataaaaaggatatcagtcagaacaagcgcgcggtgcggcggctgcggactgcttgcgagcgtgccaaaaggacactatccagctccactcaggcaagcctagagattgactcactattcgaggggattgatttttatacatcgattaccagggccaggttcgaagagctgtgtagcgacctctttcgcagtaccttagaacctgtggagaaggcactacgggatgcaaagctcgataaggcccaaatccatgacttggtcctcgttggcgggtctacccgaattccgaaggtgcagaaactactccaggatttttttaacgggcgtgacctgaacaagtcgattaaccccgacgaggccgtggcctatggcgcagcagtgcaggcggctattctgatgggagacaagagtgaaaatgtacaggacttactgcttttagacgtggcccccttgagcttgggactcgaaacggcaggtggggtaatgacagccctgattaagcgaaatagtactattcctacgaaacagacccagatctttaccacctattcggataatcaacccggggtcctgattcaagtatacgagggagaacgagcgatgacaaaggacaataatcttctgggtcgctttgagctgagtggtatcccgcccgcgccgcgcggagtcccacagatagaggtgactttcgatatagacgccaacggaatcctgaatgtgacggccaccgacaagtcaacaggaaaagcgaataaaattactatcactaacgacaaaggaaggctgtctaaggaggaaattgagagaatggtgcaggaggctgaaaagtacaaggccgaagatgaggtgcagcgggaacgagttagtgcgaaaaatgctctggagagttacgccttcaacatgaaatcagccgtggaagacgaaggcctgaaggggaaaatctctgaggctgataaaaaaaaggtgttggataagtgccaggaggtaattagctggctagatgcaaacaccttagccgagaaagacgagttcgagcacaagcgcaaggaactggaacaggtctgcaaccccatcatctcagggctgtaccagggagccggagggccaggtcccggcggatttggggcacagggcccaaagggaggaagtgggtcaggccccacaatcgaggaggtggattag

SEQ ID NO: 155072 - DNA, 1926 bp, Artificial Sequence
  derived and/or modified sequence
atggccaaagctgccgccattggaatcgaccttggaaccacgtacagctgtgttggggtgttccagcacggcaaggtggaaatcattgcaaacgaccagggaaaccgtactaccccctcttacgtggcattcactgacacagagcgtctcattggcgatgcagccaagaatcaagtggccttgaacccgcagaatactgtgtttgacgccaaacggctgatcggacgcaagttcggtgaccccgtggttcagagcgacatgaaacattggccttttcaagtaattaacgacggcgacaagccaaaggtccaggtatcatacaagggtgaaaccaaggcattctatcccgaagaaatatcctctatggtcttgacaaaaatgaaagaaattgcagaggcgtacctaggttatccggttaccaacgcggtcataacagtgcctgcatacttcaatgactctcagcgtcaagcaacaaaagatgctggcgtcatcgctgggttaaacgtgctcaggattatcaacgaacctaccgctgcagctattgcttatggactggatcggactggaaagggagagcgaaacgtactgatctttgatttagggggtggtacttttgacgtgagcattctgacgatcgatgacggaatatttgaggtgaaagccacagctggagacacacacttgggcggtgaggacttcgataatcggctcgtgaatcacttcgtcgaggaattcaaaagaaaacacaagaaagacattagtcaaaacaaacgcgctgtgcgtcgcttgcgtactgcctgcgagagggcaaaacgcacactgtcaagtagcacacaggcatctttagagatcgacagcctgtttgagggcatagatttttatacttcaatcactcgagcgcggtttgaggagctgtgttcagaccttttccggagcacgctggagcctgttgagaaggctctccgcgatgcaaaactggacaaggcacaaatccacgatctggtcctcgtgggcggctctactaggatccctaaagtgcagaagttgctgcaggatttctttaatgggcgagatctgaacaaatccataaaccccgacgaggcagtcgcctacggagcagccgtgcaggctgcaatcttaatgggggacaaatctgagaacgtgcaggacctcctgttgttagatgtcgcaccattaagccttggcctcgaaacagcggggggtgttatgaccgcacttataaaaagaaactccacgatccctaccaagcagacccagattttcactacatactccgataaccagccaggagtcctcatccaagtctatgaaggcgagagagccatgactaaggacaataatctgctcggcaggtttgagctttctggcattccaccggcgccccgcggcgtgccacagatcgaggtgacattcgatatcgacgcaaacgggatcctcaacgttacagccactgataagtcaacagggaaagccaacaaaattaccattactaacgataaagggagactgagcaaggaggaaattgagaggatggtgcaagaggccgaaaagtataaagccgaggacgaggtgcaacgggaaagagtcagcgctaaaaatgccctcgaatcctacgcattcaatatgaaatcagccgttgaggacgagggcctgaaaggaaagatcagtgaggctgacaaaaagaaagttctcgacaaatgccaggaagtcataagctggctggacgcaaacactttggcagaaaaagacgagtttgaacacaaaagaaaggagctggaacaggtttgcaatcctattatctccggactgtaccagggagcaggaggaccgggacctggaggctttggggctcaagggccaaaaggaggttctgggagcgggcccaccatcgaagaggtcgactag

SEQ ID NO: 155073 - DNA, 699 bp, Artificial Sequence
  derived and/or modified sequence
atggctaaggctgccgcgatcggcatcgatcttggcacaacttattcatgtgtgggagtgtttcagcatgggaaagttgagatcattgcaaatgatcaaggcaatagaaccacccccagctatgttgcgttcaccgatactgagcggcttatcggagatgcaggagtgatcgccgggctgaacgtcctgcgcattattaatgaacccaccgccgccgccatcgcgtatggactagatcggacaggtaaaggcgagaggaatgtcttaatcttcgacttaggaggcgggacatttgatgtaagtattctcaccatcgatgacggaatattcgaggtcaaagcgactgccggcgacactcaccttggtggcgaagacttcgataatcggttagtgaaccattttgttgaggagtttaaacggaaacacaaaaaggacatctcccagaacaaaagagcggttagaagactaagaaccgcctgcgaacgggctaaaagaacgctgtcatcatcaacccaggcgtctctcgagatcgattccctattcgagggcatagacttctacacctccatcacccgtgcgcgcttcgaagaactgtgttctgacttgttccgaagcactctggaacctgtcgaaaaggcaccaccagcttccccgcgctgcaggtcctgttgcagaacctcctccacaggggccacttag

SEQ ID NO: 155074 - DNA, 1926 bp, Artificial Sequence
  derived and/or modified sequence
atggctaaagcagccgccatcgggattgatctcggcaccacatattcttgtgtgggcgttttccagcacgggaaggtggagatcatcgcaaatgaccaagggaaccggactacaccaagctatgtggcctttactgatacagaacggttgatcggggacgcggcgaagaaccaggttgcccttaacccacagaacactgtgttcgacgcaaagcgtttaattgggagaaagttcggagatcccgtagtgcagtctgacatgaaacactggcccttccaggtgatcaacgatggcgacaagccaaaggtacaggtcagctacaagggtgagacaaaggccttctaccccgaagaaattagtagcatggtgctgactaaaatgaaagaaatagctgaggcctatctcgggtaccctgtcactaacgcggtgattaccgtacccgcttactttaatgactcccagaggcaagcaacaaaggatgccggtgtcatcgccgggctaaatgtcctgaggattatcaacgaacctaccgccgctgctatagcgtacgggttggaccgtaccggaaagggggaacgtaacgtccttatctttgacctcggcggcggaacatttgatgtgtccattctaacaatcgacgatggcatcttcgaggttaaggcaacagcaggagatacccatctgggcggagaggatttcgataaccggctcgttaatcacttcgtggaggagttcaagcggaaacataaaaaagacatttctcaaaacaaaagagccgtaagaagacttagaaccgcatgcgaacgggctaagcggactttaagctcttcaactcaggcttccctggaaattgatagccttttcgagggtatcgatttttacacgagcattactcgagccaggttcgaggagctttgcagcgacttgtttagatccacactggagccggtcgaaaaggccctgagagacgcaaagttagataaggctcagattcacgacctggtcctggtgggcggctcaactcggatacctaaagtccagaaactcctccaagacttctttaacggtagggatctgaataaatctattaaccctgacgaggcggtcgcttatggagcagcagtgcaggccgccatcctgatgggcgacaagtctgagaacgtgcaggacctgctgctattggatgtggcccccctgtccttgggcctggagactgccgggggtgtcatgaccgctcttatcaagagaaattccacaatccccaccaagcagacccagattttcaccacgtactcagataaccaaccaggagtgctgatacaggtgtacgaaggggagagagcaatgacgaaggataataacctcttaggcagatttgaacttagcgggatcccccccgccccgagaggggtgccccagatcgaggtgacatttgatatagacgccaatgggatcctaaatgtcactgctaccgataagtcgactggcaaagcaaacaagataacaatcactaacgacaaggggcgcctgtctaaagaggagattgaaaggatggtgcaagaagccgaaaagtataaggctgaggacgaggtgcaacgagagcgggtcagcgcaaagaatgcattggaaagctatgccttcaatatgaaaagcgctgttgaggacgagggtctgaaaggaaaaatttccgaagcagataagaaaaaggtcctcgataaatgccaggaggtgattagctggctggatgccaacactctcgcagaaaaggatgaatttgagcataagagaaaggagctggagcaagtatgcaatcctatcatttcagggttgtatcaaggagccggaggccctggccccggcggttttggcgcccagggtcctaagggcggaagcggatctggccccaccatcgaagaggtcgattag

SEQ ID NO: 155075 - DNA, 1431 bp, Artificial Sequence
  derived and/or modified sequence
atggctaaggccgccgctattggaattgacctcggtacaacctatagctgcgtgggcgtttttcagcatggcaagggggaacgtaatgtgcttatcttcgatcttggtggtgggactttcgacgtgtccattctgactatcgacgatggtatcttcgaagttaaggctacagcgggcgacactcatcttggaggcgaagactttgacaacagactggttaaccacttcgtagaagaattcaaaagaaagcacaaaaaagacatctcccagaacaaacgcgcagtcaggcgactacgtacagcctgtgaaagagccaaacgaacactctcctcctcaacgcaggcaagcttggagattgattccctgttcgaggggatcgatttttacacctccataactcgtgctagattcgaggaattatgttccgacctgttccggtcaacactcgagccggtagagaaagccctccgggacgcaaaattagacaaggcccaaatccatgacttagtgctggtcggaggcagtacgcgtatccccaaagtgcaaaagctgctccaggacttttttaacggccgagatcttaataaaagcatcaatcctgacgaggcagtggcctatggcgctgctgtccaggctgctattttgatgggagacaagagtgagaacgtgcaggacctacttcttctagatgttgcaccgctcagcctcggactcgaaacggccggaggtgtgatgaccgcccttatcaaaaggaactcaaccattcccaccaagcagacccaaatcttcaccacttatagcgacaaccagcctggcgtcttaatccaggtgtatgaaggcgaacgggccatgaccaaggataacaacctcctgggccggttcgaactgtccggtatcccccccgcgcctcggggggtgccccagatagaagtcacgtttgatattgacgccaacggaatattgaatgtcacagccactgacaaaagtacaggaaaagcaaacaagattaccattacgaatgacaaaggcaggctgagcaaagaagagatcgagaggatggttcaggaagccgagaagtacaaggcagaggatgaggtgcaacgggaaagggtatctgccaaaaacgccctcgagtcctatgctttcaacatgaagtccgccgtggaggacgagggtctgaaggggaaaatcagtgaggcagacaagaaaaaagtgctcgacaaatgccaagaggtcatatcctggctcgacgccaatactctggctgagaaggatgagttcgagcacaaaaggaaagagctggaacaggtctgcaaccctattatttccggactgtaccagggcgccggtgggcccggtccaggcggttttggggcccaggggccaaagggcggatccggcagcggccccaccattgaagaagttgattag

SEQ ID NO: 155076 - DNA, 1431 bp, Artificial Sequence
  derived and/or modified sequence
atggccaaggctgcagcaattgggattgacttgggaacaacgtattcatgtgtgggggtttttcagcacgggaaaggtgagaggaacgttcttatctttgacctgggcgggggcactttcgacgtgtccatactgacgatcgacgatggcatctttgaagtgaaggccacagctggggatacccatctcggaggggaagattttgacaatcgccttgttaaccacttcgtggaggaattcaagcgcaaacataagaaagacatcagtcaaaacaagcgcgcagtcaggcgactacggactgcctgcgaaagagccaaacggacactctcaagtagtacacaagcatccctcgaaatcgattcactcttcgagggtatcgacttttatacttcaatcactcgcgcccgcttcgaggagctgtgctctgaccttttccgttcaactttggagcctgtggagaaagcactccgggatgctaagctcgacaaggcacagatacatgacctggtcctggtcggagggtccacgcgcatcccgaaggtgcagaaattgctgcaagatttcttcaacggaagggacctcaacaagtctattaaccccgacgaagcagtcgcttacggtgcagccgtccaggccgcaatccttatgggtgataagtccgagaacgtgcaagatctcttactactggacgtcgcacctctctctctgggactggaaacagccgggggcgtgatgaccgccctgataaaacggaactcaacgatccccaccaaacaaacccagatattcaccacttactctgataatcagcctggcgtgttgattcaggtttacgagggagagagagctatgactaaagacaacaatcttctggggcgattcgagctttccggcatcccaccagcccctagaggtgtgccacagatcgaggtcacattcgacatagacgctaacgggatcctaaacgtgaccgctactgacaaaagtaccggaaaggctaacaaaataacaataactaatgataaagggcgtctgtccaaggaggaaatcgagcggatggtgcaggaggccgagaagtacaaagctgaggatgaggtgcagagagagcgagtgagcgctaagaacgccctcgagagctacgctttcaacatgaaaagtgcggttgaggacgagggtctgaagggcaagatatctgaggccgataaaaagaaggtactggataaatgtcaggaggttatcagttggctagacgctaatacactggctgaaaaagatgagtttgaacataagcgcaaggaactggaacaggtgtgtaatcccatcatttcaggcttgtaccagggcgccggcgggcccgggcctggcggcttcggtgcgcaggggccaaagggaggatctggatcaggccccaccatagaggaggtggattag

SEQ ID NO: 155077 - DNA, 1653 bp, Artificial Sequence
  derived and/or modified sequence
atggctaaggcagcagccatcggcatcgatctgggtacaacctatagctgcgtgggagttttccagcacggcaaggtccagattagcagtatggtgctcactaaaatgaaagagattgccgaggcctatttagggtaccctgtgacaaacgccgtcatcaccgtcccagcctatttcaacgacagtcagaggcaggcaactaaggacgccggcgtaatcgcagggctcaatgtcctcagaattataaatgaacccacggcggcagctatcgcctatggcctggatcgcacaggcaaaggcgagaggaatgtattaattttcgatctgggagggggcacattcgatgtgtccatcttaacaatagatgatggtatatttgaagtgaaagctaccgccggcgatacccacctcggcggcgaggattttgacaatcgactggtgaaccactttgtcgaggagtttaaacggaagcacaagaaggacatcagccagaataaacgagctgtgagaaggttgaggacggcctgtgagagagccaaaaggactctctcttcatccacccaagcgtctttagaaattgattctctgtttgaagggattgacttctacacatcaatcacccgggctcgcttcgaagaactgtgttcagacctgtttcgtagcactcttgaacctgtagagaaggcactccgcgatgctaaactggataaggcacagatccatgaccttgtgctggtgggcggatcgaccaggatacccaaggttcagaagctattgcaggacttcttcaacgggagggatcttaataagagcattaaccctgatgaagctgttgcttacggcgccgccgttcaggcagctattctgatgggcgacaagagtgaaaacgtccaagacctgttgctcctcgacgtggctcccctgtctctgggcctggaaaccgcgggcggcgttatgactgccctgatcaaacgtaactcaaccatccccacaaagcagacccagatattcaccacctatagtgataaccagccaggagtgttaattcaggtatatgagggtgaacgggccatgacgaaagacaacaatctgctcgggagattcgaattgtcgggaatccccccagccccaagaggcgtacctcagatcgaggttacctttgacatcgatgccaatggcatccttaacgtgacagcgacagacaagtcaaccgggaaagcgaacaagatcacgataaccaatgacaagggacggcttagtaaggaggaaatcgaacgcatggtgcaggaggccgagaagtacaaggccgaggacgaagtccagcgggagcgagtatccgcaaaaaatgctctcgaaagttatgcatttaatatgaaaagcgccgtggaggacgagggcctgaaaggcaaaattagtgaggcagacaagaaaaaggtgctcgacaagtgccaggaagtgattagttggctcgatgccaacactctcgcggagaaggacgaattcgagcacaaacgtaaagagctggagcaggtgtgcaatccaattatctcagggctgtaccagggagctggggggcccgggcctggagggtttggcgcgcaaggccccaaaggcgggagcgggagtggccctacaatcgaggaggtggactag

SEQ ID NO: 155078 - DNA, 1872 bp, Artificial Sequence
  derived and/or modified sequence
atggcaaaagcagccgcgataggtatcgatctggggacaacctactcatgcgtgggggtatttcagcacgggaaggtggaaatcattgccaacgaccaggggaatcggacaaccccttcctatgtggcattcacggacaccgaacgcttaatcggagacgccgccaagaatcaggtggctttaaatccggtcgtacagtcagacatgaagcactggcccttccaggtaatcaacgatggcgacaagcctaaggtccaggtgagttacaaaggggaaacaaaagctttctaccccgaggaaatctcatcaatggtcctcaccaaaatgaaagagattgccgaggcctatctagggtacccagtgaccaatgctgtgatcaccgtgcccgcctacttcaacgactcacagaggcaggccactaaggatgcgggcgtgattgccggcctgaacgtgctgcggattataaatgagcctacggcggcagccatcgcatacggactggacaggaccggtaagggcgagcgaaatgtgttgatatttgacctgggtggggggacctttgatgtgtcaatcttaactatagacgatggcatatttgaggtgaaggctaccgcaggagatacacatcttggaggggaagacttcgataaccgcctcgtcaaccacttcgttgaggaattcaaacggaaacacaagaaagacatctcccagaacaaacgcgctgttagacgccttcggaccgcgtgcgagagggccaagaggaccttaagcagttcaacccaggcttccctcgagattgactctcttttcgagggcattgatttttataccagcataaccagagcaaggtttgaagagctttgctcagacctcttcaggtccacactggaaccagtagaaaaggccctgcgggacgcaaagttggacaaggcccagattcacgacttagtgctggtgggcggaagcaccaggatccccaaagtgcagaaattactacaggatttttttaacggaagagatctgaacaaatcaatcaatccagacgaggccgtggcctacggtgcagcagtgcaggctgctatcctgatgggcgacaaatccgagaatgtgcaggacttgttgctcctggatgtcgcccctctgagtctgggactggagaccgcaggcggcgtgatgactgctctgataaagaggaactccactattccaacaaagcagacacagatcttcaccacttactctgacaatcagcccggcgtgttgattcaggtctacgagggtgagagggcaatgacaaaggataacaatctgcttggccgctttgagctaagtggcatcccgccagccccccgcggagtccctcaaattgaagtcacgtttgacatagacgctaacggtatcctcaatgtgacagccactgataagtctactgggaaggccaataaaatcaccatcaccaacgataagggccgactttccaaggaggaaatcgagcggatggtccaagaggccgagaagtataaagccgaggatgaggtgcagcgagagcgggtatccgccaaaaacgcgctcgaatcctacgctttcaatatgaagtccgccgtggaggatgagggcctgaagggcaagatatcggaggcggacaagaagaaagtcctggacaaatgccaggaggttatttcttggctcgatgcgaacaccttagccgaaaaagacgagtttgagcacaaacgcaaggagttggagcaggtgtgtaatcccatcatttccgggttgtaccaaggtgccggaggcccagggcctggagggtttggggcccaggggcccaagggagggagcggcagtggcccaaccattgaggaggtcgactag

SEQ ID NO: 155079 - DNA, 1653 bp, Artificial Sequence
  derived and/or modified sequence
atggccaaagccgcggccatcggaattgatctggggacgacctattcctgcgtgggagttttccagcatgggaaggtacagatctcttctatggtactgacaaaaatgaaggaaatcgcagaggcctatctgggttaccccgttaccaatgctgtcattacggttcccgcctatttcaatgacagccagcgacaggcgacaaaggacgccggcgtcatcgcggggctgaacgtcttgcgcatcattaacgagcccacggccgcagccatcgcatacggactcgataggaccggtaagggcgagcgaaatgtcctgatatttgacctggggggaggtacttttgatgtgtcgatcctcactatcgatgatggtatctttgaagtcaaggccacggccggcgatacacacctcggtggggaggatttcgacaatagattggtcaatcactttgtcgaggagttcaagcggaagcataaaaaggatattagccaaaataaaagagcagtgcggaggctgaggacagcctgcgaacgagctaaaagaaccctgagttcaagtactcaagcctcactggaaatcgattctctcttcgaaggaattgacttctatacgagcatcacaagggcacggttcgaggagctgtgcagtgatttgtttcggagtacgctcgagcctgtggagaaggcccttagggacgctaaactcgacaaggcccagattcacgacctagtgcttgtcggaggctccacacgcatccccaaggtgcaaaagttgctccaggatttcttcaatggaagggatctcaataagagcatcaaccccgacgaggctgtggcttatggcgccgctgttcaggccgcgattttaatgggagataagtcagagaatgtgcaggacctgctcctgctagatgtggccccattgagcctaggactggagacagccggaggggtcatgaccgctctgattaagcggaactccaccatccctacaaaacagacacagatctttacgacctactctgacaaccagccaggagtcctcatccaggtctatgagggggaacgagccatgacaaaggataacaatttattaggaagattcgagctgagcgggatcccacctgctcctagaggcgtgccgcagatagaggtgactttcgatatcgatgctaacggcatcctgaatgttaccgcaaccgataaaagtactggtaaggctaacaaaattaccattaccaatgataagggacgcctgtccaaggaggaaattgagagaatggtacaagaagctgaaaagtataaggccgaggatgaggtccagcgtgagagagtgtccgctaagaatgccctggaaagttacgcatttaatatgaagagcgcagtggaggatgagggactgaaaggaaaaatcagcgaggctgacaaaaaaaaggtgctggataaatgtcaggaggtcatttcttggctagatgcaaataccctcgccgagaaagatgaatttgagcacaaaaggaaagaactggaacaggtctgcaacccaataataagtggcctatatcagggcgctggcggtccgggacccgggggctttggggcccaaggtccaaagggcggttctggtagcgggcctaccatcgaggaagttgactag

SEQ ID NO: 155080 - DNA, 1653 bp, Artificial Sequence
  derived and/or modified sequence
atggccaaagctgctgcgattggcatcgacctgggcaccacatacagttgcgtcggggtgtttcaacacgggaaagttcagatctcctctatggtcttgactaaaatgaaagagatcgcagaggcctatctcggctacccagtcactaacgctgtcatcaccgtcccagcctactttaatgattctcagcggcaggctacaaaggatgccggtgtgatcgcaggcttgaatgtgcttcgcatcatcaatgagccaacagcggctgccatcgcttatggattggatcggaccgggaaaggcgagcgtaacgtgcttatttttgatcttgggggtggtacttttgacgtgtctatcctgacaatcgatgacggtatcttcgaggtaaaggctactgccggcgatacccacctcggcggagaggacttcgataacaggctcgttaaccatttcgtcgaagagttcaaaaggaaacacaaaaaggatatttcgcaaaataagcgcgccgtgcgccgcttgagaaccgcgtgtgagagagcgaagcgtactctctccagtagcacacaggcttcactggaaattgattctctgttcgaaggcattgatttctatacatcaatcacccgtgcacggtttgaggagctgtgctctgatctgttccgcagcacgttagaacccgtggagaaagccctgcgagacgcaaaacttgacaaagctcaaattcacgatctggttctcgtgggagggtctacccggatccccaaggtccaaaaactgctgcaggacttttttaatggcagggatttgaacaagtcgatcaacccggatgaagctgtagcttatggcgcggccgtacaggctgcaattctaatgggggacaaatccgaaaacgtgcaagacttgctcctccttgatgtggccccactttcgctggggctggagaccgcaggaggagtcatgaccgccttgattaagagaaactcaaccataccaaccaagcaaacccagatctttacgacctactccgataatcaacccggcgtgctgatacaggtgtacgaaggcgagcgcgccatgacgaaagacaacaacctccttggcaggttcgaacttagcggcataccgcccgccccgcgaggagtaccacagatcgaagtgacattcgatatcgacgccaacggaatcctcaacgtgaccgccactgacaagtccacaggtaaggcaaacaaaattaccataaccaacgacaagggacgcttaagtaaggaggaaatcgaaagaatggtacaggaagctgaaaaatataaggctgaggacgaagtgcagagagagcgggtgtccgctaagaatgctttagagtcctacgcttttaacatgaagtcggctgtcgaggatgagggcttaaagggtaagatctcagaggccgataagaagaaggtgctggataagtgccaggaggtgatctcttggttggatgctaacaccctcgccgagaaagatgagttcgagcataaaaggaaggaacttgagcaagtctgcaacccaatcatttctggtctgtaccagggggcgggaggcccaggtccgggaggttttggcgcacaaggaccaaaaggaggatcaggaagcgggccaacaatcgaagaagtggactag

SEQ ID NO: 155081 - DNA, 1653 bp, Artificial Sequence
  derived and/or modified sequence
atggccaaggcagctgccattgggattgacctgggaactacctattcatgtgtgggtgtgttccagcatggcaaggtgcagatatcctcaatggtgctgacgaagatgaaggagatcgccgaggcctatctcggctatcccgtcactaacgcagttatcaccgttccagcctactttaatgattctcagcgtcaggcaaccaaggatgcaggagttatcgccgggctgaatgttctccgcatcatcaacgagcctaccgctgccgctatcgcatatggtcttgacagaacaggaaaaggagaacgcaacgtcctgattttcgatttgggaggcggaacttttgatgtatctatccttacaatcgacgatggaatcttcgaagtgaaggctactgccggcgatacacaccttggcggcgaagactttgataaccgtcttgtgaaccactttgtcgaagagttcaagaggaaacataaaaaggacatttcccagaataagagagccgttcgtagattgaggacagcatgtgagcgggcgaaacgtaccttaagttcgtcaacgcaggccagtttggaaatcgatagcctgtttgagggaatagacttttacacatctattacacgtgcccggttcgaggagctctgcagcgacctttttaggagtactctggaacctgtggagaaggctctgcgtgacgctaagttggacaaggcccagattcacgatctggtgttggtcggggggagcactaggatccccaaggttcagaaattgctccaggatttcttcaatggcagagatctcaacaagagcattaacccagacgaagccgtggcctacggcgccgccgtgcaggccgccattctcatgggtgataagtcagagaacgtacaggacctgctgttgttggacgtcgcacccctctccctcggattagaaacagctggcggggtaatgactgcactaattaagagaaatagcactatcccaaccaaacagacgcagattttcacaacttattcagataaccagccgggagtactgatccaggtctacgagggagagcgggccatgaccaaagataacaacctcctgggtcgatttgaactatctggcatccctccagcgcctcgcggcgttccccagattgaggtgacatttgatatagatgccaatggcatcctaaatgtgacggccacggataagtccactggcaaggctaataaaattaccatcacaaatgacaaaggtcggctgagtaaggaggagattgagcgcatggtacaggaagcagagaagtataaggcagaggacgaagtgcagcgggagcgagtatctgcaaagaatgcgctcgaatcgtatgcatttaatatgaaatccgccgtcgaggacgaaggcctgaaaggaaagatctcagaggccgataagaaaaaggtgcttgataaatgtcaggaggtgattagctggctagatgccaataccctcgctgagaaagacgagttcgaacataagcgcaaagagctggaacaggtctgcaaccctatcataagcggtctttatcagggcgcgggtggtcccggcccgggtggattcggagcccaggggcccaaaggcggtagtggaagcggacccaccatagaggaggttgattag

SEQ ID NO: 155082 - DNA, 699 bp, Artificial Sequence
  derived and/or modified sequence
atggcaaaggccgctgccattggaatagatctgggtacgacatactcgtgcgtgggcgtgttccagcatggaaaggtggaaattatagccaacgatcaaggcaacagaaccaccccttcttatgtagccttcaccgacaccgaacggttaattggagacgccggcgtaatagctgggctgaatgtcctgaggatcattaacgagcccacagctgccgcaattgcctacggcttagatcggactggaaagggggaacgcaacgtgcttatttttgacctgggaggcggcaccttcgatgtgtcaattcttacgatagatgacggcatcttcgaagtgaaggccaccgctggggatacgcacctaggaggggaagatttcgacaataggctggtcaaccacttcgtcgaggaatttaagcgcaagcataagaaagacatcagtcaaaacaagcgggcagtgaggcgactgcggaccgcttgcgaaagagccaagcgtacgctctccagtagcacacaggctagtctggaaatagacagcctgtttgagggaattgatttttacaccagtatcacccgggcgagattcgaggagctatgcagcgacttgttcagaagcactctggagcctgtcgagaaagcacccccggcaagccctcgctgtcgaagctgttgtcggactagctctaccggtgccacctag

SEQ ID NO: 155083 - DNA, 1653 bp, Artificial Sequence
  derived and/or modified sequence
atggctaaagccgctgccattggcatcgatctgggcacaacctacagctgtgttggcgtattccagcatggtaaagtgcagatctccagcatggtactgaccaagatgaaggaaatcgctgaagcctatctgggataccccgtgactaatgctgtgataacagtccctgcctacttcaatgactcccaaagacaggccacgaaggatgccggggtgatagcagggcttaacgtgctacgaatcataaatgagcccactgccgccgccatcgcgtacggattggaccggactggcaaaggggaacggaatgtgcttatttttgacttgggggggggaaccttcgatgtcagcattcttaccatcgacgatggtattttcgaagtgaaggctaccgcaggcgacacacacctgggcggagaggactttgataatcgacttgtcaatcattttgtcgaggagttcaagaggaagcacaagaaggacattagccaaaataaacgggcggttagacgcctccgaacagcatgtgagagggctaaacgcactctgtctagttcaactcaggccagcctggagattgactcgctttttgagggtatcgacttttacacgtccattactcgggcccgcttcgaggagctttgcagcgatttgttcaggagcaccttggaaccagtggagaaagccttgagagatgccaaactggacaaggcccagattcacgaccttgtgctggttgggggcagtacgcgcatcccaaaagtgcagaagctgctgcaggacttcttcaacggccgcgaccttaataagagcattaatccagacgaggctgtagcctatggcgcagctgtgcaagccgctatactgatgggggataagtcagaaaatgtgcaggatctcttactgcttgatgtagccccactatccctggggctcgaaactgcgggaggtgtgatgaccgctctgatcaaacgcaactctactatcccaaccaaacaaacacagatttttacaacatattcagacaatcagcctggcgttctcatccaggtctatgaaggcgagcgggctatgacaaaggataataacctgctgggccggttcgagctgtctggaattccacctgctcctcgcggagtcccgcagattgaggtgactttcgacatcgatgctaatggaatattgaatgtcacggccacagacaagtccaccggaaaggctaacaaaattacaatcaccaacgacaaaggtagactgagcaaggaggagatcgagcggatggtacaggaagctgaaaagtacaaggctgaggatgaggtgcaacgtgaacgtgttagtgctaagaatgctttggagtcttacgcatttaacatgaaatctgcggttgaagatgagggcttgaaggggaagatcagtgaggctgacaaaaagaaagtactcgacaagtgtcaggaagttattagttggctcgacgctaacacactggccgagaaagacgagtttgaacacaaacggaaggaactggaacaggtgtgcaaccccattattagtgggctgtatcagggcgctggcggacccgggcccggaggtttcggcgcacaggggcccaaaggaggtagcggctctggaccaacaatcgaagaagtggactag

SEQ ID NO: 155084 - DNA, 699 bp, Artificial Sequence
  derived and/or modified sequence
atggccaaggcagccgccatcggcatcgatctcggcacaacctactcgtgtgtgggggttttccaacatggaaaggtggagatcatcgctaatgaccagggcaaccgcacaacacctagttacgtggctttcacagacacagaacgtcttattggcgacgccggagtcattgcaggactgaatgtcctcaggatcataaacgaacctaccgcagctgctatagcgtatggtctggataggactggaaaaggagaaagaaacgtgctgatcttcgacctgggtggtggtacattcgatgtgtccatcctcacgattgacgatgggatcttcgaggtaaaagctacggccggcgacacgcacctgggtggggaagatttcgacaatcggctcgtgaaccactttgtggaggaattcaagagaaagcacaagaaggatatctcacagaataaaagagcggtgagaagattgaggactgcctgtgagcgggccaagagaactctgagtagctccacgcaggccagtctcgagattgattccctcttcgaggggatcgacttttacacctcaattacacgggccagatttgaagaactgtgttctgatctcttcaggagcaccttggagccagtcgagaaagcgccacctgcgagtccaaggtgtcgctcttgttgtcgaacatcaagcaccggagcgacgtag

SEQ ID NO: 155085 - DNA, 699 bp, Artificial Sequence
  derived and/or modified sequence
atggccaaggccgcagccatcggtatcgacctgggcacaacttactcatgtgtgggggtgttccagcacggcaaagtggagattatcgcaaatgaccagggaaatcgcaccaccccttcatatgtagcctttaccgacaccgaaaggttgattggagacgcaggcgtaatcgccgggttgaatgtgcttaggatcatcaatgaacccacagctgcggctattgcctatggactggatcgaaccggaaaaggggaacgcaacgtgctgatcttcgacttagggggtggcacttttgatgtgagcatcctgacaatcgatgacggaattttcgaagtgaaagccacggcgggcgatacgcacctgggcggagaggatttcgataatcggcttgtcaatcatttcgtcgaggaattcaaacggaagcacaagaaggacatctcccagaataaaagagcagtgcggcgattacgaacagcgtgcgagcgggcaaaaaggacgctgagtagtagcacacaggccagcctggaaatagatagtttattcgaaggaatagatttttacacgtcaataacccgtgcaagatttgaggagctctgtagcgacttgtttcgcagtaccctcgaaccagtggaaaaagccccaccagcctctccacggtgtcgttcttgctgccgcacatcttctactggggcgacctag

SEQ ID NO: 155086 - DNA, 699 bp, Artificial Sequence
  derived and/or modified sequence
atggcaaaggctgcagccattgggatcgatctaggcaccacatacagctgcgtgggagtatttcagcacggcaaagtggagatcatcgcaaacgatcaaggcaacaggactactccatcctatgtcgccttcacggacacagagaggttaattggcgatgcgggggtgattgccggcttgaatgtgcttcgcatcattaacgagcctacagccgccgcaattgcctatggactggaccgaaccggcaaaggagagcgcaacgtgctgatcttcgatctcggaggcgggacatttgacgtgagtatcctaaccatcgacgatggcatttttgaggtgaaagcgaccgccggtgacacccatctgggtggggaagatttcgataataggctggtaaaccactttgtagaagaatttaagcggaagcacaagaaggacatctctcaaaacaaaagggcggtacgccgactcagaacggcatgtgagcgggccaagcgaacactcagtagctcaacacaagcttcattggagattgatagtctgttcgagggaattgatttttacacctccattacgagggccagattcgaagaactgtgttccgacctttttcgttcaacacttgagcctgtcgagaaagcgcctcccgcatctcctcgatgtagatcttgttgcagaacaagttcgactggtgctacctag

SEQ ID NO: 155087 - DNA, 1926 bp, Artificial Sequence
  derived and/or modified sequence
atggccaaagcggctgcgatcggcatcgatctggggactacctattcctgcgtaggagtgttccagcacgggaaagtggaaatcatcgcaaatgaccagggaaaccggaccactccttcctacgtggcattcactgacacggaacggctcataggggacgccgccaagaatcaggtagcccttaatccgcagaacactgtgttcgatgcaaagaggctgattggtcgcaagtttggagatccagtagtgcagtccgacatgaaacactggcctttccaagtcattaacgatggagataagcccaaggtacaagtgagttacaagggggaaacgaaagcgttctacccggaagagattagtagcatggtgctgaccaaaatgaaggagatcgccgaagcttatctgggctaccccgttaccaacgcagtcatcaccgtgccagcatacttcaacgatagccagagacaggcaactaaggatgcaggtgtcattgcaggactgaacgtgctgcgcattatcaacgaacctactgccgctgccattgcgtacggactggatcgaacaggaaagggagaacggaacgtgctgatctttgacctgggggggggcacttttgacgtgtctatcctgacaatcgacgatgggatctttgaagtgaaagctactgccggggatactcacctgggtggggaggatttcgacaatcgtctggtcaatcactttgtggaggagtttaagcgtaaacataaaaaggacatatcgcagaacaaacgagccgtgcgcaggctgcgcactgcctgtgaacgcgccaagagaaccctgtctagtagtacacaagccagcttggagattgattcgttatttgagggcattgacttctacacatcaatcacacgtgcgcgatttgaagagctgtgctctgatctctttagatctactctggagccagtagagaaggcacttcgggacgcgaagctggacaaggctcagattcatgacctcgtgctggtgggcggatccacgcgaattccgaaggtgcagaagctattacaggatttttttaacggaagagacctaaacaaatccatcaacccagacgaggccgtggcgtatggtgccgcagttcaagccgccattctgatgggggacaagtccgagaatgtgcaagatcttctactccttgacgtggcccccctgagtctgggccttgaaacggccggcggtgtgatgacagctctgatcaagaggaatagcacgatacccacaaagcagacccaaattttcaccacgtatagtgataaccagccaggcgtgctgatacaggtgtatgaaggcgagagggccatgacgaaggacaacaacctcttagggaggtttgagctgtccggaattccacccgcgccccggggtgtaccccagatagaagtcaccttcgacatagacgccaacgggatccttaacgtgactgctacggataagagcaccggcaaagccaacaagattacgatcactaatgataaggggcggctatccaaggaagagattgagcgtatggttcaagaggccgagaaatataaagctgaggatgaagttcagcgcgagagggtgagtgccaagaatgcactggagagctacgcatttaatatgaaatcggccgtggaggatgaaggactcaaagggaaaatatcagaagctgacaagaaaaaagtgctggacaaatgccaagaagtaatttcatggttagacgcaaacaccttggcagagaaggatgaatttgagcataagcggaaggagctcgagcaagtctgcaatcccatcatcagcggcctgtaccagggggcagggggacctgggcccgggggatttggggcacagggtccaaagggaggcagcggttctggccctactattgaagaagtcgactag

SEQ ID NO: 155088 - DNA, 1926 bp, Artificial Sequence
  derived and/or modified sequence
atggcaaaagcagcagccataggcattgacttggggactacttattcctgcgtcggagttttccagcatggcaaggtggagatcatagccaatgaccaagggaacagaacgactccctcctatgtggctttcaccgacacagagagactgattggtgacgctgctaaaaatcaagtcgctctgaacccccagaataccgtgttcgatgccaaaagactgattggtcgcaaattcggggatcctgtggtccagtccgatatgaaacattggcctttccaggtgattaacgacggcgacaagcctaaggtccaggtctcatacaagggcgaaactaaggccttttaccccgaggagatatcttcaatggtgctgaccaaaatgaaagagatcgcagaagcttatttgggttatcctgtgacgaacgccgtcataactgtaccagcctacttcaacgacagtcagaggcaagccacaaaggatgccggagtgatcgccggcttgaatgtgctacggatcatcaatgaacctacggctgccgctattgcatacggcctcgaccgcactggcaaaggggagcgcaacgtgctgatattcgacttaggaggtgggacctttgacgtgtctatccttactatcgatgatggcattttcgaggtcaaggcaactgccggagatacacatctgggcggtgaagactttgataataggctggtgaatcactttgttgaggaattcaagcgtaaacataaaaaagatatttctcagaacaaacgggccgtccgccgcctgcggaccgcatgcgaaagagcgaagaggaccctgagctcttcaacccaggcttcactggaaatcgatagcctgttcgagggcatagacttctatacctcaatcacacgcgcccgctttgaggaactctgctctgatctctttcgctcgactctggaacccgtcgagaaggcccttcgcgacgcaaaattggacaaagctcagatccacgatctggtgcttgtcgggggcagcacgagaattccaaaggtgcagaagctgctgcaagatttttttaatgggcgagatctgaacaagagcattaatcctgatgaagcggttgcttatggagccgccgtgcaggctgctatcttaatgggcgacaagtcggagaacgttcaggacttactgctgctcgacgtggccccgctgagcctgggccttgagacagctggcggagtcatgaccgctctaatcaagcggaacagcactattccaacgaaacagacacaaattttcacaacctactcggacaaccaaccgggggtgctgatccaagtatatgagggagagcgagctatgaccaaggataacaatctgctgggcaggtttgaactgtcaggcatcccccccgccccgagaggcgtgccacagatcgaggtgaccttcgatatcgacgccaacgggatcctcaacgttactgccacagataagtctacagggaaggctaataaaataaccatcactaacgacaaagggagactttccaaagaagaaatcgagaggatggtacaggaagctgagaagtacaaagcagaggatgaggttcagcgcgagagagtatccgctaaaaacgcccttgaatcttacgcatttaatatgaagtctgcagtggaggatgaaggattgaaagggaagatctccgaggcagataagaagaaggtactcgataaatgccaggaggtgatttcgtggttggacgctaacaccctagccgaaaaagacgaattcgagcacaaaaggaaggagctagagcaggtgtgtaatcccataatttccggtctttaccagggggctggcggtcctggtccaggcgggtttggcgcccagggccccaaaggcggatccgggtccggaccgacaatcgaggaagtcgactag

SEQ ID NO: 155089 - DNA, 1926 bp, Artificial Sequence
  derived and/or modified sequence
atggccaaagctgcagcaattggaatcgaccttgggacaacatactcctgtgttggcgtattccaacacggcaaggtcgagattatcgccaatgaccagggaaaccgaacaactcccagctacgtggcttttactgacacagaacggctgataggggatgccgccaaaaaccaagttgccctcaatcctcagaacaccgtgtttgacgctaagcggcttatcggtcgtaagtttggcgaccctgtggtgcagtcagatatgaaacactggccctttcaagttatcaatgatggagataaacccaaggtgcaggtctcttacaaaggggagacgaaagcattctatcccgaggagatatcatctatggttcttacaaagatgaaagagattgccgaagcttacctgggataccccgttaccaatgcagtgattacggtgcctgcatactttaacgacagccagagacaggctactaaggacgcgggcgttatagccggccttaacgtcttaaggattatcaacgagcctaccgcagcagccatagcgtatggactcgatagaaccggcaagggggaacgcaacgtgttgattttcgatctgggcggtgggactttcgatgtgagtatcctcaccatcgacgacggaattttcgaggtgaaggcaacggctggcgacacacacctgggcggcgaggattttgataatagactggtaaatcattttgtggaggaatttaagaggaagcataagaaagatatcagccagaataagcgtgctgtccggagactcaggactgcatgtgaacgtgcaaaaaggactttgtctagcagtacacaggcatcgttagagatcgatagcctgttcgaagggattgacttttacacatctattacccgagcacggtttgaagaactgtgttcggacttgttccgatcaaccttggaaccagtggagaaagccctcagagatgctaaactcgataaggcacaaattcacgatctggtactggtcggcggatctaccagaatccccaaagtacagaagctgctgcaggacttctttaacgggcgagacctcaacaagtctataaaccctgacgaagcggtcgcatatggggctgctgtccaggcagcgattttgatgggggacaaatccgagaatgtccaggaccttctccttctcgatgtagcccctttgagcctgggcctggagaccgccgggggtgtgatgacagcactgatcaaaaggaactcaacaattccaaccaagcaaacacaaatctttacgacttactctgacaatcagcccggtgtgctcatacaggtgtacgaaggggagcgtgccatgactaaggataacaatctgttggggaggttcgaactgtccggcatccctcccgccccgagaggcgtgccacagatagaagtgaccttcgatattgacgcaaatggtatactgaacgtgacggcaaccgacaagtcaacggggaaggccaacaaaattacaatcacaaacgataagggccgactctctaaggaagagatcgagcgaatggtgcaagaggccgaaaagtataaagcagaagatgaggtgcagcgggaacgtgtatcagccaaaaatgcactggagtcatacgctttcaacatgaagtccgcagtggaggacgagggactgaaaggcaagatctccgaggcggacaaaaaaaaggtgctggacaagtgtcaggaagttatcagctggctcgacgctaatacattggctgaaaaggatgagtttgagcataagagaaaagaactcgaacaggtctgtaatcccatcatatccgggctctaccaaggcgcgggcggacctgggccaggagggtttggggcacaggggccaaaaggcgggtccggtagtggtcccacaatcgaagaggtggactag

SEQ ID NO: 155090 - DNA, 699 bp, Artificial Sequence
  derived and/or modified sequence
atggcgaaagccgccgcaataggcattgaccttggtaccacctacagttgcgttggcgtgttccagcacgggaaagtcgagattatcgcaaacgatcagggaaataggactacccctagctacgtggccttcacagacacggaacggctgatcggcgatgcaggtgtcatagctggcctgaatgtgctgcggatcatcaatgagcccaccgccgctgctatcgcgtatgggttggatcggacaggcaaaggggagcggaacgttttgatttttgatctggggggcggaacctttgatgtatctatactaactattgacgatgggatcttcgaagtgaaggctaccgcaggagatactcatctcggtggggaagactttgacaaccgcttggttaatcattttgtagaagagttcaaacgaaagcataagaaggatatcagtcagaacaagagagcagtccggagattgcggaccgcatgtgagagagcaaagaggaccttgagttcgagcacacaagccagcttggagatagactcattgtttgaaggcatcgatttctataccagcatcacgcgggccaggtttgaagaactgtgttctgacctttttaggtccaccctagagcctgtggagaaggccccccccgctagcccccggtgccggtcatgttgccgcactagcagcaccggtgccacctag

SEQ ID NO: 155091 - DNA, 1926 bp, Artificial Sequence
  derived and/or modified sequence
atggcgaaagccgctgctattggcatcgacctgggaacgacttactcctgcgtgggcgttttccagcatggaaaagttgagatcatcgctaacgaccaggggaaccgcacaacacctagctatgtcgccttcacagacacggagcggcttataggcgacgccgcaaagaatcaagtagcactgaaccctcagaacacagttttcgacgccaagagactaatcggcagaaaatttggtgacccagttgtgcagagtgacatgaagcactggccgtttcaagttattaacgacggtgataagccaaaggtacaggtgagctataagggcgaaacaaaagcattctaccccgaagagatcagctcaatggtcctcaccaagatgaaagaaatcgcagaggcatacctgggttaccctgtcacgaatgccgtcatcacagtgccagcatattttaatgatagccaacgacaagctacaaaagacgccggcgtgatcgcgggactaaacgttcttcgtatcattaatgaaccgacagccgcggccatcgcatacggactggaccgcacaggaaaaggcgaaagaaatgtcttaatttttgacctgggcggagggacttttgatgtcagcatacttacgatcgacgacggtattttcgaagttaaggctacagcgggcgacacccatttaggtggagaggacttcgataacagactggtaaaccacttcgtggaagagttcaaaagaaagcataagaaggatatatcacagaacaagcgcgccgtgcgacgcttgcggacagcctgtgaaagagctaaaagaacactcagctcctcgactcaggctagcctcgagattgactcgctatttgaaggaatagacttctatacatctatcacccgagccagattcgaggagctatgttctgacttgttccgatctactttggaaccagttgagaaggctttgagagacgccaaactcgacaaggcccagatacacgacttggtcctagtcgggggtagcaccagaatcccaaaggtccagaaactccttcaggacttcttcaatggaagagatcttaacaaaagcatcaatcccgatgaagctgtcgcatacggtgcagcagtgcaggcggcgattcttatgggcgataaatcagaaaatgtgcaggacctgctgctgttagacgtcgcccctttaagcctgggacttgagaccgcgggcggcgtcatgactgctctcatcaagcggaattcaaccattcctaccaagcaaactcagatatttaccacttattcagataaccagccaggcgtgcttattcaggtctacgaaggcgagcgggccatgaccaaagacaataacctcctggggcgttttgaacttagtggcatccctcccgcaccaaggggggttccgcagattgaggtgacgttcgacattgatgctaacggaatcctgaacgtgactgcaaccgacaaaagcacaggcaaagcaaacaagatcactatcacgaatgacaagggtagactaagtaaagaagaaatcgaacgcatggtccaggaggctgaaaagtataaggcggaggatgaagttcaacgcgaaagggtatctgcaaagaatgctctcgaaagttacgccttcaatatgaaaagcgcagtcgaagacgaaggattgaaggggaagatttctgaggctgacaaaaagaaggtcttggataaatgccaggaggtgatctcttggttggatgccaatacacttgctgagaaggacgaatttgaacacaagcggaaagagctggagcaggtttgtaacccgatcatttccggactctaccaaggggccggcgggccaggccccgggggttttggcgcacagggacccaagggggggagcggttctgggcccactatagaagaggtggattag

SEQ ID NO: 155092 - DNA, 1926 bp, Artificial Sequence
  derived and/or modified sequence
atggccaaggcagccgccatcggaatcgacttgggcactacctattcctgcgtaggagtgttccaacatggaaaagtcgaaatcatcgccaatgaccaggggaacaggactactccctcgtatgtggcctttacggacactgagcgcttgatcggagatgcagctaagaaccaggtggccttgaatccccagaacactgtcttcgacgcaaagcgcttgatcggcaggaagtttggagacccagtcgtgcaatcagacatgaagcactggccattccaggttatcaatgacggcgacaagcctaaggttcaggtctcttacaagggagaaacaaaagcgttctatccagaggaaatatctagcatggtcctgaccaaaatgaaggaaatcgccgaagcttacctcggttatcccgtcacaaacgctgtgattacggttcctgcttattttaacgacagccagagacaggcaactaaggacgccggagtaatagctggactgaacgttctgagaataattaatgagcctacagccgcagcaatcgcatacggactggataggaccggcaagggcgagcgcaacgtcttgatttttgatctgggtggcggtacattcgacgtgagtatcctcaccatcgatgatggtatctttgaagtcaaagcaactgccggtgacactcatctgggaggcgaggatttcgacaaccggttagtgaaccactttgttgaggaatttaagcgtaaacacaagaaggatatatcccaaaacaagagggccgtgcgccgactgcggacggcgtgcgagagggcaaaacgtacactgtcatccagcacacaggcaagcctggagatcgactctctttttgaaggtatcgatttctacacctcaatcacacgagctagatttgaggagttgtgcagcgacctgtttcgcagcaccctggaacccgtggaaaaggctctgcgtgacgcgaagcttgacaaggcgcagatccatgacctggttttggtagggggctctacaaggataccaaaggtgcaaaaacttctgcaggacttctttaacggcagagatctaaataagtcgataaatccagacgaggccgtcgcatacggcgccgctgtgcaggcagccatcttaatgggtgacaaatccgagaatgtccaagatctgttacttctggacgtggcccctctgagcttggggcttgaaactgctggaggagtgatgactgccctgatcaagcggaacagcactatcccgaccaagcagacgcaaatttttacgacctattccgataatcagccaggcgtgctcatacaagtgtacgaaggcgagagggctatgacaaaggataacaacctgctcggccggtttgagttgagtggcattccccccgccccgagaggtgtaccacagatagaggttacctttgacatcgatgccaacggcattctaaatgtcacggctactgataagtcaacaggtaaagcgaacaagattaccatcaccaacgataaaggaagactgtcgaaggaagagattgaacgcatggttcaggaagctgagaagtacaaggccgaggatgaagtacagagagagcgcgtttccgcgaaaaacgcactcgagtcatatgcttttaatatgaagagcgccgtagaggatgaaggcctgaagggcaaaatatccgaggcagacaagaagaaggtcctcgataagtgccaggaggtgattagctggttggatgcaaacaccctggcagaaaaagacgaatttgagcataaacggaaagaactggagcaggtttgcaatccaattatcagcgggttataccagggggcaggtggccccggcccgggaggattcggcgcgcaggggccgaaggggggcagcgggtccggtcccactatcgaggaggtcgattag

SEQ ID NO: 155093 - DNA, 2127 bp, Artificial Sequence
  derived and/or modified sequence
ctgagatcctgctgtgagggacccctgcgactgagcagggtgaccccagctgtgccccgactgagcagagccaatttgtgtggttgccggcaccggcgtgtggaattccccgcctttcggcgcactgagctcttgagccgcattccctccgcggtaagcagtcctcaatcccaatccggcgcacaccgccaagggacgggaatggccaaagctgccgccatcggaattgatctgggcaccacatattcttgcgtaggggtctttcagcatggtaaggtcgagatcatcgccaatgaccaaggcaacagaaccaccccctcctatgtggccttcactgatactgagaggctgattggcgatgcagcaaaaaatcaggtagcattaaatcctcagaacaccgtattcgatgccaaaaggctcatcgggagaaagttcggtgatcctgtggtgcagtctgacatgaagcactggccattccaagtaattaacgatggggacaagcctaaagtgcaggtctcatataaaggtgagacaaaggcattttatcctgaggagatttcctcaatggtcctgacgaagatgaaagagattgcagaggcatatttgggctaccctgtaaccaacgcggttataaccgtgccggcgtactttaatgatagtcagagacaggccacaaaagacgcaggagtaatcgctggcctgaatgtgctgcgaatcatcaatgagcctacagcagcagccatcgcttacgggctggaccgaacaggcaaaggagagaggaatgttttaatatttgatctgggggggggcacgtttgacgtgtccatcttgaccattgatgacgggattttcgaagttaaagctaccgcaggcgacacccatctcggtggggaggatttcgacaacagactagtgaatcatttcgtagaagagtttaaacgcaagcacaagaaggatatctcccagaacaagcgggctgttcgccgcttaaggactgcctgcgagagagccaagaggacactctccagtagcacacaggctagccttgagatcgactctctttttgaagggattgatttctacacgagtattacaagagcccgctttgaagaattatgctcagaccttttcagatcaacactcgaaccagtggagaaagctcttagagacgcaaaactggataaggctcagattcacgatctcgtcttggtgggagggagtacaaggattcccaaagtccaaaaactgcttcaagacttctttaatggtagagatctgaataagtctatcaacccagatgaagctgtggcttatggggcagcagtgcaagcagctatcctgatgggagacaaatcagagaatgtgcaggatcttctcctgctcgacgttgcccctttaagtctcggactagagacggctggcggagtcatgactgccctcatcaaaaggaatagtacaattccgacgaagcagactcagattttcaccacctacagtgacaatcagcctggagtcctgatacaagtttacgagggcgagagggctatgaccaaggataacaacctgctgggtagatttgagctctccggcatccccccggcgcctaggggcgtgccccagatcgaggttaccttcgatatcgacgccaatggaattctgaacgttacagccactgacaaaagcaccggtaaagcgaataaaataacaattacgaatgacaaagggcggctgagtaaagaggaaatagaacgtatggtgcaagaggcagagaaatacaaggcagaagatgaagttcaacgggaacgcgtgtctgccaaaaacgccctggagtcttatgcctttaacatgaagtctgctgtcgaggacgaaggactgaaagggaagatcagcgaggccgataagaagaaagttctggataaatgccaggaggtgatcagttggcttgacgccaacaccttagccgagaaggacgagttcgaacataaacggaaggaattggagcaagtgtgtaacccgataatctcggggttatatcagggcgctggaggccctggtccgggcggtttcggtgcccaagggcccaaggggggctctggtagcggccccacgattgaagaggtggactag

SEQ ID NO: 155094 - DNA, 1653 bp, Artificial Sequence
  derived and/or modified sequence
atggcgaaagccgccgccattgggatcgacctgggtaccacctactcatgcgtgggtgtctttcagcacggcaaagttcaaattagttcgatggtgttaacaaaaatgaaagagatagcagaggcttacctaggctatccggtgactaatgcagtgattactgttcctgcgtactttaatgactctcagcgacaggcaactaaagatgccggggtcattgccggcttgaacgtactgcgcatcattaatgaacccactgccgcagccatcgcttatggcctggacagaaccggaaaaggggagaggaacgtgctgattttcgacctgggcgggggtaccttcgatgtgagcattctgacaattgacgacggcatcttcgaagtcaaggcgaccgcgggggacacacatctggggggcgaggactttgacaatcggttagtgaaccactttgtggaagaatttaagcggaaacacaaaaaggatatctcacagaataaacgagcggtccgcagactgcggaccgcctgcgaacgtgccaagcgtaccctatcatcaagtacacaggcaagcctcgagatcgatagccttttcgaggggattgatttttacacgagcatcacccgagcacggtttgaagagctttgcagtgacctcttccgcagtaccctggaacctgtcgaaaaagctctgcgcgatgctaagctggacaaagctcaaattcatgacctggtcctcgtcggcgggtcaactagaatccctaaggttcagaagctgctgcaggatttttttaacggaagggatctgaataagagcatcaacccagatgaagcagtagcctacggcgccgctgtgcaggcagccatcctgatgggcgacaagtcagagaatgtgcaggacctgctcctcctcgatgtggctccccttagcttgggtctggagacggcgggtggtgtcatgaccgctctcatcaaaagaaattctactatccccacgaaacagactcagatcttcactacctactctgataatcagcccggggttcttattcaggtctatgaaggcgagagggccatgacaaaagacaacaacttgttaggtagatttgagctcagtggcattccgcctgctcctcgtggagtgccacaaattgaagttaccttcgacatcgacgctaatgggatcctcaacgtcactgccaccgataaaagcactggcaaggcaaataagatcaccattacgaatgataaaggccgcttgtctaaagaagaaatcgaaagaatggtgcaggaggccgaaaagtacaaagcagaggacgaagtacagagagagagggtatccgccaagaacgccctcgagtcttacgcctttaatatgaagtcagcagtggaggatgaaggccttaaagggaaaatcagcgaagccgataagaaaaaagtcctggacaaatgccaggaggtcatttcctggctcgatgccaataccttagccgagaaggacgagttcgagcataaacgaaaagagctggagcaggtgtgtaatcctattatttcaggcctgtatcagggagcaggcgggcccggtcctggcggattcggggctcaaggccctaagggaggttcggggtcaggcccaacgattgaggaggttgactag

SEQ ID NO: 155095 - DNA, 1875 bp, Artificial Sequence
  derived and/or modified sequence
atggccaaggccgccgctatcggtatagatctcgggacaacttactcgtgtgtgggagtattccaacatgggaaggtcgagattatcgctaatgatcaagggaaccgcaccacaccttcttacgtcgctttcacggatacagaaaggttaatcggggatgcggcaaagaaccaagtcgccctaaacccccctgtcgtgcagagtgatatgaaacattggcccttccaggtgatcaacgatggcgacaagcctaaggtgcaggtcagttataagggggagaccaaggccttctacccagaagaaatttcctccatggtgctcaccaaaatgaaagagatcgccgaggcttatctcggttaccctgtgacgaatgctgtgattacagttcccgcctacttcaacgacagtcagaggcaggccactaaggatgcaggtgttattgccgggctcaatgtcctcagaatcattaacgaaccgaccgcagccgccatcgcatatgggttggatcgaacaggaaagggtgaaagaaacgtgctcatcttcgacctcggcggtggcacttttgatgtttcaattctcaccattgacgacggaatttttgaggtcaaggccaccgcaggggacacccacttgggcggggaagactttgacaaccggttggtgaaccactttgtggaagaattcaaaaggaagcacaaaaaagacataagtcagaacaaaagggcggtgaggaggctgcgcacagcctgcgagcgggctaaacgcacattgtccagttccacccaggcctctttggaaatcgatagcctcttcgagggcattgatttttataccagtattacgagggcaagattcgaggagctctgcagtgatctcttccgctctactcttgaaccagtggagaaagctctgagagacgccaagctcgacaaggctcagatccatgatctggtcctagttggaggcagcacccgcatccccaaggtccagaagctcctccaggactttttcaatggtagagacctgaacaagtcaataaacccagacgaggccgtggcttatggggccgccgtgcaggccgctattctaatgggagataaatccgaaaacgttcaggacctgctgctactggatgtggcgcctctgtctctgggactggagacagcagggggtgtgatgaccgctctcataaagcggaattctaccataccaaccaaacagacgcagatcttcaccacctattctgacaatcagccgggcgttctgatccaggtctacgagggcgagcgcgcaatgacaaaagataataatctgcttggcagattcgagctgagcgggattcccccggccccccggggggtgcctcagatcgaagtgaccttcgacatagacgccaacggaatcttgaatgtaacagcgaccgataagtccaccggaaaagcaaataagatcacaatcacgaatgataagggacgactcagtaaggaagagatcgagcgtatggtgcaagaggcagaaaagtacaaggcagaggatgaggttcagcgcgaaagggtgtccgcaaaaaatgcactcgagagctatgccttcaatatgaagtctgcggtggaagacgaaggtctaaaaggaaaaatttctgaagcagacaagaaaaaagtgttggacaaatgtcaggaggtgataagttggctggatgctaataccctcgcagagaaggacgaatttgagcacaagagaaaagaattggaacaagtctgcaatcccataatttcagggctctatcaaggcgctggggggcctgggccaggtgggttcggagcccagggtccaaaagggggctctgggtctggccccacaatcgaagaggttgattag

SEQ ID NO: 155096 - DNA, 1857 bp, Artificial Sequence
  derived and/or modified sequence
atggcaaaagccgcagctataggcatagacctggggactacgtattcttgcgtgggagttttccagcacggcaaagtggaaatcattgccaacgaccaggggaaccgcacaacaccttcatatgttgctttcactgatacagagcgcctaatcggtgatgcagcaaaaaatcaagttgttcaatccgacatgaaacattggccttttcaggtcatcaatgacggagacaaacctaaagtacaggtttcttacaaaggtgagacgaaagccttttatccagaggagatttcctcaatggtgctgacaaaaatgaaggagatagccgaggcctacctgggctacccagtgaccaacgccgtcatcactgtccctgcgtattttaatgactcccagcgccaggcaaccaaggatgccggggttatagccgggttgaatgtcttaagaattataaatgagcctacagctgcggcgatcgcctatggtctcgacaggaccggcaaaggcgagcggaatgttctgatcttcgatctgggcggaggcacgtttgatgtgtccatcttgactatagatgacgggatctttgaagttaaggcgacagccggcgacacccacctaggcggtgaagacttcgacaatcgcttagtgaatcactttgtcgaggagttcaagaggaaacataagaaggatatttcccaaaataaacgcgcggtgcgccggctcagaaccgcatgtgagagggccaaaagaaccttgagtagttcaacacaggcctctctggagatcgattcactcttcgaaggcatcgatttttatacttctatcactagggctcggtttgaggaactgtgcagtgatctgttccggtccactctggagcccgtggagaaagcgcttcgcgacgcgaagctggataaggctcaaattcatgatcttgttctggtgggaggatctacccggataccgaaagtgcaaaagctgctccaggactttttcaacggccgagacctcaacaagagtatcaatcccgacgaggccgtggcctatggagcagcagtgcaggccgccatcctgatgggtgacaagtctgagaacgtgcaggacctacttttactggacgtggcaccactctccctggggctcgagactgctggcggcgtcatgaccgctctgatcaagcggaattctaccatccccactaagcagacccaaatcttcaccacttactccgataatcagcctggcgtcctaatacaagtgtacgaaggggagcgcgccatgactaaggacaacaatctgctggggagattcgaattgtccggcattccaccagctccccgaggggtacctcagatcgaggtgactttcgatatcgatgccaatggtatccttaacgtgactgccacagataaatcaacaggaaaggccaacaaaattaccataacaaatgacaagggccgcctgtccaaagaggagatcgaaagaatggtccaggaggcagagaagtataaggctgaggacgaggttcagcgagaacgagtttccgctaagaacgccctggaatcttatgcattcaatatgaagtcagccgtggaagatgaaggcttaaaaggaaaaattagcgaagccgataaaaaaaaggtgttggacaagtgtcaggaggtcatctcatggttagatgccaacacactcgcggagaaggacgaattcgagcataagcggaaagaactcgagcaggtttgcaatccaatcatctctggtctgtatcagggcgctggtggaccggggccaggagggtttggcgctcagggcccaaagggtggctctggaagtggcccaaccatcgaggaggtcgattag

SEQ ID NO: 155097 - DNA, 1857 bp, Artificial Sequence
  derived and/or modified sequence
atggccaaagccgccgctataggaatcgacctcgggacaacgtattcttgcgtaggggtttttcaacatggtaaggtcgagatcatcgccaatgaccagggcaacagaactactccaagctacgtggccttcactgacacggagagactcatcggggatgcggcaaagaatcaggtagtccagagcgacatgaagcactggcccttccaggtgatcaacgacggcgataaaccaaaggtccaggtctcatacaagggagagactaaggctttctaccctgaagaaattagttcaatggtcctcaccaaaatgaaagaaattgcggaggcctacttggggtacccagtcactaatgccgttattactgtgccagcatactttaatgatagccaacgacaggccaccaaagatgcaggcgtgatcgccggcttaaatgtactccgaatcatcaacgagccgaccgctgctgctatcgcatatggactcgatcgcaccggcaaaggcgagaggaatgttctgatctttgatttagggggcggaacttttgacgtgtctatcctgacaattgatgatggcatttttgaggttaaggctaccgctggagacacacatctaggcggtgaagactttgataatcgcttggttaaccacttcgtcgaggagtttaagcgcaagcataagaaagatatctcacaaaacaaaagagcggtccgtagactcaggacagcatgtgaacgtgccaaaaggacactatcttcttccacccaagccagcctggagatcgactctctgtttgaaggcatcgacttctacacttcaataacaagagcccggttcgaagagttgtgctctgacctgtttcggtctactcttgagccagtggaaaaggcattgcgcgacgcgaagcttgacaaagcacagattcacgacctggtgctggtgggcggctctacccgtatccctaaagtccagaaactcctgcaggacttcttcaatgggcgcgatttgaacaaaagcataaatccagatgaggctgttgcttacggagcagccgtccaggccgccatcctcatgggcgataagagcgagaatgttcaggatttgctgctgctcgatgtggctccactgtcactcggactggaaacagctggcggggtcatgaccgccctcatcaagagaaatagcaccattccgaccaagcaaacccaaatatttaccacttacagcgataaccagccaggcgtgttaatccaggtgtacgagggcgaacgcgccatgaccaaggacaataaccttttgggtagatttgagttgtcaggcatcccacctgcgccaagaggggttccgcaaatcgaggtgacattcgacattgacgcaaacggcatcttgaacgtgactgcaaccgacaagtccaccggcaaagccaataaaattacgattacaaacgataagggccgtctttccaaggaagagatcgaacggatggtccaggaagcagaaaagtataaggccgaggatgaagtccaaagggagagagtgtcagctaagaacgcactggaaagctatgcttttaatatgaagagcgccgtggaagacgagggtctgaaaggtaagataagcgaggccgacaagaaaaaggttctcgacaagtgtcaagaagttataagttggctggatgccaatactctggcagaaaaggacgagtttgagcacaaaaggaaggaattggagcaagtgtgtaaccccatcatttccggactctatcagggagctggcggccctggacccgggggcttcggcgcacaagggcctaagggcgggtcgggctctgggcctaccatcgaagaggtggactag

SEQ ID NO: 155098 - DNA, 1653 bp, Artificial Sequence
  derived and/or modified sequence
atggctaaagcagctgccatcggaattgatctgggcaccacctattcatgtgtgggcgtgttccagcacggcaaggtacaaataagcagtatggtgctgaccaagatgaaggagattgccgaggcatacctcggttatcccgtgactaacgcagttataacagtgccggcatacttcaacgactctcagcgccaggcgacaaaagacgctggtgttatagctggcctaaatgtcctcaggatcattaatgagcctactgccgccgcaattgcctatggattagaccggacaggcaaaggcgagcgcaacgtactgatttttgatttgggcggcgggacttttgacgtcagcatcctgactatagatgatggtatttttgaggtcaaggcgacggccggcgatactcacctcggcggtgaggacttcgataatcggctcgtgaaccatttcgttgaagaatttaagcgcaagcataagaaggacattagtcagaataagcgtgcagtgcggagactccggaccgcttgcgaacgcgccaaaagaaccttgtcttcaagtacccaagctagtctggagatcgactccttatttgagggtattgacttttacacaagtatcactagggctaggtttgaagaactttgctcggacctgttcaggtcaacccttgagcctgtggagaaagcgctgcgtgatgctaagctcgataaagcacaaatccacgacctggtccttgtgggaggatctacgagaattcccaaggtgcaaaaacttctgcaggacttcttcaacggacgggatctgaataagtcaatcaacccggatgaagccgtagcttacggagccgcagtgcaggctgcaattctgatgggtgacaagagcgaaaacgtgcaggatctcttactgctcgatgtcgccccgctcagcctcgggctggagactgctggtggagtgatgacggcgttaatcaagagaaacagcacaattcctactaaacagacccaaatattcacaacctactctgacaatcagcccggggttttgattcaggtctacgagggagagcgggccatgacaaaagacaataacctgctgggacggtttgaactctctggaattcctccagcgccccgcggcgttccacaaatagaagtgacatttgatattgatgccaacggtatactgaatgtcacagctaccgataagagcacgggaaaggccaacaagataacaataacgaacgataagggaaggctgtctaaagaagaaatcgagaggatggtccaggaggccgagaaatacaaggcagaggacgaggtacagcgagagcgcgtaagtgctaagaacgctctagaatcctatgctttcaacatgaagtccgcggtagaggatgaagggctgaagggaaaaattagtgaagcagataaaaaaaaagtgctcgataaatgtcaggaggtgattagctggctcgatgccaatactttagcagaaaaagacgagttcgaacataagcgcaaggaactggaacaggtctgcaaccctattatctcagggctttatcaaggggccggggggcccggcccaggcggctttggagctcagggccctaaagggggctcggggtctggtcctaccatcgaggaggtcgattag

SEQ ID NO: 155099 - DNA, 1857 bp, Artificial Sequence
  derived and/or modified sequence
atggcaaaagccgcagcaattgggattgatctgggtactacctattcctgcgtgggggtgttccaacatggaaaggttgaaataatcgcaaacgatcagggaaatcggaccacacctagttacgtggctttcaccgacactgagagactgatcggagacgccgctaagaaccaggttgttcagagtgacatgaaacactggcctttccaggtcattaacgatggcgacaagccgaaggttcaggtgtcttacaagggggagactaaagctttctatcccgaagaaattagcagcatggttttgactaagatgaaggaaattgcggaggcatatctgggctaccccgtgactaacgcagtcatcacggtgccggcatatttcaacgattcccagcgccaggcaacaaaagacgcgggcgtgattgctggcctgaatgtcctgcgcatcatcaatgagcctactgccgccgctatcgcttatggcctggacagaaccggaaaaggggagcgcaatgtcctcatttttgacctgggcgggggtacatttgacgtaagcattttgacaatcgatgatgggatctttgaagttaaggccactgccggcgatacacaccttggaggggaggatttcgataatcgtttagtgaaccatttcgttgaggagtttaaaaggaaacataagaaagacatttcacagaacaagcgagccgtgcgcagactgagaaccgcttgtgaaagagccaagcggaccttgagctcgagcacgcaggcttctctggaaattgatagtctgttcgaaggaattgatttttacaccagcattacacgagctagatttgaggagctgtgctctgatctgtttcgctcaaccctagagccggttgaaaaagcactacgtgatgccaaattagataaggcccagatccacgatctggtgcttgttggcggtagcacgaggatacccaaagtacagaagttgctgcaggacttttttaatggtagggacctcaataagtcaattaacccagacgaggccgtggcttacggcgcagcggtgcaggccgccatacttatgggtgataaaagtgagaatgtgcaggatctgctgctgctggacgttgctcccttgtcactgggccttgagacagcgggcggcgtgatgaccgccctgattaagcgcaactcaaccatcccgacaaaacagactcaaattttcactacatattcagacaatcagccaggcgtcttgatccaggtttatgagggcgaacgggccatgacaaaggataacaatctcctggggcgattcgagctgtccggtatacctccagcccctcggggagtgccccagatcgaagtgactttcgatattgatgccaatgggatactgaatgtgactgccacagataagagcacaggcaaggccaacaaaatcacaatcacaaatgacaaaggcaggttaagcaaggaagagattgagagaatggtccaagaagcggaaaagtataaagctgaggatgaggtccagcgagaacgcgtctctgctaaaaacgcccttgaatcctacgcatttaacatgaaatccgccgtggaggatgaaggactgaaaggaaagatttccgaagcggacaagaaaaaagtgctggataagtgccaagaggtgatttcttggctggacgctaataccctagccgagaaagacgaattcgagcacaagagaaaggagctggagcaggtctgcaatcccattatttcaggcctataccagggagcaggcggtcccgggcccggcggatttggagcgcagggacctaaggggggatccggatctggcccaacaatagaagaagtcgattag

SEQ ID NO: 155100 - DNA, 1653 bp, Artificial Sequence
  derived and/or modified sequence
atggcgaaggccgcggcaatcggcattgacttagggacaacctactcctgcgtgggagtgtttcagcatggcaaagtccagatttccagtatggtgcttaccaaaatgaaggagattgctgaggcgtacctgggctaccccgtgaccaacgccgtcattacagtgcccgcttactttaacgatagccagcggcaagccacaaaggatgctggcgtgatcgctgggctgaatgtgctgcgtattattaacgagccgacggcagccgccatcgcgtacggcctggacagaacggggaagggggaaaggaacgtgctgatcttcgatctgggtggcggaaccttcgatgtctctatcctcaccatcgacgatgggatcttcgaagttaaagcgaccgctggagacactcatcttgggggggaagactttgacaatcgcctggtcaaccactttgtggaagagtttaagcgcaagcacaagaaggacatatcacaaaacaagcgcgccgtgcgtcgtctgaggactgcctgcgaaagagctaaacgcacgctgtcatctagcacccaggcgtcactggagatagacagcctgttcgagggaatcgacttctatactagcatcacacgcgctcgattcgaagaattgtgctcagacctattcagaagtactcttgaacctgttgaaaaagcgctgagggatgctaagctagacaaggcacaaatccacgatctcgtgctggttggagggtctacacgtattcctaaagtacaaaagcttctgcaagacttttttaatgggagggatttgaacaagtcaataaaccctgatgaagccgttgcctatggtgctgccgttcaggccgctattctgatgggggacaagtctgaaaacgtgcaagaccttctgttgctggacgtggcaccgctttctttaggcctcgagacggctggcggtgtcatgaccgctcttattaaacggaattccacaatacccactaaacaaacccaaatctttaccacctacagcgataatcagccaggggttcttattcaggtctacgaaggtgagcgggccatgaccaaggacaacaacctcctcggaaggtttgagctgtctggtatacctcctgcccccaggggggtaccacagatcgaagtcacttttgatatcgacgcgaacggaattttaaatgtgacagctacagacaagtcaacgggtaaggctaacaagatcaccatcacaaatgataaaggcagattgtccaaagaagagatcgagagaatggttcaggaagccgaaaagtataaggctgaggatgaggtgcagcgggagcgcgtaagtgccaagaacgcactggagtcatatgccttcaacatgaagagtgcagttgaggacgagggcctgaaggggaaaatctccgaggccgacaaaaagaaggtgcttgacaaatgccaggaagttattagctggcttgatgcaaataccctggcggagaaggacgagttcgagcacaagcgcaaggaattagagcaggtatgcaaccccattatatccggtctgtatcagggggcgggcggcccagggcctgggggttttggggcccaggggcccaaaggcggttcaggcagtggcccaacgatagaagaggtggattag

SEQ ID NO: 155101 - DNA, 2427 bp, Artificial Sequence
  derived and/or modified sequence
ataaaagcccaggggcaagcggtccggataacggctagcctgaggagctgctgcgacagtccactacctttttcgagagtgactcccgttgtcccaaggcttcccagagcgaacctgtgcggctgcaggcaccggcgcgtcgagtttccggcgtccggaaggaccgagctcttctcgcggatccagtgttccgtttccagcccccaatctcagagcggagccgacagagagcagggaaccggcatggccaaagccgcggcgatcggcatcgacctgggcaccacctactcctgcgtgggggtgttccaacacggcaaggtggagatcatcgccaacgaccagggcaaccgcaccacccccagctacgtggccttcacggacaccgagcggctcatcggggatgcggccaagaaccaggtggcgctgaacccgcagaacaccgtgtttgacgcgaagcggctgattggccgcaagttcggcgacccggtggtgcagtcggacatgaagcactggcctttccaggtgatcaacgacggagacaagcccaaggtgcaggtgagctacaagggggagaccaaggcattctaccccgaggagatctcgtccatggtgctgaccaagatgaaggagatcgccgaggcgtacctgggctacccggtgaccaacgcggtgatcaccgtgccggcctacttcaacgactcgcagcgccaggccaccaaggatgcgggtgtgatcgcggggctcaacgtgctgcggatcatcaacgagcccacggccgccgccatcgcctacggcctggacagaacgggcaagggggagcgcaacgtgctcatctttgacctgggcgggggcaccttcgacgtgtccatcctgacgatcgacgacggcatcttcgaggtgaaggccacggccggggacacccacctgggtggggaggactttgacaacaggctggtgaaccacttcgtggaggagttcaagagaaaacacaagaaggacatcagccagaacaagcgagccgtgaggcggctgcgcaccgcctgcgagagggccaagaggaccctgtcgtccagcacccaggccagcctggagatcgactccctgtttgagggcatcgacttctacacgtccatcaccagggcgaggttcgaggagctgtgctccgacctgttccgaagcaccctggagcccgtggagaaggctctgcgcgacgccaagctggacaaggcccagattcacgacctggtcctggtcgggggctccacccgcatccccaaggtgcagaagctgctgcaggacttcttcaacgggcgcgacctgaacaagagcatcaaccccgacgaggctgtggcctacggggcggcggtgcaggcggccatcctgatgggggacaagtccgagaacgtgcaggacctgctgctgctggacgtggctcccctgtcgctggggctggagacggccggaggcgtgatgactgccctgatcaagcgcaactccaccatccccaccaagcagacgcagatcttcaccacctactccgacaaccaacccggggtgctgatccaggtgtacgagggcgagagggccatgacgaaagacaacaatctgttggggcgcttcgagctgagcggcatccctccggcccccaggggcgtgccccagatcgaggtgaccttcgacatcgatgccaacggcatcctgaacgtcacggccacggacaagagcaccggcaaggccaacaagatcaccatcaccaacgacaagggccgcctgagcaaggaggagatcgagcgcatggtgcaggaggcggagaagtacaaagcggaggacgaggtgcagcgcgagagggtgtcagccaagaacgccctggagtcctacgccttcaacatgaagagcgccgtggaggatgaggggctcaagggcaagatcagcgaggcggacaagaagaaggtgctggacaagtgtcaagaggtcatctcgtggctggacgccaacaccttggccgagaaggacgagtttgagcacaagaggaaggagctggagcaggtgtgtaaccccatcatcagcggactgtaccagggtgccggtggtcccgggcctgggggcttcggggctcagggtcccaagggagggtctgggtcaggccccaccattgaggaggtagattaggggcctttccaagattgctgtttttgttttggagcttcaagactttgcatttcctagtatttctgtttgtcagttctcaatttcctgtgtttgcaatgttgaaattttttggtgaagtactgaacttgctttttttccggtttctacatgcagagatgaatttatactgccatcttacgactatttcttctttttaatacacttaactcaggccattttttaagttggttacttcaaagtaaataaactttaaaattc

SEQ ID NO: 155102 - DNA, 1909 bp, Artificial Sequence
  derived and/or modified sequence
aacggctagcctgaggagctgctgcgacagtccactacctttttcgagagtgactcccgttgtcccaaggcttcccagagcgaacctgtgcggctgcaggcaccggcgcgtcgagtttccggcgtccggaaggaccgagctcttctcgcggatccagtgttccgtttccagcccccaatctcagagcggagccgacagagagcagggaaccggcatggccaaagccgcggcgatcggcatcgacctgggcaccacctactcctgcgtgggggtgttccaacacggcaagggggagcgcaacgtgctcatctttgacctgggcgggggcaccttcgacgtgtccatcctgacgatcgacgacggcatcttcgaggtgaaggccacggccggggacacccacctgggtggggaggactttgacaacaggctggtgaaccacttcgtggaggagttcaagagaaaacacaagaaggacatcagccagaacaagcgagccgtgaggcggctgcgcaccgcctgcgagagggccaagaggaccctgtcgtccagcacccaggccagcctggagatcgactccctgtttgagggcatcgacttctacacgtccatcaccagggcgaggttcgaggagctgtgctccgacctgttccgaagcaccctggagcccgtggagaaggctctgcgcgacgccaagctggacaaggcccagattcacgacctggtcctggtcgggggctccacccgcatccccaaggtgcagaagctgctgcaggacttcttcaacgggcgcgacctgaacaagagcatcaaccccgacgaggctgtggcctacggggcggcggtgcaggcggccatcctgatgggggacaagtccgagaacgtgcaggacctgctgctgctggacgtggctcccctgtcgctggggctggagacggccggaggcgtgatgactgccctgatcaagcgcaactccaccatccccaccaagcagacgcagatcttcaccacctactccgacaaccaacccggggtgctgatccaggtgtacgagggcgagagggccatgacgaaagacaacaatctgttggggcgcttcgagctgagcggcatccctccggcccccaggggcgtgccccagatcgaggtgaccttcgacatcgatgccaacggcatcctgaacgtcacggccacggacaagagcaccggcaaggccaacaagatcaccatcaccaacgacaagggccgcctgagcaaggaggagatcgagcgcatggtgcaggaggcggagaagtacaaagcggaggacgaggtgcagcgcgagagggtgtcagccaagaacgccctggagtcctacgccttcaacatgaagagcgccgtggaggatgaggggctcaagggcaagatcagcgaggcggacaagaagaaggtgctggacaagtgtcaagaggtcatctcgtggctggacgccaacaccttggccgagaaggacgagtttgagcacaagaggaaggagctggagcaggtgtgtaaccccatcatcagcggactgtaccagggtgccggtggtcccgggcctgggggcttcggggctcagggtcccaagggagggtctgggtcaggccccaccattgaggaggtagattaggggcctttccaagattgctgtttttgttttggagcttcaagactttgcatttcctagtatttctgtttgtcagttctcaatttcctgtgtttgcaatgttgaaattttttggtgaagtactgaacttgctttttttccggtttctacatgcagagatgaatttatactgccatcttacgactatttcttctttttaatacacttaactcaggccattttttaagttggttacttcaaagtaaataaactttaaaattcaagtga

SEQ ID NO: 155103 - DNA, 1909 bp, Artificial Sequence
  derived and/or modified sequence
aacggctagcctgaggagctgctgcgacagtccactacctttttcgagagtgactcccgttgtcccaaggcttcccagagcgaacctgtgcggctgcaggcaccggcgcgtcgagtttccggcgtccggaaggaccgagctcttctcgcggatccagtgttccgtttccagcccccaatctcagagccgagccgacagagagcagggaaccggcatggccaaagccgcggcgatcggcatcgacctgggcaccacctactcctgcgtgggggtgttccaacacggcaagggggagcgcaacgtgctcatctttgacctgggcgggggcaccttcgacgtgtccatcctgacgatcgacgacggcatcttcgaggtgaaggccacggccggggacacccacctgggtggggaggactttgacaacaggctggtgaaccacttcgtggaggagttcaagagaaaacacaagaaggacatcagccagaacaagcgagccgtgaggcggctgcgcaccgcctgcgagagggccaagaggaccctgtcgtccagcacccaggccagcctggagatcgactccctgtttgagggcatcgacttctacacgtccatcaccagggcgaggttcgaggagctgtgctccgacctgttccgaagcaccctggagcccgtggagaaggctctgcgcgacgccaagctggacaaggcccagattcacgacctggtcctggtcgggggctccacccgcatccccaaggtgcagaagctgctgcaggacttcttcaacgggcgcgacctgaacaagagcatcaaccccgacgaggctgtggcctacggggcggcggtgcaggcggccatcctgatgggggacaagtccgagaacgtgcaggacctgctgctgctggacgtggctcccctgtcgctggggctggagacggccggaggcgtgatgactgccctgatcaagcgcaactccaccatccccaccaagcagacgcagatcttcaccacctactccgacaaccaacccggggtgctgatccaggtgtacgagggcgagagggccatgacgaaagacaacaatctgttggggcgcttcgagctgagcggcatccctccggcccccaggggcgtgccccagatcgaggtgaccttcgacatcgatgccaacggcatcctgaacgtcacggccacggacaagagcaccggcaaggccaacaagatcaccatcaccaacgacaagggccgcctgagcaaggaggagatcgagcgcatggtgcaggaggcggagaagtacaaagcggaggacgaggtgcagcgcgagagggtgtcagccaagaacgccctggagtcctacgccttcaacatgaagagcgccgtggaggatgaggggctcaagggcaagatcagcgaggccgacaagaagaaggtgctggacaagtgtcaagaggtcatctcgtggctggacgccaacaccttggccgagaaggacgagtttgagcacaagaggaaggagctggagcaggtgtgtaaccccatcatcagcggactgtaccagggtgccggtggtcccgggcctgggggcttcggggctcagggtcccaagggagggtctgggtcaggccccaccattgaggaggtagattaggggcctttccaagattgctgtttttgttttggagcttcaagactttgcatttcctagtatttctgtttgtcagttctcaatttcctgtgtttgcaatgttgaaattttttggtgaagtactgaacttgctttttttccggtttctacatgcagagatgaatttatactgccatcttacgactatttcttctttttaatacacttaactcaggccattttttaagttggttacttcaaagtaaataaactttaaaattcaagtga

SEQ ID NO: 155104 - DNA, 2483 bp, Artificial Sequence
  derived and/or modified sequence
gagctcggtgattggctcagaagggaaaaggcgggtctccgtgacgacttataaaagcccaggggcaagcggtccggataacggctagcctgaggagctgctgcgacagtccactacctttttcgagagtgactcccgttgtcccaaggcttcccagagcgaacctgtgcggctgcaggcaccggcgcgtcgagtttccggcgtccggaaggaccgagctcttctcgcggatccagtgttccgtttccagcccccaatctcagagccgagccgacagagagcagggaaccggcatggccaaagccgcggcgatcggcatcgacctgggcaccacctactcctgcgtgggggtgttccaacacggcaaggtggagatcatcgccaacgaccagggcaaccgcaccacccccagctacgtggccttcacggacaccgagcggctcatcggggatgcggccaagaaccaggtggcgctgaacccgcagaacaccgtgtttgacgcgaagcggctgatcggccgcaagttcggcgacccggtggtgcagtcggacatgaagcactggcctttccaggtgatcaacgacggagacaagcccaaggtgcaggtgagctacaagggggacaccaaggcattctaccccgaggagatctcgtccatggtgctgaccaagatgaaggagatcgccgaggcgtacctgggctacccggtgaccaacgcggtgatcaccgtgccggcctacttcaacgactcgcagcgccaggccaccaaggatgcgggtgtgatcgcggggctcaacgtgctgcggatcatcaacgagcccacggccgccgccatcgcctacggcctggacagaacgggcaagggggagcgcaacgtgctcatctttgacctgggcgggggcaccttcgacgtgtccatcctgacgatcgacgacggcatcttcgaggtgaaggccacggccggggacacccacctgggtggggaggactttgacaacaggctggtgaaccacttcgtggaggagttcaagagaaaacacaagaaggacatcagccagaacaagcgagccgtgaggcggctgcgcaccgcctgcgagagggccaagaggaccctgtcgtccagcacccaggccagcctggagatcgactccctgtttgagggcatcgacttctacacgtccatcaccagggcgaggttcgaggagctgtgctccgacctgttccgaagcaccctggagcccgtggagaaggctctgcgcgacgccaagctggacaaggcccagattcacgacctggtcctggtcgggggctccacccgcatccccaaggtgcagaagctgctgcaggacttcttcaacgggcgcgacctgaacaagagcatcaaccccgacgaggctgtggcctacggggcggcggtgcaggcggccatcctgatgggggacaagtccgagaacgtgcaggacctgctgctgctggacgtggctcccctgtcgctggggctggagacggccggaggcgtgatgactgccctgatcaagcgcaactccaccatccccaccaagcagacgcagatcttcaccacctactccgacaaccaacccggggtgctgatccaggtgtacgagggcgagagggccatgacgaaagacaacaatctgttggggcgcttcgagctgagcggcatccctccggcccccaggggcgtgccccagatcgaggtgaccttcgacatcgatgccaacggcatcctgaacgtcacggccacggacaagagcaccggcaaggccaacaagatcaccatcaccaacgacaagggccgcctgagcaaggaggagatcgagcgcatggtgcaggaggcggagaagtacaaagcggaggacgaggtgcagcgcgagagggtgtcagccaagaacgccctggagtcctacgccttcaacatgaagagcgccgtggaggatgaggggctcaagggcaagatcagcgaggccgacaagaagaaggtgctggacaagtgtcaagaggtcatctcgtggctggacgccaacaccttggccgagaaggacgagtttgagcacaagaggaaggagctggagcaggtgtgtaaccccatcatcagcggactgtaccagggtgccggtggtcccgggcctgggggcttcggggctcagggtcccaagggagggtctgggtcaggccccaccattgaggaggtagattaggggcctttccaagattgctgtttttgttttggagcttcaagactttgcatttcctagtatttctgtttgtcagttctcaatttcctgtgtttgcaatgttgaaattttttggtgaagtactgaacttgctttttttccggtttctacatgcagagatgaatttatactgccatcttacgactatttcttctttttaatacacttaactcaggccattttttaagttggttacttcaaagtaaataaactttaaaattcaagtga

SEQ ID NO: 155105 - DNA, 1909 bp, Artificial Sequence
  derived and/or modified sequence
aacggctagcctgaggagctgctgcgacagtccactacctttttcgagagtgactcccgttgtcccaaggcttcccagagcgaacctgtgcggctgcaggcaccggcgcgtcgagtttccggcgtccggaaggaccgagctcttctcgcggatccagtgttccgtttccagcccccaatctcagagcggagccgacagagagcagggaaccggcatggccaaagccgcggcgatcggcatcgacctgggcaccacctactcctgcgtgggggtgttccaacacggcaagggggagcgcaacgtgctcatctttgacctgggcgggggcaccttcgacgtgtccatcctgacgatcgacgacggcatcttcgaggtgaaggccacggccggggacacccacctgggtggggaggactttgacaacaggctggtgaaccacttcgtggaggagttcaagagaaaacacaagaaggacatcagccagaacaagcgagccgtgaggcggctgcgcaccgcctgcgagagggccaagaggaccctgtcgtccagcacccaggccagcctggagatcgactccctgtttgagggcatcgacttctacacgtccatcaccagggcgaggttcgaggagctgtgctccgacctgttccgaagcaccctggagcccgtggagaaggctctgcgcgacgccaagctggacaaggcccagattcacgacctggtcctggtcgggggctccacccgcatccccaaggtgcagaagctgctgcaggacttcttcaacgggcgcgacctgaacaagagcatcaaccccgacgaggctgtggcctacggggcggcggtgcaggcggccatcctgatgggggacaagtccgagaacgtgcaggacctgctgctgctggacgtggctcccctgtcgctggggctggagacggccggaggcgtgatgactgccctgatcaagcgcaactccaccatccccaccaagcagacgcagatcttcaccacctactccgacaaccaacccggggtgctgatccaggtgtacgagggcgagagggccatgacgaaagacaacaatctgttggggcgcttcgagctgagcggcatccctccggcccccaggggcgtgccccagatcgaggtgaccttcgacatcgatgccaacggcatcctgaacgtcacggccacggacaagagcaccggcaaggccaacaagatcaccatcaccaacgacaagggccgcctgagcaaggaggagatcgagcgcatggtgcaggaggcggagaagtacaaagcggaggacgaggtgcagcgcgagagggtgtcagccaagaacgccctggagtcctacgccttcaacatgaagagcgccgtggaggatgaggggctcaagggcaagatcagcgaggccgacaagaagaaggtgctggacaagtgtcaagaggtcatctcgtggctggacgccaacaccttggccgagaaggacgagtttgagcacaagaggaaggagctggagcaggtgtgtaaccccatcatcagcggactgtaccagggtgccggtggtcccgggcctgggggcttcggggctcagggtcccaagggagggtctgggtcaggccccaccattgaggaggtagattaggggcctttccaagattgctgtttttgttttggagcttcaagactttgcatttcctagtatttctgtttgtcagttctcaatttcctgtgtttgcaatgttgaaattttttggtgaagtactgaacttgctttttttccggtttctacatgcagagatgaatttatactgccatcttacgactatttcttctttttaatacacttaactcaggccattttttaagttggttacttcaaagtaaataaactttaaaattcaagtga

SEQ ID NO: 155106 - DNA, 2483 bp, Artificial Sequence
  derived and/or modified sequence
gagctcggtgattggctcagaagggaaaaggcgggtctccgtgacgacttataaaagcccaggggcaagcggtccggataacggctagcctgaggagctgctgcgacagtccactacctttttcgagagtgactcccgttgtcccaaggcttcccagagcgaacctgtgcggctgcaggcaccggcgcgtcgagtttccggcgtccggaaggaccgagctcttctcgcggatccagtgttccgtttccagcccccaatctcagagcggagccgacagagagcagggaaccggcatggccaaagccgcggcgatcggcatcgacctgggcaccacctactcctgcgtgggggtgttccaacacggcaaggtggagatcatcgccaacgaccagggcaaccgcaccacccccagctacgtggccttcacggacaccgagcggctcatcggggatgcggccaagaaccaggtggcgctgaacccgcagaacaccgtgtttgacgcgaagcggctgatcggccgcaagttcggcgacccggtggtgcagtcggacatgaagcactggcctttccaggtgatcaacgacggagacaagcccaaggtgcaggtgagctacaagggggagaccaaggcattctaccccgaggagatctcgtccatggtgctgaccaagatgaaggagatcgccgaggcgtacctgggctacccggtgaccaacgcggtgatcaccgtgccggcctacttcaacgactcgcagcgccaggccaccaaggatgcgggtgtgatcgcggggctcaacgtgctgcggatcatcaacgagcccacggccgccgccatcgcctacggcctggacagaacgggcaagggggagcgcaacgtgctcatctttgacctgggcgggggcaccttcgacgtgtccatcctgacgatcgacgacggcatcttcgaggtgaaggccacggccggggacacccacctgggtggggaggactttgacaacaggctggtgaaccacttcgtggaggagttcaagagaaaacacaagaaggacatcagccagaacaagcgagccgtgaggcggctgcgcaccgcctgcgagagggccaagaggaccctgtcgtccagcacccaggccagcctggagatcgactccctgtttgagggcatcgacttctacacgtccatcaccagggcgaggttcgaggagctgtgctccgacctgttccgaagcaccctggagcccgtggagaaggctctgcgcgacgccaagctggacaaggcccagattcacgacctggtcctggtcgggggctccacccgcatccccaaggtgcagaagctgctgcaggacttcttcaacgggcgcgacctgaacaagagcatcaaccccgacgaggctgtggcctacggggcggcggtgcaggcggccatcctgatgggggacaagtccgagaacgtgcaggacctgctgctgctggacgtggctcccctgtcgctggggctggagacggccggaggcgtgatgactgccctgatcaagcgcaactccaccatccccaccaagcagacgcagatcttcaccacctactccgacaaccaacccggggtgctgatccaggtgtacgagggcgagagggccatgacgaaagacaacaatctgttggggcgcttcgagctgagcggcatccctccggcccccaggggcgtgccccagatcgaggtgaccttcgacatcgatgccaacggcatcctgaacgtcacggccacggacaagagcaccggcaaggccaacaagatcaccatcaccaacgacaagggccgcctgagcaaggaggagatcgagcgcatggtgcaggaggcggagaagtacaaagcggaggacgaggtgcagcgcgagagggtgtcagccaagaacgccctggagtcctacgccttcaacatgaagagcgccgtggaggatgaggggctcaagggcaagatcagcgaggccgacaagaagaaggtgctggacaagtgtcaagaggtcatctcgtggctggacgccaacaccttggccgagaaggacgagtttgagcacaagaggaaggagctggagcaggtgtgtaaccccatcatcagcggactgtaccagggtgccggtggtcccgggcctgggggcttcggggctcagggtcccaagggagggtctgggtcaggccccaccattgaggaggtagattaggggcctttccaagattgctgtttttgttttggagcttcaagactttgcatttcctagtatttctgtttgtcagttctcaatttcctgtgtttgcaatgttgaaattttttggtgaagtactgaacttgctttttttccggtttctacatgcagagatgaatttatactgccatcttacgactatttcttctttttaatacacttaactcaggccattttttaagttggttacttcaaagtaaataaactttaaaattcaagtga

SEQ ID NO: 155107 - DNA, 2483 bp, Artificial Sequence
  derived and/or modified sequence
gagctcggtgattggctcagaagggaaaaggcgggtctccgtgacgacttataaaagcccaggggcaagcggtccggataacggctagcctgaggagctgctgcgacagtccactacctttttcgagagtgactcccgttgtcccaaggcttcccagagcgaacctgtgcggctgcaggcaccggcgcgtcgagtttccggcgtccggaaggaccgagctcttctcgcggatccagtgttccgtttccagcccccaatctcagagcggagccgacagagagcagggaaccggcatggccaaagccgcggcgatcggcatcgacctgggcaccacctactcctgcgtgggggtgttccaacacggcaaggtggagatcatcgccaacgaccagggcaaccgcaccacccccagctacgtggccttcacggacaccgagcggctcatcggggatgcggccaagaaccaggtggcgctgaacccgcagaacaccgtgtttgacgcgaagcggctgatcggccgcaagttcggcgacccggtggtgcagtcggacatgaagcactggcctttccaggtgatcaacgacggagacaagcccaaggtgcaggtgagctacaagggggagaccaaggcattctaccccgaggagatctcgtccatggtgctgaccaagatgaaggagatcgccgaggcgtacctgggctacccggtgaccaacgcggtgatcaccgtgccggcctacttcaacgactcgcagcgccaggccaccaaggatgcgggtgtgatcgcggggctcaacgtgctgcggatcatcaacgagcccacggccgccgccatcgcctacggcctggacagaacgggcaagggggagcgcaacgtgctcatctttgacctgggcgggggcaccttcgacgtgtccatcctgacgatcgacgacggcatcttcgaggtgaaggccacggccggggacacccacctgggtggggaggactttgacaacaggctggtgaaccacttcgtggaggagttcaagagaaaacacaagaaggacatcagccagaacaagcgagccgtgaggcggctgcgcaccgcctgcgagagggccaagaggaccctgtcgtccagcacccaggccagcctggagatcgactccctgtttgagggcatcgacttctacacgtccatcaccagggcgaggttcgaggagctgtgctccgacctgttccgaagcaccctggagcccgtggagaaggctctgcgcgacgccaagctggacaaggcccagattcacgacctggtcctggtcgggggctccacccgcatccccaaggtgcagaagctgctgcaggacttcttcaacgggcgcgacctgaacaagagcatcaaccccgacgaggctgtggcctacggggcggcggtgcaggcggccatcctgatgggggacaagtccgagaacgtgcaggacctgctgctgctggacgtggctcccctgtcgctggggctggagacggccggaggcgtgatgactgccctgatcaagcgcaactccaccatccccaccaagcagacgcagatcttcaccacctactccgacaaccaacccggggtgctgatccaggtgtacgagggcgagagggccatgacgaaagacaacaatctgttggggcgcttcgagctgagcggcatccctccggcccccaggggcgtgccccagatcgaggtgaccttcgacatcgatgccaacggcatcctgaacgtcacggccacggacaagagcaccggcaaggccaacaagatcaccatcaccaacgacaagggccgcctgagcaaggaggagatcgagcgcatggtgcaggaggcggagaagtacaaagcggaggacgaggtgcagcgcgagagggtgtcagccaagaacgccctggagtcctacgccttcaacatgaagagcgccgtggaggatgaggggctcaagggcaagatcagcgaggcggacaagaagaaggtgctggacaagtgtcaagaggtcatctcgtggctggacgccaacaccttggccgagaaggacgagtttgagcacaagaggaaggagctggagcaggtgtgtaaccccatcatcagcggactgtaccagggtgccggtggtcccgggcctgggggcttcggggctcagggtcccaagggagggtctgggtcaggccccaccattgaggaggtagattaggggcctttccaagattgctgtttttgttttggagcttcaagactttgcatttcctagtatttctgtttgtcagttctcaatttcctgtgtttgcaatgttgaaattttttggtgaagtactgaacttgctttttttccggtttctacatgcagagatgaatttatactgccatcttacgactatttcttctttttaatacacttaactcaggccattttttaagttggttacttcaaagtaaataaactttaaaattcaagtga

SEQ ID NO: 155108 - DNA, 1452 bp, Artificial Sequence
  derived and/or modified sequence
aacggctagcctgaggagctgctgcgacagtccactacctttttcgagagtgactcccgttgtcccaaggcttcccagagcgaacctgtgcggctgcaggcaccggcgcgtcgagtttccggcgtccggaaggaccgagctcttctcgcggatccagtgttccgtttccagcccccaatctcagagcggagccgacagagagcagggaaccggcatggccaaagccgcggcgatcggcatcgacctgggcaccacctactcctgcgtgggggtgttccaacacggcaaggtggagatcatcgccaacgaccagggcaaccgcaccacccccagctacgtggccttcacggacaccgagcggctcatcggggatgcgggtgtgatcgcggggctcaacgtgctgcggatcatcaacgagcccacggccgccgccatcgcctacggcctggacagaacgggcaagggggagcgcaacgtgctcatctttgacctgggcgggggcaccttcgacgtgtccatcctgacgatcgacgacggcatcttcgaggtgaaggccacggccggggacacccacctgggtggggaggactttgacaacaggctggtgaaccacttcgtggaggagttcaagagaaaacacaagaaggacatcagccagaacaagcgagccgtgaggcggctgcgcaccgcctgcgagagggccaagaggaccctgtcgtccagcacccaggccagcctggagatcgactccctgtttgagggcatcgacttctacacgtccatcaccagggcgaggttcgaggagctgtgctccgacctgttccgaagcaccctggagcccgtggagaaggctccacccgcatccccaaggtgcagaagctgctgcaggacttcttcaacgggcgcgacctgaacaagagcatcaaccccgacgaggctgtggcctacggggcggcggtgcaggcggccatcctgatgggggacaagtccgagaacgtgcaggacctgctgctgctggacgtggctcccctgtcgctggggctggagacggccggaggcgtgatgactgccctgatcaagcgcaactccaccatccccaccaagcagacgcagatcttcaccacctactccgacaaccaacccggggtgctgatccaggtgtacgagggcgagagggccatgacgaaagacaacaatctgttggggcgcttcgagctgagcggcatccctccggcccccaggggcgtgccccagatcgaggtgaccttcgacatcgatgccaacggcatcctgaacgtcacggccacggacaagagcaccggcaaggccaacaagatcaccatcaccaacgacaagggccgcctgagcaaggaggagatcgagcgcatggtgcaggaggcggagaagtacaaagcggaggacgaggtgcagcgcgagagggtgtcagccaag

SEQ ID NO: 155109 - DNA, 2483 bp, Artificial Sequence
  derived and/or modified sequence
gagctcggtgattggctcagaagggaaaaggcgggtctccgtgacgacttataaaagcccaggggcaagcggtccggataacggctagcctgaggagctgctgcgacagtccactacctttttcgagagtgactcccgttgtcccaaggcttcccagagcgaacctgtgcggctgcaggcaccggcgcgtcgagtttccggcgtccggaaggaccgagctcttctcgcggatccagtgttccgtttccagcccccaatctcagagccgagccgacagagagcagggaaccggcatggccaaagccgcggcgatcggcatcgacctgggcaccacctactcctgcgtgggggtgttccaacacggcaaggtggagatcatcgccaacgaccagggcaaccgcaccacccccagctacgtggccttcacggacaccgagcggctcatcggggatgcggccaagaaccaggtggcgctgaacccgcagaacaccgtgtttgacgcgaagcggctgatcggccgcaagttcggcgacccggtggtgcagtcggacatgaagcactggcctttccaggtgatcaacgacggagacaagcccaaggtgcaggtgagctacaagggggagaccaaggcattctaccccgaggagatctcgtccatggtgctgaccaagatgaaggagatcgccgaggcgtacctgggctacccggtgaccaacgcggtgatcaccgtgccggcctacttcaacgactcgcagcgccaggccaccaaggatgcgggtgtgatcgcggggctcaacgtgctgcggatcatcaacgagcccacggccgccgccatcgcctacggcctggacagaacgggcaagggggagcgcaacgtgctcatctttgacctgggcgggggcaccttcgacgtgtccatcctgacgatcgacgacggcatcttcgaggtgaaggccacggccggggacacccacctgggtggggaggactttgacaacaggctggtgaaccacttcgtggaggagttcaagagaaaacacaagaaggacatcagccagaacaagcgagccgtgaggcggctgcgcaccgcctgcgagagggccaagaggaccctgtcgtccagcacccaggccagcctggagatcgactccctgtttgagggcatcgacttctacacgtccatcaccagggcgaggttcgaggagctgtgctccgacctgttccgaagcaccctggagcccgtggagaaggctctgcgcgacgccaagctggacaaggcccagattcacgacctggtcctggtcgggggctccacccgcatccccaaggtgcagaagctgctgcaggacttcttcaacgggcgcgacctgaacaagagcatcaaccccgacgaggctgtggcctacggggcggcggtgcaggcggccatcctgatgggggacaagtccgagaacgtgcaggacctgctgctgctggacgtggctcccctgtcgctggggctggagacggccggaggcgtgatgactgccctgatcaagcgcaactccaccatccccaccaagcagacgcagatcttcaccacctactccgacaaccaacccggggtgctgatccaggtgtacgagggcgagagggccatgacgaaagacaacaatctgttggggcgcttcgagctgagcggcatccctccggcccccaggggcgtgccccagatcgaggtgaccttcgacatcgatgccaacggcatcctgaacgtcacggccacggacaagagcaccggcaaggccaacaagatcaccatcaccaacgacaagggccgcctgagcaaggaggagatcgagcgcatggtgcaggaggcggagaagtacaaagcggaggacgaggtgcagcgcgagagggtgtcagccaagaacgccctggagtcctacgccttcaacatgaagagcgccgtggaggatgaggggctcaagggcaagatcagcgaggccgacaagaagaaggtgctggacaagtgtcaagaggtcatctcgtggctggacgccaacaccttggccgagaaggacgagtttgagcacaagaggaaggagctggagcaggtgtgtaaccccatcatcagcggactgtaccagggtgccggtggtcccgggcctgggggcttcggggctcagggtcccaagggagggtctgggtcaggccccaccattgaggaggtagattaggggcctttccaagattgctgtttttgttttggagcttcaagactttgcatttcctagtatttctgtttgtcagttctcaatttcctgtgtttgcaatgttgaaattttttggtgaagtactgaacttgctttttttccggtttctacatgcagagatgaatttatactgccatcttacgactatttcttctttttaatacacttaactcaggccattttttaagttggttacttcaaagtaaataaactttaaaattcaagtga

SEQ ID NO: 155110 - DNA, 1867 bp, Artificial Sequence
  derived and/or modified sequence
aacggctagcctgaggagctgctgcgacagtccactacctttttcgagagtgactcccgttgtcccaaggcttcccagagcgaacctgtgcggctgcaggcaccggcgcgtcgagtttccggcgtccggaaggaccgagctcttctcgcggatccagtgttccgtttccagcccccaatctcagagcggagccgacagagagcagggaaccggcatggccaaagccgcggcgatcggcatcgacctgggcaccacctactcctgcgtgggggtgttccaacacggcaaggtgcagatctcgtccatggtgctgaccaagatgaaggagatcgccgaggcgtacctgggctacccggtgaccaacgcggtgatcaccgtgccggcctacttcaacgactcgcagcgccaggccaccaaggatgcgggtgtgatcgcggggctcaacgtgctgcggatcatcaacgagcccacggccgccgccatcgcctacggcctggacagaacgggcaagggggagcgcaacgtgctcatctttgacctgggcgggggcaccttcgacgtgtccatcctgacgatcgacgacggcatcttcgaggtgaaggccacggccggggacacccacctgggtggggaggactttgacaacaggctggtgaaccacttcgtggaggagttcaagagaaaacacaagaaggacatcagccagaacaagcgagccgtgaggcggctgcgcaccgcctgcgagagggccaagaggaccctgtcgtccagcacccaggccagcctggagatcgactccctgtttgagggcatcgacttctacacgtccatcaccagggcgaggttcgaggagctgtgctccgacctgttccgaagcaccctggagcccgtggagaaggctctgcgcgacgccaagctggacaaggcccagattcacgacctggtcctggtcgggggctccacccgcatccccaaggtgcagaagctgctgcaggacttcttcaacgggcgcgacctgaacaagagcatcaaccccgacgaggctgtggcctacggggcggcggtgcaggcggccatcctgatgggggacaagtccgagaacgtgcaggacctgctgctgctggacgtggctcccctgtcgctggggctggagacggccggaggcgtgatgactgccctgatcaagcgcaactccaccatccccaccaagcagacgcagatcttcaccacctactccgacaaccaacccggggtgctgatccaggtgtacgagggcgagagggccatgacgaaagacaacaatctgttggggcgcttcgagctgagcggcatccctccggcccccaggggcgtgccccagatcgaggtgaccttcgacatcgatgccaacggcatcctgaacgtcacggccacggacaagagcaccggcaaggccaacaagatcaccatcaccaacgacaagggccgcctgagcaaggaggagatcgagcgcatggtgcaggaggcggagaagtacaaagcggaggacgaggtgcagcgcgagagggtgtcagccaagaacgccctggagtcctacgccttcaacatgaagagcgccgtggaggatgaggggctcaagggcaagatcagcgaggcggacaagaagaaggtgctggacaagtgtcaagaggtcatctcgtggctggacgccaacaccttggccgagaaggacgagtttgagcacaagaggaaggagctggagcaggtgtgtaaccccatcatcagcggactgtaccagggtgccggtggtcccgggcctgggggcttcggggctcagggtcccaagggagggtctgggtcaggccccaccattgaggaggtagattag

SEQ ID NO: 155111 - DNA, 2344 bp, Artificial Sequence
  derived and/or modified sequence
aacggctagcctgaggagctgctgcgacagtccactacctttttcgagagtgactcccgttgtcccaaggcttcccagagcgaacctgtgcggctgcaggcaccggcgcgtcgagtttccggcgtccggaaggaccgagctcttctcgcggatccagtgttccgtttccagcccccaatctcagagcggagccgacagagagcagggaaccggcatggccaaagccgcggcgatcggcatcgacctgggcaccacctactcctgcgtgggggtgttccaacacggcaaggtggagatcatcgccaacgaccagggcaaccgcaccacccccagctacgtggccttcacggacaccgagcggctcatcggggatgcggccaagaaccaggtggcgctgaacccggtggtgcagtcggacatgaagcactggcctttccaggtgatcaacgacggagacaagcccaaggtgcaggtgagctacaagggggagaccaaggcattctaccccgaggagatctcgtccatggtgctgaccaagatgaaggagatcgccgaggcgtacctgggctacccggtgaccaacgcggtgatcaccgtgccggcctacttcaacgactcgcagcgccaggccaccaaggatgcgggtgtgatcgcggggctcaacgtgctgcggatcatcaacgagcccacggccgccgccatcgcctacggcctggacagaacgggcaagggggagcgcaacgtgctcatctttgacctgggcgggggcaccttcgacgtgtccatcctgacgatcgacgacggcatcttcgaggtgaaggccacggccggggacacccacctgggtggggaggactttgacaacaggctggtgaaccacttcgtggaggagttcaagagaaaacacaagaaggacatcagccagaacaagcgagccgtgaggcggctgcgcaccgcctgcgagagggccaagaggaccctgtcgtccagcacccaggccagcctggagatcgactccctgtttgagggcatcgacttctacacgtccatcaccagggcgaggttcgaggagctgtgctccgacctgttccgaagcaccctggagcccgtggagaaggctctgcgcgacgccaagctggacaaggcccagattcacgacctggtcctggtcgggggctccacccgcatccccaaggtgcagaagctgctgcaggacttcttcaacgggcgcgacctgaacaagagcatcaaccccgacgaggctgtggcctacggggcggcggtgcaggcggccatcctgatgggggacaagtccgagaacgtgcaggacctgctgctgctggacgtggctcccctgtcgctggggctggagacggccggaggcgtgatgactgccctgatcaagcgcaactccaccatccccaccaagcagacgcagatcttcaccacctactccgacaaccaacccggggtgctgatccaggtgtacgagggcgagagggccatgacgaaagacaacaatctgttggggcgcttcgagctgagcggcatccctccggcccccaggggcgtgccccagatcgaggtgaccttcgacatcgatgccaacggcatcctgaacgtcacggccacggacaagagcaccggcaaggccaacaagatcaccatcaccaacgacaagggccgcctgagcaaggaggagatcgagcgcatggtgcaggaggcggagaagtacaaagcggaggacgaggtgcagcgcgagagggtgtcagccaagaacgccctggagtcctacgccttcaacatgaagagcgccgtggaggatgaggggctcaagggcaagatcagcgaggcggacaagaagaaggtgctggacaagtgtcaagaggtcatctcgtggctggacgccaacaccttggccgagaaggacgagtttgagcacaagaggaaggagctggagcaggtgtgtaaccccatcatcagcggactgtaccagggtgccggtggtcccgggcctgggggcttcggggctcagggtcccaagggagggtctgggtcaggccccaccattgaggaggtagattaggggcctttccaagattgctgtttttgttttggagcttcaagactttgcatttcctagtatttctgtttgtcagttctcaatttcctgtgtttgcaatgttgaaattttttggtgaagtactgaacttgctttttttccggtttctacatgcagagatgaatttatactgccatcttacgactatttcttctttttaatacacttaactcaggccattttttaagttggttacttcaaagtaaataaactttaaaattc

SEQ ID NO: 155112 - DNA, 1867 bp, Artificial Sequence
  derived and/or modified sequence
aacggctagcctgaggagctgctgcgacagtccactacctttttcgagagtgactcccgttgtcccaaggcttcccagagcgaacctgtgcggctgcaggcaccggcgcgtcgagtttccggcgtccggaaggaccgagctcttctcgcggatccagtgttccgtttccagcccccaatctcagagccgagccgacagagagcagggaaccggcatggccaaagccgcggcgatcggcatcgacctgggcaccacctactcctgcgtgggggtgttccaacacggcaaggtgcagatctcgtccatggtgctgaccaagatgaaggagatcgccgaggcgtacctgggctacccggtgaccaacgcggtgatcaccgtgccggcctacttcaacgactcgcagcgccaggccaccaaggatgcgggtgtgatcgcggggctcaacgtgctgcggatcatcaacgagcccacggccgccgccatcgcctacggcctggacagaacgggcaagggggagcgcaacgtgctcatctttgacctgggcgggggcaccttcgacgtgtccatcctgacgatcgacgacggcatcttcgaggtgaaggccacggccggggacacccacctgggtggggaggactttgacaacaggctggtgaaccacttcgtggaggagttcaagagaaaacacaagaaggacatcagccagaacaagcgagccgtgaggcggctgcgcaccgcctgcgagagggccaagaggaccctgtcgtccagcacccaggccagcctggagatcgactccctgtttgagggcatcgacttctacacgtccatcaccagggcgaggttcgaggagctgtgctccgacctgttccgaagcaccctggagcccgtggagaaggctctgcgcgacgccaagctggacaaggcccagattcacgacctggtcctggtcgggggctccacccgcatccccaaggtgcagaagctgctgcaggacttcttcaacgggcgcgacctgaacaagagcatcaaccccgacgaggctgtggcctacggggcggcggtgcaggcggccatcctgatgggggacaagtccgagaacgtgcaggacctgctgctgctggacgtggctcccctgtcgctggggctggagacggccggaggcgtgatgactgccctgatcaagcgcaactccaccatccccaccaagcagacgcagatcttcaccacctactccgacaaccaacccggggtgctgatccaggtgtacgagggcgagagggccatgacgaaagacaacaatctgttggggcgcttcgagctgagcggcatccctccggcccccaggggcgtgccccagatcgaggtgaccttcgacatcgatgccaacggcatcctgaacgtcacggccacggacaagagcaccggcaaggccaacaagatcaccatcaccaacgacaagggccgcctgagcaaggaggagatcgagcgcatggtgcaggaggcggagaagtacaaagcggaggacgaggtgcagcgcgagagggtgtcagccaagaacgccctggagtcctacgccttcaacatgaagagcgccgtggaggatgaggggctcaagggcaagatcagcgaggccgacaagaagaaggtgctggacaagtgtcaagaggtcatctcgtggctggacgccaacaccttggccgagaaggacgagtttgagcacaagaggaaggagctggagcaggtgtgtaaccccatcatcagcggactgtaccagggtgccggtggtcccgggcctgggggcttcggggctcagggtcccaagggagggtctgggtcaggccccaccattgaggaggtagattag

SEQ ID NO: 155113 - DNA, 1867 bp, Artificial Sequence
  derived and/or modified sequence
aacggctagcctgaggagctgctgcgacagtccactacctttttcgagagtgactcccgttgtcccaaggcttcccagagcgaacctgtgcggctgcaggcaccggcgcgtcgagtttccggcgtccggaaggaccgagctcttctcgcggatccagtgttccgtttccagcccccaatctcagagcggagccgacagagagcagggaaccggcatggccaaagccgcggcgatcggcatcgacctgggcaccacctactcctgcgtgggggtgttccaacacggcaaggtgcagatctcgtccatggtgctgaccaagatgaaggagatcgccgaggcgtacctgggctacccggtgaccaacgcggtgatcaccgtgccggcctacttcaacgactcgcagcgccaggccaccaaggatgcgggtgtgatcgcggggctcaacgtgctgcggatcatcaacgagcccacggccgccgccatcgcctacggcctggacagaacgggcaagggggagcgcaacgtgctcatctttgacctgggcgggggcaccttcgacgtgtccatcctgacgatcgacgacggcatcttcgaggtgaaggccacggccggggacacccacctgggtggggaggactttgacaacaggctggtgaaccacttcgtggaggagttcaagagaaaacacaagaaggacatcagccagaacaagcgagccgtgaggcggctgcgcaccgcctgcgagagggccaagaggaccctgtcgtccagcacccaggccagcctggagatcgactccctgtttgagggcatcgacttctacacgtccatcaccagggcgaggttcgaggagctgtgctccgacctgttccgaagcaccctggagcccgtggagaaggctctgcgcgacgccaagctggacaaggcccagattcacgacctggtcctggtcgggggctccacccgcatccccaaggtgcagaagctgctgcaggacttcttcaacgggcgcgacctgaacaagagcatcaaccccgacgaggctgtggcctacggggcggcggtgcaggcggccatcctgatgggggacaagtccgagaacgtgcaggacctgctgctgctggacgtggctcccctgtcgctggggctggagacggccggaggcgtgatgactgccctgatcaagcgcaactccaccatccccaccaagcagacgcagatcttcaccacctactccgacaaccaacccggggtgctgatccaggtgtacgagggcgagagggccatgacgaaagacaacaatctgttggggcgcttcgagctgagcggcatccctccggcccccaggggcgtgccccagatcgaggtgaccttcgacatcgatgccaacggcatcctgaacgtcacggccacggacaagagcaccggcaaggccaacaagatcaccatcaccaacgacaagggccgcctgagcaaggaggagatcgagcgcatggtgcaggaggcggagaagtacaaagcggaggacgaggtgcagcgcgagagggtgtcagccaagaacgccctggagtcctacgccttcaacatgaagagcgccgtggaggatgaggggctcaagggcaagatcagcgaggccgacaagaagaaggtgctggacaagtgtcaagaggtcatctcgtggctggacgccaacaccttggccgagaaggacgagtttgagcacaagaggaaggagctggagcaggtgtgtaaccccatcatcagcggactgtaccagggtgccggtggtcccgggcctgggggcttcggggctcagggtcccaagggagggtctgggtcaggccccaccattgaggaggtagattag

SEQ ID NO: 155114 - DNA, 1452 bp, Artificial Sequence
  derived and/or modified sequence
aacggctagcctgaggagctgctgcgacagtccactacctttttcgagagtgactcccgttgtcccaaggcttcccagagcgaacctgtgcggctgcaggcaccggcgcgtcgagtttccggcgtccggaaggaccgagctcttctcgcggatccagtgttccgtttccagcccccaatctcagagccgagccgacagagagcagggaaccggcatggccaaagccgcggcgatcggcatcgacctgggcaccacctactcctgcgtgggggtgttccaacacggcaaggtggagatcatcgccaacgaccagggcaaccgcaccacccccagctacgtggccttcacggacaccgagcggctcatcggggatgcgggtgtgatcgcggggctcaacgtgctgcggatcatcaacgagcccacggccgccgccatcgcctacggcctggacagaacgggcaagggggagcgcaacgtgctcatctttgacctgggcgggggcaccttcgacgtgtccatcctgacgatcgacgacggcatcttcgaggtgaaggccacggccggggacacccacctgggtggggaggactttgacaacaggctggtgaaccacttcgtggaggagttcaagagaaaacacaagaaggacatcagccagaacaagcgagccgtgaggcggctgcgcaccgcctgcgagagggccaagaggaccctgtcgtccagcacccaggccagcctggagatcgactccctgtttgagggcatcgacttctacacgtccatcaccagggcgaggttcgaggagctgtgctccgacctgttccgaagcaccctggagcccgtggagaaggctccacccgcatccccaaggtgcagaagctgctgcaggacttcttcaacgggcgcgacctgaacaagagcatcaaccccgacgaggctgtggcctacggggcggcggtgcaggcggccatcctgatgggggacaagtccgagaacgtgcaggacctgctgctgctggacgtggctcccctgtcgctggggctggagacggccggaggcgtgatgactgccctgatcaagcgcaactccaccatccccaccaagcagacgcagatcttcaccacctactccgacaaccaacccggggtgctgatccaggtgtacgagggcgagagggccatgacgaaagacaacaatctgttggggcgcttcgagctgagcggcatccctccggcccccaggggcgtgccccagatcgaggtgaccttcgacatcgatgccaacggcatcctgaacgtcacggccacggacaagagcaccggcaaggccaacaagatcaccatcaccaacgacaagggccgcctgagcaaggaggagatcgagcgcatggtgcaggaggcggagaagtacaaagcggaggacgaggtgcagcgcgagagggtgtcagccaag

SEQ ID NO: 155115 - DNA, 2520 bp, Artificial Sequence
  derived and/or modified sequence
ggaaaacggccagcctgaggagctgctgcgagggtccgcttcgtctttcgagagtgactcccgcggtcccaaggctttccagagcgaacctgtgcggctgcaggcaccggcgtgttgagtttccggcgttccgaaggactgagctcttgtcgcggatcccgtccgccgtttccagcccccagtctcagagcggagcccacagagcagggcaccggcatggccaaagccgcggcgatcggcatcgacctgggcaccacctactcctgcgtgggggtgttccaacacggcaaggtggagatcatcgccaacgaccagggcaaccgcaccacccccagctacgtggccttcacggacaccgagcggctcatcggggatgcggccaagaaccaggtggcgctgaacccgcagaacaccgtgtttgacgcgaagcggctgattggccgcaagttcggcgacccggtggtgcagtcggacatgaagcactggcctttccaggtgatcaacgacggagacaagcccaaggtgcaggtgagctacaagggggagaccaaggcattctaccccgaggagatctcgtccatggtgctgaccaagatgaaggagatcgccgaggcgtacctgggctacccggtgaccaacgcggtgatcaccgtgccggcctacttcaacgactcgcagcgccaggccaccaaggatgcgggtgtgatcgcggggctcaacgtgctgcggatcatcaacgagcccacggccgccgccatcgcctacggcctggacagaacgggcaagggggagcgcaacgtgctcatctttgacctgggcgggggcaccttcgacgtgtccatcctgacgatcgacgacggcatcttcgaggtgaaggccacggccggggacacccacctgggtggggaggactttgacaacaggctggtgaaccacttcgtggaggagttcaagagaaaacacaagaaggacatcagccagaacaagcgagccgtgaggcggctgcgcaccgcctgcgagagggccaagaggaccctgtcgtccagcacccaggccagcctggagatcgactccctgtttgagggcatcgacttctacacgtccatcaccagggcgaggttcgaggagctgtgctccgacctgttccgaagcaccctggagcccgtggagaaggctctgcgcgacgccaagctggacaaggcccagattcacgacctggtcctggtcgggggctccacccgcatccccaaggtgcagaagctgctgcaggacttcttcaacgggcgcgacctgaacaagagcatcaaccccgacgaggctgtggcctacggggcggcggtgcaggcggccatcctgatgggggacaagtccgagaacgtgcaggacctgctgctgctggacgtggctcccctgtcgctggggctggagacggccggaggcgtgatgactgccctgatcaagcgcaactccaccatccccaccaagcagacgcagatcttcaccacctactccgacaaccaacccggggtgctgatccaggtgtacgagggcgagagggccatgacgaaagacaacaatctgttggggcgcttcgagctgagcggcatccctccggcccccaggggcgtgccccagatcgaggtgaccttcgacatcgatgccaacggcatcctgaacgtcacggccacggacaagagcaccggcaaggccaacaagatcaccatcaccaacgacaagggccgcctgagcaaggaggagatcgagcgcatggtgcaggaggcggagaagtacaaagcggaggacgaggtgcagcgcgagagggtgtcagccaagaacgccctggagtcctacgccttcaacatgaagagcgccgtggaggatgaggggctcaagggcaagatcagcgaggcggacaagaagaaggttctggacaagtgtcaagaggtcatctcgtggctggacgccaacaccttggccgagaaggacgagtttgagcacaagaggaaggagctggagcaggtgtgtaaccccatcatcagcggactgtaccagggtgccggtggtcccgggcctggcggcttcggggctcagggtcccaagggagggtctgggtcaggccctaccattgaggaggtggattaggggcctttgttctttagtatgtttgtctttgaggtggactgttgggactcaaggactttgctgctgttttcctatgtcatttctgcttcagctctttgctgcttcacttctttgtaaagttgtaacctgatggtaattagctggcttcattatttttgtagtacaaccgatatgttcattagaattctttgcatttaatgttgatactgtaagggtgtttcgttccctttaaatgaatcaacactgccaccttctgtacgagtttgtttgttttttttttttttttttttttttgcttggcgaaaacactacaaaggctgggaatgtatgtttttataatttgtttatttaaatatgaaaaataaaatgttaaacttt

SEQ ID NO: 155116 - DNA, 2524 bp, Artificial Sequence
  derived and/or modified sequence
ggaaaacggccagcctgaggagctgctgcgagggtccgcttcgtctttcgagagtgactcccgcggtcccaaggctttccagagcgaacctgtgcggctgcaggcaccggcgtgttgagtttccggcgttccgaaggactgagctcttgtcgcggatcccgtccgccgtttccagcccccagtctcagagcggagcccacagagcagggcaccggcatggccaaagccgcggcgatcggcatcgacctgggcaccacctactcctgcgtgggggtgttccaacacggcaaggtggagatcatcgccaacgaccagggcaaccgcaccacccccagctacgtggccttcacggacaccgagcggctcatcggggatgcggccaagaaccaggtggcgctgaacccgcagaacaccgtgtttgacgcgaagcggctgatcggccgcaagttcggcgacccggtggtgcagtcggacatgaagcactggcctttccaggtgatcaacgacggagacaagcccaaggtgcaggtgagctacaagggggagaccaaggcattctaccccgaggagatctcgtccatggtgctgaccaagatgaaggagatcgccgaggcgtacctgggctacccggtgaccaacgcggtgatcaccgtgccggcctacttcaacgactcgcagcgccaggccaccaaggatgcgggtgtgatcgcggggctcaacgtgctgcggatcatcaacgagcccacggccgccgccatcgcctacggcctggacagaacgggcaagggggagcgcaacgtgctcatctttgacctgggcgggggcaccttcgacgtgtccatcctgacgatcgacgacggcatcttcgaggtgaaggccacggccggggacacccacctgggtggggaggactttgacaacaggctggtgaaccacttcgtggaggagttcaagagaaaacacaagaaggacatcagccagaacaagcgagccgtgaggcggctgcgcaccgcctgcgagagggccaagaggaccctgtcgtccagcacccaggccagcctggagatcgactccctgtttgagggcatcgacttctacacgtccatcaccagggcgaggttcgaggagctgtgctccgacctgttccgaagcaccctggagcccgtggagaaggctctgcgcgacgccaagctggacaaggcccagattcacgacctggtcctggtcgggggctccacccgcatccccaaggtgcagaagctgctgcaggacttcttcaacgggcgcgacctgaacaagagcatcaaccccgacgaggctgtggcctacggggcggcggtgcaggcggccatcctgatgggggacaagtccgagaacgtgcaggacctgctgctgctggacgtggctcccctgtcgctggggctggagacggccggaggcgtgatgactgccctgatcaagcgcaactccaccatccccaccaagcagacgcagatcttcaccacctactccgacaaccaacccggggtgctgatccaggtgtacgagggcgagagggccatgacgaaagacaacaatctgttggggcgcttcgagctgagcggcatccctccggcccccaggggcgtgccccagatcgaggtgaccttcgacatcgatgccaacggcatcctgaacgtcacggccacggacaagagcaccggcaaggccaacaagatcaccatcaccaacgacaagggccgcctgagcaaggaggagatcgagcgcatggtgcaggaggcggagaagtacaaagcggaggacgaggtgcagcgcgagagggtgtcagccaagaacgccctggagtcctacgccttcaacatgaagagcgccgtggaggatgaggggctcaagggcaagatcagcgaggcggacaagaagaaggttctggacaagtgtcaagaggtcatctcgtggctggacgccaacaccttggccgagaaggacgagtttgagcacaagaggaaggagctggagcaggtgtgtaaccccatcatcagcggactgtaccagggtgccggtggtcccgggcctggcggcttcggggctcagggtcccaagggagggtctgggtcaggccctaccattgaggaggtggattaggggcctttgttctttagtatgtttgtctttgaggtggactgttgggactcaaggactttgctgctgttttcctatgtcatttctgcttcagctctttgctgcttcacttctttgtaaagttaagttgtaacctgatggtaattagctggcttcattatttttgtagtacaaccgatatgttcattagaattctttgcatttaatgttgatactgtaagggtgtttcgttccctttaaatgaatcaacactgccaccttctgtacgagtttgtttgttttttttttttttttttttttgcttggcgaaaacactacaaaggctgggaatgtatgtttttataatttgtttatttaaatatgaaaaataaaatgttaaactttt

SEQ ID NO: 155117 - DNA, 2525 bp, Artificial Sequence
  derived and/or modified sequence
ggaaaacggccagcctgaggagctgctgcgagggtccgcttcgtctttcgagagtgactcccgcggtcccaaggctttccagagcgaacctgtgcggctgcaggcaccggcgtgttgagtttccggcgttccgaaggactgagctcttgtcgcggatcccgtccgccgtttccagcccccagtctcagagcggagcccacagagcagggcaccggcatggccaaagccgcggcgatcggcatcgacctgggcaccacctactcctgcgtgggggtgttccaacacggcaaggtggagatcatcgccaacgaccagggcaaccgcaccacccccagctacgtggccttcacggacaccgagcggctcatcggggatgcggccaagaaccaggtggcgctgaacccgcagaacaccgtgtttgacgcgaagcggctgatcggccgcaagttcggcgacccggtggtgcagtcggacatgaagcactggcctttccaggtgatcaacgacggagacaagcccaaggtgcaggtgagctacaagggggagaccaaggcattctaccccgaggagatctcgtccatggtgctgaccaagatgaaggagatcgccgaggcgtacctgggctacccggtgaccaacgcggtgatcaccgtgccggcctacttcaacgactcgcagcgccaggccaccaaggatgcgggtgtgatcgcggggctcaacgtgctgcggatcatcaacgagcccacggccgccgccatcgcctacggcctggacagaacgggcaagggggagcgcaacgtgctcatctttgacctgggcgggggcaccttcgacgtgtccatcctgacgatcgacgacggcatcttcgaggtgaaggccacggccggggacacccacctgggtggggaggactttgacaacaggctggtgaaccacttcgtggaggagttcaagagaaaacacaagaaggacatcagccagaacaagcgagccgtgaggcggctgcgcaccgcctgcgagagggccaagaggaccctgtcgtccagcacccaggccagcctggagatcgactccctgtttgagggcatcgacttctacacgtccatcaccagggcgaggttcgaggagctgtgctccgacctgttccgaagcaccctggagcccgtggagaaggctctgcgcgacgccaagctggacaaggcccagattcacgacctggtcctggtcgggggctccacccgcatccccaaggtgcagaagctgctgcaggacttcttcaacgggcgcgacctgaacaagagcatcaaccccgacgaggctgtggcctacggggcggcggtgcaggcggccatcctgatgggggacaagtccgagaacgtgcaggacctgctgctgctggacgtggctcccctgtcgctggggctggagacggccggaggcgtgatgactgccctgatcaagcgcaactccaccatccccaccaagcagacgcagatcttcaccacctactccgacaaccaacccggggtgctgatccaggtgtacgagggcgagagggccatgacgaaagacaacaatctgttggggcgcttcgagctgagcggcatccctccggcccccaggggcgtgccccagatcgaggtgaccttcgacatcgatgccaacggcatcctgaacgtcacggccacggacaagagcaccggcaaggccaacaagatcaccatcaccaacgacaagggccgcctgagcaaggaggagatcgagcgcatggtgcaggaggcggagaagtacaaagcggaggacgaggtgcagcgcgagagggtgtcagccaagaacgccctggagtcctacgccttcaacatgaagagcgccgtggaggatgaggggctcaagggcaagatcagcgaggcggacaagaagaaggttctggacaagtgtcaagaggtcatctcgtggctggacgccaacaccttggccgagaaggacgagtttgagcacaagaggaaggagctggagcaggtgtgtaaccccatcatcagcggactgtaccagggtgccggtggtcccgggcctgggggcttcggggctcagggtcccaagggagggtctgggtcaggccctaccattgaggaggtggattaggggcctttgttctttagtatgtttgtctttgaggtggactgttgggactcaaggactttgctgctgttttcctatgtcatttctgcttcagctctttgctgcttcacttctttgtaaagttaagttgtaacctgatggtaattagctggcttcattatttttgtagtacaaccgatatgttcattagaattctttgcatttaatgttgatactgtaagggtgtttcgttccctttaaatgaatcaacactgccaccttctgtacgagtttttttttttttttttttttttttttttttgcttggcgaaaacactacaaaggctgggaatgtatgtttttataatttgtttatttaaatatgaaaaataaaatgttaaactttt

SEQ ID NO: 155118 - DNA, 1054 bp, Artificial Sequence
  derived and/or modified sequence
atggccaaagccgcggcgatcggcatcgacctgggcaccacctactcctgcgtgggggtgttccaacacggcaaggtggagatcatcgccaacgaccagggcaaccgcaccacccccagctacgtggccttcacggacaccgagcggctcatcggggatgcgggtgtgatcgcggggctcaacgtgctgcggatcatcaacgagcccacggccgccgccatcgcctacggcctggacagaacgggcaagggggagcgcaacgtgctcatctttgacctgggcgggggcaccttcgacgtgtccatcctgacgatcgacgacggcatcttcgaggtgaaggccacggccggggacacccacctgggtggggaggactttgacaacaggctggtgaaccacttcgtggaggagttcaagagaaaacacaagaaggacatcagccagaacaagcgagccgtgaggcggctgcgcaccgcctgcgagagggccaagaggaccctgtcgtccagcacccaggccagcctggagatcgactccctgtttgagggcatcgacttctacacgtccatcaccagggcgaggttcgaggagctgtgctccgacctgttccgaagcaccctggagcccgtggagaaggctccacccgcatccccaaggtgcagaagctgctgcaggacttcttcaacgggcgcgacctgaacaagagcatcaaccccgacgaggctgtggcctacggggcggcggtgcaggcggccatcctgatgggggacaagtccgagaacgtgcaggacctgctgctgctggacgtggctcccctgtcgctggggctggagacggccggaggcgtgatgactgccctgatcaagcgcaactccaccatccccaccaagcagacgcagatcttcaccacctactccgacaaccaacccggggtgctgatccaggtgtacgagggcgagagggccatgacgaaagacaacaatctgttggggcgcttcgagctgagcggcatccctccggcccccaggggcgtgccccagatcgaggtgacctt

SEQ ID NO: 155119 - DNA, 2521 bp, Artificial Sequence
  derived and/or modified sequence
ggaaaacggccagcctgaggagctgctgcgagggtccgcttcgtctttcgagagtgactcccgcggtcccaaggctttccagagcgaacctgtgcggctgcaggcaccggcgtgttgagtttccggcgttccgaaggactgagctcttgtcgcggatcccgtccgccgtttccagcccccagtctcagagcggagcccacagagcagggcaccggcatggccaaagccgcggcgatcggcatcgacctgggcaccacctactcctgcgtgggggtgttccaacacggcaaggtggagatcatcgccaacgaccagggcaaccgcaccacccccagctacgtggccttcacggacaccgagcggctcatcggggatgcggccaagaaccaggtggcgctgaacccgcagaacaccgtgtttgacgcgaagcggctgatcggccgcaagttcggcgacccggtggtgcagtcggacatgaagcactggcctttccaggtgatcaacgacggagacaagcccaaggtgcaggtgagctacaagggggagaccaaggcattctaccccgaggagatctcgtccatggtgctgaccaagatgaaggagatcgccgaggcgtacctgggctacccggtgaccaacgcggtgatcaccgtgccggcctacttcaacgactcgcagcgccaggccaccaaggatgcgggtgtgatcgcggggctcaacgtgctgcggatcatcaacgagcccacggccgccgccatcgcctacggcctggacagaacgggcaagggggagcgcaacgtgctcatctttgacctgggcgggggcaccttcgacgtgtccatcctgacgatcgacgacggcatcttcgaggtgaaggccacggccggggacacccacctgggtggggaggactttgacaacaggctggtgaaccacttcgtggaggagttcaagagaaaacacaagaaggacatcagccagaacaagcgagccgtgaggcggctgcgcaccgcctgcgagagggccaagaggaccctgtcgtccagcacccaggccagcctggagatcgactccctgtttgagggcatcgacttctacacgtccatcaccagggcgaggttcgaggagctgtgctccgacctgttccgaagcaccctggagcccgtggagaaggctctgcgcgacgccaagctggacaaggcccagattcacgacctggtcctggtcgggggctccacccgcatccccaaggtgcagaagctgctgcaagacttcttcaacgggcgcgacctgaacaagagcatcaaccccgacgaggctgtggcctacggggcggcggtgcaggcggccatcctgatgggggacaagtccgagaacgtgcaggacctgctgctgctggacgtggctcccctgtcgctggggctggagacggccggaggcgtgatgactgccctgatcaagcgcaactccaccatccccaccaagcagacgcagatcttcaccacctactccgacaaccaacccggggtgctgatccaggtgtacgagggcgagagggccatgacgaaagacaacaatctgttggggcgcttcgagctgagcggcatccctccggcccccaggggcgtgccccagatcgaggtgaccttcgacatcgatgccaacggcatcctgaacgtcacggccacggacaagagcaccggcaaggccaacaagatcaccatcaccaacgacaagggccgcctgagcaaggaggagatcgagcgcatggtgcaggaggcggagaagtacaaagcggaggacgaggtgcagcgcgagagggtgtcagccaagaacgccctggagtcctacgccttcaacatgaagagcgccgtggaggatgaggggctcaagggcaagatcagcgaggcggacaagaagaaggttctggacaagtgtcaagaggtcatctcgtggctggacgccaacaccttggccgagaaggacgagtttgagcacaagaggaaggagctggagcaggtgtgtaaccccatcatcagcggactgtaccagggtgccggtggtcccgggcctggcggcttcggggctcagggtcccaagggagggtctgggtcaggccctaccattgaggaggtggattaggggcctttgttctttagtatgtttgtctttgaggtggactgttgggactcaaggactttgctgctgttttcctatgtcatttctgcttcagctctttgctgcttcacttctttgtaaagttgtaacctgatggtaattagctggcttcattatttttgtagtacaaccgatatgttcattagaattctttgcatttaatgttgatactgtaagggtgtttcgttccctttaaatgaatcaacactgccaccttctgtacgagtttgtttgttttttttttttttttttttttttgcttggcgaaaacactacaaaggctgggaatgtatgtttttataatttgtttatttaaatatgaaaaataaaatgttaaactttt

SEQ ID NO: 155120 - DNA, 2515 bp, Artificial Sequence
  derived and/or modified sequence
ggaaaacggccagcctgaggagctgctgcgagggtccgcttcgtctttcgagagtgactcccgcggtcccaaggctttccagagcgaacctgtgcggctgcaggcaccggcgtgttgagtttccggcgttccgaaggactgagctcttgtcgcggatcccgtccgccgtttccagcccccagtctcagagcggagcccacagagcagggcaccggcatggccaaagccgcggcgatcggcatcgacctgggcaccacctactcctgcgtgggggtgttccaacacggcaaggtggagatcatcgccaacgaccagggcaaccgcaccacccccagctacgtggccttcacggacaccgagcggctcatcggggatgcggccaagaaccaggtggcgctgaacccgcagaacaccgtgtttgacgcgaagcggctgatcggccgcaagttcggcgacccggtggtgcagtcggacatgaagcactggcctttccaggtgatcaacgacggagacaagcccaaggtgcaggtgagctacaagggggagaccaaggcattctaccccgaggagatctcgtccatggtgctgaccaagatgaaggagatcgccgaggcgtacctgggctacccggtgaccaacgcggtgatcaccgtgccggcctacttcaacgactcgcagcgccaggccaccaaggatgcgggtgtgatcgcggggctcaacgtgctgcggatcatcaacgagcccacggccgccgccatcgcctacggcctggacagaacgggcaagggggagcgcaacgtgctcatctttgacctgggcgggggcaccttcgacgtgtccatcctgacgatcgacgacggcatcttcgaggtgaaggccacggccggggacacccacctgggtggggaggactttgacaacaggctggtgaaccacttcgtggaggagttcaagagaaaacacaagaaggacatcagccagaacaagcgagccgtgaggcggctgcgcaccgcctgcgagagggccaagaggaccctgtcgtccagcacccaggccagcctggagatcgactccctgtttgagggcatcgacttctacacgtccatcaccagggcgaggttcgaggagctgtgctccgacctgttccgaagcaccctggagcccgtggagaaggctctgcgcgacgccaagctggacaaggcccagattcacgacctggtcctggtcgggggctccacccgcatccccaaggtgcagaagctgctgcaagacttcttcaacgggcgcgacctgaacaagagcatcaaccccgacgaggctgtggcctacggggcggcggtgcaggcggccatcctgatgggggacaagtccgagaacgtgcaggacctgctgctgctggacgtggctcccctgtcgctggggctggagacggccggaggcgtgatgactgccctgatcaagcgcaactccaccatccccaccaagcagacgcagatcttcaccacctactccgacaaccaacccggggtgctgatccaggtgtacgagggcgagagggccatgacgaaagacaacaatctgttggggcgcttcgagctgagcggcatccctccggcccccaggggcgtgccccagatcgaggtgaccttcgacatcgatgccaacggcatcctgaacgtcacggccacggacaagagcaccggcaaggccaacaagatcaccatcaccaacgacaagggccgcctgagcaaggaggagatcgagcgcatggtgcaggaggcggagaagtacaaagcggaggacgaggtgcagcgcgagagggtgtcagccaagaacgccctggagtcctacgccttcaacatgaagagcgccgtggaggatgaggggctcaagggcaagatcagcgaggcggacaagaagaaggttctggacaagtgtcaagaggtcatctcgtggctggacgccaacaccttggccgagaaggacgagtttgagcacaagaggaaggagctggagcaggtgtgtaaccccatcatcagcggactgtaccagggtgccggtggtcccgggcctgggggcttcggggctcagggtcccaagggagggtctgggtcaggccctaccattgaggaggtggattaggggcctttgttctttagtatgtttgtctttgaggtggactgttgggactcaaggactttgctgctgttttcctatgtcatttctgcttcagctctttgctgcttcacttctttgtaaagttgtaacctgatggtaattagctggcttcattatttttgtagtacaaccgatatgttcattagaattctttgcatttaatgttgatactgtaagggtgtttcgttccctttaaatgaatcaacactgccaccttctgtacgagtttgttttttttttttttttttttttgcttggcgaaaacactacaaaggctgggaatgtatgtttttataatttgtttatttaaatatgaaaaataaaatgttaaactttt

SEQ ID NO: 155121 - DNA, 2519 bp, Artificial Sequence
  derived and/or modified sequence
ggaaaacggccagcctgaggagctgctgcgagggtccgcttcgtctttcgagagtgactcccgcggtcccaaggctttccagagcgaacctgtgcggctgcaggcaccggcgtgttgagtttccggcgttccgaaggactgagctcttgtcgcggatcccgtccgccgtttccagcccccagtctcagagcggagcccacagacagggcaccggcatggccaaagccgcggcgatcggcatcgacctgggcaccacctactcctgcgtgggggtgttccaacacggcaaggtggagatcatcgccaacgaccagggcaaccgcaccacccccagctacgtggccttcacggacaccgagcggctcatcggggatgcggccaagaaccaggtggcgctgaacccgcagaacaccgtgtttgacgcgaagcggctgattggccgcaagttcggcgacccggtggtgcagtcggacatgaagcactggcctttccaggtgatcaacgacggagacaagcccaaggtgcaggtgagctacaagggggagaccaaggcattctaccccgaggagatctcgtccatggtgctgaccaagatgaaggagatcgccgaggcgtacctgggctacccggtgaccaacgcggtgatcaccgtgccggcctacttcaacgactcgcagcgccaggccaccaaggatgcgggtgtgatcgcggggctcaacgtgctgcggatcatcaacgagcccacggccgccgccatcgcctacggcctggacagaacgggcaagggggagcgcaacgtgctcatctttgacctgggcgggggcaccttcgacgtgtccatcctgacgatcgacgacggcatcttcgaggtgaaggccacggccggggacacccacctgggtggggaggactttgacaacaggctggtgaaccacttcgtggaggagttcaagagaaaacacaagaaggacatcagccagaacaagcgagccgtgaggcggctgcgcaccgcctgcgagagggccaagaggaccctgtcgtccagcacccaggccagcctggagatcgactccctgtttgagggcatcgacttctacacgtccatcaccagggcgaggttcgaggagctgtgctccgacctgttccgaagcaccctggagcccgtggagaaggctctgcgcgacgccaagctggacaaggcccagattcacgacctggtcctggtcgggggctccacccgcatccccaaggtgcagaagctgctgcaggacttcttcaacgggcgcgacctgaacaagagcatcaaccccgacgaggctgtggcctacggggcggcggtgcaggcggccatcctgatgggggacaagtccgagaacgtgcaggacctgctgctgctggacgtggctcccctgtcgctggggctggagacggccggaggcgtgatgactgccctgatcaagcgcaactccaccatccccaccaagcagacgcagatcttcaccacctactccgacaaccaacccggggtgctgatccaggtgtacgagggcgagagggccatgacgaaagacaacaatctgttggggcgcttcgagctgagcggcatccctccggcccccaggggcgtgccccagatcgaggtgaccttcgacatcgatgccaacggcatcctgaacgtcacggccacggacaagagcaccggcaaggccaacaagatcaccatcaccaacgacaagggccgcctgagcaaggaggagatcgagcgcatggtgcaggaggcggagaagtacaaagcggaggacgaggtgcagcgcgagagggtgtcagccaagaacgccctggagtcctacgccttcaacatgaagagcgccgtggaggatgaggggctcaagggcaagatcagcgaggcggacaagaagaaggttctggacaagtgtcaagaggtcatctcgtggctggacgccaacaccttggccgagaaggacgagtttgagcacaagaggaaggagctggagcaggtgtgtaaccccatcatcagcggactgtaccagggtgccggtggtcccgggcctggcggcttcggggctcagggtcccaagggagggtctgggtcaggccctaccattgaggaggtggattaggggcctttgttctttagtatgtttgtctttgaggtggactgttgggactcaaggactttgctgctgttttcctatgtcatttctgcttcagctctttgctgcttcacttctttgtaaagttgtaacctgatggtaattagctggcttcattatttttgtagtacaaccgatatgttcattagaattctttgcatttaatgttgatactgtaagggtgtttcgttccctttaaatgaatcaacactgccaccttctgtacgagtttgtttgttttttttttttttttttttttttgcttggcgaaaacactacaaaggctgggaatgtatgtttttataatttgtttatttaaatatgaaaaataaaatgttaaacttt

SEQ ID NO: 155122 - DNA, 1653 bp, Artificial Sequence
  derived and/or modified sequence
atggccaaagccgcggcgatcggcatcgacctgggcaccacctactcctgcgtgggggtgttccaacacggcaaggtgcagatctcgtccatggtgctgaccaagatgaaggagatcgccgaggcgtacctgggctacccggtgaccaacgcggtgatcaccgtgccggcctacttcaacgactcgcagcgccaggccaccaaggatgcgggtgtgatcgcggggctcaacgtgctgcggatcatcaacgagcccacggccgccgccatcgcctacggcctggacagaacgggcaagggggagcgcaacgtgctcatctttgacctgggcgggggcaccttcgacgtgtccatcctgacgatcgacgacggcatcttcgaggtgaaggccacggccggggacacccacctgggtggggaggactttgacaacaggctggtgaaccacttcgtggaggagttcaagagaaaacacaagaaggacatcagccagaacaagcgagccgtgaggcggctgcgcaccgcctgcgagagggccaagaggaccctgtcgtccagcacccaggccagcctggagatcgactccctgtttgagggcatcgacttctacacgtccatcaccagggcgaggttcgaggagctgtgctccgacctgttccgaagcaccctggagcccgtggagaaggctctgcgcgacgccaagctggacaaggcccagattcacgacctggtcctggtcgggggctccacccgcatccccaaggtgcagaagctgctgcaggacttcttcaacgggcgcgacctgaacaagagcatcaaccccgacgaggctgtggcctacggggcggcggtgcaggcggccatcctgatgggggacaagtccgagaacgtgcaggacctgctgctgctggacgtggctcccctgtcgctggggctggagacggccggaggcgtgatgactgccctgatcaagcgcaactccaccatccccaccaagcagacgcagatcttcaccacctactccgacaaccaacccggggtgctgatccaggtgtacgagggcgagagggccatgacgaaagacaacaatctgttggggcgcttcgagctgagcggcatccctccggcccccaggggcgtgccccagatcgaggtgaccttcgacatcgatgccaacggcatcctgaacgtcacggccacggacaagagcaccggcaaggccaacaagatcaccatcaccaacgacaagggccgcctgagcaaggaggagatcgagcgcatggtgcaggaggcggagaagtacaaagcggaggacgaggtgcagcgcgagagggtgtcagccaagaacgccctggagtcctacgccttcaacatgaagagcgccgtggaggatgaggggctcaagggcaagatcagcgaggcggacaagaagaaggttctggacaagtgtcaagaggtcatctcgtggctggacgccaacaccttggccgagaaggacgagtttgagcacaagaggaaggagctggagcaggtgtgtaaccccatcatcagcggactgtaccagggtgccggtggtcccgggcctggcggcttcggggctcagggtcccaagggagggtctgggtcaggccctaccattgaggaggtggattag

SEQ ID NO: 155123 - DNA, 1875 bp, Artificial Sequence
  derived and/or modified sequence
atggccaaagccgcggcgatcggcatcgacctgggcaccacctactcctgcgtgggggtgttccaacacggcaaggtggagatcatcgccaacgaccagggcaaccgcaccacccccagctacgtggccttcacggacaccgagcggctcatcggggatgcggccaagaaccaggtggcgctgaacccgccggtggtgcagtcggacatgaagcactggcctttccaggtgatcaacgacggagacaagcccaaggtgcaggtgagctacaagggggagaccaaggcattctaccccgaggagatctcgtccatggtgctgaccaagatgaaggagatcgccgaggcgtacctgggctacccggtgaccaacgcggtgatcaccgtgccggcctacttcaacgactcgcagcgccaggccaccaaggatgcgggtgtgatcgcggggctcaacgtgctgcggatcatcaacgagcccacggccgccgccatcgcctacggcctggacagaacgggcaagggggagcgcaacgtgctcatctttgacctgggcgggggcaccttcgacgtgtccatcctgacgatcgacgacggcatcttcgaggtgaaggccacggccggggacacccacctgggtggggaggactttgacaacaggctggtgaaccacttcgtggaggagttcaagagaaaacacaagaaggacatcagccagaacaagcgagccgtgaggcggctgcgcaccgcctgcgagagggccaagaggaccctgtcgtccagcacccaggccagcctggagatcgactccctgtttgagggcatcgacttctacacgtccatcaccagggcgaggttcgaggagctgtgctccgacctgttccgaagcaccctggagcccgtggagaaggctctgcgcgacgccaagctggacaaggcccagattcacgacctggtcctggtcgggggctccacccgcatccccaaggtgcagaagctgctgcaggacttcttcaacgggcgcgacctgaacaagagcatcaaccccgacgaggctgtggcctacggggcggcggtgcaggcggccatcctgatgggggacaagtccgagaacgtgcaggacctgctgctgctggacgtggctcccctgtcgctggggctggagacggccggaggcgtgatgactgccctgatcaagcgcaactccaccatccccaccaagcagacgcagatcttcaccacctactccgacaaccaacccggggtgctgatccaggtgtacgagggcgagagggccatgacgaaagacaacaatctgttggggcgcttcgagctgagcggcatccctccggcccccaggggcgtgccccagatcgaggtgaccttcgacatcgatgccaacggcatcctgaacgtcacggccacggacaagagcaccggcaaggccaacaagatcaccatcaccaacgacaagggccgcctgagcaaggaggagatcgagcgcatggtgcaggaggcggagaagtacaaagcggaggacgaggtgcagcgcgagagggtgtcagccaagaacgccctggagtcctacgccttcaacatgaagagcgccgtggaggatgaggggctcaagggcaagatcagcgaggcggacaagaagaaggttctggacaagtgtcaagaggtcatctcgtggctggacgccaacaccttggccgagaaggacgagtttgagcacaagaggaaggagctggagcaggtgtgtaaccccatcatcagcggactgtaccagggtgccggtggtcccgggcctggcggcttcggggctcagggtcccaagggagggtctgggtcaggccctaccattgaggaggtggattag

SEQ ID NO: 155124 - DNA, 2166 bp, Artificial Sequence
  derived and/or modified sequence
aaaacggccagcctgaggagctgctgcgagggtccgcttcgtctttcgagagtgactcccgcggtcccaaggctttccagagcgaacctgtgcggctgcaggcaccggcgtgttgagtttccggcgttccgaaggactgagctcttgtcgcggatcccgtccgccgtttccagcccccagtctcagagcggagcccacagagcagggcaccggcatggccaaagccgcggcgatcggcatcgacctgggcaccacctactcctgcgtgggggtgttccaacacggcaaggtggagatcatcgccaacgaccagggcaaccgcaccacccccagctacgtggccttcacggacaccgagcggctcatcggggatgcggccaagaaccaggtggtgcagtcggacatgaagcactggcctttccaggtgatcaacgacggagacaagcccaaggtgcaggtgagctacaagggggagaccaaggcattctaccccgaggagatctcgtccatggtgctgaccaagatgaaggagatcgccgaggcgtacctgggctacccggtgaccaacgcggtgatcaccgtgccggcctacttcaacgactcgcagcgccaggccaccaaggatgcgggtgtgatcgcggggctcaacgtgctgcggatcatcaacgagcccacggccgccgccatcgcctacggcctggacagaacgggcaagggggagcgcaacgtgctcatctttgacctgggcgggggcaccttcgacgtgtccatcctgacgatcgacgacggcatcttcgaggtgaaggccacggccggggacacccacctgggtggggaggactttgacaacaggctggtgaaccacttcgtggaggagttcaagagaaaacacaagaaggacatcagccagaacaagcgagccgtgaggcggctgcgcaccgcctgcgagagggccaagaggaccctgtcgtccagcacccaggccagcctggagatcgactccctgtttgagggcatcgacttctacacgtccatcaccagggcgaggttcgaggagctgtgctccgacctgttccgaagcaccctggagcccgtggagaaggctctgcgcgacgccaagctggacaaggcccagattcacgacctggtcctggtcgggggctccacccgcatccccaaggtgcagaagctgctgcaggacttcttcaacgggcgcgacctgaacaagagcatcaaccccgacgaggctgtggcctacggggcggcggtgcaggcggccatcctgatgggggacaagtccgagaacgtgcaggacctgctgctgctggacgtggctcccctgtcgctggggctggagacggccggaggcgtgatgactgccctgatcaagcgcaactccaccatccccaccaagcagacgcagatcttcaccacctactccgacaaccaacccggggtgctgatccaggtgtacgagggcgagagggccatgacgaaagacaacaatctgttggggcgcttcgagctgagcggcatccctccggcccccaggggcgtgccccagatcgaggtgaccttcgacatcgatgccaacggcatcctgaacgtcacggccacggacaagagcaccggcaaggccaacaagatcaccatcaccaacgacaagggccgcctgagcaaggaggagatcgagcgcatggtgcaggaggcggagaagtacaaagcggaggacgaggtgcagcgcgagagggtgtcagccaagaacgccctggagtcctacgccttcaacatgaagagcgccgtggaggatgaggggctcaagggcaagatcagcgaggcggacaagaagaaggttctggacaagtgtcaagaggtcatctcgtggctggacgccaacaccttggccgagaaggacgagtttgagcacaagaggaaggagctggagcaggtgtgtaaccccatcatcagcggactgtaccagggtgccggtggtcccgggcctggcggcttcggggctcagggtcccaagggagggtctgggtcaggccctaccattgaggaggtggattaggggcctttgttctttagtatgtttgtctttgaggtggactgttgggactcaaggactttgctgctgttttcctatgtcatttctgcttcagctct

SEQ ID NO: 155125 - DNA, 2166 bp, Artificial Sequence
  derived and/or modified sequence
aaaacggccagcctgaggagctgctgcgagggtccgcttcgtctttcgagagtgactcccgcggtcccaaggctttccagagcgaacctgtgcggctgcaggcaccggcgtgttgagtttccggcgttccgaaggactgagctcttgtcgcggatcccgtccgccgtttccagcccccagtctcagagcggagcccacagagcagggcaccggcatggccaaagccgcggcgatcggcatcgacctgggcaccacctactcctgcgtgggggtgttccaacacggcaaggtggagatcatcgccaacgaccagggcaaccgcaccacccccagctacgtggccttcacggacaccgagcggctcatcggggatgcggccaagaaccaggtggtgcagtcggacatgaagcactggcctttccaggtgatcaacgacggagacaagcccaaggtgcaggtgagctacaagggggagaccaaggcattctaccccgaggagatctcgtccatggtgctgaccaagatgaaggagatcgccgaggcgtacctgggctacccggtgaccaacgcggtgatcaccgtgccggcctacttcaacgactcgcagcgccaggccaccaaggatgcgggtgtgatcgcggggctcaacgtgctgcggatcatcaacgagcccacggccgccgccatcgcctacggcctggacagaacgggcaagggggagcgcaacgtgctcatctttgacctgggcgggggcaccttcgacgtgtccatcctgacgatcgacgacggcatcttcgaggtgaaggccacggccggggacacccacctgggtggggaggactttgacaacaggctggtgaaccacttcgtggaggagttcaagagaaaacacaagaaggacatcagccagaacaagcgagccgtgaggcggctgcgcaccgcctgcgagagggccaagaggaccctgtcgtccagcacccaggccagcctggagatcgactccctgtttgagggcatcgacttctacacgtccatcaccagggcgaggttcgaggagctgtgctccgacctgttccgaagcaccctggagcccgtggagaaggctctgcgcgacgccaagctggacaaggcccagattcacgacctggtcctggtcgggggctccacccgcatccccaaggtgcagaagctgctgcaggacttcttcaacgggcgcgacctgaacaagagcatcaaccccgacgaggctgtggcctacggggcggcggtgcaggcggccatcctgatgggggacaagtccgagaacgtgcaggacctgctgctgctggacgtggctcccctgtcgctggggctggagacggccggaggcgtgatgactgccctgatcaagcgcaactccaccatccccaccaagcagacgcagatcttcaccacctactccgacaaccaacccggggtgctgatccaggtgtacgagggcgagagggccatgacgaaagacaacaatctgttggggcgcttcgagctgagcggcatccctccggcccccaggggcgtgccccagatcgaggtgaccttcgacatcgatgccaacggcatcctgaacgtcacggccacggacaagagcaccggcaaggccaacaagatcaccatcaccaacgacaagggccgcctgagcaaggaggagatcgagcgcatggtgcaggaggcggagaagtacaaagcggaggacgaggtgcagcgcgagagggtgtcagccaagaacgccctggagtcctacgccttcaacatgaagagcgccgtggaggatgaggggctcaagggcaagatcagcgaggcggacaagaagaaggttctggacaagtgtcaagaggtcatctcgtggctggacgccaacaccttggccgagaaggacgagtttgagcacaagaggaaggagctggagcaggtgtgtaaccccatcatcagcggactgtaccagggtgccggtggtcccgggcctgggggcttcggggctcagggtcccaagggagggtctgggtcaggccctaccattgaggaggtggattaggggcctttgttctttagtatgtttgtctttgaggtggactgttgggactcaaggactttgctgctgttttcctatgtcatttctgcttcagctct

SEQ ID NO: 155126 - DNA, 1653 bp, Artificial Sequence
  derived and/or modified sequence
atggccaaagccgcggcgatcggcatcgacctgggcaccacctactcctgcgtgggggtgttccaacacggcaaggtgcagatctcgtccatggtgctgaccaagatgaaggagatcgccgaggcgtacctgggctacccggtgaccaacgcggtgatcaccgtgccggcctacttcaacgactcgcagcgccaggccaccaaggatgcgggtgtgatcgcggggctcaacgtgctgcggatcatcaacgagcccacggccgccgccatcgcctacggcctggacagaacgggcaagggggagcgcaacgtgctcatctttgacctgggcgggggcaccttcgacgtgtccatcctgacgatcgacgacggcatcttcgaggtgaaggccacggccggggacacccacctgggtggggaggactttgacaacaggctggtgaaccacttcgtggaggagttcaagagaaaacacaagaaggacatcagccagaacaagcgagccgtgaggcggctgcgcaccgcctgcgagagggccaagaggaccctgtcgtccagcacccaggccagcctggagatcgactccctgtttgagggcatcgacttctacacgtccatcaccagggcgaggttcgaggagctgtgctccgacctgttccgaagcaccctggagcccgtggagaaggctctgcgcgacgccaagctggacaaggcccagattcacgacctggtcctggtcgggggctccacccgcatccccaaggtgcagaagctgctgcaagacttcttcaacgggcgcgacctgaacaagagcatcaaccccgacgaggctgtggcctacggggcggcggtgcaggcggccatcctgatgggggacaagtccgagaacgtgcaggacctgctgctgctggacgtggctcccctgtcgctggggctggagacggccggaggcgtgatgactgccctgatcaagcgcaactccaccatccccaccaagcagacgcagatcttcaccacctactccgacaaccaacccggggtgctgatccaggtgtacgagggcgagagggccatgacgaaagacaacaatctgttggggcgcttcgagctgagcggcatccctccggcccccaggggcgtgccccagatcgaggtgaccttcgacatcgatgccaacggcatcctgaacgtcacggccacggacaagagcaccggcaaggccaacaagatcaccatcaccaacgacaagggccgcctgagcaaggaggagatcgagcgcatggtgcaggaggcggagaagtacaaagcggaggacgaggtgcagcgcgagagggtgtcagccaagaacgccctggagtcctacgccttcaacatgaagagcgccgtggaggatgaggggctcaagggcaagatcagcgaggcggacaagaagaaggttctggacaagtgtcaagaggtcatctcgtggctggacgccaacaccttggccgagaaggacgagtttgagcacaagaggaaggagctggagcaggtgtgtaaccccatcatcagcggactgtaccagggtgccggtggtcccgggcctggcggcttcggggctcagggtcccaagggagggtctgggtcaggccctaccattgaggaggtggattag

SEQ ID NO: 155127 - DNA, 2166 bp, Artificial Sequence
  derived and/or modified sequence
aaaacggccagcctgaggagctgctgcgagggtccgcttcgtctttcgagagtgactcccgcggtcccaaggctttccagagcgaacctgtgcggctgcaggcaccggcgtgttgagtttccggcgttccgaaggactgagctcttgtcgcggatcccgtccgccgtttccagcccccagtctcagagcggagcccacagagcagggcaccggcatggccaaagccgcggcgatcggcatcgacctgggcaccacctactcctgcgtgggggtgttccaacacggcaaggtggagatcatcgccaacgaccagggcaaccgcaccacccccagctacgtggccttcacggacaccgagcggctcatcggggatgcggccaagaaccaggtggtgcagtcggacatgaagcactggcctttccaggtgatcaacgacggagacaagcccaaggtgcaggtgagctacaagggggagaccaaggcattctaccccgaggagatctcgtccatggtgctgaccaagatgaaggagatcgccgaggcgtacctgggctacccggtgaccaacgcggtgatcaccgtgccggcctacttcaacgactcgcagcgccaggccaccaaggatgcgggtgtgatcgcggggctcaacgtgctgcggatcatcaacgagcccacggccgccgccatcgcctacggcctggacagaacgggcaagggggagcgcaacgtgctcatctttgacctgggcgggggcaccttcgacgtgtccatcctgacgatcgacgacggcatcttcgaggtgaaggccacggccggggacacccacctgggtggggaggactttgacaacaggctggtgaaccacttcgtggaggagttcaagagaaaacacaagaaggacatcagccagaacaagcgagccgtgaggcggctgcgcaccgcctgcgagagggccaagaggaccctgtcgtccagcacccaggccagcctggagatcgactccctgtttgagggcatcgacttctacacgtccatcaccagggcgaggttcgaggagctgtgctccgacctgttccgaagcaccctggagcccgtggagaaggctctgcgcgacgccaagctggacaaggcccagattcacgacctggtcctggtcgggggctccacccgcatccccaaggtgcagaagctgctgcaagacttcttcaacgggcgcgacctgaacaagagcatcaaccccgacgaggctgtggcctacggggcggcggtgcaggcggccatcctgatgggggacaagtccgagaacgtgcaggacctgctgctgctggacgtggctcccctgtcgctggggctggagacggccggaggcgtgatgactgccctgatcaagcgcaactccaccatccccaccaagcagacgcagatcttcaccacctactccgacaaccaacccggggtgctgatccaggtgtacgagggcgagagggccatgacgaaagacaacaatctgttggggcgcttcgagctgagcggcatccctccggcccccaggggcgtgccccagatcgaggtgaccttcgacatcgatgccaacggcatcctgaacgtcacggccacggacaagagcaccggcaaggccaacaagatcaccatcaccaacgacaagggccgcctgagcaaggaggagatcgagcgcatggtgcaggaggcggagaagtacaaagcggaggacgaggtgcagcgcgagagggtgtcagccaagaacgccctggagtcctacgccttcaacatgaagagcgccgtggaggatgaggggctcaagggcaagatcagcgaggcggacaagaagaaggttctggacaagtgtcaagaggtcatctcgtggctggacgccaacaccttggccgagaaggacgagtttgagcacaagaggaaggagctggagcaggtgtgtaaccccatcatcagcggactgtaccagggtgccggtggtcccgggcctgggggcttcggggctcagggtcccaagggagggtctgggtcaggccctaccattgaggaggtggattaggggcctttgttctttagtatgtttgtctttgaggtggactgttgggactcaaggactttgctgctgttttcctatgtcatttctgcttcagctct

SEQ ID NO: 155128 - DNA, 1926 bp, Artificial Sequence
  derived and/or modified sequence
atggccaaggctgctgccatcggcatcgacctgggcaccacctacagctgtgtgggcgtcttccagcacggcaaggtggagatcatcgccaatgaccagggcaacagaaccacccccagctatgtggccttcacagacacagagcggctgattggagatgctgccaagaaccaggtggccctgaacccccagaacacagtgtttgatgccaagaggctcatcggcaggaagtttggagaccctgtggtgcagagcgacatgaagcactggcccttccaggtgatcaatgatggagacaagcccaaggtgcaggtgtcctacaagggggagaccaaggccttctacccagaggagatcagctccatggtgctgaccaagatgaaggagattgctgaggcctacctgggctaccctgtgaccaatgctgtgatcaccgtgcctgcctacttcaatgacagccagaggcaggccaccaaggatgctggggtgattgctggcctgaatgtgctgcgcatcatcaatgagcccacagctgctgccatcgcctacggcctggacagaacaggcaagggggagagaaatgtgctgatctttgacctgggcggcggcacctttgatgtgtccatcctgaccattgatgatggcatctttgaggtgaaggccacagctggggacacccacctgggcggagaagattttgacaaccggctggtgaaccactttgtggaggagttcaagaggaagcacaagaaggacatcagccagaacaagagagctgtgcggcggctgaggacagcctgtgagcgggccaagaggaccctgagcagcagcacccaggccagcctggagattgacagcctgtttgagggcatcgacttctacaccagcatcacccgggccaggtttgaggagctgtgcagcgacctcttccgcagcaccctggagcctgtggagaaggccctgagagatgccaagctggacaaggcccagatccatgacctggtgctggtgggcggcagcacccgcatccccaaggtgcagaagctgctgcaggacttcttcaacggccgggacctgaacaagagcatcaacccagatgaggccgtggcctatggagctgctgtgcaggccgccatcctgatgggagacaagtcagaaaatgtgcaggacctgctgctgctggatgtggcccccctgagcctgggcctggagacagctgggggcgtgatgacagccctgatcaagaggaacagcaccatccccaccaagcagacccagatcttcaccacctacagcgacaaccagcccggggtgctgatccaggtgtatgaaggagagcgggccatgaccaaggacaacaacctgctgggccgctttgagctgagcggcatccccccagccccccggggcgtgccccagatcgaggtgacctttgatattgatgccaacggcatcctgaatgtgacagccacagacaagagcacaggcaaggccaacaagatcaccatcaccaatgacaagggccgcctgagcaaggaggagattgaaagaatggtgcaggaggccgagaagtacaaggccgaggatgaggtgcagcgggagcgggtgtctgccaagaatgccctggagagctatgccttcaacatgaagtctgctgtggaggatgagggcctgaagggcaagatcagcgaggccgacaagaagaaggtgctggacaagtgccaggaggtgatctcctggctggatgccaacaccctggccgagaaggatgaatttgagcacaagaggaaggagctggagcaggtgtgcaaccccatcatcagcggcctgtaccagggcgctgggggccctggccctgggggctttggagcccagggccccaagggcggcagcggcagcggccccaccatcgaggaggtggactag

SEQ ID NO: 155129 - DNA, 1431 bp, Artificial Sequence
  derived and/or modified sequence
atggccaaggctgctgccatcggcatcgacctgggcaccacctacagctgtgtgggcgtcttccagcacggcaaaggagagagaaatgtgctgatctttgacctgggcggcggcacctttgatgtgtccatcctgaccattgatgatggcatctttgaggtgaaggccacagctggggacacccacctgggcggggaggactttgacaaccggctggtgaaccactttgtggaggagttcaagaggaagcacaagaaggacatcagccagaacaagagagctgtgcggcggctgaggacagcctgtgagcgggccaagaggaccctgagcagcagcacccaggccagcctggagattgacagcctgtttgagggcatcgacttctacaccagcatcacccgggccaggtttgaggagctgtgcagcgacctcttccgcagcaccctggagcctgtggagaaggccctgagagatgccaagctggacaaggcccagatccatgacctggtgctggtgggcggcagcacccgcatccccaaggtgcagaagctgctgcaggacttcttcaacggccgggacctgaacaagagcatcaacccagatgaagctgtggcctacggggctgctgtgcaggccgccatcctgatgggagacaagtcagaaaatgtgcaggacctgctgctgctggatgtggcccccctgagcctgggcctggagacagctggaggagtgatgacagccctgatcaagaggaacagcaccatccccaccaagcagacccagatcttcaccacctacagcgacaaccagcccggggtgctgatccaggtgtatgaaggagagcgggccatgaccaaggacaacaacctgctgggccgctttgagctgagcggcatccccccagccccccggggcgtgccccagatcgaggtgacctttgatattgatgccaacggcatcctgaatgtgacagccacagacaagagcacaggcaaggccaacaagatcaccatcaccaatgacaagggccgcctgagcaaggaggagattgaaagaatggtgcaggaggccgagaagtacaaggcagaagatgaggtgcagcgggagcgggtgtctgccaagaatgccctggagagctatgccttcaacatgaagtctgctgtggaggatgagggcctgaagggcaagatcagcgaggccgacaagaagaaggtgctggacaagtgccaggaggtgatctcctggctggatgccaacaccctggccgagaaggatgaatttgagcacaagaggaaggagctggagcaggtgtgcaaccccatcatcagcggcctgtaccagggcgccggcggccctggccctgggggctttggagcccagggccccaagggcggcagcggcagcggccccaccatcgaggaggtggactag

SEQ ID NO: 155130 - DNA, 1926 bp, Artificial Sequence
  derived and/or modified sequence
atggccaaggctgctgccatcggcatcgacctgggcaccacctacagctgtgtgggcgtcttccagcacggcaaggtggagatcatcgccaatgaccagggcaacagaaccacccccagctatgtggccttcacagacacagagcggctgattggagatgctgccaagaaccaggtggccctgaacccccagaacacagtgtttgatgccaagaggctcatcggcaggaagtttggagaccctgtggtgcagagcgacatgaagcactggcccttccaggtgatcaatgatggagacaagcccaaggtgcaggtgtcctacaagggggacaccaaggccttctacccagaggagatcagctccatggtgctgaccaagatgaaggagattgctgaggcctacctgggctaccctgtgaccaatgctgtgatcaccgtgcctgcctacttcaatgacagccagaggcaggccaccaaggatgctggggtgattgctggcctgaatgtgctgcgcatcatcaatgagcccacagctgctgccatcgcctacggcctggacagaacaggcaagggggagagaaatgtgctgatctttgacctgggcggcggcacctttgatgtgtccatcctgaccattgatgatggcatctttgaggtgaaggccacagctggggacacccacctgggcggagaagattttgacaaccggctggtgaaccactttgtggaggagttcaagaggaagcacaagaaggacatcagccagaacaagagagctgtgcggcggctgaggacagcctgtgagcgggccaagaggaccctgagcagcagcacccaggccagcctggagattgacagcctgtttgagggcatcgacttctacaccagcatcacccgggccaggtttgaggagctgtgcagcgacctcttccgcagcaccctggagcctgtggagaaggccctgagagatgccaagctggacaaggcccagatccatgacctggtgctggtgggcggcagcacccgcatccccaaggtgcagaagctgctgcaggacttcttcaacggccgggacctgaacaagagcatcaacccagatgaggccgtggcctatggagctgctgtgcaggccgccatcctgatgggagacaagtcagaaaatgtgcaggacctgctgctgctggatgtggcccccctgagcctgggcctggagacagctgggggcgtgatgacagccctgatcaagaggaacagcaccatccccaccaagcagacccagatcttcaccacctacagcgacaaccagcccggggtgctgatccaggtgtatgaaggagagcgggccatgaccaaggacaacaacctgctgggccgctttgagctgagcggcatccccccagccccccggggcgtgccccagatcgaggtgacctttgatattgatgccaacggcatcctgaatgtgacagccacagacaagagcacaggcaaggccaacaagatcaccatcaccaatgacaagggccgcctgagcaaggaggagattgaaagaatggtgcaggaggccgagaagtacaaggccgaggatgaggtgcagcgggagcgggtgtctgccaagaatgccctggagagctatgccttcaacatgaagtctgctgtggaggatgagggcctgaagggcaagatcagcgaggccgacaagaagaaggtgctggacaagtgccaggaggtgatctcctggctggatgccaacaccctggccgagaaggatgaatttgagcacaagaggaaggagctggagcaggtgtgcaaccccatcatcagcggcctgtaccagggcgctgggggccctggccctgggggctttggagcccagggccccaagggcggcagcggcagcggccccaccatcgaggaggtggactag

SEQ ID NO: 155131 - DNA, 699 bp, Artificial Sequence
  derived and/or modified sequence
atggccaaggctgctgccatcggcatcgacctgggcaccacctacagctgtgtgggcgtcttccagcacggcaaggtggagatcatcgccaatgaccagggcaacagaaccacccccagctatgtggccttcacagacacagagcggctgattggagatgctggggtgattgctggcctgaatgtgctgcgcatcatcaatgagcccacagctgctgccatcgcctacggcctggacagaactggaaaaggagagagaaatgtgctgatctttgacctgggcggcggcacctttgatgtgtccatcctgaccattgatgatggcatctttgaggtgaaggccacagctggggacacccacctgggcggggaggactttgacaaccggctggtgaaccactttgtggaggagttcaagaggaagcacaagaaggacatcagccagaacaagagagctgtgcggcggctgaggacagcctgtgagcgggccaagaggaccctgagcagcagcacccaggccagcctggagattgacagcctgtttgagggcatcgacttctacaccagcatcacccgggccaggtttgaggagctgtgcagcgacctcttccgcagcaccctggagcctgtggagaaggcccccccagccagcccccgctgccgcagctgctgcaggaccagcagcactggagccacctag

SEQ ID NO: 155132 - DNA, 1653 bp, Artificial Sequence
  derived and/or modified sequence
atggccaaggctgctgccatcggcatcgacctgggcaccacctacagctgtgtgggcgtcttccagcacggcaaggtgcagatcagctccatggtgctgaccaagatgaaggagattgctgaggcctacctgggctaccctgtgaccaatgctgtgatcaccgtgcctgcctacttcaatgacagccagaggcaggccaccaaggatgctggggtgattgctggcctgaatgtgctgcgcatcatcaatgagcccacagctgctgccatcgcctacggcctggacagaactggaaaaggagagagaaatgtgctgatctttgacctgggcggcggcacctttgatgtgtccatcctgaccattgatgatggcatctttgaggtgaaggccacagctggggacacccacctgggcggggaggactttgacaaccggctggtgaaccactttgtggaggagttcaagaggaagcacaagaaggacatcagccagaacaagagagctgtgcggcggctgaggacagcctgtgagcgggccaagaggaccctgagcagcagcacccaggccagcctggagattgacagcctgtttgagggcatcgacttctacaccagcatcacccgggccaggtttgaggagctgtgcagcgacctcttccgcagcaccctggagcctgtggagaaggccctgagagatgccaagctggacaaggcccagatccatgacctggtgctggtgggcggcagcacccgcatccccaaggtgcagaagctgctgcaggacttcttcaacggccgggacctgaacaagagcatcaacccagatgaagctgtggcctacggggctgctgtgcaggccgccatcctgatgggagacaagtcagaaaatgtgcaggacctgctgctgctggatgtggcccccctgagcctgggcctggagacagctggaggagtgatgacagccctgatcaagaggaacagcaccatccccaccaagcagacccagatcttcaccacctacagcgacaaccagcccggggtgctgatccaggtgtatgaaggagagcgggccatgaccaaggacaacaacctgctgggccgctttgagctgagcggcatccccccagccccccggggcgtgccccagatcgaggtgacctttgatattgatgccaacggcatcctgaatgtgacagccacagacaagagcacaggcaaggccaacaagatcaccatcaccaatgacaagggccgcctgagcaaggaggagattgaaagaatggtgcaggaggccgagaagtacaaggcagaagatgaggtgcagcgggagcgggtgtctgccaagaatgccctggagagctatgccttcaacatgaagtctgctgtggaggatgagggcctgaagggcaagatcagcgaggccgacaagaagaaggtgctggacaagtgccaggaggtgatctcctggctggatgccaacaccctggccgagaaggatgaatttgagcacaagaggaaggagctggagcaggtgtgcaaccccatcatcagcggcctgtaccagggcgccggcggccctggccctgggggctttggagcccagggccccaagggcggcagcggcagcggccccaccatcgaggaggtggactag

SEQ ID NO: 155133 - DNA, 1872 bp, Artificial Sequence
  derived and/or modified sequence
atggccaaggctgctgccatcggcatcgacctgggcaccacctacagctgtgtgggcgtcttccagcacggcaaggtggagatcatcgccaatgaccagggcaacagaaccacccccagctatgtggccttcacagacacagagcggctgattggagatgctgccaagaaccaggtggccctgaaccctgtggtgcagagcgacatgaagcactggcccttccaggtgatcaatgatggagacaagcccaaggtgcaggtgtcctacaagggggagaccaaggccttctacccagaggagatcagctccatggtgctgaccaagatgaaggagattgctgaggcctacctgggctaccctgtgaccaatgctgtgatcaccgtgcctgcctacttcaatgacagccagaggcaggccaccaaggatgctggggtgattgctggcctgaatgtgctgcgcatcatcaatgagcccacagctgctgccatcgcctacggcctggacagaacaggcaagggggagagaaatgtgctgatctttgacctgggcggcggcacctttgatgtgtccatcctgaccattgatgatggcatctttgaggtgaaggccacagctggggacacccacctgggcggagaagattttgacaaccggctggtgaaccactttgtggaggagttcaagaggaagcacaagaaggacatcagccagaacaagagagctgtgcggcggctgaggacagcctgtgagcgggccaagaggaccctgagcagcagcacccaggccagcctggagattgacagcctgtttgagggcatcgacttctacaccagcatcacccgggccaggtttgaggagctgtgcagcgacctcttccgcagcaccctggagcctgtggagaaggccctgagagatgccaagctggacaaggcccagatccatgacctggtgctggtgggcggcagcacccgcatccccaaggtgcagaagctgctgcaggacttcttcaacggccgggacctgaacaagagcatcaacccagatgaggccgtggcctatggagctgctgtgcaggccgccatcctgatgggagacaagtcagaaaatgtgcaggacctgctgctgctggatgtggcccccctgagcctgggcctggagacagctgggggcgtgatgacagccctgatcaagaggaacagcaccatccccaccaagcagacccagatcttcaccacctacagcgacaaccagcccggggtgctgatccaggtgtatgaaggagagcgggccatgaccaaggacaacaacctgctgggccgctttgagctgagcggcatccccccagccccccggggcgtgccccagatcgaggtgacctttgatattgatgccaacggcatcctgaatgtgacagccacagacaagagcacaggcaaggccaacaagatcaccatcaccaatgacaagggccgcctgagcaaggaggagattgaaagaatggtgcaggaggccgagaagtacaaggccgaggatgaggtgcagcgggagcgggtgtctgccaagaatgccctggagagctatgccttcaacatgaagtctgctgtggaggatgagggcctgaagggcaagatcagcgaggccgacaagaagaaggtgctggacaagtgccaggaggtgatctcctggctggatgccaacaccctggccgagaaggatgaatttgagcacaagaggaaggagctggagcaggtgtgcaaccccatcatcagcggcctgtaccagggcgctgggggccctggccctgggggctttggagcccagggccccaagggcggcagcggcagcggccccaccatcgaggaggtggactag

SEQ ID NO: 155134 - DNA, 2127 bp, Artificial Sequence
  derived and/or modified sequence
ctgcggagctgctgtgagggccccctgcggctgagccgggtgaccccagctgtgccccggctgagccgggccaacctgtgtggctgccgccaccggcgggtggagttccctgccttccggaggacagagctgctgagccgcatccccagcgctgtgagcagcccccagagccagagcggggcccaccggcagggcaccggcatggccaaggccgccgccatcggcatcgacctgggcaccacctacagctgtgtgggcgtcttccagcacggcaaggtggagatcatcgccaatgaccagggcaacagaaccacccccagctatgtggccttcacagacacagagcggctgattggagatgctgccaagaaccaggtggccctgaacccccagaacacagtgtttgatgccaagaggctgattggaaggaagtttggagaccctgtggtgcagagcgacatgaagcactggcccttccaggtgatcaatgatggagacaagcccaaggtgcaggtgtcctacaagggggagaccaaggccttctacccagaggagatcagctccatggtgctgaccaagatgaaggagattgctgaggcctacctgggctaccctgtgaccaatgctgtgatcaccgtgcctgcctacttcaatgacagccagaggcaggccaccaaggatgctggggtgattgctggcctgaatgtgctgcgcatcatcaatgagcccacagctgctgccatcgcctacggcctggacagaactggaaaaggagagagaaatgtgctgatctttgacctgggcggcggcacctttgatgtgtccatcctgaccattgatgatggcatctttgaggtgaaggccacagctggggacacccacctgggcggggaggactttgacaaccggctggtgaaccactttgtggaggagttcaagaggaagcacaagaaggacatcagccagaacaagagagctgtgcggcggctgaggacagcctgtgagcgggccaagaggaccctgagcagcagcacccaggccagcctggagattgacagcctgtttgagggcatcgacttctacaccagcatcacccgggccaggtttgaggagctgtgcagcgacctcttccgcagcaccctggagcctgtggagaaggccctgagagatgccaagctggacaaggcccagatccatgacctggtgctggtgggcggcagcacccgcatccccaaggtgcagaagctgctgcaggacttcttcaacggccgggacctgaacaagagcatcaacccagatgaagctgtggcctacggggctgctgtgcaggccgccatcctgatgggagacaagtcagaaaatgtgcaggacctgctgctgctggatgtggcccccctgagcctgggcctggagacagctggaggagtgatgacagccctgatcaagaggaacagcaccatccccaccaagcagacccagatcttcaccacctacagcgacaaccagcccggggtgctgatccaggtgtatgaaggagagcgggccatgaccaaggacaacaacctgctgggccgctttgagctgagcggcatccccccagccccccggggcgtgccccagatcgaggtgacctttgatattgatgccaacggcatcctgaatgtgacagccacagacaagagcacaggcaaggccaacaagatcaccatcaccaatgacaagggccgcctgagcaaggaggagattgaaagaatggtgcaggaggccgagaagtacaaggcagaagatgaggtgcagcgggagcgggtgtctgccaagaatgccctggagagctatgccttcaacatgaagtctgctgtggaggatgagggcctgaagggcaagatcagcgaggccgacaagaagaaggtgctggacaagtgccaggaggtgatctcctggctggatgccaacaccctggccgagaaggatgaatttgagcacaagaggaaggagctggagcaggtgtgcaaccccatcatcagcggcctgtaccagggcgccggcggccctggccctgggggctttggagcccagggccccaagggcggcagcggcagcggccccaccatcgaggaggtggactag

SEQ ID NO: 155135 - DNA, 1875 bp, Artificial Sequence
  derived and/or modified sequence
atggccaaggctgctgccatcggcatcgacctgggcaccacctacagctgtgtgggcgtcttccagcacggcaaggtggagatcatcgccaatgaccagggcaacagaaccacccccagctatgtggccttcacagacacagagcggctgattggagatgctgccaagaaccaggtggccctgaacccccctgtggtgcagagcgacatgaagcactggcccttccaggtgatcaatgatggagacaagcccaaggtgcaggtgtcctacaagggggagaccaaggccttctacccagaggagatcagctccatggtgctgaccaagatgaaggagattgctgaggcctacctgggctaccctgtgaccaatgctgtgatcaccgtgcctgcctacttcaatgacagccagaggcaggccaccaaggatgctggggtgattgctggcctgaatgtgctgcgcatcatcaatgagcccacagctgctgccatcgcctacggcctggacagaactggaaaaggagagagaaatgtgctgatctttgacctgggcggcggcacctttgatgtgtccatcctgaccattgatgatggcatctttgaggtgaaggccacagctggggacacccacctgggcggggaggactttgacaaccggctggtgaaccactttgtggaggagttcaagaggaagcacaagaaggacatcagccagaacaagagagctgtgcggcggctgaggacagcctgtgagcgggccaagaggaccctgagcagcagcacccaggccagcctggagattgacagcctgtttgagggcatcgacttctacaccagcatcacccgggccaggtttgaggagctgtgcagcgacctcttccgcagcaccctggagcctgtggagaaggccctgagagatgccaagctggacaaggcccagatccatgacctggtgctggtgggcggcagcacccgcatccccaaggtgcagaagctgctgcaggacttcttcaacggccgggacctgaacaagagcatcaacccagatgaagctgtggcctacggggctgctgtgcaggccgccatcctgatgggagacaagtcagaaaatgtgcaggacctgctgctgctggatgtggcccccctgagcctgggcctggagacagctggaggagtgatgacagccctgatcaagaggaacagcaccatccccaccaagcagacccagatcttcaccacctacagcgacaaccagcccggggtgctgatccaggtgtatgaaggagagcgggccatgaccaaggacaacaacctgctgggccgctttgagctgagcggcatccccccagccccccggggcgtgccccagatcgaggtgacctttgatattgatgccaacggcatcctgaatgtgacagccacagacaagagcacaggcaaggccaacaagatcaccatcaccaatgacaagggccgcctgagcaaggaggagattgaaagaatggtgcaggaggccgagaagtacaaggcagaagatgaggtgcagcgggagcgggtgtctgccaagaatgccctggagagctatgccttcaacatgaagtctgctgtggaggatgagggcctgaagggcaagatcagcgaggccgacaagaagaaggtgctggacaagtgccaggaggtgatctcctggctggatgccaacaccctggccgagaaggatgaatttgagcacaagaggaaggagctggagcaggtgtgcaaccccatcatcagcggcctgtaccagggcgccggcggccctggccctgggggctttggagcccagggccccaagggcggcagcggcagcggccccaccatcgaggaggtggactag

SEQ ID NO: 155136 - DNA, 1857 bp, Artificial Sequence
  derived and/or modified sequence
atggccaaggctgctgccatcggcatcgacctgggcaccacctacagctgtgtgggcgtcttccagcacggcaaggtggagatcatcgccaatgaccagggcaacagaaccacccccagctatgtggccttcacagacacagagcggctgattggagatgctgccaagaaccaggtggtgcagagcgacatgaagcactggcccttccaggtgatcaatgatggagacaagcccaaggtgcaggtgtcctacaagggggagaccaaggccttctacccagaggagatcagctccatggtgctgaccaagatgaaggagattgctgaggcctacctgggctaccctgtgaccaatgctgtgatcaccgtgcctgcctacttcaatgacagccagaggcaggccaccaaggatgctggggtgattgctggcctgaatgtgctgcgcatcatcaatgagcccacagctgctgccatcgcctacggcctggacagaactggaaaaggagagagaaatgtgctgatctttgacctgggcggcggcacctttgatgtgtccatcctgaccattgatgatggcatctttgaggtgaaggccacagctggggacacccacctgggcggggaggactttgacaaccggctggtgaaccactttgtggaggagttcaagaggaagcacaagaaggacatcagccagaacaagagagctgtgcggcggctgaggacagcctgtgagcgggccaagaggaccctgagcagcagcacccaggccagcctggagattgacagcctgtttgagggcatcgacttctacaccagcatcacccgggccaggtttgaggagctgtgcagcgacctcttccgcagcaccctggagcctgtggagaaggccctgagagatgccaagctggacaaggcccagatccatgacctggtgctggtgggcggcagcacccgcatccccaaggtgcagaagctgctgcaggacttcttcaacggccgggacctgaacaagagcatcaacccagatgaagctgtggcctacggggctgctgtgcaggccgccatcctgatgggagacaagtcagaaaatgtgcaggacctgctgctgctggatgtggcccccctgagcctgggcctggagacagctggaggagtgatgacagccctgatcaagaggaacagcaccatccccaccaagcagacccagatcttcaccacctacagcgacaaccagcccggggtgctgatccaggtgtatgaaggagagcgggccatgaccaaggacaacaacctgctgggccgctttgagctgagcggcatccccccagccccccggggcgtgccccagatcgaggtgacctttgatattgatgccaacggcatcctgaatgtgacagccacagacaagagcacaggcaaggccaacaagatcaccatcaccaatgacaagggccgcctgagcaaggaggagattgaaagaatggtgcaggaggccgagaagtacaaggcagaagatgaggtgcagcgggagcgggtgtctgccaagaatgccctggagagctatgccttcaacatgaagtctgctgtggaggatgagggcctgaagggcaagatcagcgaggccgacaagaagaaggtgctggacaagtgccaggaggtgatctcctggctggatgccaacaccctggccgagaaggatgaatttgagcacaagaggaaggagctggagcaggtgtgcaaccccatcatcagcggcctgtaccagggcgccggcggccctggccctgggggctttggagcccagggccccaagggcggcagcggcagcggccccaccatcgaggaggtggactag

SEQ ID NO: 155137 - DNA, 1926 bp, Artificial Sequence
  derived and/or modified sequence
atggccaaggccgccgccatcggcatcgacctgggcaccacctacagctgcgtaggcgtgttccagcatgggaaagtggaaattatcgccaacgaccagggcaaccgaacaaccccaagctacgtagcttttacagacaccgagaggctcattggcgacgccgctaagaaccaggtggctcttaatccccagaatactgtgttcgacgccaagaggttaattggtaggaagtttggagaccccgtggtacagtcagatatgaaacactggcccttccaggtgatcaacgacggggacaaaccaaaggtacaggtgagttacaagggggaaacaaaggctttttacccagaggagataagttcaatggtcctaactaaaatgaaagaaatcgctgaggcctaccttgggtacccagtaacaaacgctgttattaccgtgcctgcatattttaacgactctcaacggcaggccaccaaggacgccggtgtcattgctggtttgaacgtcctccggataatcaacgaacctaccgccgcagccattgcttatggcttggaccgcactgggaaaggtgagaggaatgttttgatctttgatctgggcggcgggaccttcgatgtctccatcctgactatagacgatggaattttcgaggtgaaagccactgcgggcgatacccatctgggcggggaggatttcgacaaccggttagtgaaccattttgtcgaggagttcaaacggaaacataagaaagacatttcacagaataagcgggcggttagacgtctcaggacagcctgtgagcgagccaagcgaactctgtcctcttccacacaggcctcgctggagatcgattctcttttcgagggcatcgacttttacacctccatcactcgcgctcgcttcgaggagttatgttccgacctatttcggtctacacttgagcctgtagaaaaagcgcttagggacgcgaaactcgataaagctcagatacacgacttggtcctcgtagggggctcgaccagaatacccaaagtgcagaagcttttacaggatttcttcaacggccgagatctaaataagagcattaatcctgatgaagccgttgcctacggcgccgccgtccaggccgccatcctgatgggggataaatcagagaacgtgcaggatctgctgctcttggacgttgcccctctgtcacttggactggaaactgcaggaggtgtaatgaccgcactgatcaagaggaattccacgatacctactaagcagacacaaattttcactacatacagcgacaatcagccaggggtactcattcaggtgtatgagggcgaacgtgcaatgactaaagacaataatctgctgggtaggtttgagttatctggcatcccgcctgcgcccagaggtgtaccccaaatcgaggttacgttcgacattgacgctaacggcattctcaatgtgaccgccaccgataagtcaaccgggaaggcaaataaaatcactattacaaatgacaaggggagactttccaaagaagagatcgagcgcatggtccaggaagccgagaagtacaaagctgaggatgaagtccaacgggaaagagtgagcgcgaagaacgcattagagagctatgccttcaatatgaagagcgccgtggaggatgagggcttgaaaggcaagatctccgaggccgacaaaaagaaggtcttggacaagtgtcaggaggtgatctcctggcttgatgccaacaccctggctgagaaggatgagttcgagcacaagaggaaagagttagagcaggtctgcaatcccattatatcaggcctataccagggagctgggggccccgggcccggaggcttcggggctcagggcccaaaggggggatcaggctctggaccaactatcgaggaagtggattag

SEQ ID NO: 155138 - DNA, 1431 bp, Artificial Sequence
  derived and/or modified sequence
atggccaaggccgccgccatcggcatcgacctgggcaccacctactcttgcgttggcgtgttccaacacgggaagggtgagaggaacgtactcatcttcgaccttggcgggggaacattcgacgtttcgattttgactattgacgatgggatattcgaggttaaggcaacggctggagacacccacctgggcggagaagatttcgataacaggttggtgaaccacttcgtggaagagttcaagcgcaagcataagaaagatatatcacaaaataagagagctgtccggagactgaggacggcttgcgagagggctaagaggacactgtctagctctacccaggctagcctggagattgatagtctcttcgaaggcattgacttctacacatcaatcacgcgggcacggtttgaggaactgtgctcagatctgttccgcagcacactcgagccagtcgaaaaagcactgcgggacgctaagttggacaaggcccaaatccatgacctcgtgctcgtgggaggatctacacgaattccgaaagtgcagaaactactgcaggacttctttaacggccgcgacctgaacaaatctataaatccagatgaggctgtcgcctacggcgcagcggtccaggcggccattctcatgggagataaatcagagaacgttcaggacttgctgctgctcgacgtggctcctctgagcctgggattggagacagccggtggtgtgatgaccgctctgattaagagaaattcaaccatacccacgaagcaaactcagattttcacaacgtactccgataatcagccaggcgtgctcatccaagtttacgaaggagaacgggccatgacgaaagacaataatctgttggggagattcgagctctccggcatcccgccggcgcctcgtggtgtacctcagatcgaggttacgtttgacatcgacgcgaacggcattctgaacgtaaccgcaacagacaaatcgacagggaaagccaacaaaatcaccatcacaaacgacaaagggagactaagcaaggaggagatagaaagaatggtccaggaagctgagaagtacaaagctgaggacgaggtgcagcgggagcgagtcagtgccaagaatgccctcgagtcttacgctttcaatatgaaaagcgcagttgaagatgagggccttaaaggcaagatttccgaggcagacaaaaaaaaggttctggacaagtgccaagaggtcatttcctggttggacgccaacacacttgccgaaaaagacgagtttgagcacaagcggaaggagttggagcaagtgtgcaatcctattatctcaggcctgtatcagggtgctggcgggccaggacccggcggattcggagcccagggaccgaagggcgggtctggttccggacctacaatcgaggaagtcgactag

SEQ ID NO: 155139 - DNA, 1431 bp, Artificial Sequence
  derived and/or modified sequence
atggccaaggccgccgccatcggcatcgacctgggcaccacctactcctgcgtcggggtgttccagcatggaaagggagaaaggaatgtgttaatatttgacctgggcggagggacttttgatgttagcattctgacaatagatgatggaatttttgaagttaaagccactgcaggggatacccacctggggggggaggattttgataaccgcctagtcaatcacttcgttgaagaattcaagcggaaacataagaaggacatttcacagaataagagggcagttaggagactgcgcactgcatgtgaacgggctaagaggactttgagtagctccacccaggccagcctggagatagactccctttttgagggaatcgacttctatacttcaattacgcgcgcccgattcgaggagttatgctcagacctattccgaagtaccctggaacctgtggagaaggccctgcgcgatgccaaactcgacaaggcgcagatccatgacctagtgttggttggaggcagtacccggattcctaaagtacagaaactgctacaggacttcttcaacggccgcgaccttaacaagtccatcaatccagatgaagccgtggcttatggggccgccgtgcaagctgcaatcctcatgggggataaatccgaaaacgtgcaggatctcctgctcctcgatgtggcaccactctcactaggcctcgagaccgcaggtggcgtgatgaccgctttgattaaacgcaactcaaccattcccaccaagcagacgcagatatttacaacgtacagcgacaatcagcctggagtgctcatccaggtgtatgagggtgaacgcgccatgaccaaggataataacctgctgggtcggttcgagctgtctgggatacccccagcacctagaggtgttccccaaatcgaggttacatttgacatagacgccaacggcattttgaacgtaactgccactgacaaaagcactggcaaggccaataaaatcaccatcactaacgataaaggacgattatcgaaggaggaaatcgagaggatggtgcaggaagccgagaaatataaagctgaggatgaggtgcagcgagagagagtcagcgcaaagaacgcccttgaaagctacgcctttaatatgaagagcgccgtcgaagatgagggattgaagggaaaaattagcgaggctgacaagaagaaggtcctcgataaatgtcaggaagttatttcttggctggatgcaaacacgctggcagaaaaagatgagtttgagcacaaaagaaaagagttggaacaggtctgcaacccgatcatctcgggcctgtatcaaggagctggtggccctgggccaggaggttttggagctcagggaccaaaaggcgggtctggcagtggccccacaattgaggaagtagattag

SEQ ID NO: 155140 - DNA, 1926 bp, Artificial Sequence
  derived and/or modified sequence
atggccaaggccgccgccatcggcatcgacctgggcaccacctactcctgtgtgggcgtttttcaacatggaaaggtggagattatcgcgaatgaccaaggcaaccgaacgacaccctcttacgtagcctttactgatacggaaagacttatcggagacgccgccaagaaccaggtggcccttaatccccagaacactgtcttcgatgccaagaggcttatcggccgtaagttcggcgaccctgtggtgcagtcagatatgaagcactggccttttcaggttattaatgatggggacaaacccaaagtccaggtgtcctataaaggggataccaaggcgttctaccccgaggagatatccagcatggtgttgacaaagatgaaggagattgccgaagcgtacttgggctatcctgtgacaaatgccgtgattaccgtgccagcctactttaacgattcacagcgacaagcaaccaaggatgctggcgtgatcgcaggactgaacgtgctcagaattatcaatgagccaacagcagcggccattgcctacgggctcgatcgaactggaaagggtgagcgcaacgttcttatattcgatctcggtgggggcacgttcgatgtttcaattttgactatagatgacggcatttttgaggttaaggccactgccggcgacactcatctgggtggagaggatttcgacaaccgactggtcaaccatttcgtggaggagtttaagcggaaacataagaaagacatctctcagaacaagagggctgtgcggagactgcgcacagcctgcgagcgtgccaagcggactttgtcctcctccacccaggcttcccttgagattgacagtctgttcgagggcatcgatttttacacatcaatcacccgtgccaggtttgaggagctctgctccgatctgtttcgatctactcttgaacccgtggagaaagctctgagggacgctaagctggacaaggcgcagatccatgacctcgtgcttgtcggcggttctacacggatccccaaggtccagaaactgctgcaagatttcttcaacgggagagatctcaacaaaagcattaatcctgatgaggcagtggcatacggagccgccgtacaggccgccatcctgatgggagataaaagcgagaatgtccaggatctcctactgctggacgtggctcctctcagcctgggtcttgagacagctggaggcgttatgactgctcttattaagagaaactctacgattcccactaagcagacacagatatttacaacgtatagtgacaatcagccaggcgttctaattcaggtgtatgagggagagcgggcaatgaccaaagataataatctcctcggccgcttcgagctctcgggcatccctcctgctcctcgtggagtcccccagatcgaggttacatttgacatcgacgctaacggaattctgaatgtgaccgccacagataagagcaccgggaaagcaaataagatcacaattaccaacgataaggggcgcctgagtaaggaagaaatagaaagaatggtgcaagaggctgaaaaatataaggccgaagacgaggtgcagagagaacgcgtctcagctaaaaacgctctcgagtcctacgcattcaatatgaagtctgctgtggaagatgagggacttaaagggaagataagtgaagccgataagaagaaagtgctcgacaaatgccaagaagtgatttcgtggcttgatgccaataccctggccgagaaggacgaatttgaacataagcgaaaagaactggaacaggtgtgcaaccctatcatctccggactctaccagggcgctggaggcccaggcccaggaggttttggggctcagggccctaagggtggcagtggctccggccctaccattgaggaggtggattag

SEQ ID NO: 155141 - DNA, 1431 bp, Artificial Sequence
  derived and/or modified sequence
atggccaaggccgccgccatcggcatcgacctgggcaccacctactcctgtgttggcgtgtttcaacatggcaaaggggaacgcaacgtgctgatcttcgacttgggaggaggtacattcgacgtaagcattctgactattgatgatgggatctttgaggtaaaggcaacagccggggacacccaccttgggggcgaagattttgacaaccgattggttaatcatttcgtggaggaatttaagagaaaacataaaaaagatatatctcaaaacaagagagccgtgaggaggttgagaaccgcatgcgaacgagccaaaagaacactctcttctagcacccaggcttccctggaaatcgactcgctatttgagggcatagacttctacactagcatcacccgggctcgattcgaggaactgtgctccgatctgttcagatccactctggagcccgtggagaaagcccttagggacgccaagctcgataaggcccagatccacgatctcgtactagtgggagggtcgacacgcattccaaaagtccagaagctactgcaggacttttttaatggaagggatctgaataagagcatcaaccctgacgaggcggtcgcttacggagctgcggtgcaagcggcgattctgatgggggataagagcgaaaatgtccaggacctgcttctcttagacgtggcccctttgagtctcggacttgagacagccggcggtgttatgacggcactgatcaaacggaattccactatcccgacaaaacagacacagattttcactacatacagcgataatcagcccggagtgttaattcaggtgtatgagggtgaacgagcgatgactaaagataacaatctcctcgggcgtttcgagctcagtggcatccccccagcgccgagaggggtgccacagatcgaagtcaccttcgatattgacgcgaatggcatcctgaacgtgacagctaccgacaagagcaccggaaaagccaataaaataacgatcaccaacgataaagggcgactgagtaaggaagaaattgagcgtatggtacaggaagcggagaagtataaggccgaagacgaagtccagcgggaacgcgtgagcgcgaaaaatgccctcgagtcatacgcattcaatatgaagtctgcggtggaagacgaaggattaaagggaaagatctccgaggccgataaaaaaaaggtcctggacaaatgtcaggaggtcatcagctggcttgatgccaatacactggctgagaaagacgaatttgagcataagcgcaaggagctggagcaggtatgtaatcctattatttccgggctttatcagggggctggcggtccaggtccaggtggtttcggcgcccaggggcctaaaggggggtctggttctggccccaccatcgaagaggttgattag

SEQ ID NO: 155142 - DNA, 1926 bp, Artificial Sequence
  derived and/or modified sequence
atggccaaggccgccgccatcggcatcgacctgggcaccacctactcatgcgtgggtgtgtttcagcacggaaaggtggagatcatcgcaaatgaccagggcaatcgcaccaccccctcatatgttgcatttaccgatactgagcgcctcatcggtgacgccgcaaagaaccaagtggcactgaaccctcaaaatacggtgttcgatgcgaaacgccttattggcaggaagttcggcgatcctgtagtgcagtcagacatgaagcactggccatttcaggtgataaacgacggcgataagccgaaagtacaagtgagttataaaggcgaaacaaaggcattctatccagaagagatctcatccatggtgctgaccaagatgaaagaaattgccgaggcatacctcggctacccggttaccaatgctgtgattaccgtgcccgcttacttcaacgactcccagagacaagccactaaagacgctggagtgatcgccggtctcaacgtgctgagaatcataaacgagccgactgccgctgcaattgcgtacggccttgacaggacaggtaagggagaacgaaatgttctgatcttcgacttgggcggcggaaccttcgatgttagtatccttactattgacgacggcatctttgaagtgaaggcaacggcaggagacacacatctcgggggcgaagacttcgacaatcgattggttaaccacttcgtagaggaattcaaacgcaaacacaagaaggatatttcccagaacaagcgagcggttcgccggctgagaacggcatgcgagcgcgccaagagaaccctatcctcttccacccaggcatctcttgaaatcgactcgctgttcgaaggcatcgacttttatacttccattactagagctagattcgaggaactctgctctgatttgtttagatccacactcgaaccagtagagaaggccctgcgcgacgccaagctagacaaagcccagatccacgacctggtgctggtaggggggagcacacggatcccaaaagtgcagaaactcctgcaggacttctttaatggcagggacctgaacaagagcatcaatccagacgaggctgttgcatacggtgccgcagttcaggcagctatcctcatgggtgacaaaagcgaaaacgttcaagaccttttgttgttggacgtggctccgctctcactggggctcgagactgccgggggagttatgacggcactgatcaagcggaacagcacaattcctaccaaacaaacccagatttttacaacctactcagataatcagccaggggttcttatccaggtttatgagggggagcgtgccatgactaaggacaataatctcttgggtcgctttgaactctctgggattcctcccgctccccgaggagtgccccaaatagaggtgacatttgacatcgacgccaacggcatcctgaacgttacggctaccgataagtccacaggcaaagccaacaaaattaccatcactaacgacaaagggcgccttagtaaagaagaaatcgaacgcatggttcaagaggctgaaaaatacaaggctgaggatgaagtgcagagggagcgggtatccgctaaaaacgcattggaatcttatgccttcaacatgaagtccgctgtggaggacgaaggcctgaagggaaagatatcagaggcggataaaaaaaaggtgctggacaagtgtcaagaggtaattagttggcttgatgccaacaccctggccgagaaagacgagttcgaacataagaggaaggagctggaacaggtgtgcaatccaattatcagcggcctgtaccagggtgccggaggccccggaccagggggattcggagcgcaaggccctaagggcggatctggaagcggccccacgatagaggaggtggactag

SEQ ID NO: 155143 - DNA, 1926 bp, Artificial Sequence
  derived and/or modified sequence
atggccaaggccgccgccatcggcatcgacctgggcaccacctactcttgtgttggtgtatttcagcacgggaaggttgagatcattgccaacgatcagggaaaccgtacaactccttcttacgtggccttcacggacacagagcgtctaatcggcgatgcggcaaaaaaccaagttgccctgaatcctcagaataccgtgttcgacgccaaacgactgatcggccgcaagttcggcgaccccgtagtacagagcgatatgaaacactggccgtttcaggtgattaatgatggagataagccaaaggtccaggtgagctacaagggtgaaaccaaggccttctacccagaggagatctcgtccatggtgcttacgaagatgaaggagatcgctgaagcttacctcggctatcccgtgactaacgccgtgatcacagtcccggcctacttcaatgattcgcagagacaggccacaaaagatgcgggtgtcatagccggcctgaatgtgctcaggatcattaacgagcccaccgctgcagctatcgcttacggattagatcgaaccggaaagggtgaaagaaacgtcctcatttttgatttaggcggaggcacattcgacgtgagtatcctgacgattgacgatgggatctttgaggtcaaggcgacggccggagatacgcacctgggtggggaggattttgacaaccgtttggtgaaccactttgtggaagaattcaagagaaagcataaaaaggacatctctcaaaacaaacgtgctgtgaggagactgagaactgcatgcgagcgtgcaaagaggacgctgagttcttccacacaagcctcactggagatagacagcctcttcgagggtatcgacttttatacctctatcacgagggctaggtttgaagagctttgttctgacctgtttagaagtaccctagagcctgttgaaaaggccctgcgcgatgctaaattagataaagctcaaattcacgacctggtgctggtgggagggtccacacgcatccccaaggtccagaagctgcttcaggacttcttcaacgggagggatttgaacaagagcatcaatcctgacgaggcggtcgcctatggtgcagccgttcaggcagcaattttgatgggcgacaagtcagaaaatgtccaggatcttctgcttcttgacgtggcaccactgagcctcgggctcgagacagcagggggggtaatgacagcgttaattaaaagaaacagtactatacccaccaagcagacacagatattcaccacctactcggataaccagcctggagtgctcattcaggtctatgagggcgaaagggccatgactaaagataataacctgctgggccgattcgagttaagcgggatcccgcctgccccacgaggagtgccacaaatagaagtgacgtttgatatcgacgccaatggtatattgaacgtgactgccacggacaagtcgaccggcaaggctaacaagatcaccataaccaacgacaaagggagactctcgaaggaagaaatcgaaagaatggtgcaagaggccgagaagtataaagccgaggacgaggtccagcgggagagagttagtgccaagaacgctctggagtcctatgctttcaacatgaagagcgccgtcgaagatgaggggctaaaggggaaaatctctgaggccgacaagaagaaagttctggacaaatgtcaggaggtgatctcatggctggatgcaaatacccttgcagaaaaggatgagtttgaacataaaagaaaagagctggagcaggtgtgtaatccaatcataagtgggctctaccagggagcaggtggtcccggccccggtggctttggggcacaggggcccaagggtgggtccgggtcggggcccactatagaagaggtggattag

SEQ ID NO: 155144 - DNA, 699 bp, Artificial Sequence
  derived and/or modified sequence
atggccaaggccgccgccatcggcatcgacctgggcaccacctacagctgcgtgggcgtcttccagcatggaaaggtggaaatcatcgccaacgatcagggcaaccgaacgactccaagttacgttgcattcacagacaccgagaggctaatcggggatgccggcgtgatagcaggactcaatgtgttgcggatcattaacgagcctacagcagccgcaatcgcctacggacttgacagaacggggaaaggggagaggaatgtgcttatctttgatttgggtgggggtaccttcgacgtgtctatcctgaccatcgatgatggaatctttgaggtcaaggccactgccggagacacacacctggggggtgaggacttcgataatcggctagtgaaccacttcgtagaggagtttaaacgaaagcataaaaaggatatctcacagaacaagagggcagtgcgacggctccggaccgcctgtgagcgggcaaagagaacattatcttcatccacacaggcctcgctggagatcgactctctgtttgagggtatagacttctacacctccatcactagggcccgattcgaggaactctgctctgatctgttcagatccacgctggagcccgtcgaaaaggcaccgcctgcaagccccagatgccgcagttgttgccgcaccagcagtaccggagccacctag

SEQ ID NO: 155145 - DNA, 1926 bp, Artificial Sequence
  derived and/or modified sequence
atggccaaggccgccgccatcggcatcgacctgggcaccacctacagttgtgtaggcgtgttccaacacggaaaagttgagattatcgctaacgatcaggggaacaggacaaccccatcctacgtcgcatttaccgatacagagagactaatcggggatgctgctaaaaaccaggttgcgttgaatcctcagaatacagtatttgatgcgaagagactgatcggacggaagtttggtgaccccgtcgttcagagcgacatgaagcactggcccttccaggtaatcaacgatggagacaagcccaaggttcaggttagctataagggcgagacaaaagccttttaccccgaggagatttcttctatggtgctcactaagatgaaggagattgcggaagcgtatctggggtatccagtgaccaacgcagttatcactgtacctgcttacttcaacgactcgcaacggcaggctactaaggacgccggtgtgatagctggtctgaatgtgctgcggatcatcaacgagcccacagccgctgccattgcttacggtctggacaggaccggcaagggagagcggaacgtgctcatattcgatttgggaggagggacctttgatgtatccattcttacgatagacgatggcatcttcgaagttaaagctactgcaggggacactcaccttgggggcgaagactttgataaccgcttagttaatcatttcgtggaggagttcaagcggaaacataagaaagatatctcccaaaacaagagagctgtccggagactgcgtaccgcctgcgaaagagccaaacggacactgtcctccagcactcaggcctccctagaaattgacagtctgtttgagggcatcgatttctacacctccattacccgcgcccgcttcgaggaactgtgctccgatctctttcgctccaccctggaacccgtggaaaaggcgttgagagacgcaaagctggacaaggctcagattcatgatctggtgctggtaggaggcagtactcgaattccgaaagtgcagaagttgctgcaggacttctttaatggtcgggacttgaacaagtctatcaatccggatgaggccgtggcttacggcgctgcagtccaggccgccatccttatgggagacaaatcagaaaatgtccaggatctcctgctgcttgacgttgctcccctctccctcggccttgaaacagccggcggggtaatgacagctctgattaaacggaattccacaatccccaccaagcagacccagatcttcacaacatattctgacaatcaaccgggggtgctcatccaggtatacgaaggagagagagccatgacgaaggataacaacttgcttggacgcttcgaactatctggcataccaccggcgccccggggcgtgcctcagattgaggtgaccttcgacatcgacgcaaatggcatcctgaacgtgaccgcaaccgacaagtcaacagggaaggccaataagatcacgattacaaacgacaaaggacgtcttagcaaggaggagattgagagaatggtgcaggaggccgagaaatacaaagccgaggacgaagttcagcgcgagagggtgtcagccaaaaacgctctggagagctatgcttttaatatgaaaagtgcagtggaagacgaaggcctgaaaggcaagattagtgaggccgacaagaaaaaagtactagataagtgtcaggaagtgatcagttggctggacgcaaataccctagctgagaaggatgaattcgaacacaagcggaaagagttggaacaggtgtgtaacccgattatttcaggcctctaccaaggagccgggggacctgggcctggtggatttggcgctcagggcccaaaaggaggctctggcagcgggccgactatcgaagaagtggactag

SEQ ID NO: 155146 - DNA, 1431 bp, Artificial Sequence
  derived and/or modified sequence
atggccaaggccgccgccatcggcatcgacctgggcaccacctactcctgtgttggcgtgtttcagcatgggaagggcgagaggaatgtgctgatctttgacctgggaggcggcacgtttgacgtgtccatcctcacaattgatgacggtatcttcgaggtgaaagccactgccggagacacacatctgggcggagaggactttgataaccggctggtgaatcactttgtcgaggaattcaagagaaagcataagaaggatatcagccagaataaacgggctgtgcggcggttgcgcaccgcttgtgagcgggcaaagagaactctgtccagcagcacccaggccagccttgagatcgactcgctgttcgaaggcatagacttttatacttccataaccagagctaggtttgaagagttatgttccgacttgttccgtagcacgctggaaccagttgaaaaagccttgcgagacgccaagcttgacaaggctcagatacacgatctggtactggttgggggttcaactcgaattcccaaagtacagaagttgctccaggacttcttcaacggaagggacctgaataaatccattaacccagacgaggccgtcgcctacggcgcggctgtacaggccgccatactcatgggcgacaagagcgagaatgtgcaggaccttctgctgttagacgttgctcccctaagcttgggcctggagacagctggtggtgttatgacagctctcattaaacgtaatagtactattccgacgaagcagacccagatatttacaacatattccgacaaccagccaggggtcctcatacaggtctatgagggggagcgggccatgaccaaagacaacaaccttctggggaggttcgaattatctggcatccctcctgcacccaggggcgttccccagattgaagtaacgttcgacattgacgccaatgggatcctcaatgttacggccaccgacaaatctaccgggaaagcaaacaagattacaatcacaaacgataagggcaggctgtcaaaggaggaaatcgaacgcatggtacaagaggcggagaagtataaagcagaggatgaagtgcaacgagagagagtgtctgcaaagaacgctctcgaatcatatgcgttcaatatgaagtctgcggtcgaagatgaaggtctgaagggcaagatctcagaggcagacaaaaagaaggttttggataagtgccaggaagtgatctcctggctcgatgccaatacactcgctgagaaagacgagttcgagcataagcggaaggagctcgagcaggtgtgtaacccgattataagcggactttaccagggcgccggcggtcccggcccaggcggctttggtgctcagggtccaaaaggtggatctggaagcggcccaaccatagaggaggtagactag

SEQ ID NO: 155147 - DNA, 1431 bp, Artificial Sequence
  derived and/or modified sequence
atggccaaggccgccgccatcggcatcgacctgggcaccacctacagttgtgtaggggtcttccaacatggcaagggcgagcggaacgtgctgattttcgacctcgggggcggaacgttcgacgtttctatcctgacaatcgatgacggcatcttcgaggtgaaggcaaccgctggcgatacccacttgggcggcgaggacttcgataacagactcgtgaaccactttgtggaggagtttaaacgaaaacacaagaaggacatttctcaaaacaagcgtgccgtgcggcgcctgcggacggcctgtgagcgcgccaaacgcaccctaagtagcagcacacaggccagtttggaaatcgattcgctgtttgagggtattgacttctatacctctatcactagagcgcggttcgaggagctgtgctccgatttgtttagaagcactctcgagccagtggagaaggcattgagagatgcaaaactggataaagctcagattcatgacctagtgctcgtcggtggttccaccagaatcccaaaggtgcagaagctcctgcaggatttttttaacggaagagacctcaacaaaagtattaatcctgacgaagctgtggcttacggcgcggccgtacaggcggctatcctgatgggggataaaagtgaaaacgtacaggatcttttgctgctcgatgtggcccctctgagtctgggcctggagactgcaggcggcgtgatgaccgccctcattaaacggaattcaacaatccctaccaaacaaacccagattttcactacctatagtgacaatcagccaggagtcttgattcaggtgtacgagggcgagagagcaatgactaaggacaacaacctgctgggccggtttgaactcagcggcataccaccagcacctaggggagttccccagatcgaagtgacgtttgatatcgacgcaaacgggatcttgaacgtgacggccaccgataagtcaaccggaaaagccaacaagatcactattacaaacgacaagggcaggctctcaaaagaagaaatagagcggatggtacaggaggctgaaaaatacaaagccgaggacgaggtccagcgagaacgcgtttctgctaagaatgccctggaaagctacgcattcaatatgaagtcagcggtggaggacgaaggcctgaagggtaaaatttccgaggccgacaaaaagaaagtgttagataaatgccaggaagtgatcagttggctcgatgcaaatacattagcagaaaaggacgagttcgaacacaagaggaaagagctagagcaggtgtgcaatcccatcatatcgggactgtaccagggtgccggcggtcctggccccggaggtttcggcgcgcaggggcccaagggaggcagtgggagcggcccaaccatagaagaggtggattag

SEQ ID NO: 155148 - DNA, 1653 bp, Artificial Sequence
  derived and/or modified sequence
atggccaaggccgccgccatcggcatcgacctgggcaccacctactcgtgcgtcggagtcttccagcatgggaaggtccagatttcctccatggtgctcacaaaaatgaaagagattgctgaagcttacttgggctaccctgttacaaatgccgtgattaccgtaccggcgtacttcaatgacagccagcggcaggcaacgaaagatgctggagtgatcgccgggcttaacgtactgagaatcatcaatgagccaactgccgcagcaatagcgtatgggcttgaccgaaccggcaaaggtgaaaggaatgtcttaatttttgacctcggcggtggaacctttgacgtcagcatcctgaccattgatgacggcatatttgaggtgaaagctacagccggggacacccatctaggtggtgaggattttgataatcgcctcgtaaaccacttcgtggaggagtttaagcgtaagcacaaaaaagacattagtcagaataagagggctgtgagacggcttcgcactgcgtgcgagagagcgaaacgcacccttagtagttccactcaggctagcctggaaattgatagcttgtttgaaggaattgacttctacacgtctatcactagagcccgtttcgaggagctgtgctcagacctgtttaggtccaccttggaaccagtggagaaggctttacgcgacgctaagctggacaaagcccaaatccatgacctcgtacttgtgggaggatctactcggattcccaaagtccagaagctcctgcaggacttcttcaatgggagagacctgaacaaatcaattaatcccgacgaggcggtcgcttacggcgcagccgtccaggctgccattctgatgggggacaaatctgagaatgtgcaggatctgttgctattggacgttgcacccctgagcctgggcctagaaactgctggcggggttatgaccgcactgattaaacggaactccaccatcccaacaaagcagacacaaatctttaccacatactctgataatcaacccggggtgcttattcaggtgtatgaaggagaacgcgctatgacaaaggacaataaccttctaggcaggtttgaactcagcggcattccccccgcgccgagaggagttccacagatagaagtaaccttcgacattgatgctaatggaattctgaatgttactgctaccgacaagtccactggaaaagctaataaaatcaccatcacgaatgacaaaggccgattaagtaaggaggagattgaaagaatggtccaggaggcagaaaaatacaaagccgaagacgaggtacaacgcgaaagggtgagcgctaagaacgcactggaatcttacgcatttaatatgaaatcggctgtggaagacgaggggttgaagggaaagataagtgaggccgacaagaaaaaagtcctggacaagtgtcaggaagtgatcagctggctggacgccaacactctggctgaaaaagatgaattcgaacataagaggaaggagttggagcaggtgtgcaaccctataatcagtggcctgtatcaaggggcaggtgggcctggtccgggcggatttggagcccagggcccaaaggggggatctggatccggaccaaccattgaggaggttgactag

SEQ ID NO: 155149 - DNA, 1872 bp, Artificial Sequence
  derived and/or modified sequence
atggccaaggccgccgccatcggcatcgacctgggcaccacctactcttgcgtcggcgtattccagcatgggaaagtggaaatcatagccaatgaccagggaaatagaaccactccaagctacgtcgcattcacggacaccgagcgcctgatcggtgatgcagcgaaaaaccaggtggccttaaatccggtagtgcaatctgatatgaaacattggccatttcaagtgataaatgacggtgacaaaccaaaagtacaggtgtcctataagggggaaaccaaagcattctacccggaagaaatttcttccatggtgctcaccaagatgaaagagatcgcagaggcatatttgggctaccctgtgactaatgccgtgattactgtgccagcatatttcaacgactctcagagacaagccaccaaggacgccggagtcatcgccggcctgaacgttctgcggataatcaacgagcccactgctgccgcaattgcgtacggcttggatcgaacaggaaagggtgaacggaacgtgcttattttcgatcttggaggggggacttttgatgtttccattctgacaattgacgatggcatcttcgaggtaaaagcgaccgccggtgatactcatctgggcggagaggacttcgacaaccgactcgtgaatcatttcgtggaggaattcaagcgtaaacacaagaaggatatctcccagaacaagcgagcagtacgcaggctcagaaccgcttgcgagcgggccaaacgcacgttaagcagttccacacaagctagcttggaaatcgactccctgttcgaggggatagatttttacactagtattactcgcgcacgcttcgaagagctctgctccgacttattccgctctaccctagagccggtggaaaaagccttgagggatgccaaactggataaagcacagatccacgatctagttcttgttggggggtcgacacgcatccctaaagtacagaaactactacaggatttttttaatggccgagatctgaataaaagcataaatcccgacgaggcagtcgcgtatggggcggcggtgcaggcggccatccttatgggcgataagagcgagaacgtccaggatctgttactacttgacgtggctccactgagcttagggctggagaccgctggaggggtgatgactgcgcttataaaaaggaatagcacaatccccacaaagcaaactcaaattttcaccacctactcagacaatcaacccggcgtcttgatccaggtgtacgagggtgaaagggcaatgaccaaagacaacaatctcctgggacgttttgaactctccggcattccaccggcccccagaggtgttccacagattgaggttacgtttgatattgatgcaaatggcatcctaaacgtcactgccaccgataaatccacgggaaaggctaataagatcacgatcaccaacgacaaaggccgacttagcaaggaagagattgagcgaatggtccaggaggccgagaaatacaaagctgaagatgaggtgcagcgcgaaagggtctccgcaaagaatgctttggaatcctatgcatttaatatgaaatccgctgtcgaagatgagggactgaaaggcaagatttctgaggcagacaagaaaaaagtgctcgataaatgccaagaggtcatatcctggcttgatgctaacaccttggccgagaaagacgaatttgagcacaagcggaaggaactcgaacaggtttgcaaccctataatttcaggactctatcagggcgcaggcgggcctggtcccggagggttcggtgcccagggaccgaagggaggctctggtagcggtccaacaatcgaagaagtggattag

SEQ ID NO: 155150 - DNA, 1653 bp, Artificial Sequence
  derived and/or modified sequence
atggccaaggccgccgccatcggcatcgacctgggcaccacctactcttgcgttggtgttttccagcacggcaaagtgcagatctcatctatggtgttaacaaagatgaaggagatagccgaggcctatcttggataccccgtgaccaatgcagtcatcacagtgcccgcatatttcaatgactcccaacggcaggccaccaaagacgctggtgttattgccgggttaaatgtgctgaggattataaatgagccaacagcagctgcaattgcttacggcctggacagaacaggcaaaggtgaacggaacgtcttaattttcgacctgggcggcggcacatttgacgtctctatcttaaccattgatgacggaatatttgaggtcaaagctactgcgggcgacacccatcttggaggtgaggacttcgataataggctggtcaatcatttcgtggaagagttcaagcgtaagcataaaaaagatatctcacagaacaaaagggccgtgcgacgcttgcgcaccgcctgcgaaagagctaaaaggacactcagctctagcacccaggcctccttggagatcgatagtcttttcgaaggcattgatttctacacatctattacgcgggcaagatttgaagaactgtgctcggacctcttcagaagtaccctcgaaccagttgagaaggcactccgagacgctaaactagacaaggcccaaatccacgacctggtcctggtcggggggtccaccaggatacccaaggtgcaaaaactgctccaggacttttttaacggtcgtgatctcaataagtccataaaccccgacgaggctgttgcttacggggccgctgtgcaggcagcaatactgatgggggacaagtctgagaacgtgcaggacctgctcctgttggatgtcgcccctctatcactcggactggagactgcagggggggtcatgaccgccctgatcaagaggaactctaccatccccactaagcagacccaaatattcactacttactccgacaaccagccaggagttttgatccaggtgtacgaaggtgaaagagctatgactaaggataacaacctgttaggccggtttgaactctcaggcatacctcccgccccccgaggtgtgcctcaaatcgaagtcacattcgatatagacgctaatggaatactgaacgtcaccgccactgacaaaagcacaggaaaggctaacaaaatcaccattaccaatgacaagggaaggctgtccaaggaagagatcgagcgtatggtgcaggaagctgaaaagtacaaggccgaagatgaggtccaaagggaaagggtctccgcaaaaaacgcgctggagtcctatgcattcaacatgaaaagcgctgtcgaggatgaaggacttaagggcaagatcagcgaagccgataaaaagaaggtgctcgataagtgccaagaggtgattagctggcttgatgcgaacacactcgcagaaaaggatgagttcgagcataagagaaaggagctcgagcaggtgtgcaatcccattatctctggcctataccagggcgcaggcgggcccggaccgggcggattcggagctcaggggcctaaaggaggctccgggtctggaccaaccattgaagaggtggactag

SEQ ID NO: 155151 - DNA, 1653 bp, Artificial Sequence
  derived and/or modified sequence
atggccaaggccgccgccatcggcatcgacctgggcaccacctactcatgtgtgggagtcttccagcatggcaaggtccagatcagtagtatggttcttacaaaaatgaaagagatcgctgaggcttatctggggtacccagtaaccaacgccgtcatcacggtcccggcctacttcaacgatagccagaggcaggcgaccaaggacgcaggagtgattgccggtctgaatgtgctcaggatcataaatgaaccaactgctgcagccattgcctatggcctggacaggaccgggaaaggggaaagaaacgttttgatcttcgaccttggcgggggcacatttgatgtgagtatcttgaccattgatgatggtatctttgaggtcaaggccactgcgggtgatactcacctaggaggggaggacttcgacaatagactggtcaaccattttgtggaggagtttaagcggaagcacaaaaaggacatcagccaaaataaacgcgccgtgcgcaggcttcggacagcttgcgaacgagctaagcggactctctcctcctccacccaggcctccctcgagatcgactcactgtttgagggcatcgacttctacacttccataacgcgcgcccggtttgaagagttatgcagcgacctcttccgcagcaccttggagcccgtcgaaaaagctctgagagatgccaagctcgacaaggcgcagatacatgaccttgtgttagtcggcgggtcaactcggattccaaaggtgcaaaagttgctgcaggacttcttcaacgggcgggacctgaacaagtcgatcaaccctgacgaagcggttgcttatggagctgctgtccaagcggcaatcttgatgggtgataagtctgagaacgtgcaagaccttctcctcctggatgtggcacccttgtcgctagggctggagacagcgggaggcgtgatgaccgctctgattaagaggaactctacgatccccacaaaacagacccagatcttcactacgtatagtgacaaccagcccggcgtgcttatccaggtctatgaaggtgaaagggccatgacaaaggacaataacctgctcggaaggttcgagctttccggaatcccgcccgcaccccgcggcgtgcctcaaatagaggtgacatttgacatagacgctaacgggatcctgaacgtaacagccactgacaagtccaccgggaaggcgaacaagattactatcaccaacgataaaggaaggctgtccaaggaggaaatcgagcgaatggtgcaggaggctgaaaagtacaaggctgaggacgaagtgcagagggagcgggtgtctgctaaaaatgctttggagtcctacgccttcaatatgaaatctgctgttgaagacgagggcctgaaagggaagattagcgaagctgataaaaagaaggtcctggataagtgtcaggaggtcatttcttggctggatgccaatacattggctgagaaggatgagtttgaacataagaggaaggagttagaacaggtttgcaacccaatcatcagtggtctctaccagggggcgggtgggcctggtccagggggcttcggtgcccaaggcccaaagggcggctctggatctggaccaaccatcgaggaagtggattag

SEQ ID NO: 155152 - DNA, 1653 bp, Artificial Sequence
  derived and/or modified sequence
atggccaaggccgccgccatcggcatcgacctgggcaccacctactcttgtgtcggagtcttccagcatggaaaagtccagattagttccatggtgctaaccaaaatgaaagagatcgccgaagcataccttggttacccagtgaccaacgctgtgatcaccgttcctgcctattttaatgatagccaaaggcaggctaccaaggatgcaggtgtgatcgctggcttgaatgtgttacggatcattaacgagccgaccgccgccgcaatcgcatacgggctggaccggaccgggaagggcgaacggaacgtcctgatcttcgacctgggagggggcacgtttgacgtttcaattctcactattgacgatggcattttcgaagtgaaggccactgccggagacactcacctcggtggagaggactttgacaatcgccttgtcaatcattttgttgaggaattcaagaggaaacacaaaaaggatatcagccagaataagcgagcggtccgcagattgcggactgcatgtgagagggcaaagagaacactctcatctagcacccaggcatcccttgagattgactctctgttcgagggaattgacttctacactagcatcacccgcgcccgcttcgaggaactctgttccgatctcttccgttctaccctggaaccagtcgaaaaggccctacgggatgcaaagttagacaaagcccagattcatgatctggtgttggtcgggggatccacgcgcattcctaaggtccagaagctcctgcaggattttttcaacggccgcgatcttaataaatccataaaccccgatgaggccgtcgcatatggagccgcagttcaagccgctatccttatgggggataagtccgaaaatgtgcaggacctcctgcttctggatgttgcccctctgagcttggggttggaaaccgcgggtggcgtcatgactgcgttaataaagcggaacagtacaattccgacaaaacaaacccagattttcactacttactccgacaaccagccgggcgtgctcatccaggtgtacgagggtgagcgggctatgactaaggataacaacttactgggccgatttgagctgtcaggcattccgccagcgcctcggggtgtgccacagatcgaggtgaccttcgatatcgatgccaatggtattctcaatgtgactgccacagacaagtcaacaggcaaggctaataagatcaccatcaccaatgacaaaggacggctatctaaggaagaaattgaaaggatggtgcaggaagcagagaagtataaggctgaggacgaggtccaaagagagcgtgtttctgccaaaaatgccctcgaatcctacgcctttaatatgaaaagtgccgtggaggatgagggcctcaagggcaagatttccgaggctgacaagaagaaggtacttgacaaatgccaagaagtaattagctggctggacgccaacacactcgcagagaaagacgagtttgagcacaagaggaaggagttagagcaggtgtgcaatcctatcatatcgggcctctatcaaggagcgggcggtcccggtcccggaggtttcggagcccaaggtcccaagggaggaagcgggtctgggcccacaatagaagaggtcgattag

SEQ ID NO: 155153 - DNA, 699 bp, Artificial Sequence
  derived and/or modified sequence
atggccaaggccgccgccatcggcatcgacctgggcaccacctacagctgtgtgggggtatttcagcacggaaaggttgaaatcatcgctaatgatcaggggaaccggacaaccccctcttacgttgcatttaccgacacggagcgcctaattggcgacgccggggtgatcgctgggctgaatgtgttgaggattattaatgagccgaccgctgcagccatcgcgtacggcctggacagaactggcaagggtgagagaaatgtccttatcttcgacttggggggcggtacctttgatgtctctatcctgactatagatgacggcatctttgaggtgaaggctacagcgggcgacacccaccttgggggagaagatttcgacaaccgactggtgaatcactttgtagaggagtttaagcgcaaacataagaaagatattagccagaataagcgggctgtgcgtagactgagaaccgcttgtgagcgggcaaaaagaaccctgtcttccagcacacaggcatccctggagatagatagcctgttcgaaggtatcgacttctatacatctattacaagagctcgtttcgaagaattatgcagcgacctgtttcgctcaaccctcgaacccgtggaaaaggcacctcccgctagtcctcgctgcagatcgtgctgtcggacctcgtcaacaggcgcaacctag

SEQ ID NO: 155154 - DNA, 1653 bp, Artificial Sequence
  derived and/or modified sequence
atggccaaggccgccgccatcggcatcgacctgggcaccacctacagttgtgtgggcgtcttccagcacggcaaggtgcagattagcagcatggtgctcacaaagatgaaagagatcgctgaggcttatttagggtacccagtgactaatgcggtgattactgttccagcttactttaatgacagccagaggcaagcaactaaagatgcaggagtaatcgccggacttaacgtactgcgtattatcaacgagccgacggcagcagcaattgcctacggtctggacaggacgggcaaaggagagaggaacgtgctgatcttcgaccttggcggcggaacatttgatgtgagcatacttaccatcgatgacggaatcttcgaggtcaaggctacagccggagacacgcacctgggtggcgaggatttcgacaacaggctggtgaaccatttcgtggaagaatttaagaggaagcataaaaaggacatctcccagaacaaaagggcggtgcgtaggttgcgcactgcttgtgaaagggccaagcggaccctgtccagttccactcaggcttctctggagatcgactctctgttcgagggcattgacttttacaccagcataacccgcgctaggttcgaggaactctgctccgatctttttagatctactttggagccagttgaaaaggctctgcgagatgcgaaactggacaaggcccagatccatgatttggtcttggtgggaggaagtacacgcattccaaaggtccagaaactactccaggactttttcaacggacgcgacttgaataaaagcatcaaccccgacgaggcagtagcgtatggagccgcagtccaagcagccattctcatgggagataagagcgagaacgtccaggatcttcttctcctggatgttgcacctctgtcactaggcctggagacggctggtggtgtaatgaccgctcttattaagagaaatagcactatccctaccaagcaaacacagatctttacaacatactccgataaccagccgggtgtgctgattcaagtatatgagggtgaaagggccatgaccaaagacaacaacctgctgggcaggttcgagctgtccggcattccgcccgccccaagaggcgtgcctcagatcgaggttactttcgacattgatgccaacgggatcctcaacgtcaccgctacggacaagtccacaggcaaggctaataagataaccattacaaacgacaaggggagactgagcaaggaggaaattgaaagaatggtccaggaggccgaaaagtacaaggccgaggatgaggtccaacgggaacgagtcagcgccaagaatgcactggagtcgtacgcctttaatatgaaatccgccgttgaagatgaggggttgaaaggaaagatctcagaagcagacaaaaagaaagtcttggacaaatgccaggaggtcatctcttggctggatgccaacaccttggctgaaaaggacgagttcgagcacaagcgcaaagagctcgagcaggtgtgtaatccaattatttcaggtctctaccagggagctggcgggcccggccctggagggtttggagcccagggacccaagggaggctcgggaagcgggccgaccatcgaagaggtggactag

SEQ ID NO: 155155 - DNA, 699 bp, Artificial Sequence
  derived and/or modified sequence
atggccaaggccgccgccatcggcatcgacctgggcaccacctacagctgtgtgggtgtgtttcagcacggaaaagtggagatcatcgcgaacgatcagggaaatcgaaccacgcctagttatgtggccttcactgatactgaaaggctgatcggtgatgcaggggttatcgctggcctgaatgtgcttagaattattaacgaaccgactgccgctgcaattgcctacggtctggatcggacaggcaaaggcgagcggaacgtcctcattttcgacctcgggggaggaactttcgacgtctccatcctcaccattgacgacggcatatttgaagtgaaagctacagctggagacacacatctcgggggcgaggatttcgacaatcggctggtgaatcatttcgtagaggaattcaagcggaagcacaaaaaagatatctctcagaataaaagagcggtgagaagactacgaacagcctgtgaaagggcaaaacgcaccttatcgtcatcaacacaggcgagcctagagatagactctttgttcgagggaatcgatttttatacgtccatcacacgggcgcggttcgaggagttgtgcagtgacttatttagatctactctcgagcctgtcgagaaagctcccccagcttctcctagatgccgttcttgctgccggacatctagtacaggagctacatag

SEQ ID NO: 155156 - DNA, 699 bp, Artificial Sequence
  derived and/or modified sequence
atggccaaggccgccgccatcggcatcgacctgggcaccacctactcctgcgtcggggttttccaacacggaaaagtcgagatcatcgccaatgatcagggcaaccgaactactccctcgtacgttgcctttacagacactgaaaggctcatcggagacgcgggggtgattgctggactcaatgtgctcaggatcatcaacgaacccaccgcagccgctattgcgtacggcctggacagaaccggtaagggggagagaaatgtgcttatcttcgacctgggcggaggaacatttgatgtctctattctgaccatagacgacggcatatttgaggttaaggcaacagccggagatacacacctgggcggcgaggattttgacaatcggctggtgaaccactttgttgaagagtttaagcgcaaacataaaaaagatatctctcagaacaagcgcgctgtgaggcgactgcggaccgcgtgtgagagggccaaacggacgttatcaagctctacacaggcttccctggaaattgactcgctctttgaaggtatcgatttttacacaagcatcactagggcccgatttgaggaactctgcagcgacctttttcgatctacactggaaccagtggaaaaggcacctcccgcctcccctcgttgtcggagctgctgtcgaacatcctctacaggcgctacctag

SEQ ID NO: 155157 - DNA, 699 bp, Artificial Sequence
  derived and/or modified sequence
atggccaaggccgccgccatcggcatcgacctgggcaccacctacagctgtgtaggggtatttcagcatgggaaagtagaaatcatcgctaacgaccaagggaatcgaacaacaccgtcctacgtggcattcactgataccgagcggctcatcggcgacgccggagtgattgctggactcaacgttttaagaatcattaacgagccaactgccgccgccatcgcctatgggttagacagaaccggaaaaggcgagagaaatgtgctcattttcgatctggggggcggcaccttcgacgtttctattcttaccattgatgatggcatatttgaagttaaagctacggcaggcgacactcacctcggaggggaggattttgataaccgactggtgaaccacttcgttgaggaatttaagcggaaacataagaaggacatttctcagaataagagggcagtgcgtcggctgaggaccgcctgtgagagggccaagagaacactcagttccagcacacaggctagtctagaaatcgactcattgttcgaaggcatagacttttatacatcaataactagagctaggtttgaggagttgtgttccgacctgtttagatctacgcttgaaccggtggaaaaggccccccctgcgtctccacgctgtaggagttgctgccgcacatccagtaccggagctacctag

SEQ ID NO: 155158 - DNA, 1926 bp, Artificial Sequence
  derived and/or modified sequence
atggccaaggccgccgccatcggcatcgacctgggcaccacctacagctgcgtcggagtgttccagcatggtaaagtggaaatcatcgccaatgatcagggtaaccgcacaactccttcatacgtcgcctttaccgacactgagagactcatcggggacgccgccaagaatcaagtcgcgctgaatcctcagaacaccgtcttcgatgctaaacgcctgattggtcggaaatttggagacccagtggtgcaatctgatatgaagcactggcctttccaggtcatcaatgatggtgacaaacctaaagtgcaggtgtcctataagggagagactaaggccttctatcccgaggagatctcatcaatggtcctgacaaaaatgaaagagattgccgaagcctacctcgggtacccggtaacaaacgccgtcattactgtgcccgcgtatttcaacgacagtcagcggcaggcaacaaaggacgccggggtgatcgctggtcttaacgttcttcggattatcaatgagcctaccgcggcagccatcgcctacggtctggatagaaccgggaaaggcgaaagaaacgtcctcatcttcgacctcggaggcggcaccttcgacgtgagcatactcacaatcgacgatgggatcttcgaggtaaaagctactgcgggggatacacatttgggaggggaggatttcgataacaggctggttaatcacttcgtggaggaattcaaaagaaagcacaagaaagacatctctcagaataagagggcagtgcgacgcctgcggaccgcctgcgaacgagcaaagcgcacactttccagcagcacccaggcttctctagaaattgattccttgtttgagggcatcgacttctataccagcatcacgcgggcccgctttgaggagctctgctccgacctctttcgatcaacactcgaacccgtagagaaggccctgagggacgctaagctggacaaagcccagatccacgacctcgtgctggtcgggggctctactcgcatcccgaaggttcaaaagctgctgcaggacttcttcaacggccgtgatcttaataagtcaatcaatcctgatgaagccgttgcttatggggctgctgttcaggccgccattctcatgggtgacaaatccgagaatgtgcaggatctgctgttgctggacgtggccccattgagtctcggactggagacagctggaggcgtaatgactgccctaataaagaggaattccacaataccaactaagcaaacacaaatctttaccacatacagtgacaatcagccaggcgttctgatccaagtgtacgagggggaacgggcaatgacaaaggataataatttgttaggccgctttgagctcagcggcatccccccggcccctaggggagtgccacagattgaagtaacatttgatattgacgcaaatgggattctgaacgttactgccaccgacaagtctacaggaaaggcaaacaaaatcaccattactaacgataaggggcggctgtccaaggaggaaattgaaagaatggttcaggaagctgagaagtataaggccgaagatgaagtccaaagggagagagtgtctgctaaaaatgcgttagaatcgtatgcgttcaatatgaaatccgcagtggaggatgaggggttgaagggcaaaattagcgaggcagataagaagaaggtactggacaagtgccaggaggttatctcatggctggacgccaatacgctagctgagaaggatgaattcgaacataagcggaaagaactggaacaggtatgtaatcccatcatcagtggtctctatcagggcgccggtggtcctgggcccggaggcttcggagcccaagggcctaaaggcggttctggctcagggccgaccatagaagaggtggattag

SEQ ID NO: 155159 - DNA, 1926 bp, Artificial Sequence
  derived and/or modified sequence
atggccaaggccgccgccatcggcatcgacctgggcaccacctacagttgcgtaggggtgtttcagcatgggaaagtggaaatcatagcaaacgaccagggcaatcgcactaccccatcctacgtggcattcacagataccgaaagattaataggtgacgccgcaaagaaccaggttgcgctcaacccccagaatacagtgtttgacgccaagcgacttattggaaggaagtttggcgacccagtggtgcagagcgatatgaaacactggccttttcaggtgataaatgacggagataagcccaaggtacaggtatcgtacaagggcgagaccaaagcgttttacccagaggagatcagctcaatggtgcttaccaaaatgaaggaaattgcagaagcctatctggggtaccccgtcaccaacgctgtaataaccgtacctgcatacttcaatgatagtcagcgtcaggctaccaaggatgccggcgtcattgcgggactgaacgtcctgagaatcatcaacgagccaacagcggctgccattgcctatggactggatagaacgggaaaaggcgagaggaatgtcctcatcttcgatcttggcggagggacctttgacgtttcaatcctaacaattgacgacgggatctttgaagttaaggctactgctggagatacccatttgggcggagaagactttgacaaccgacttgtgaatcattttgttgaggaatttaagagaaaacacaagaaagatatctctcagaacaagcgggccgtgaggagactgagaacagcgtgtgagagggccaagcgtacactttcatcttccacccaagcttcgctcgagattgacagcttattcgaagggatagacttctacacatccattactagagctaggtttgaggaactgtgttctgatctgtttcggagtaccctcgaaccagtggaaaaggccttgcgcgacgcaaaactggataaagcccaaatccacgatctggtgctggtggggggtagtactaggattcctaaggtgcagaagctgcttcaggacttcttcaacggcagagacttgaacaagtccattaatcctgatgaagccgttgcctatggtgccgccgtgcaggctgccattctcatgggcgataagagtgaaaacgtccaggacctgcttctcttggatgttgccccattgtcgctggggctggagaccgcaggcggtgtgatgacagcgttaatcaaacgaaactctactattccaactaaacaaacccaaatttttaccacctactctgataaccaacctggcgtattaatccaggtgtacgagggcgagcgggctatgaccaaggacaacaatcttctgggccggttcgaactcagtgggattcccccagcccccaggggagtccctcagattgaggtgactttcgacatagatgctaacgggatactgaatgtgactgccaccgataagtcaactggaaaagcgaacaagattaccatcacaaacgacaagggacgtctatccaaggaggaaatcgagcggatggtacaggaggcggaaaaatacaaagcagaggatgaggtgcaacgggaacgggttagcgccaaaaacgctctagagagctacgcatttaatatgaagtcagcagtggaagatgaaggcctaaagggcaagattagtgaagcggacaagaaaaaggtactggataaatgtcaagaggtaatctcctggctcgatgccaatacccttgccgaaaaggatgaattcgaacacaaaaggaaagagctagaacaggtatgtaatcccataatttccgggttatatcaaggggctggcggtcctggaccaggaggcttcggcgcccaaggaccaaaggggggcagtggaagcggtcctactatagaggaggtggattag

SEQ ID NO: 155160 - DNA, 1926 bp, Artificial Sequence
  derived and/or modified sequence
atggccaaggccgccgccatcggcatcgacctgggcaccacctacagctgcgtcggagtgtttcagcacggaaaagtggagataatcgctaacgaccaggggaacagaacaacaccatcttacgtagccttcacagatactgaacggttgatcggtgatgcagccaaaaaccaggtagccttaaacccccagaatactgtctttgatgccaaaagactgatcggccggaaattcggagaccccgtggtgcagtccgatatgaaacactggcctttccaagtgatcaacgacggcgacaaacccaaggttcaagtttcttataaaggagaaaccaaagccttttacccagaggagattagttctatggtgttgacaaagatgaaggagattgccgaagcctacctgggttatcctgtaacgaacgcagtaatcactgtgcccgcgtacttcaatgattcccagcgacaggctaccaaagacgccggcgttatagccggactcaatgttctccgtattatcaatgaaccaacagctgctgccatcgcctatggattggacagaaccggcaaaggcgagcgcaatgtactaatattcgatttaggcggcggtacttttgacgtgagtatcctcaccatcgatgacggcatattcgaggtgaaagctaccgccggtgacacgcaccttggaggcgaggacttcgataaccgtctagtaaatcactttgtggaggagttcaagcgaaagcataagaaagacattagtcagaataagagagcggtcaggaggcttcgaactgcctgcgaacgagcgaagaggaccttatcctcgtcgactcaggcttctctggaaatcgattcacttttcgaaggaattgacttctacacgtctattacacgtgcccggtttgaggagctgtgtagtgacctgttccgcagtactctcgagcccgtcgaaaaggcactgagggatgccaagctcgataaagctcaaatccacgacctggtgctggtgggcggatccacacgtatccctaaagtccaaaagctgcttcaagacttcttcaatggccgggacctgaacaagagcattaatccagacgaagccgtagcatacggagcagcagttcaggcagctatcctgatgggcgataaatcagagaacgttcaggatcttctgcttctggacgtcgcccctctttccttaggcttggagaccgctggaggggtgatgaccgccttaatcaaaaggaacagcacaattccaaccaaacagactcagatatttacaacctacagcgataaccagccaggcgtgctaatacaggtgtacgagggtgaacgcgcaatgacaaaggacaacaatttactagggcgttttgagctatccggtatcccccctgctcccagaggcgtgcctcagatcgaagtgacctttgatattgacgccaacgggatcctgaacgtcactgccaccgataagagcaccggtaaggccaacaaaattaccattacaaatgacaagggcagattgtctaaggaagagattgaacgtatggttcaggaagcggagaaatacaaggccgaagatgaggtgcagagagagcgcgttagcgccaagaatgcacttgaatcctacgcatttaacatgaagtcagccgtggaggacgagggcctcaagggcaaaatatccgaagccgataagaaaaaggtgctggataaatgccaggaggtgatctcctggctggatgctaacactctggctgaaaaagacgaattcgaacacaaaaggaaggagttggaacaagtgtgtaatcctatcatttccggtctgtaccagggcgcagggggcccaggcccgggaggctttggagcccagggtccgaagggaggctcaggctcgggcccgacaattgaggaagtggactag

SEQ ID NO: 155161 - DNA, 699 bp, Artificial Sequence
  derived and/or modified sequence
atggccaaggccgccgccatcggcatcgacctgggcaccacctactcttgtgttggcgtgtttcagcatggcaaggttgagattatcgcgaatgatcagggtaaccggacaaccccttcctatgtggctttcaccgacactgaacgattaataggagatgctggagtgatcgctggtcttaacgtcctccggataatcaatgaaccaactgcggccgctatcgcttacggtctggataggactggaaagggagagcggaatgtgctgatattcgatctaggcggcggcacctttgacgtcagtattttaaccattgacgatgggatctttgaggtgaaggcaaccgccggcgatacacacttgggcggagaagacttcgacaacagactggtgaaccacttcgttgaagaatttaagaggaaacataagaaggatatctctcagaacaagagggcagtgagacgactccggacagcttgcgagcgggcaaaacggaccttgagctcctccacccaggccagcctggaaatcgattctctgttcgagggaattgatttttatacttcgatcactcgggcccggtttgaggagctgtgtagtgatctgtttagaagcacacttgaacccgtagaaaaggcaccgcccgcatctccacgctgcagatcttgttgcagaacttcaagcaccggggccacttag

SEQ ID NO: 155162 - DNA, 1926 bp, Artificial Sequence
  derived and/or modified sequence
atggccaaggccgccgccatcggcatcgacctgggcaccacctactcttgcgtcggagtgtttcagcacggcaaagttgaaatcattgccaacgatcaagggaacaggacgacaccctcatacgtggcctttaccgataccgagaggttaatcggggatgcagcaaagaaccaagtggcgctgaatccacagaataccgtcttcgatgctaagcgccttatcggaagaaaattcggcgatcctgttgtccagtctgacatgaaacactggcccttccaggtaattaatgacggcgacaagcccaaagttcaagtgagttacaagggtgagacgaaagcattttacccagaagagatctcttctatggttctgacgaaaatgaaggaaattgcggaggcctatttggggtatcccgtgactaatgccgtcattacagtacctgcttactttaatgattcccagaggcaggcgactaaggatgccggtgttattgccggtctgaatgtgctgcgcatcatcaacgagccaacagccgccgccattgcttacggactggatcgcacaggaaagggcgagcggaatgtgttaattttcgatctggggggtggcacgttcgacgtatccattctgaccatcgacgatggcatttttgaggtcaaggccacagcgggagatacgcacctggggggagaggacttcgacaatcgactcgtcaatcattttgttgaggagttcaagaggaagcataagaaagatatctcacagaacaaaagggctgtgcgacggttgagaacagcatgcgagcgtgcgaagaggaccctgagttcctccacgcaagccagtttggagatagatagtctttttgagggcatcgacttctacacaagtattacgagagctcgctttgaggagctgtgttccgacctcttccgctccaccctggagcctgtggaaaaagcgcttagagatgcaaagctggataaagcccaaatccacgatctggtgttggtgggagggagcaccagaattcctaaggtgcagaagcttcttcaggacttctttaacggaagagatctcaataaatcaatcaaccccgatgaggccgtcgcctacggtgctgctgtgcaagctgctatcttgatgggcgacaagtcagaaaatgttcaagacctcctcctcctcgacgtggccccactttcattgggcctggagaccgctggcggggtaatgaccgctctgattaaacggaattcaacaatacctaccaaacaaacacagatctttacaacttactccgacaaccagccaggcgtcttaatccaggtctatgaaggggagcgcgcaatgacgaaggacaacaacctcttgggaagattcgagctctcagggatcccacctgctccccgtggtgtaccccaaatagaagtgacctttgatatcgacgccaatggaattcttaatgttaccgccacagataagagcaccggtaaagctaacaagatcaccatcactaacgacaagggcagactgagcaaagaggaaattgaacggatggtgcaggaggccgaaaagtacaaagctgaggacgaggtacaacgcgagagagtctctgccaagaacgcattggaaagttacgccttcaacatgaagtcagcagttgaggacgagggcctcaagggaaaaatcagcgaggccgacaaaaagaaggtgctcgataaatgccaggaggtcatttcttggcttgacgctaatacactggctgaaaaggacgagttcgaacacaagagaaaggagctggagcaagtttgtaatccaatcatcagcggcttgtatcagggggcaggaggtcctgggcccggggggttcggtgcccaaggcccgaaagggggctcaggctccggacctacaattgaggaggtcgattag

SEQ ID NO: 155163 - DNA, 1926 bp, Artificial Sequence
  derived and/or modified sequence
atggccaaggccgccgccatcggcatcgacctgggcaccacctactcttgtgtcggggtcttccagcacggcaaagtggagatcatcgcaaacgaccagggaaataggactactccctcctatgtggctttcaccgacacagagcgcttaatcggtgacgccgctaagaatcaggtggccctaaatccccagaatactgtatttgatgcgaagagattaatcggtcggaaattcggggatccagttgtgcagtcagacatgaagcattggccttttcaagtaattaacgacggtgacaagcccaaggtgcaggtgtcctacaaaggagagacgaaagctttctacccagaagagatctcgtctatggttctcacaaagatgaaggagattgcggaagcttaccttgggtaccccgtcacaaacgcagtcattacagtgccagcttatttcaacgatagccagaggcaggccacaaaggatgctggtgttatcgctgggctcaacgtgctgaggataattaacgaaccgacagctgccgctatcgcttatggactggatcgtacaggcaaaggggagagaaacgtgctcatatttgatctggggggggggacctttgacgtaagcatcctgactatcgacgacggaatctttgaggttaaggcaaccgcgggagacacacacctcgggggagaagatttcgataatagactagtaaaccacttcgtcgaggagtttaagagaaagcataagaaggatatcagccaaaataaacgggccgtgaggcggctccgaacggcttgcgaacgtgccaagaggacactgagctccagcacacaggcgtcacttgagatcgatagcctgtttgaaggaattgacttttacaccagcattacccgtgctagattcgaagaactatgtagtgatttgtttaggtcaacactggaacctgtggagaaagcccttcgggacgcaaagctggataaagcacaaattcatgatctagtgctcgtaggtgggagtacgaggatcccaaaggtacaaaagctgctgcaggatttcttcaatggccgcgatctgaacaagagcatcaatccagatgaagcagttgcctacggggcagccgtgcaagccgccattctgatgggcgacaagagcgaaaacgtacaggatcttctgttgctggatgtggcaccgctgtcattagggctcgagaccgcgggaggcgtcatgacagcgttaattaagagaaattcgacaattcccactaagcaaacacaaatttttaccacatactcagacaaccagcctggagtgcttattcaggtgtatgagggtgagagggcgatgacgaaagataataatctgctgggtcgattcgagctaagtggcatcccacccgcccctagaggggttccacagatcgaggttaccttcgatatcgacgccaatggaatcctaaacgtaaccgccacggataagtccaccggaaaggctaacaagattactataaccaacgacaagggaaggctgtccaaggaggagattgagagaatggtgcaagaggctgagaagtataaagccgaagatgaagtccaacgggaacgagtgtccgctaagaatgcgttagaaagctacgcgtttaacatgaagtccgctgtcgaagatgaggggctgaaaggcaagatttcagaagctgataagaagaaagtgctcgacaagtgccaggaggtgatctcctggcttgacgccaataccctggccgagaaggacgagttcgagcacaaaagaaaagagctagagcaggtgtgtaaccccattatcagtggcctgtatcaaggggcgggcgggcctggcccaggcggttttggcgcacagggtcctaagggcggttcaggatcgggaccaaccatcgaggaggttgactag

SEQ ID NO: 155164 - DNA, 2127 bp, Artificial Sequence
  derived and/or modified sequence
ctgcggagctgctgcgagggccccctgcggctgagccgggtgaccccggccgtgccgcgtctgtcacgggccaacctgtgcgggtgcagacacaggcgcgtggaattcccagcttttcgccgcactgagttattgtcacggatcccgtctgcggtgagctccccacagtctcaaagtggggcccatcgccaggggacaggtatggcaaaggccgccgctattggcatagacctgggcacaacctacagttgcgtgggcgtgtttcaacatggaaaggtagagattatagctaatgaccagggcaatcggactaccccttcctatgtagccttcaccgataccgagcgactcataggcgacgctgccaaaaatcaagtggcactgaacccccaaaacactgtatttgatgctaagaggctgatcgggcgcaaatttggcgaccccgtggtgcagtcggacatgaagcactggccattccaagttatcaatgatggggacaaacctaaagtgcaggtctcttacaagggcgaaaccaaggcgttctaccctgaagaaatttctagcatggtattaacgaagatgaaagaaattgcagaggcctatctgggatatcctgttacaaacgctgttatcactgtccccgcttacttcaacgacagtcaacgccaggctacaaaagacgccggcgtaattgcgggcctgaacgtcttaaggatcattaatgaacccactgccgctgcaatcgcttacgggctcgaccgcacagggaagggagagagaaacgtcctcattttcgatctgggcggaggaacatttgatgttagtattctgacaatagacgacggcatcttcgaggttaaagcaactgcaggcgatacccaccttggcggcgaggattttgataatagattggtgaaccactttgtggaagagtttaaacgcaaacataagaaggacatcagccagaataagcgcgccgtcaggagattgaggacagcctgcgaacgggccaaacggaccctgagcagctcgacccaggctagtctggaaatcgactccctgttcgagggaattgatttctacaccagcatcacccgagcacgctttgaggaactgtgcagcgatctgttccgctccaccctcgagcccgtcgagaaagccctgcgagatgccaaactggacaaggcgcagattcacgatctcgtgctggtcggggggagcactcgaatcccaaaagtgcagaaactactgcaagatttttttaacggtcgggatctgaacaaatcaatcaatccagacgaggcagtggcgtacggagcagccgtacaggctgccatcctcatgggcgacaaatccgagaacgttcaggatctactcctcctcgacgtcgctcctctatccctcggacttgagaccgctgggggggttatgactgccctgatcaagaggaattctacaattcctactaaacagacccagatttttactacctatagcgataaccagcccggggtgctaattcaagtctacgaaggggaacgggctatgacgaaagataataaccttcttggccgcttcgaactgagcggcatacccccagccccgcggggcgtgccccagattgaagttacctttgatatcgatgctaatgggatcttaaacgtgacagctacagacaaatctactggtaaggccaataagatcaccatcacgaacgataaaggtaggctcagcaaagaggagatagaacgaatggttcaggaggctgagaagtataaggccgaggacgaggtgcaacgggaaagggtcagtgctaagaacgccctggagtcttatgcgtttaacatgaagtcagccgtggaggatgaaggactaaagggcaaaatctctgaggcagataagaaaaaggttcttgacaagtgtcaggaagtgatcagttggctggatgccaatacactggccgagaaggacgagttcgagcataagagaaaagagttagagcaagtctgtaaccctataataagtgggctataccagggggcaggcggtccaggccccggcggctttggtgctcagggccccaagggaggctcaggatcaggcccaaccattgaagaagtggattag

SEQ ID NO: 155165 - DNA, 1653 bp, Artificial Sequence
  derived and/or modified sequence
atggccaaggccgccgccatcggcatcgacctgggcaccacctactcttgtgtaggtgtgttccagcacggaaaagtgcaaatctcatccatggtgctcaccaagatgaaggagattgctgaagcatacctgggctatccagtcaccaatgccgtgatcactgtcccagcttatttcaatgattcgcagaggcaggcgacgaaggatgctggtgtgatcgctgggctgaacgtgctgaggataatcaacgaaccaacagccgccgctattgcctatggacttgaccgcacgggtaagggtgaacgcaacgttttgatcttcgacctgggtggaggaaccttcgacgtgtctattctaaccatcgatgacgggattttcgaggtgaaagcaaccgcaggagacactcatttgggaggcgaggatttcgacaacaggctagtgaaccattttgtcgaagagtttaaaagaaaacataaaaaggatatctcccagaataagcgcgccgtcagaagactcaggacagcgtgcgagagagcaaagcgtactctatccagcagcacacaggcatcgctggaaatcgattccttgtttgagggtatcgacttctacacttcaataaccagggcccgattcgaggaactctgtagcgacctgttcaggtctaccttggaacctgttgaaaaagcattgcgggacgctaagctggataaagcccaaattcacgaccttgtgttggtcggtggaagcactcggattcccaaagtccagaaactgcttcaggatttcttcaacggaagggatctcaacaaatctatcaacccagatgaagctgttgcctatggcgccgcagttcaggcagctattctgatgggcgacaagagtgagaacgtccaggatctcttacttctagatgtcgctccactctcactcggtctggaaactgctggaggcgtgatgaccgctctgatcaaacgcaacagcaccatccccactaaacagactcagatcttcaccacatacagtgataaccagcccggcgtacttatccaggtgtacgagggagagcgagccatgaccaaggataacaatctgcttggccgctttgaactgagtggcataccccccgctcctaggggtgtacctcagatcgaggtgacattcgatatcgatgccaacggcattctcaatgtaacagcaaccgacaagtcaacgggaaaagcgaacaagatcacgatcactaatgataaagggcgcctgtcgaaagaagaaatcgaacgtatggtccaagaggcagagaagtacaaggctgaagacgaggtccagcgtgagcgggtgagtgcaaagaatgccctcgagtcctatgctttcaacatgaagagcgcagttgaggacgagggactgaagggaaagatatccgaggcagataaaaaaaaagtgcttgataaatgtcaagaggtgatttcgtggctagatgctaatacactagctgagaaagacgagttcgagcataaacggaaggagttggagcaggtgtgcaacccaatcatcagcggtctctatcagggggctggcggcccgggcccaggtgggtttggcgcccagggcccaaagggcggatctggcagtggcccaactatcgaggaagtggattag

SEQ ID NO: 155166 - DNA, 1875 bp, Artificial Sequence
  derived and/or modified sequence
atggccaaggccgccgccatcggcatcgacctgggcaccacctactcctgcgtgggcgtgttccagcacgggaaggtagagattatcgccaatgatcaggggaataggacgacccccagttacgttgcttttacggacactgaacgtctgattggagatgccgccaaaaaccaggtggccctgaacccccctgtcgttcagtcagatatgaagcattggccctttcaggtgatcaacgacggcgataagccaaaggtgcaggtttcatacaaaggggaaactaaggcattctacccggaggagatcagcagcatggtgctcactaaaatgaaagaaattgctgaagcctacttggggtacccggtgaccaacgctgttataactgttcctgcctacttcaatgattctcagcgccaggccaccaaggacgcaggtgtcattgcagggctgaatgtgctgcgaatcatcaatgagcccacagcagccgccatagcgtacggcctggacagaaccggaaaaggcgaaagaaatgtgctgatcttcgacctgggaggagggactttcgacgtctctatactcacgattgacgacgggatttttgaagtcaaggcaaccgcaggcgacactcacctaggtggagaagacttcgataatcggctggttaatcacttcgtggaggaatttaagcgcaaacacaaaaaagatatctcacagaataaaagggcagtgaggcgactccggactgcctgtgaaagggctaagaggaccctatcctcctctacccaagcctctcttgagatagattctctttttgaaggcatcgacttttacacgagtatcacccgggcccgctttgaagaactgtgtagcgatctgtttaggtccacactagaaccagtcgagaaggctctcagagatgcaaaactcgataaagcccaaatccacgacttggtcctcgtgggcggtagcacccgaattcccaaagtccaaaaactgctgcaggactttttcaatggccgcgacttaaacaagtctattaatcccgatgaagcagtggcgtacggcgccgctgttcaggcagccattctgatgggggacaaatctgaaaacgtacaggacctgttactgctggacgtggctcctttaagccttgggttagaaaccgcaggcggagtcatgacagccctaatcaaacgcaactctaccatccccactaagcaaacgcaaattttcacaacctatagcgacaatcagcccggggtattgatccaggtttacgagggggagcgggctatgaccaaagacaacaatcttctaggtcgattcgaattgtctggaattccaccagcaccaaggggtgtcccccagattgaggttacattcgatattgatgcgaacggcatccttaatgtaaccgcgaccgataaatctactggcaaggctaacaaaatcactattacgaatgacaagggccgtctcagtaaagaggagatcgaaagaatggtacaggaggcagaaaagtataaagcggaggacgaagtccagcgagaacgcgtctcagcaaagaacgcactcgagagctatgcatttaacatgaaatccgctgtagaggacgagggcctgaaaggaaagatctccgaagctgacaagaagaaggtcctggataagtgtcaggaagtgatttcttggctggacgctaacactttggccgaaaaagacgaattcgagcacaagcgcaaggaactggaacaggtctgtaatccaatcatcagcgggctgtaccagggcgccggcgggccagggcctggcggttttggtgcccaaggcccaaaagggggatcggggtccgggccaactatcgaagaggttgactag

SEQ ID NO: 155167 - DNA, 1857 bp, Artificial Sequence
  derived and/or modified sequence
atggccaaggccgccgccatcggcatcgacctgggcaccacctacagctgtgtaggagtgttccaacatggcaaggtcgaaatcatcgccaacgatcaaggaaaccggacaaccccttcatatgtcgcctttacagatactgagcgactgattggggacgccgcgaaaaaccaagtggtgcaatcagacatgaaacattggcccttccaggtcatcaacgacggggataaacctaaggtgcaggtgagctacaaaggggaaactaaggccttttaccccgaagagatctcatcaatggtgctgaccaagatgaaagaaattgcggaggcttatttagggtatccagtgactaacgccgtaataactgtccctgcctatttcaacgacagccagaggcaggccacgaaggatgcaggcgtgatcgccggcttaaatgtgttgagaatcattaatgagcctacagccgcggctattgcttatggccttgaccgtacaggcaagggagaaagaaatgttcttattttcgacctggggggcggaactttcgacgtttcaatactgacaatagatgacggaatttttgaggtgaaagctaccgccggcgacacccatctaggaggcgaggatttcgacaatagattagtaaaccacttcgtggaagaatttaagaggaagcataaaaaagacattagccagaataaacgagcggtcaggcgcctccgcactgcctgtgaaagggccaagcggactcttagctcctccactcaagcctccttagaaatcgacagcttgttcgagggcatcgacttttacacttcaatcacccgcgccaggttcgaggagctctgctccgacctgtttcggtccacccttgagcccgttgagaaggcactgcgggacgccaagttggacaaagcacagattcatgacctggtgctggttggaggctctacccgaatccccaaggtgcaaaagctgcttcaggatttctttaacggccgagacttgaataaatctataaatcctgatgaggccgttgcatatggagctgctgtccaggcagccatcctgatgggcgacaagtccgagaatgtccaagacttactactcctggatgtggctccgctctccctcggtcttgagaccgctggcggggtgatgacagccctgatcaaacgtaacagcaccattcccacaaagcagacccagatcttcacgacgtactctgataaccagccgggcgtgctgatccaggtgtatgaaggcgaaagagccatgaccaaagataataacctcttgggaaggttcgaattaagcggcataccacctgccccgcgcggcgtaccacaaatcgaagtgaccttcgatatagacgcaaatggcatactaaacgtgacggcaacagataagagcacgggcaaagccaacaagattacaataaccaacgacaaaggacggctaagcaaggaagaaatcgaacgcatggtacaagaagctgaaaaatacaaggctgaggatgaggtccaacgggaacgcgtgtcggccaagaatgcactcgagagctatgccttcaacatgaaatcagccgttgaggatgaaggcctgaaaggaaaaataagcgaggctgacaaaaagaaagtgcttgacaaatgtcaggaggtgatttcgtggctcgatgctaacacactggccgagaaagatgaatttgagcacaaaagaaaggagttagaacaagtgtgtaacccgattatcagtggattgtatcaaggcgctggcggtccaggtccaggcgggtttggtgctcaaggaccgaaaggaggctctggctctggccccacgatcgaagaagttgattag

SEQ ID NO: 155168 - DNA, 1857 bp, Artificial Sequence
  derived and/or modified sequence
atggccaaggccgccgccatcggcatcgacctgggcaccacctactcctgcgtcggagtgtttcagcacgggaaagtggagattatagccaacgaccaggggaacagaacaacccctagctatgtagcctttaccgatacggagaggctgattggagatgccgcaaagaaccaggtggtgcagtcagatatgaagcactggccattccaggtgattaatgacggcgataaacccaaggtgcaggtgtcctacaagggcgagacaaaagccttctaccctgaggaaatcagctccatggttctgactaagatgaaggagatcgcggaggcatatctcggctatcccgtcaccaacgccgtgatcacagtccccgcctacttcaatgactcacagagacaagccaccaaggatgccggcgtgatagcaggactcaatgtgctgaggatcattaacgagcctaccgctgccgccatagcctatggtcttgacaggacagggaagggagaacgaaacgtgctaatatttgacctcggagggggcacgttcgacgtatcaatccttacaatagatgacggcatcttcgaggtaaaagcaacagctggggacacacacttgggcggggaggacttcgataatagacttgtgaatcacttcgtggaagagtttaaaaggaaacataagaaagatatttctcagaacaaacgtgcggtacggaggctaagaaccgcctgcgagcgggcgaagcgtactctcagctcaagcacccaagccagtcttgaaattgattcactttttgagggtattgacttttatacatcgatcaccagagctagattcgaggaactctgttctgatctctttagatcaactctggaaccggtggaaaaagcactcagagatgcaaagctggataaggcacagattcatgatcttgttcttgtcgggggttccacacggattcctaaggtgcaaaagctgctccaagatttttttaacggtcgggatctgaacaaatctataaaccccgacgaggcagtggcttacggtgccgccgtgcaagccgccatattgatgggggacaaatccgaaaacgtccaggatctgctgttgctcgatgtcgctccgctgtcgctgggcctggagacggccgggggggtgatgaccgctctgatcaagagaaatagcacaatccctacgaagcaaacacaaattttcacaacatattccgataaccaaccaggagtccttattcaagtatatgagggagagagagcaatgacaaaagacaataacctgctgggcaggtttgaactcagtgggatcccccccgcgcctaggggcgtaccccagatagaagtcaccttcgatattgacgcgaatgggatccttaatgtgacggccactgacaagtcgacaggcaaggccaacaagattactattaccaacgataaaggcagactatcaaaagaagaaatagagaggatggttcaagaggcagagaagtataaggctgaggatgaagtgcagcgagagcgcgtctctgccaaaaacgcactggagagctacgcattcaacatgaaatctgccgtggaggacgagggcctgaaggggaagatcagtgaggcagataagaaaaaggtattggacaaatgccaggaggttattagctggttggacgctaacactctggccgagaaagacgagttcgaacataaaaggaaagaactcgagcaggtctgtaatcccataatttcaggtctctatcagggagctgggggtccaggaccggggggttttggcgcacaggggcctaaagggggttcagggtctgggccgacaattgaggaagttgactag

SEQ ID NO: 155169 - DNA, 1653 bp, Artificial Sequence
  derived and/or modified sequence
atggccaaggccgccgccatcggcatcgacctgggcaccacctacagctgcgtaggcgtgttccagcacggtaaagtgcagatatcatcaatggttctaaccaaaatgaaagaaatagcggaagcctacctgggttaccctgtaacaaacgcagtgattactgtgccagcttactttaatgacagtcagcgtcaagccactaaagatgcaggagtaatagctgggctaaacgtactgcggataatcaatgaacccactgccgccgctatcgcgtatggtctggacaggactggcaaaggagagaggaacgtcctcatctttgatctaggcggggggacgttcgatgtcagcatactaacaattgacgacgggatctttgaggtgaaggccaccgccggcgacactcatctgggaggagaggacttcgacaaccggctggttaaccactttgtcgaggaattcaaacgaaagcataagaaggatatcagccagaacaaaagggctgtgcgacgtctgaggactgcatgtgagagggccaaacgcacgctgtcaagctcaacacaggcaagtcttgagatcgacagcctcttcgagggaattgacttctatacatccataacccgcgccaggtttgaggagctgtgctccgatctgtttcgttcgacactggagccagtcgagaaagcgctcagagacgcaaagctggacaaggcacagatccacgacctcgtcctcgtgggtggatccactaggattcctaaggtccagaagctgctgcaagatttcttcaacggtagagatttgaataaatccatcaaccctgacgaggcagtcgcctacggggctgccgtgcaggccgctatcctcatgggggacaagtcagagaacgtgcaagacctcctcctgcttgacgtggccccactcagcctcggactcgagacagctggcggggttatgacagcactgattaaaagaaactccaccataccgacgaaacagacacagatcttcaccacctactccgataaccagccaggggtcttgattcaagtgtacgaaggagaacgcgccatgacaaaggataacaatctgctggggcgtttcgaactcagcggtattccacctgctcctcggggggtaccccagattgaagtgacatttgatattgatgccaatgggattctgaatgtgaccgcaactgacaagtcgacggggaaggcaaataaaattactataaccaacgataaaggccgcctgtctaaagaggaaatcgagcggatggtccaggaagccgagaaatataaggcggaggatgaagtccagagggagcgggtcagtgccaaaaatgctctggaatcctacgcattcaacatgaaatccgctgtggaggacgaggggctaaagggcaagattagtgaagcggacaaaaaaaaagtgctcgataagtgccaggaggtaatctcctggctggacgccaatacccttgccgagaaggacgagtttgagcacaagagaaaggagctggagcaggtctgcaaccccattatctccgggttgtatcagggtgcaggaggccctggacctggcgggttcggtgcccagggcccgaaagggggtagtgggagcggacccactatcgaggaggtggactag

SEQ ID NO: 155170 - DNA, 1857 bp, Artificial Sequence
  derived and/or modified sequence
atggccaaggccgccgccatcggcatcgacctgggcaccacctactcgtgcgttggcgtcttccagcacggcaaagttgaaattattgcaaatgaccagggtaaccgcaccaccccaagttatgtggccttcaccgacactgagagactcatcggcgacgctgccaagaaccaggttgtgcagtctgacatgaagcattggccgtttcaggtcatcaacgatggtgacaagcccaaggtacaggtatcctacaaaggcgaaacaaaagcgttttaccccgaagaaatctcttctatggtgctgactaaaatgaaggaaatcgctgaagcatacctcggttatccggttacgaacgccgtcattaccgtgccggcatactttaacgatagccagaggcaggctacaaaagacgcgggggtaattgccggcctcaatgtactgcgaattatcaacgagcccaccgccgccgcaatcgcgtacggcttagatcggacaggcaaaggggaacgcaatgtgctgatatttgatcttggaggcgggacttttgatgtctcgatcttaacaattgacgacgggatctttgaagtgaaagctaccgccggagatacccatctagggggcgaggatttcgacaatcggttagtgaatcatttcgtcgaggaattcaaacgaaaacacaagaaggacattagtcagaataagcgggcagttcgacggctgagaaccgcctgcgaacgagcgaaaagaaccctgagtagctctacgcaggcaagtttagaaattgatagtctttttgagggaatcgatttttacacttcaattactagggctcggttcgaggaactgtgtagtgatctgtttcgctccactttagaaccagtggagaaagcactgagagacgccaagctggacaaagcacagatccacgacctggtacttgtgggcgggtcaaccaggatccccaaagttcagaaactcctacaagacttctttaatggtcgagacttgaataaatcaatcaacccagatgaggctgtggcttatggcgcagctgttcaagccgcaatcctcatgggagacaaaagcgagaacgtgcaggatctgttactgttagatgtggcccctttgagcctggggctggaaacagctggaggcgtgatgacggcccttatcaaacgtaactccaccatccccaccaaacaaacccagatctttacaacatactctgacaaccagccgggcgtgctcattcaagtgtacgaaggggagagggccatgaccaaagacaataatctgctggggaggttcgagctgtcggggatacccccagcgccacgaggggtgccacagatcgaagtgacctttgacatcgacgctaatggtatcctgaacgtgacagcaaccgacaaatccaccggtaaagccaataagataaccattactaatgataaggggagattgtctaaggaggagattgagaggatggtgcaggaggctgagaaatacaaggctgaggacgaggtgcagagggaacgggtctctgctaaaaacgcactggaatcgtatgcttttaacatgaaaagcgctgttgaggatgagggactaaaggggaagattagcgaagcggataaaaaaaaggttctggacaagtgccaggaagttatcagctggctggatgccaacacacttgccgagaaagacgagtttgagcataaacgcaaagaactggagcaggtgtgcaaccccattatcagcgggctctaccagggcgctggcggcccaggtccagggggcttcggagcccagggaccaaagggcggttccggatcaggacctactatcgaggaggtcgactag

SEQ ID NO: 155171 - DNA, 1653 bp, Artificial Sequence
  derived and/or modified sequence
atggccaaggccgccgccatcggcatcgacctgggcaccacctactcatgcgtgggagtcttccagcacggtaaggtgcagatttccagcatggtcctgaccaagatgaaagaaatcgccgaggcataccttggatatccagtcacaaatgctgtcatcactgtgcctgcctacttcaacgatagtcaaaggcaggccacgaaggacgcgggcgttattgcggggctgaatgtcctccgaatcatcaatgaaccaacggccgctgccatcgcttatgggcttgaccgaacgggcaaaggagaacggaatgttttaatattcgatctgggcggggggacattcgacgtaagcattctgacaatagacgacggcatcttcgaagtgaaggctactgccggggacacacaccttggcggcgaggactttgataatcgactcgtcaaccacttcgtggaagagtttaagaggaaacataaaaaggacatcagccagaacaaaagggcagtgcggcgcctgcggacggcttgtgagagggctaaaagaaccctgagctccagcacacaggcctccttggaaattgatagccttttcgagggcattgacttttatacttctatcactagggcaagattcgaagagctgtgcagtgaccttttcaggagtaccctggagcccgtggagaaagcactgcgcgacgccaaactagacaaagcacagattcacgacttagtgctggtcggtggatctacccgaattcctaaggtgcagaagttgctgcaagatttttttaacggccgtgacctgaataagtccatcaaccccgatgaggcagttgcatacggcgctgccgtgcaggcggccattcttatgggcgataaatccgagaacgtccaggacctgttgctgctggatgtggccccattatccctagggctcgaaacggcaggcggagtcatgaccgctttaattaaacggaactctaccatcccaacgaaacaaactcagatattcactacctatagtgataatcaaccaggtgtgctcattcaggtgtatgagggtgaacgtgccatgacaaaggataataatttgctcggtcgtttcgagctcagcgggatccctcctgctcccaggggagtgccacagatcgaggtgactttcgatatcgacgctaacggaattctgaacgtgacagcaactgacaaaagcactggcaaggccaacaaaataacaattacaaacgataaaggaagactgagcaaggaggagatcgagagaatggtgcaggaggccgagaagtacaaagccgaagatgaggtgcagagagaacgtgtgtccgctaaaaacgcactcgagtcttatgcattcaacatgaaaagcgctgtggaggatgaggggttaaagggcaaaatctccgaagcagataaaaaaaaagtgttggacaagtgtcaggaagtaatatcatggctggacgcaaataccctcgcagaaaaggatgagtttgagcacaagaggaaagaactggaacaagtctgtaacccaatcataagtggcctgtatcaaggtgccgggggccccggccctgggggtttcggcgctcagggcccaaagggaggttctgggtcagggcccaccatcgaagaggttgactag

SEQ ID NO: 155172 - DNA, 1926 bp, Artificial Sequence
  derived and/or modified sequence
atggcgaaggccgcagctatcggaatcgacctgggcactacctatagttgtgtgggagtctttcagcatgggaaggtcgaaattattgccaatgaccagggaaaccgcacaacaccaagctacgtcgcctttacagatacagagaggctgattggagacgctgccaagaatcaagttgctttgaacccgcagaacaccgtctttgacgccaaacgccttatcggcagaaaattcggtgatccagtcgtgcaaagtgatatgaaacattggcccttccaagtgattaacgatggcgacaagcccaaggtacaagtcagctataagggagagacaaaggcattctaccccgaagagatctcttccatggtgctcaccaagatgaaggaaatcgccgaggcctatctcggttacccagtaacaaacgctgtcatcactgtacccgcatacttcaatgatagccagcgccaggccaccaaggacgctggggtcatagccggtctgaatgtgttgcgtatcattaacgagccgacggctgcagcgatcgcctatggcctggacaggacaggcaagggagaaaggaatgtgctcatattcgatctcggaggcggaactttcgacgtttcaatcctcacaatcgacgacggaatatttgaggttaaagcgaccgccggagatacacatctaggcggtgaggactttgacaaccgtctcgtgaatcatttcgtcgaagaattcaaaagaaagcacaagaaggatatctctcagaataagagagcagtgcggcgtctccgaactgcttgtgagagagcaaaacgcactttgtcttcctcaactcaggcaagtctggaaattgactctttatttgaaggcattgatttctacaccagcattactcgggctcgctttgaggaactttgcagtgacttgtttagatctaccctcgagccggtggaaaaagcgcttcgggatgctaaactcgataaggcccagatccatgatctcgtcctagtggggggttccactaggatccctaaagtacagaaactattgcaggacttcttcaatgggcgagacctcaataaatccatcaaccctgacgaggctgtggcctacggggcagccgtacaagccgcaatcttaatgggtgacaagtctgagaatgtgcaggacttgctcctgttggatgtggccccacttagcctcgggctggagaccgcaggaggcgtgatgactgctctgattaagaggaactctacaattcccacaaaacagacccagatattcactacatactctgacaaccagccaggtgtcctgattcaggtctatgagggagagcgagcaatgacaaaggataataatctgctgggtcgatttgagctctcaggaataccacccgcaccaagaggagtcccgcaaatcgaagtaaccttcgatattgacgcgaatggcattctgaacgtgaccgccaccgataagtccacaggcaaggcgaacaaaatcaccatcactaatgacaaggggcgactgagtaaggaagaaatcgagcggatggttcaagaggccgaaaagtacaaggcagaagacgaggttcagcgggagcgcgtgtcagctaagaatgctttggaaagttacgctttcaacatgaaatctgccgttgaggacgaaggcttaaagggtaagatctcggaggcagacaaaaaaaaggttttggataagtgccaggaagtaatttcttggctcgacgcgaacactctggccgaaaaagacgagtttgagcacaagagaaaggagctcgaacaggtgtgtaaccccatcatcagcgggctttatcaaggagccggaggtcctgggccaggaggcttcggagcccagggaccaaagggcggtagcggaagtggtcccaccatcgaagaggtggactag

SEQ ID NO: 155173 - DNA, 1431 bp, Artificial Sequence
  derived and/or modified sequence
atggcaaaggctgccgcaatcggcattgacttggggaccacctattcctgcgttggagtgttccagcacggtaagggcgaacgtaatgtgctgattttcgacctgggaggagggacatttgatgtcagcatactcaccatcgatgatgggatttttgaggtgaaggccaccgccggtgatacccacttgggtggggaagacttcgacaacagactcgtaaaccattttgttgaagagttcaaacggaagcataagaaggacatatctcagaataaaagagcagtgagacgactgcgcacagcctgcgagcgagccaaacgcacactgagttctagcacccaggcatcactcgaaatcgacagcctgttcgaggggatcgatttttatacaagtatcacacgagcaagattcgaagaactctgttcagaccttttcagatccactttggaacctgtcgagaaggccctgcgcgatgcaaagctggataaggcccagatccacgacctggttctcgtcggagggtccactagaattccaaaagtccagaagctgcttcaagatttcttcaacggtagagacctgaataagagcatcaacccggacgaagccgtcgcctacggagcagccgtacaggctgctatcctgatgggagataaaagcgaaaacgtgcaggatttgcttctactggatgtggccccactttccctgggcctggagacagccggtggagtcatgactgccctgatcaagcggaactctacaattccaaccaagcagacacaaatatttacaacctactcggacaaccaaccgggtgtgctgattcaagtttatgagggagaacgggcaatgacaaaagataacaatcttttgggcaggtttgagctgagcggcattccaccggctcctagaggagtcccgcagattgaggtgacctttgacattgacgctaatggaatcctgaatgtgacagctacagacaagtctaccgggaaagctaacaaaataactattaccaatgacaaaggccgactcagcaaagaggagatcgagagaatggtccaggaggccgagaaatacaaagccgaagacgaggtccagagagagcgagtcagcgcaaagaatgcgctcgaaagttacgcattcaatatgaaatctgccgtagaggatgagggactgaaaggcaagattagcgaggctgataagaagaaagtacttgacaaatgccaggaggtgatctcctggctggatgcaaatactctagctgaaaaagatgagtttgaacacaaacggaaggagctggaacaggtgtgcaatccaataattagtggcctataccagggagctggagggcctgggcctggtggattcggcgctcagggcccaaaaggtggatccggctcaggcccaactattgaggaggtggactag

SEQ ID NO: 155174 - DNA, 1431 bp, Artificial Sequence
  derived and/or modified sequence
atggctaaggcggcagcaattggcattgacttaggcaccacttacagctgtgtgggcgttttccagcacgggaaaggggaacgaaatgtactgattttcgatcttgggggagggacatttgacgtttccatactcacaattgacgacgggatattcgaagtaaaagcaaccgcgggagacactcacctgggtggtgaagattttgacaacagactggtgaaccattttgttgaggaattcaagcgcaaacacaaaaaagatatcagccagaacaaacgagcggtgcgaagactgaggactgcatgcgaaagagctaaaagaactctgagttcgagcactcaggcatctctggagattgattctctgttcgagggtatcgatttctacacctccatcacccgggctagatttgaggagctttgctccgatctttttaggagtaccttggaaccagtggagaaggctctccgagatgccaaactggataaggcccagattcacgatctagtgctggtgggagggtcaactcggatccctaaagtccaaaagttattgcaggacttctttaatggacgggatttaaacaaaagcatcaatccagacgaagcggtggcatatggcgctgcggtccaggctgcaattctgatgggagacaaatcggagaatgttcaggatttgctcctgctagacgtggccccactgtctctcggtcttgagactgctgggggtgtgatgacagccctgataaagcggaattccaccattccgactaaacagacacaaatttttaccacctattctgacaaccagcccggagtgctgatccaggtgtatgagggagagcgagccatgactaaagacaacaaccttctcgggcgatttgagttgtctggaatacctcccgcacccagaggcgtaccacagattgaggtgacattcgacatcgatgccaatgggatcttgaatgtgactgctacagataaatcaacaggcaaagctaacaagattaccatcactaatgacaaagggagattgtcgaaggaggaaatcgaacggatggtccaggaggcggaaaaatataaggcagaggacgaggtgcagcgcgagcgcgtgagcgcgaagaatgctctcgaaagctacgcattcaacatgaagagcgctgtagaggacgagggcctgaagggcaaaatatccgaggctgataaaaaaaaagtgctggataaatgccaggaggtgatctcctggctcgacgccaacaccctggctgagaaagatgagtttgagcacaagcgcaaagagttggagcaggtttgtaatcccattatcagcgggttataccaaggggctggaggacccggacctgggggattcggcgcacagggacccaagggcggttccgggtctggtccaacaattgaagaagtggactag

SEQ ID NO: 155175 - DNA, 1926 bp, Artificial Sequence
  derived and/or modified sequence
atggccaaggcagccgctattggaatcgatctggggacaacttattcttgtgtgggggtcttccaacatggtaaggtggagatcatcgccaacgatcaagggaatcgcactactcccagttacgtggcatttacggacaccgaacggcttatcggcgatgctgccaaaaatcaggttgccctgaacccccagaataccgtgtttgatgctaaaaggctgatcggtcgcaaatttggagatcccgtggttcagtctgatatgaagcactggccatttcaggtgattaacgacggtgacaagccgaaagtccaagtttcttacaagggagacactaaagctttctaccctgaagagatcagttcaatggtgctgaccaagatgaaagagatagcagaagcctatttaggctacccagttactaacgcagtcattaccgtgcctgcctatttcaacgacagccaacgacaggctaccaaggatgctggtgtcatagcaggtctcaacgtcttgagaataatcaatgagccgaccgcggctgccatagcttatggcctggaccggactggtaagggcgagcgcaacgtcttaatatttgacctaggtggtggcacattcgatgtgtctatcctgactattgacgacggtatcttcgaagttaaggccaccgcgggtgatacgcacctcgggggagaggatttcgacaacagacttgtgaatcactttgtggaggagttcaagcgcaaacataagaaggacatcagtcaaaacaagcgggctgtccggagacttcgaaccgcctgtgagagagcaaaaaggaccctgagttcgtccacacaggctagcctagagatagactccctgttcgaggggatcgacttctacacgagtatcaccagggcccgttttgaggaactgtgctctgatctgtttcgcagtacactggaaccagtggagaaggccctaagagacgcaaaattggataaagcacagatccacgacctggtgctggtgggcggttccactaggatccccaaggtccagaaacttctccaggatttttttaacggcagggatttaaacaagagcatcaaccctgatgaggctgtagcctacggagcagcagtgcaggctgctattttgatgggagataaaagcgaaaacgtgcaagacctgctattgcttgacgtggcacctctttcgcttggcctcgagacagccggaggggtgatgacggccctgatcaaacggaatagcaccattccgacaaagcagactcaaatcttcacaacatactccgataatcagccaggggtactgatacaggtgtacgaaggcgaaagggctatgacaaaagataataatttacttggcagattcgagctgagcgggatccctccagcccctcggggtgtgccgcagatagaggtgaccttcgatatagacgccaatggtatcctcaatgtgacagcaactgacaaaagcactggtaaggccaataaaattacgataactaatgacaaggggaggttgagtaaggaagagatcgaaagaatggttcaggaggctgaaaagtacaaggctgaggatgaggtccagcgggaaagagtgtccgctaagaatgctcttgagtcgtatgcatttaacatgaagtcagcagtcgaggacgaaggcttgaagggtaaaatatccgaggccgacaagaaaaaggtgcttgataagtgtcaggaggtgatttcttggcttgatgccaatactctggcggaaaaagatgaatttgaacacaagcgcaaagagctggagcaagtgtgcaatcccataattagcgggttatatcaaggcgctggcggacctggaccaggaggtttcggcgctcagggaccgaaaggcggatctggttcgggacccacaattgaagaggtggattag

SEQ ID NO: 155176 - DNA, 1431 bp, Artificial Sequence
  derived and/or modified sequence
atggcaaaggcggctgccatcgggattgacctagggaccacttattcctgcgtgggagtgtttcagcatggcaagggcgaaaggaacgtgctgattttcgatctggggggaggtacttttgatgtctccatcttaactatcgatgatggaatctttgaagttaaagccacagccggagatacccaccttggcggtgaggacttcgacaataggctggtgaaccactttgtggaagagtttaaacgaaagcataagaaggacattagccagaacaagagagcggttcgccgactgcggactgcttgtgagagggccaagaggactctctcttcctccacccaggcctctctcgagattgactctttatttgagggcattgacttctatacaagtatcacccgcgcacgtttcgaggaactgtgttccgatcttttcaggtccaccttagaacccgtggagaaggctctgagggatgccaagttagacaaagcccagattcatgacttggtactagttgggggtagtacgcgcatacccaaggtccagaagcttctacaagatttttttaatggacgagatctgaacaagtccatcaaccccgatgaagccgtggcctacggagctgcagttcaggccgcaatcttaatgggggacaaatctgaaaacgtgcaagacctactgctgctcgatgtggcgcctctttcattgggtctagaaaccgcgggtggtgtcatgacagccctgataaagagaaattctaccatcccgacaaagcaaacccagatttttactacatactccgataaccagccaggggtgcttatccaggtgtacgagggggaaagagccatgacaaaggataacaatctgctgggccgttttgagctaagcggaattccccctgcacctaggggagtgccccaaatcgaagtgacgtttgatatcgatgctaatggcattctaaacgtcactgctaccgacaaaagtacgggtaaggccaataaaatcacaattactaacgacaaagggaggttatctaaggaggaaattgagcggatggtacaggaggccgagaagtacaaggctgaagacgaagtgcagagggagcgtgtttccgccaaaaacgcgttggaaagttatgcattcaacatgaagtcggcagtggaagacgaggggctgaagggcaagatctccgaagccgataaaaagaaagtgctggacaaatgccaggaggtgattagttggttggatgcgaatacactcgcagagaaggatgagttcgagcacaagcggaaggagctcgaacaagtgtgtaatcccatcatctcgggtctgtaccaaggggcaggcggacccggacccggtggattcggggcacagggccctaagggcggatcagggagtggacccacgatcgaagaggtcgactag

SEQ ID NO: 155177 - DNA, 1926 bp, Artificial Sequence
  derived and/or modified sequence
atggccaaagccgcagccatcggcattgacttggggacaacttacagctgcgtcggggtgtttcaacacggcaaggtcgagatcatcgccaacgatcagggcaaccgaaccacccccagctacgtggcctttacagacactgaaagactgatcggcgatgctgccaaaaatcaagtggctcttaatccccagaacacagtttttgacgctaaacgcctaatcggaagaaaatttggagaccccgtagtacagagcgatatgaagcattggcctttccaggtcattaatgatggagacaagcctaaagtgcaggtgtcctacaagggtgaaaccaaggccttctatccagaggagattagtagcatggtgctcaccaaaatgaaagagatagcggaggcctacctgggctatccagtgactaatgcagttatcactgtacctgcctattttaacgacagccaacgacaggcgaccaaggacgctggcgtaatagccggacttaatgttttgagaatcattaacgagccaactgccgcagccatcgcttacggactcgacagaactggcaaaggtgagaggaacgtgctgatctttgatctcgggggagggaccttcgacgtgtccatccttactatcgacgatgggatctttgaagtgaaggcaaccgctggtgatacccacctgggtggagaagacttcgacaatagactggtaaaccatttcgttgaagagttcaagcggaaacacaagaaagatatcagtcagaacaagagggctgtcagaaggcttagaactgcctgcgagcgtgccaaaaggacgttaagcagctctacccaggcctcactagagatcgattctctgttcgagggtatcgacttctatacctccattacaagggctcgcttcgaggaattatgttccgacctgttccgctccacactcgaaccagtcgagaaggctctcagagatgccaaattagacaaagcgcagatccacgacctagtgcttgtgggtggaagtactaggatacctaaggtgcagaaattgctccaggattttttcaatggcagagatctcaataagtccataaaccccgacgaggccgtcgcctacggagccgctgtgcaggccgcaattcttatgggagataagtcagagaacgtgcaggacttgctccttctggacgtggcaccgttgtccctgggactggaaaccgctggcggagtgatgacagctctcattaaacgtaactccactattccaaccaagcagacgcagatcttcacaacctatagcgataatcagcccggagtgcttattcaagtttatgagggcgagcgggctatgaccaaagataacaatctgctaggtcgattcgagctcagcggaatacccccagccccaagaggcgtgcctcagatcgaagttaccttcgacatagatgctaacggaattctaaacgtgaccgcaacagacaagtctactggtaaggccaataaaatcaccatcaccaatgataaaggccgtctctccaaagaagaaatagagcgtatggtacaggaagcagaaaaatacaaggccgaggatgaagttcaacgcgagcgagtctcagcaaaaaatgcacttgaaagctatgccttcaacatgaaatccgccgttgaagacgaggggctgaagggcaagatctcggaagccgataagaaaaaggtgttagataagtgtcaggaagtgatatcctggttggatgcaaacacgttggcagaaaaggatgaatttgaacataagcggaaagaattggaacaagtttgtaatccgatcatctccggattgtaccagggagcgggaggcccaggaccaggagggtttggagcccagggcccaaaaggaggctctggcagcggacctactatagaagaggttgactag

SEQ ID NO: 155178 - DNA, 1926 bp, Artificial Sequence
  derived and/or modified sequence
atggcaaaagccgctgctatcgggattgatctcgggaccacatattcctgcgtgggagtttttcagcacggtaaagtagaaataatcgctaacgaccaagggaacagaacgacccctagctacgtggctttcactgacacagaacggcttataggggatgcagccaagaaccaggtggcactcaacccacagaacacggtcttcgatgcaaaaagacttattggtagaaagtttggcgatccagtagttcaatccgatatgaaacattggccttttcaggtgattaatgacggagacaaacctaaagtacaggtgtcctataagggcgagacaaaggctttctacccagaggaaatttcttctatggtgctgacgaagatgaaggaaatcgctgaggcttacctggggtacccggtaactaacgctgtgatcaccgtccctgcctactttaacgatagtcagcggcaggctactaaagatgcaggggtgatcgctggactgaatgtgttacggataatcaacgagccaactgcagcagccattgcctatggtctggatcggacgggaaagggggagagaaacgtgctgatttttgatctagggggaggcaccttcgacgtaagtatcctgaccatagatgacggcatttttgaggtaaaggccactgctggtgatacacatctgggcggtgaagactttgataacagactagtgaaccactttgtcgaggaatttaaacgcaaacacaagaaagacatttcccagaacaagcgggctgttcgtcgccttaggactgcatgtgagcgggcaaagagaacgcttagcagttccactcaggcgtctctggaaatcgactctctttttgaggggatagatttctacacgagtatcacgcgggcacggttcgaagaactgtgttcagacctatttcgatctaccctggagccagtggagaaagcgttgagggatgccaagctggataaagctcaaatccacgatctggtgttggtcggtgggagtacacggatccctaaggtgcagaaacttctacaggatttttttaatggaagagacttgaacaaatcgatcaatccagatgaagcggtagcctacggagctgctgtgcaagcagctattcttatgggcgacaaatcagagaacgtccaggatctgcttctgctggacgtggctccgttgtctctaggattagaaacggccggaggcgtgatgaccgcactgataaagaggaacagtaccataccgactaagcagactcagatttttacaacctacagcgacaaccagcccggagtgttaatccaggtgtatgagggggaacgcgcaatgacgaaggataacaacctactgggacgattcgagctgtcaggcattccacctgctcccagaggggtcccacaaattgaggtgacctttgatattgacgccaacggaatcctgaacgtcacagccacagataagtcaaccgggaaagcaaacaaaatcaccatcacgaatgacaaggggaggctgtctaaagaagaaattgagcggatggtgcaggaagccgagaaatacaaagcagaggacgaggtgcagcgagagcgcgtgtcggcaaagaatgctctggaaagttatgctttcaatatgaagtcggccgtagaagacgaaggcttgaagggcaagattagtgaggccgacaagaaaaaggtgcttgataagtgccaggaggttatttcctggctagacgctaataccctcgctgagaaagacgagttcgaacacaagcgtaaggaactggagcaagtctgcaatccaataatcagtggactctaccagggggcaggaggtccgggacctgggggattcggagcccagggtcctaaaggagggtctggttccgggcctactattgaggaagtcgactag

SEQ ID NO: 155179 - DNA, 699 bp, Artificial Sequence
  derived and/or modified sequence
atggcgaaagcagctgcaattggtattgatctgggaaccacatactcttgcgtgggcgtgtttcaacatgggaaggtagaaataattgccaacgatcagggcaataggacaaccccaagttacgttgcgttcaccgacaccgaacgcctcatcggggatgcaggtgtcattgccggtttgaacgttctgaggattatcaacgagccaaccgccgctgccatcgcttatggcctagacaggacaggcaaaggggagcgtaatgtattaatctttgatctgggcggtggcacttttgatgtgtctatcttgaccattgatgacggtatcttcgaggtaaaagcaaccgcgggagatacacacttggggggagaagactttgacaaccgcctggtcaaccatttcgtcgaggaatttaaacggaagcacaagaaagatatctcccagaataagcgtgccgtgcggaggcttcgtacggcgtgcgagagagccaagcggaccctgagcagtagtacccaggcttctttggaaattgattccctgtttgaaggaatcgacttttacacttccatcacaagggctagatttgaagagctttgctccgacctctttagatccacccttgagcctgtggagaaggccccacctgctagtccgaggtgccgctcctgctgtcgcactagttctaccggcgcaacatag

SEQ ID NO: 155180 - DNA, 1926 bp, Artificial Sequence
  derived and/or modified sequence
atggcaaaggccgctgcaatcggaattgacctgggaacaacttactcatgcgtgggggtttttcagcatggaaaggtggagattatcgcaaatgaccagggtaatcggacaaccccgagctatgttgctttcacagacaccgagagactcataggggacgccgctaaaaaccaagttgccctgaacccccagaatacagtgtttgatgctaagagacttatcggcagaaaattcggcgaccccgtggttcagagtgatatgaaacactggccttttcaggtgattaatgacggggacaaaccaaaagtgcaagtgtcttataagggggaaaccaaggccttttacccagaagaaatctcttctatggttctcactaagatgaaggaaattgccgaagcctacttgggttatcctgtgactaacgcggttataaccgtacccgcttactttaatgattcacagaggcaggccaccaaggatgccggtgtcatcgccggattaaacgtgcttagaattatcaacgaacccacggccgcagccattgcgtatggtctggacaggacaggcaagggggaaaggaacgttcttatcttcgatcttggagggggtactttcgatgtcagcattttaactatcgacgatggtatctttgaagtaaaggccacggctggcgatacccacctagggggagaagactttgataaccgcctcgtgaatcacttcgtcgaggagttcaaaagaaaacataagaaggatatatctcagaacaaacgtgccgtacgcagactaaggacggcctgtgagagggccaagaggaccctgtcttcctcaacccaagcctctctggaaattgatagtctgtttgaggggatcgatttctacaccagtattacaagggccagattcgaggaactatgcagtgatctatttaggagcactcttgaacccgtggaaaaggcactccgggatgccaagctcgacaaagctcagatccacgacctggtgcttgttggtggatccactcgcatccccaaagtgcagaagttgctccaggacttttttaatggacgtgatttgaacaagtctatcaatcctgatgaggccgtggcatacggcgcagccgtgcaggccgctattctcatgggagacaagagcgagaacgttcaggatcttctgttgctcgatgtcgctcccctcagtctgggactcgaaaccgccggtggggttatgacagcactaatcaaacgaaatagcaccatcccgaccaaacaaacccagatctttacgacttacagtgataatcagccaggcgtgctgattcaggtctatgaaggagagagagccatgactaaagacaataacctgcttgggaggttcgagctgtctggcattccacctgcacctaggggcgtaccccagatcgaggtaacatttgatatcgacgccaatgggatcctaaatgtcaccgctactgataagtccaccggaaaggccaataaaattaccatcactaacgataagggacggctttctaaggaagaaatcgaacggatggttcaggaagccgaaaagtacaaggcggaagatgaggtgcaacgcgagagagtgagtgccaagaacgcccttgaaagctatgcattcaatatgaagtctgctgttgaagacgaggggcttaagggtaagatatccgaggcagataaaaaaaaagtgttggacaagtgtcaagaggtgattagttggctagacgcaaataccctagctgaaaaggacgaattcgaacataaacgcaaagaactggaacaggtgtgtaaccctatcattagcgggctgtatcaaggcgcaggcggaccagggccaggaggatttggagcccaaggccctaagggtgggtctgggtctggtccaacgatagaagaagtggactag

SEQ ID NO: 155181 - DNA, 1431 bp, Artificial Sequence
  derived and/or modified sequence
atggcaaaggccgctgccatcgggattgatttgggtactacttatagttgcgttggggtgttccagcacggaaaaggagagaggaacgtgctgatttttgatttaggtggtgggactttcgatgtaagtatcctgaccatcgacgatggtatctttgaggttaaggcaacggccggagatacgcacctcggaggtgaagatttcgataataggcttgttaatcatttcgtcgaggaattcaagcgcaagcacaaaaaagatatttcccagaacaagcgcgcagtgagaagactaaggactgcttgtgagcgagcgaagcggaccctgagctccagtactcaggcaagtctcgaaattgactcgttattcgaaggaatcgacttttataccagtattaccagggctcgcttcgaagaactgtgctccgacctctttagaagtacattggaacctgtagagaaagcactccgagatgcgaagctcgataaagctcaaatccatgacctagtgctcgtgggcggttccacacgcatccctaaggtgcagaaactcctgcaggacttttttaacgggagggacctgaacaaatccatcaaccccgacgaggcagtggcctacggcgctgccgtgcaggcagcaatcctgatgggcgacaaaagcgagaacgtgcaagacctgttgctcctggacgtggccccactcagccttggacttgagacagctggcggagtgatgaccgcactaattaagcggaactctactatcccgactaaacagactcagattttcaccacctatagtgacaaccaaccaggagtgctgattcaagtctacgagggggaacgagccatgactaaggataataatttactaggaaggtttgagctgtcaggcattccccctgcaccccgaggagtgcctcagatcgaagtgaccttcgacattgatgccaatggaatcctgaatgtcacagccaccgacaagtcaacagggaaggccaacaaaatcacaattaccaacgacaaaggccgacttagcaaggaagagatcgaaagaatggtccaagaggctgagaagtacaaggccgaggacgaggtgcagcgagagcgcgtaagcgccaaaaatgccttagaaagctacgctttcaacatgaagtcagccgttgaagatgaaggccttaaaggaaagataagtgaagctgataaaaaaaaggttctggataagtgtcaggaggtgatatcctggctggacgccaatacactcgctgaaaaggacgaattcgagcacaaacgaaaggagctcgagcaggtatgcaaccctatcatctctggcctctatcagggtgctggtgggcctggcccaggcggttttggggctcagggtccaaagggtgggtccggctctggtcctactatagaagaggtagattag

SEQ ID NO: 155182 - DNA, 1431 bp, Artificial Sequence
  derived and/or modified sequence
atggcaaaagcagctgctatcggaattgatcttggtaccacatactcttgtgtgggggttttccagcatggtaagggtgaacgcaacgtgctgatttttgacctaggtggaggcacttttgacgtttcaatcctgacaattgacgacgggatctttgaagtcaaggctaccgccggtgatactcatctgggcggagaggactttgataatcgtctggttaaccattttgttgaggagttcaaacgaaagcataagaaggacattagccagaacaagcgcgctgttcggaggttaagaactgcatgtgagcgtgccaagaggacactgagttcctcaacccaggctagtctcgaaatagactctctcttcgagggtatagatttctatacgtcgatcactagagctcgcttcgaggaactctgtagcgatctgtttcgctccacgctggagcctgttgaaaaagcactgcgcgatgcaaagctggacaaagcgcagatccatgatctcgtgctcgtgggcggttccacccggatccctaaggtccagaagctgcttcaggatttttttaatgggagggacttgaacaaaagcattaacccagacgaggcagtcgcgtacggcgcagctgtccaggctgctattctgatgggagataagtcagaaaacgtgcaggatctgcttttgctcgatgtggccccactgtctttgggactagaaaccgccggaggcgtgatgactgctctgatcaagaggaactctaccatcccaacaaagcagacacagatcttcacaacctactctgacaaccaaccgggtgtcctcattcaggtctatgagggcgaaagagccatgaccaaagataacaatttactggggaggtttgagctatcaggcattcctcctgctccaaggggggtcccccagatcgaagtgaccttcgacatagatgcaaacggcattctcaacgtgacagcaaccgacaagagcacagggaaggcgaacaagattaccatcacaaatgataagggcagattgagcaaagaggagattgagcggatggtgcaagaagcagagaaatataaagctgaggacgaggttcaacgggagagagtgtctgccaagaacgccctggaatcttacgcgtttaatatgaagtcagctgtggaggacgaggggctgaagggcaaaatcagtgaagctgacaaaaaaaaggtgctggacaagtgtcaggaagttatctcatggttagacgcgaatacgctagctgaaaaggatgagtttgagcacaagaggaaagaactggaacaggtttgtaatcccattatttccggtctgtaccaaggagctggtgggcctggccctgggggattcggagctcaaggtcctaaggggggaagtggctctgggcctactatagaggaggtcgactag

SEQ ID NO: 155183 - DNA, 1653 bp, Artificial Sequence
  derived and/or modified sequence
atggccaaggccgcagctattggcatcgatctgggcacaacctactcctgtgtgggtgtctttcagcacggcaaggtgcagatttcatcgatggtgctgactaagatgaaagaaattgctgaggcatatctgggctatcctgtcacgaacgctgtaattaccgtgcctgcctattttaacgatagccaacggcaagctaccaaagatgctggcgttattgcaggcctcaatgttctcaggattatcaacgagcccaccgcagccgcaatcgcatatggattggatcggaccggcaaaggagaaaggaacgtgttaatcttcgacctgggcggtggtacgtttgatgtaagtatacttacgatagatgacgggatttttgaggtcaaggcgactgccggtgacacccatctcggaggtgaggacttcgataacaggctggttaaccatttcgtcgaggagtttaaacgcaagcataaaaaggatattagccagaacaaaagggccgttaggcgacttaggacagcttgtgagagagccaaaagaaccttatcttcctctactcaggcctctctagagatcgacagtctgttcgaaggcatcgatttttatacaagcattacacgagccaggtttgaagaattatgcagcgatctgttcagatcgacactcgaaccagtagaaaaggctctgagggatgctaagctcgacaaggcccagattcacgaccttgtccttgtaggcggttcaacgcgcattcccaaggttcagaagctgctccaggacttctttaacggcagagatctaaataaaagcatcaatcctgatgaagcagtagcctacggggcagccgtgcaggcagccattttaatgggcgacaaaagtgagaatgtccaggacttgctgctgttagatgttgctccccttagtctcggcctcgagacagccggaggtgtgatgaccgcactgatcaaacgcaattctacaatcccaactaagcagactcagattttcactacctacagcgataaccagccaggcgtgttaattcaggtgtacgaaggagagagagccatgactaaggataataatctgctaggtaggtttgaactgagcggaatccccccagcccctcgcggtgtgcctcaaatcgaagtgacttttgatatcgatgcaaatggcattctgaatgtaaccgccactgacaagagcacagggaaggcaaataagataacaatcaccaatgacaagggacgcctctcgaaagaggagattgaaaggatggtacaggaggccgagaaatataaagccgaagacgaggttcaacgggaaagagtctccgccaaaaacgccctagagtcctacgctttcaatatgaagagcgcagtcgaggacgaggggctgaaagggaaaatctcagaggctgataagaaaaaagtgttggataagtgccaggaagtgatcagctggcttgatgcaaacacacttgcggaaaaggacgagtttgagcacaagcgaaaggaactcgagcaggtctgcaaccctatcatctctggcctctaccagggagccggagggccaggccctggcggattcggtgcacaagggcctaaagggggaagcggttcaggccctacaattgaggaggtagattag

SEQ ID NO: 155184 - DNA, 1872 bp, Artificial Sequence
  derived and/or modified sequence
atggccaaagctgccgctattggcatcgaccttggaacgacctatagctgcgttggggtcttccagcatggtaaggtcgaaatcatcgctaatgatcagggaaatcggactaccccatcctacgttgctttcacagacactgagagattgattggcgatgctgctaaaaaccaagtcgccttgaaccccgtggtgcagagcgacatgaagcattggccattccaggttatcaatgatggagacaagcccaaggtccaggtctcatacaaaggcgagaccaaggctttctatcccgaggaaatttcttctatggtgcttactaagatgaaagagatagcggaggcctatctgggttatccagtcacaaacgccgttattaccgtccccgcatattttaacgattcccagaggcaggctactaaggacgccggtgtgattgccggtcttaacgtgctaagaatcataaacgagccaacagccgcagctatagcttacggcctagacaggacggggaaaggcgaaaggaacgtgctgatattcgacctaggcggaggcacctttgatgtcagcatattgacaatcgacgacgggatcttcgaggtaaaggcaacagccggagatacccacttgggtggcgaggactttgacaaccgactggtaaaccattttgttgaggaattcaagagaaaacacaagaaagatatttcccagaataagcgggcagtcagacgcctgcgcacagcctgcgaacgtgcgaaaaggacgttatcctcctcaacccaggcttcacttgagatcgattccctctttgagggtatcgacttctacacatccattacccgcgctaggttcgaagagctttgctcagacttgttccgctccaccctggaaccagtcgaaaaagcacttcgagatgcaaagctagataaggcccagatacacgatttggtactggttggtggatctacccgcatcccaaaggtccagaagctgctgcaggatttcttcaacggtcgcgacttaaataagtcaatcaaccccgatgaagctgttgcctacggggcagctgtgcaggccgcaatcctgatgggcgacaaatcagagaacgtccaagacctgctgctccttgacgtagccccactttctctagggctggaaacagctgggggagtcatgacagccttaattaagaggaattcaacaatcccgacgaagcagacccagatttttactacctactctgacaaccagcccggagtccttatccaagtgtatgagggtgagcgggctatgactaaagataacaacctgctcgggcgtttcgaactttctgggatacctcccgcacctcgaggggtgccccagatcgaggtgacattcgatattgatgcgaatggtattctgaacgtgaccgctacagacaagtctactggcaaggcgaataagatcaccattaccaatgataaaggacgcctctctaaagaggagatcgagcgcatggtgcaagaggccgagaaatacaaggcagaagacgaagtacagagggaaagagtgtctgctaaaaacgctctcgaaagctatgcctttaatatgaagagcgccgtggaggatgaaggcttgaaaggcaaaatcagtgaggcggataagaagaaggtccttgacaagtgccaagaagtgatcagctggctggatgccaatacactggctgaaaaagacgaattcgaacataagcgcaaagaacttgaacaggtgtgcaatcccatcatttccggactatatcagggtgccggtggccctggccctggcggatttggtgctcaggggcctaagggcggaagcggttccggccctacaatcgaggaggtcgactag

SEQ ID NO: 155185 - DNA, 1653 bp, Artificial Sequence
  derived and/or modified sequence
atggcaaaggctgcagccatagggattgaccttggtacaacatactcttgtgtgggcgtcttccagcacgggaaagtgcagattagcagcatggttctcactaagatgaaagagattgccgaagcctatctcgggtacccagtgaccaatgcagtgatcacagtgcctgcatattttaatgacagccagcgacaggctacgaaggatgcaggagttatcgcaggactgaacgtcctccgcatcatcaatgagccaaccgcagccgcaatagcatacggcttagaccggaccgggaaaggcgaaagaaacgtccttatttttgatctgggcggaggaacgtttgacgtcagcattctaacaattgacgatggcatttttgaagtcaaagcaactgccggtgacacccatcttggcggagaagacttcgataataggcttgtgaatcactttgtcgaagaatttaaacggaagcataaaaaggatatttctcagaataagagggccgttcgccgtctccgcaccgcatgcgagcgcgcaaagcggaccctgtcctccagtacacaagcctctttagaaatcgatagcctgttcgagggtattgatttttataccagtatcaccagggcaagattcgaagagctgtgtagtgacctgttccgctcgactctagaaccggtcgagaaagccttacgggacgcgaaactcgataaagcacaaatacacgatctcgttctggtgggcggttcaactagaatccccaaggttcagaaattgctgcaggacttcttcaacggcagagacctgaacaagtctatcaatccagatgaggccgtagcctacggcgcagctgtccaggctgctattctgatgggagataaaagcgagaatgtccaggacctcctgctcttagacgtcgctcccctcagcctcggactggagaccgctggaggtgtgatgacagccctcatcaaaaggaattctactatccctaccaagcagactcagatttttacaacctacagcgacaatcagcccggagttctcattcaggtttacgaaggtgagcgcgctatgacgaaagacaacaacctcctgggaaggtttgaactgagtggtatccctccggcacccaggggcgtcccacagatagaagtgacattcgacatagacgctaatgggatacttaatgtgacggccaccgacaagagtactggcaaggccaataaaatcaccatcaccaatgataaggggagactgtcaaaagaggagattgagcgcatggtgcaggaagcagagaaatacaaggccgaagatgaggtccagcgtgagcgcgtgtctgccaagaacgcgctagaaagttatgccttcaatatgaaatcagccgtcgaggatgagggccttaagggtaagatttctgaggcagacaaaaagaaagtgctggacaagtgccaggaggtcatctcttggctggatgcaaatactctcgccgagaaagatgagtttgagcataaaaggaaggaattggagcaggtgtgcaaccccataatatctggcctgtatcagggggcaggcggacccggacccggaggtttcggcgctcaaggccctaaagggggttccggtagcggcccaacaatagaagaggtggattag

SEQ ID NO: 155186 - DNA, 1653 bp, Artificial Sequence
  derived and/or modified sequence
atggcaaaggccgcagcgataggaattgacctgggaactacatactcgtgcgtgggcgtattccagcatggcaaagtgcagattagcagcatggtgctgacgaaaatgaaagagatcgctgaagcctatctgggttaccccgtcactaatgccgtcattacagttcctgcttacttcaatgactctcaaaggcaggccacaaaggacgcaggtgtcatagctggcttgaatgtactgcgaatcatcaacgaacctaccgccgctgctattgcctatggactcgaccgcactggcaagggagagagaaacgtgctgatattcgatctgggtggcggaaccttcgacgtgtctatcctgacgatcgatgacggtatcttcgaggtaaaggccaccgccggagatacccacttgggcggtgaggactttgataaccgcctggtgaatcattttgttgaagagttcaaacgtaagcacaaaaaagacatttctcagaacaagcgcgctgtcaggcgcctccgcactgcatgcgaacgggcaaaacgcacactaagttccagtactcaggcctcattggaaatagacagcctcttcgaagggatcgacttttacacttctattacacgcgcacgctttgaggaactctgcagcgatcttttcaggagcactctggaaccagtcgaaaaagcattacgagacgcaaagttggacaaggctcagattcacgatcttgtccttgttggaggtagtacacgcatccccaaagtacaaaagctgctacaagacttcttcaacggcagggatttaaacaagtcgattaatcccgatgaagctgtggcttatggagcagccgtgcaagctgcaatactcatgggagacaaatcagagaatgtacaggacctgctgcttctggatgtagcccctttgtctctgggcctagagacggctggaggtgtaatgaccgcgcttattaagagaaatagtaccatcccaacgaagcaaacgcagatctttacaacttacagtgacaatcagcccggtgtattaatccaagtatatgaaggagagcgcgcaatgacaaaggataacaaccttctgggaaggttcgagctgagcgggatccctccggctccgcgtggggtgcctcagattgaggtgacctttgatatagacgccaacggaatccttaatgtgacagctaccgataaatcaactggcaaagccaataagataaccatcacaaacgacaaaggtagactgagcaaagaggagatcgagcgcatggtgcaagaagcagagaaatacaaggccgaagacgaagtgcaaagagagcgggtatcagcgaagaatgccctggagtcttacgcattcaacatgaagtctgctgttgaggacgaaggcctcaaggggaaaattagcgaagctgataagaagaaagtgctggacaagtgtcaggaagttatttcatggctggacgccaacactctggcagagaaggacgaattcgagcataaaagaaaagagctggaacaggtgtgcaatcccattatttccggtctgtaccaaggcgcaggtggccctgggcctgggggttttggcgctcagggcccaaaaggcggttcggggtccggtccgacaattgaggaggtcgattag

SEQ ID NO: 155187 - DNA, 1653 bp, Artificial Sequence
  derived and/or modified sequence
atggcgaaagccgctgccatcggaattgacctgggcacgacttactcttgtgtgggggtattccaacatggcaaggtccaaataagcagtatggtgctgaccaagatgaaggaaatagctgaagcctacctgggctatcctgtgaccaacgctgttatcaccgtacctgcttacttcaatgactcccagagacaagctacgaaggatgccggagtcatagctggactgaacgtgctcaggatcatcaacgagccaactgctgccgctatagcttacggactggaccgaacaggcaaaggagaacgaaacgtgctgatcttcgatctgggcggtgggactttcgatgtgagcatccttactatcgatgacggcattttcgaagttaaggccaccgctggcgacacccacctgggaggggaagacttcgacaaccgcttagtgaaccatttcgtggaggagtttaagcgaaaacacaagaaagatatctctcagaacaaacgtgccgtgcgtcgcctgcgaacggcttgtgagcgcgctaagcggactctttcaagctccactcaggcatcactcgagatcgattccctgttcgaagggattgatttctatactagtataacccgcgcaaggttcgaggaactctgtagtgacttattccgcagtaccctggaaccagtggaaaaggccctccgggatgctaagttagataaagcccaaatccacgacctggtcctagtgggaggctcaacgcggattcccaaagtccagaagttactccaggacttcttcaatgggagggacctcaacaaatccatcaacccagatgaggccgtcgcctacggagcagcagtgcaagcggctatcctcatgggcgataagagcgaaaatgtgcaggacctcttactacttgatgtggctcccctgtcccttgggcttgaaaccgctgggggtgtgatgaccgcgctgattaaacgaaacagtactatcccaaccaagcagacacagatatttactacatatagtgacaatcagcctggtgtactgattcaggtgtatgaaggtgagagggcaatgaccaaggataacaacctgttagggagattcgagttgagcgggatacctccggctccacgcggagttccacagatcgaagtcacgtttgacattgacgccaacgggatccttaatgtcaccgctactgacaaatccactggcaaggcaaacaagatcactattactaatgataaaggcaggctgagtaaagaagagatcgagcgaatggttcaagaagccgagaaatacaaagcagaggacgaggtgcaacgcgaaagagttagtgcaaagaatgctctggagagttacgcttttaacatgaagtccgctgtggaggacgagggactcaagggcaagatttccgaagcagataaaaaaaaggtgctggataaatgtcaagaggtgatttcctggctggacgccaatactttggctgaaaaagacgaatttgaacacaagaggaaggagctggaacaagtgtgcaatcctatcataagcggtttataccaaggcgcagggggaccaggcccaggaggcttcggggcacagggcccaaaaggcggttctggctcaggacccacaattgaggaagtcgactag

SEQ ID NO: 155188 - DNA, 699 bp, Artificial Sequence
  derived and/or modified sequence
atggcaaaagccgcagcaatcggtattgacctggggaccacctattcttgtgttggcgtttttcaacatgggaaagttgagattatcgcaaatgatcaaggaaacagaaccaccccctcttacgtggcctttaccgataccgagagattgattggtgacgccggagtaatcgctggtttgaacgttctgaggattataaatgagcccacagccgcagccatcgcatacggtctggaccggactggtaaaggcgagagaaacgtattaatctttgacttgggcggaggaactttcgatgtgtctattcttacaatcgacgatgggatctttgaggtaaaagccaccgcgggagacactcacctgggtggtgaagatttcgacaacagactcgtcaaccattttgtggaagaattcaaaagaaaacataagaaggacattagccagaataagagggccgttcgacgcctcaggacggcatgtgaacgcgcaaaacggacgctcagttcctcaactcaagcctcactcgagatcgactctctcttcgaagggatagatttctatacatctatcacccgggcaaggttcgaggagctgtgcagcgacctgttccggtctacccttgagccagtagagaaggcaccaccagctagcccgcgatgtaggtcttgttgtcggacatcttccactggagccacatag

SEQ ID NO: 155189 - DNA, 1653 bp, Artificial Sequence
  derived and/or modified sequence
atggccaaggcggctgccatagggatagatctgggcacaacatatagctgtgtgggagtgtttcagcacggcaaggtccagataagttctatggtgcttactaaaatgaaagaaatcgccgaagcttatttaggctatcccgtgaccaacgccgtgatcacagtcccagcatacttcaacgactcccaacgccaggctaccaaggacgcaggcgtgattgccggattaaatgtccttagaatcatcaatgagcccacagcagctgcaatagcgtacggcttagaccgcaccggtaagggagagaggaatgtgctcatatttgatttgggcggtggcacgtttgacgtgtctatcctgacaattgacgacggcatctttgaggttaaggctactgccggagacacacacttagggggtgaagatttcgataatcggctggtcaatcacttcgtggaagaattcaagcggaaacacaaaaaagacatctctcagaataagagggccgtgcgccgactgcggactgcatgcgagcgtgcaaagcgaacactgtcttcttctacccaggctagcctagaaatcgactctcttttcgagggcattgatttctatacctctatcacaagggcacgtttcgaggagctgtgtagtgacttgtttcgatccacgttagagcctgttgaaaaagccctgcgcgacgccaagctcgacaaggcacaaattcacgacctcgtcctagtagggggttccacccggataccaaaggtgcagaaactacttcaggacttctttaatggacgcgacctgaacaagtccattaaccccgacgaagctgtcgcctacggggcagcagtccaggctgcgattctgatgggagataagagcgagaacgtgcaagaccttctgctcctggatgtcgctccattgagtctcgggctggaaaccgccggtggagtgatgactgccctcatcaagcggaattcgaccattcctaccaagcagacccagatttttacaacttactctgacaatcagccaggggtcctcatccaggtgtatgagggcgagcgagcaatgacaaaagataacaatctgctcgggaggttcgagctctccggaatcccccctgcgcctcgcggagtccctcaaatcgaggtgacattcgacatcgacgcaaacggcattttgaatgtgactgccacagataaatctaccggtaaggctaacaaaatcactattacgaacgacaaaggtaggctctctaaagaagaaatcgagaggatggtgcaagaggccgaaaagtataaagccgaagacgaggtacagagggagcgcgtgagcgctaaaaacgcacttgagtcctatgcctttaatatgaaaagcgctgtggaagatgagggactaaaggggaagatctccgaagccgacaagaagaaagtccttgataaatgccaggaggtgatatcatggctggatgccaacactcttgctgagaaagatgagttcgagcataaacggaaggagctggagcaggtttgcaatcctataatttcaggcctgtaccaaggcgcagggggacccggacctggcggattcggcgctcaaggaccgaaggggggtagcggtagcggacccacaatcgaggaggtggactag

SEQ ID NO: 155190 - DNA, 699 bp, Artificial Sequence
  derived and/or modified sequence
atggctaaggcggctgccataggcattgacctgggtactacatactcttgcgttggcgtctttcaacacggaaaagtcgaaatcatcgccaatgaccaaggaaaccgcacgactccgtcatacgtcgcttttacagacaccgaacgcctaataggtgacgccggtgtgatagccggactgaacgtattgcggattatcaacgaacccaccgcagccgctattgcctacggcctggatcgcacaggtaaaggggagcggaacgtgcttatttttgatttaggcggaggtaccttcgacgtatcaatactgacaattgacgatggcattttcgaggtgaaagccacagccggagacacacacctgggcggtgaagatttcgataaccgacttgtaaaccattttgtggaagaattcaagcggaagcataaaaaagacatctcacaaaacaagagggcagtccgccgactgcggaccgcatgtgagcgagctaagcgtaccctttcctcctctactcaggcctctctagaaattgattccctctttgaaggcattgacttttacacctcgatcacaagagctcggttcgaggagctgtgctcagatcttttcagaagcaccctcgaaccagtagagaaggctcccccagctagtcctcgctgccggagctgttgccgcacctctagtacaggggctacatag

SEQ ID NO: 155191 - DNA, 699 bp, Artificial Sequence
  derived and/or modified sequence
atggctaaagctgcagctataggaatcgatttaggaactacttattcctgcgttggagtgttccagcatgggaaagtcgaaatcatcgctaacgatcagggaaataggaccaccccttcctatgtggcttttaccgataccgaaagactgatcggagacgcgggtgttatcgccggtcttaacgtgctcaggattatcaacgagccgactgccgcagcaatcgcctacggcctggaccggacaggtaagggggaaagaaacgtgttgatcttcgacctgggcggtggcaccttcgatgtgtccatcttgactattgacgacggcatctttgaggtaaaagctacagccggagacacacatctgggaggcgaggattttgataacagactcgttaaccacttcgtggaagaatttaagcgcaaacataagaaggatatctcccagaacaagcgggctgtacgccgtctgcgtaccgcctgtgagagagctaaacgcaccctgtcctcctccactcaggccagtctagagatcgactcgcttttcgagggaattgacttttatacgagcattacccgggcacgatttgaagagctgtgttcggatctattccgctccacacttgagcccgttgaaaaagcaccacccgcaagtccaagatgccgcagttgttgcaggacctcgtcaaccggcgctacctag

SEQ ID NO: 155192 - DNA, 699 bp, Artificial Sequence
  derived and/or modified sequence
atggccaaagcggctgcgatcggcatcgatctggggaccacatatagttgcgtgggtgtgtttcaacatggaaaggtcgagatcattgcaaacgaccagggaaatagaacaacaccttcctacgttgctttcaccgacactgagcgactaattggagacgccggtgttatagccggactaaacgtgttacggattattaatgagcctacggcagccgcaatcgcctatgggctcgacagaacagggaaaggagagcggaacgtgctgatattcgatctgggcggtggtacatttgatgtgagtatccttactattgatgacggaattttcgaagttaaggctaccgccggagatactcacctgggcggagaggacttcgataacaggctggtgaatcattttgtggaggagtttaaacggaaacataaaaaggacatttcacaaaacaagcgggctgtacgccgtctgaggaccgcctgcgagagagctaagcgcaccctgagctcttctacacaagcttcgctggagatcgattcactgtttgaaggcattgatttttatacatcaatcacgcgcgcacggtttgaggaactctgttccgatttgttccgttccaccttggagcccgtagaaaaggcaccaccagcatctccacgatgtcggtcctgctgccgcacttccagtacaggtgcaacatag

SEQ ID NO: 155193 - DNA, 1926 bp, Artificial Sequence
  derived and/or modified sequence
atggcaaaagcagccgctatcgggattgacctcggaacgacatacagctgtgtgggcgtctttcaacacgggaaggtcgaaattattgctaacgaccaaggtaaccgcaccactccctcatatgttgcctttaccgatactgagcgcctcatcggcgacgccgcaaagaaccaggtggccctcaaccctcaaaacaccgtgttcgatgccaagcgcctaatcggaagaaaatttggcgaccccgtcgtgcagtccgatatgaagcattggccatttcaggtaattaacgacggggacaaacctaaggtgcaagtatcatacaagggagaaaccaaggccttttaccctgaagagatttcgtccatggtgctgactaagatgaaggaaatcgcggaagcctacctgggatacccagtgaccaatgctgtaattacagttcccgcatacttcaatgacagccagcgacaggctactaaagacgccggtgtgattgccggactcaacgtgctcaggattattaatgagcccaccgcagcagctattgcctatgggctggataggactggcaagggagaaagaaatgtgctcatatttgatttggggggtggaacgtttgatgtgtccattttaactatagatgacggtatctttgaggttaaggcaaccgcgggtgatactcacctgggaggagaggattttgacaaccgcctcgtaaatcattttgtggaagagttcaagcgcaaacacaagaaggacatttcgcaaaacaaaagagccgtgagacggcttaggaccgcttgcgagcgcgcaaagcggacactttcatctagtacacaagccagcttagaaatcgactctctgtttgagggaattgatttttatacctcaattactcgagctaggtttgaggagctttgtagtgacctgttcaggagcaccttagaacctgtcgaaaaggcactccgcgacgcgaaactagacaaggcacagatccacgatttagtactcgtcggaggatctacccgtatccctaaggtgcaaaaacttctccaggatttttttaatggccgtgacttaaataagtccatcaatcctgatgaagccgttgcctatggggcagctgttcaggccgctatcctgatgggcgacaagagtgagaatgtgcaggatctgctgctgctcgacgttgctccgctcagcctggggctggaaaccgctggaggagtgatgacagcactgattaaaaggaactctaccatcccgaccaagcagacccagatattcacaacatatagtgataaccaacctggcgtgctcatccaggtttatgaaggggagagagcaatgacaaaggataacaacttgctggggcgatttgagttatcagggatcccaccagcacccagaggtgtccctcagatcgaggtaacgtttgatatcgatgccaatgggatacttaacgtgacagccacagataagtccaccggcaaggcgaacaagatcactattactaatgacaagggaaggctctctaaagaagagatcgagagaatggttcaggaggccgagaagtataaggcagaggacgaggttcaaagggagcgggtgtcagccaaaaacgccctggaaagctacgccttcaacatgaagagtgccgtggaggatgaagggctgaagggcaagatctccgaggcagataagaaaaaggttctagacaagtgccaggaggtgataagttggctggacgccaacactctggccgagaaagacgagttcgaacacaagaggaaagagctggaacaggtttgcaaccccattataagcggactgtaccaaggcgcaggcggacccggacctgggggatttggagcgcaagggcctaaaggtggtagtggaagcgggccaaccattgaagaggtggactag

SEQ ID NO: 155194 - DNA, 1926 bp, Artificial Sequence
  derived and/or modified sequence
atggccaaagccgctgccataggaatcgacctgggcacaacttactcgtgtgttggagtgtttcaacacggtaaagtggagattatcgccaatgatcaggggaaccgaactacaccctcatacgtggccttcacagacaccgagagactgattggtgacgccgcaaagaatcaggtggccctgaacccccagaatacagtgtttgacgccaaacgtctgatcggacgcaaattcggcgaccccgtggttcagagcgacatgaagcactggccgtttcaggtgatcaacgatggcgacaaacctaaggtccaggtgtcatataaaggggagacaaaagctttctatcctgaagagatttcctccatggtcttgactaaaatgaaagagatcgcagaggcgtacctgggctatcctgtcaccaatgccgtcattacggtgccagcatatttcaacgacagccagcgccaggctactaaggacgccggtgtgattgccggtctgaatgtgctgcgcattatcaatgagcctacagctgccgcaattgcctacggcctggaccggacgggaaaaggcgagcggaatgtgctgattttcgatctcgggggaggaacctttgatgtctctattctcaccatcgatgatggcatcttcgaggtcaaggcgacggcaggcgatacccacttgggcggagaagacttcgacaaccggctggtgaaccactttgtggaggagttcaagcggaagcacaagaaggacatcagccaaaacaagagggcagttcgcagactacgcacagcttgcgagcgagccaaacgcaccctttcaagttcaacgcaggccagtttagagattgacagtcttttcgaggggattgacttctatacctcaattacccgagctcgctttgaggagttgtgctcggacctgttccgcagtactctcgaacccgtcgagaaggcgcttcgcgatgctaagttggacaaagcacagatccatgacctcgtactggttggaggctctacaaggattcctaaggttcaaaaactcttgcaggactttttcaacggacgggacttaaataaatcaattaacccagacgaagccgtcgcctacggcgcagcggtacaggccgcaattcttatgggtgacaagagcgagaacgtccaagatctgctgctgttggatgtggctccactttctcttggcctggagactgccggtggagtaatgaccgctctcataaagcggaactctacgatacctactaaacaaacccagattttcacaacatactcagataaccagccgggagtcttaattcaggtctacgaaggcgagagggccatgacaaaagataacaacctgcttggaagatttgaactcagtggcatcccacccgctcctagaggggtgccccaaatcgaggtgacattcgacattgacgctaacggaattctcaacgttacagccacggacaaaagcacgggaaaagctaataagatcaccattaccaacgacaaaggtcggttatcaaaggaggagatcgagagaatggtgcaggaggccgagaagtacaaggctgaagacgaggtgcagagggaaagggtgtcggctaaaaacgctttagaatcatacgcctttaatatgaaatccgccgtcgaagatgaaggattaaaaggaaagatttcggaggcagataaaaagaaagtgctggataagtgccaggaagttatttcatggttggacgctaacacacttgccgagaaagatgagtttgaacacaaacggaaggaattggagcaggtatgtaatcccatcattagtggcttgtaccagggggctgggggacctggtccaggagggtttggtgcccaggggcctaagggaggatccgggagcggccctaccattgaggaggtggattag

SEQ ID NO: 155195 - DNA, 1926 bp, Artificial Sequence
  derived and/or modified sequence
atggctaaggccgcagcaattggtattgatctcggcacaacgtactcatgtgtaggagtttttcagcacggcaaggtagagatcatagctaatgaccaggggaaccgaacgactccctcttatgttgcgttcaccgatacggagagacttatcggggatgccgcaaagaaccaggtggctctcaatcctcaaaatactgttttcgatgcgaaaagactcatcggccgtaagtttggagatcccgtagtccagtctgacatgaaacactggccattccaggtgattaacgacggtgacaaacctaaagtgcaggtgtcgtacaagggcgagactaaggccttctacccagaagagatatcttctatggtactaactaagatgaaagaaattgccgaagcatacctcggctaccccgttaccaacgcggtcattacagttccagcttatttcaacgactctcagagacaagcaactaaggacgcaggtgtaattgcaggcctgaacgtgcttaggatcatcaacgaaccaacagccgcagccatcgcttacggcctcgatagaactggaaagggcgaaagaaacgtgctgatattcgatttggggggtggtacatttgatgtgagcattctgacaatagacgacggaattttcgaggtcaaagctactgcaggggacacccacctgggaggggaagatttcgacaaccgtttggttaaccacttcgtggaggagtttaagagaaagcacaaaaaggatattagtcagaacaaaagggctgtgaggcgattgagaaccgcatgcgaaagggcaaagaggaccctgtctagttctacacaggcttcactagagatcgactctcttttcgagggaatcgacttctataccagcataactagagctcggttcgaagaactatgcagtgatttatttagaagcactctcgagccagtcgagaaggccttacgcgacgccaagctcgataaagcgcagattcacgatctggtgctggtgggcggatccactagaatcccaaaggtgcagaagctgctgcaggatttcttcaatggcagggaccttaacaagtccataaatcccgacgaagcagtcgcctatggcgcagcagtccaggctgccatccttatgggggacaagtcagagaatgtacaggaccttctactgctcgacgtggcgccactgagcctgggtctcgagacggcaggaggcgtgatgactgctctgataaaacgtaattccaccatcccaaccaagcaaactcagatcttcaccacctacagcgacaaccagccgggagtcctgattcaggtctatgaaggagagcgcgcaatgacaaaagacaataacctattaggacggttcgagctgagcgggatccccccagctccaagaggcgtgccacagattgaggtgaccttcgacatcgatgctaacggtatcttaaatgtcactgctacggacaaaagtactggtaaggccaacaagattactattacaaatgataaaggccgtcttagcaaggaagagatagaacgtatggtgcaggaggccgagaagtacaaagcggaggacgaagtacagagggagcgcgtgtccgcgaagaacgctttagagagctacgctttcaacatgaagagcgccgtggaagatgaaggactaaaaggcaagatttctgaggctgacaaaaagaaagtgctggataagtgccaggaggtgatttcctggttggacgctaacaccctggctgagaaggatgagttcgagcataagagaaaagagctggagcaagtgtgcaatcccatcatctctggcttgtaccagggagcgggaggtcctggtcctgggggattcggtgctcaagggccaaaaggagggtccggttctggccctacgattgaggaggtggattag

SEQ ID NO: 155196 - DNA, 699 bp, Artificial Sequence
  derived and/or modified sequence
atggctaaggcggcagctattggcatcgatttgggcactacttattcctgtgtgggagtgtttcagcacggcaaagtggagattatcgcaaacgaccaggggaaccgcaccacaccttcttacgtggcctttaccgacaccgagcggctgattggcgatgcgggagtgattgctggcctgaacgtgctcaggatcatcaacgaaccaactgccgctgcgatcgcttacggactggatcgaaccggaaaaggagaaaggaatgttctaatcttcgatctggggggtggtacctttgatgtctctatactgacaatcgacgatggaatcttcgaggtgaaggctacagctggcgacacccacctgggtggagaggactttgacaaccgactggttaaccactttgtagaggagttcaaacggaagcacaaaaaggacatttctcagaacaaacgggctgttcgcaggctgcggaccgcatgtgaaagagcgaagagaacgctctccagttctacgcaggccagtctggagatcgacagtctgtttgagggaattgatttttatacctctataacacgagctcgcttcgaggagctctgtagcgatctgttccgatccacccttgaacctgtggaaaaggccccaccagcttcaccacgttgccggtcgtgctgcagaacatcttcaactggtgctacctag

SEQ ID NO: 155197 - DNA, 1926 bp, Artificial Sequence
  derived and/or modified sequence
atggctaaagctgccgcaatcggtatcgatctggggacaacctattcctgtgtgggcgtttttcagcacggaaaggtggaaataatagctaatgaccagggaaaccgcaccacgccctcttacgtggcttttactgatactgagcgcctcattggggacgctgctaagaaccaagtggccctgaatcctcagaataccgtattcgatgctaaaagactaattggtaggaaatttggtgacccagtggtgcagtcggatatgaaacattggcccttccaagttatcaatgatggcgataagcccaaggtgcaggtgtcctacaagggtgagacaaaggcattttatccggaggagataagctccatggttctgacaaagatgaaggaaatagcggaagcgtatctggggtatcctgtgacaaatgctgtgattacagtgccagcatacttcaatgactcacagaggcaggcaaccaaggacgctggggtcattgctggccttaatgttctgagaatcattaatgagccgaccgctgccgcaatcgcttatggcctagacagaaccggaaagggagagaggaacgttctcatcttcgatctggggggaggcacattcgacgtttctattttgacgattgacgacggcatcttcgaggtcaaggccaccgccggtgatacacacttagggggagaggattttgataacaggctggtgaatcactttgttgaggaatttaaacgcaagcacaaaaaggacatcagccagaataaaagggcagtgcggcgtctgcggactgcctgtgagagggctaagagaactctcagctcaagcacacaagcaagtctagagattgactccctctttgaagggattgacttctatacaagcatcacaagggcacggtttgaagagctgtgctcagatctgtttcgatcaactctcgaaccagtggaaaaggcgctgcgcgatgccaaactggacaaagctcagatacacgatttagttctggtgggaggttcaacccgcattcctaaggtgcaaaagctgctccaggacttcttcaatggcagggatctgaacaagtccatcaatcccgatgaggccgttgcctacggagctgctgtgcaagctgccatcctaatgggcgataagtccgaaaacgttcaagatttgctgctgctcgacgtggccccactgtcactgggtctggagacggcaggtggcgttatgacagccctgatcaaaagaaattccacgatccccacaaagcagactcagatctttaccacctacagtgacaatcagccgggagtgctgatccaagtgtacgagggtgagagagcgatgaccaaggataataacctgttgggcagattcgagttgtcgggaatccctccggcaccaagaggcgtgcctcagatcgaagtcactttcgatatagatgcaaatgggatcttgaatgtcactgccactgacaagtccaccgggaaggccaataagataactattactaacgacaaaggtcgcttgagtaaagaggagatcgagcgaatggtgcaggaagcagagaaatataaggccgaggacgaggtgcagagagaaagagtatccgctaaaaacgcactagagagttacgcctttaatatgaagtccgccgtggaagacgaagggctgaaaggcaagatcagtgaggccgacaagaagaaggtgcttgataaatgtcaagaggtgattagctggctcgatgccaacaccctagccgagaaagatgaatttgagcataagcggaaggaactggagcaggtatgcaaccccattatcagcgggctttatcaaggggcagggggtcctggccctggaggttttggtgctcagggtcccaagggcggatcaggctctggccctactatcgaagaagtggattag

SEQ ID NO: 155198 - DNA, 1926 bp, Artificial Sequence
  derived and/or modified sequence
atggctaaggccgcagcgattggcattgacctgggcacaacttactcttgcgtgggcgtgttccaacatggcaaagttgagattatcgctaacgatcagggcaaccgaacgacaccatcctatgtggccttcactgacactgaaagactaatcggggatgccgcaaaaaaccaggtggccctcaatcctcagaacacggtatttgacgccaagcgcttaataggaagaaaatttggtgatcccgtcgtccagtctgacatgaaacattggccatttcaggttataaatgatggcgataagcctaaagtgcaggtttcatataagggggagactaaggctttctatcccgaggagatctctagcatggttttgacaaaaatgaaagaaattgcagaggcatacctgggctaccccgttaccaacgccgtgataaccgtcccagcttatttcaacgacagccagcggcaggcaacaaaggacgccggagttatagcgggactgaatgttcttcgaattatcaacgaacctacggcagctgccattgcctacggcctcgaccgcaccggcaaaggtgagaggaatgtgctcatattcgacctcggtggcggaacctttgacgtgtcgattctgaccatcgacgatgggatttttgaagtcaaggctactgcaggggacacccacctgggaggtgaagatttcgataatagactggttaaccactttgttgaggaatttaaacggaaacacaaaaaagatatctcccagaataaacgagccgtgaggaggttacgcacggcttgtgaacgcgctaagagaacattgagctcaagtacacaagcgtcattagagatagacagcctcttcgaggggattgacttctatacttcgattacacgggcacgattcgaagagctgtgctctgatctgtttcgaagcaccctggaacctgtggaaaaagccctgcgagacgccaagttggataaagctcagatccatgatcttgtcctggtcggagggtccacccgcatccccaaggtgcagaagctgctgcaggatttctttaatggacgcgaccttaacaagtctattaaccctgatgaggccgtggcttacggtgccgcagtccaggcagcaatacttatgggcgataagtcagagaacgtgcaggacttactgttgctggatgtcgctccactgtcactcggtttggagactgccggtggggtaatgactgccctgatcaagcgtaattccaccattcctactaagcagacgcaaatattcaccacctactcagataatcagcccggagtgttgatccaggtttatgagggggagcgggcaatgaccaaggacaacaacttactcggcagatttgaactgtccggcattccccctgctccccgtggggtgccacagatcgaagtgacttttgatatcgatgcaaacggcatactgaacgtgaccgctacagacaagtccacggggaaagccaataagatcaccatcacaaacgacaagggcagattaagcaaagaggaaatagagagaatggtgcaggaagccgaaaagtataaagctgaggacgaagtgcagcgcgaacgagtgtctgccaagaacgcactggagagctatgccttcaacatgaaatccgccgtggaggatgaggggctgaagggcaagatcagcgaggctgataagaagaaggtactggacaagtgtcaagaagtaatatcctggttagatgccaatactctcgccgagaaagacgagttcgaacataagcggaaagagctggaacaggtgtgtaaccctatcatcagtggcctgtatcaaggggctggtggcccaggaccaggagggtttggggctcagggaccaaaaggaggaagtgggtccggccctacgatcgaggaagttgattag

SEQ ID NO: 155199 - DNA, 2127 bp, Artificial Sequence
  derived and/or modified sequence
ctgaggtcctgctgtgagggccctctccgcttgagtcgagtgacacccgctgtaccacggctgtctcgggcaaatctgtgcgggtgccggcacagacgggtcgagtttcccgctttccgaaggacggagctcctgagccggataccctcagccgtttcctctccacagtcccagtctggggcacaccggcaggggaccgggatggctaaggcagctgccatcgggatagatttgggaactacgtacagttgtgtgggcgttttccaacacggtaaggttgaaatcattgctaacgaccagggaaataggacaactccctcttatgtcgctttcaccgataccgaacggttaatcggagacgccgctaagaatcaagtggcactgaatccacagaatacagtcttcgacgccaagcgcttaataggaagaaaattcggcgacccggttgtccagtctgacatgaaacattggccgtttcaagtgattaacgacggcgacaagcctaaagtgcaggtttcttacaagggagagaccaaagctttctatccggaggaaattagctctatggtgctgacaaaaatgaaggagattgcagaggcttacctgggctaccctgtcacaaacgctgtaattaccgtgcctgcttacttcaacgactctcaaaggcaggccaccaaagacgctggagtgatcgccggattgaacgtgctgagaatcatcaatgagcctacagccgcagcaatcgcctatggtctcgaccggactggcaaaggcgaaagaaacgttttgatctttgacctgggaggcggaacattcgacgtctccattttaacaatagatgatggcatcttcgaggtgaaggcgaccgccggtgacacccacctggggggtgaagattttgataaccgccttgtcaaccactttgtggaagagttcaagaggaaacacaagaaagatatttcacagaacaagagggctgttaggcgtctcaggacagcttgcgaaagggcaaagagaacactttctagctctacacaagctagtctggaaattgactccctgttcgagggcatcgacttttacacatcaatcacacgagctagatttgaggagctgtgtagcgatctgttccgctctacattggagcccgttgagaaggctctgcgagacgcgaaattggacaaggctcagatacatgaccttgttcttgtgggcggttccacacggattcccaaggtccagaagcttcttcaggacttcttcaacggcagggacctcaataagtccataaacccagacgaagctgtggcttatggagccgcagtccaagcggctattctcatgggagacaagtctgaaaacgtgcaggatttgctcttgctcgacgtcgctcctctttctctaggcttagaaacggcaggaggagtgatgacagccttgattaagagaaactccaccatccccacaaaacagacgcaaatttttacaacctattcagacaaccagcccggtgtgctgattcaggtgtacgagggggagcgtgctatgacaaaagacaataatctactcgggaggtttgagctgtccgggatccctcccgctcccaggggagtacctcaaatcgaagtgacgttcgatatagacgcaaacggaatattgaatgtcaccgccactgataagagcaccggaaaagcaaataagataacaataaccaacgacaaagggaggcttagcaaagaagagatcgagaggatggttcaggaagccgagaaatacaaggctgaagatgaggtacaaagggagcgcgtttccgcgaaaaatgccctggagagttacgcattcaacatgaaatcagccgttgaggatgaagggctgaaaggcaagatctcggaggcggataaaaagaaggtccttgataagtgtcaggaagtaatcagctggctggacgccaacactctggccgaaaaagacgagttcgaacataagcgcaaagagctcgagcaggtttgtaatcccattatcagcggactgtatcagggcgctggcggtcccggaccaggaggctttggtgcgcaaggtcccaagggaggatcaggctctgggcctaccatcgaggaggtggattag

SEQ ID NO: 155200 - DNA, 1653 bp, Artificial Sequence
  derived and/or modified sequence
atggccaaagctgctgctatagggattgatttaggtactacttactcttgcgtgggcgtgtttcagcacggtaaggtgcaaattagctccatggtcttgactaaaatgaaggagatcgcggaggcctatctgggataccctgttaccaacgcagtgatcaccgtcccagcatacttcaatgacagtcagagacaggctaccaaagatgctggggtgatcgctgggttgaacgttctgaggattattaacgaacccacagcagcagccatcgcctatggccttgatcgaacagggaagggcgagcgaaatgtgctaatctttgatcttggcggtgggaccttcgacgttagtattttgaccatcgatgatggcattttcgaagtgaaggcaacggccggagatacgcacttagggggagaggattttgataatcggctggtgaaccacttcgtagaggaatttaaacggaagcacaaaaaggacatatcacagaacaagagggccgtgagacgccttcgaacggcgtgtgagagagccaaacgaacactgtcgagctctacacaggcatctctggagatcgacagcctctttgagggaattgatttttataccagcatcaccagagccaggtttgaagagctgtgctcagatctttttcgaagcactctcgagcctgtggagaaggcccttagggatgctaagttagacaaggcacagatccatgacctggtgctggtgggtggtagtacacgcatccccaaagtgcaaaagttattgcaggatttctttaatggaagggatctgaacaaatctataaatcccgacgaggctgtggcatacggcgctgcagtccaggctgccatcctcatgggagacaaaagtgaaaatgttcaggatctgcttctcttggatgttgcaccgctctcactagggctcgaaactgctggaggggtcatgactgccctgattaaacgaaatagtactatccccacaaaacagacgcagatttttacaacctattccgacaaccaacctggcgtacttattcaagtctacgaaggtgagagagccatgacaaaggataataatctgcttggacgtttcgagctatccggtattcctccagctcctcgcggagtaccacagattgaagtcaccttcgacatcgacgccaacggcatcctgaatgtgaccgcaacagataaatccactgggaaggctaacaaaattactattactaacgacaaaggaaggctgtcaaaagaggagatcgaaagaatggtgcaggaggccgagaagtacaaagccgaggatgaggtacagcgagaacgggtttctgccaaaaatgcactggagtcatatgcatttaacatgaaatcagctgtggaggacgagggtctcaaaggtaagatctcagaagccgacaaaaagaaggttctggataaatgtcaagaagtaatcagctggctcgacgctaacacactagccgaaaaggatgagtttgagcacaagcggaaagaattggagcaggtatgtaacccaataatttcaggtctgtatcagggcgcaggaggcccagggcctgggggatttggagctcagggccctaaagggggaagcggctccgggcctacaatcgaggaagtggactag

SEQ ID NO: 155201 - DNA, 1875 bp, Artificial Sequence
  derived and/or modified sequence
atggctaaggccgctgcaatcgggatcgatctcggcaccacctacagttgtgtgggtgtgtttcagcacggtaaggtggaaattatcgctaatgatcagggtaacagaactaccccttcctacgtggctttcaccgatacggagaggctcatcggggacgcggcaaaaaaccaagtcgcacttaacccccctgtggtgcagtctgacatgaagcattggccgtttcaggtaataaacgacggggataaacccaaagtccaggtgtcctacaagggagaaactaaagcgttttatccggaagaaatttcttcaatggtcctgaccaagatgaaagaaattgccgaagcttacctcggctatccggtgactaatgctgtaattactgtgccagcttatttcaacgactctcagcggcaggccactaaggacgctggcgtcattgccggactaaacgtcctgcgtatcatcaacgaaccaacggctgctgcaatagcctacggacttgatagaactgggaagggggagcgaaacgtgctgatattcgaccttgggggagggactttcgatgtgagcatcctgaccatcgatgatgggatcttcgaggtaaaggccactgccggtgacacccacctggggggtgaggattttgacaaccggctcgttaatcattttgtggaagaattcaaacggaaacacaagaaggatatctcacaaaataaacgagccgtgcggagactgagaaccgcctgcgagcgcgcaaaacgaacactgagctcttctacccaagccagtctggagatcgatagtctgtttgaagggatcgacttctacacatcaatcaccagggctaggtttgaggaattgtgctccgatctattcaggtcaaccctagagcccgttgaaaaagctctgagggacgccaaattggacaaggcacagattcacgacctcgtgctggtggggggatcaacacggattcctaaggtccaaaagctcctgcaagatttcttcaatgggcgagatctgaacaaatcgatcaaccccgatgaggctgtcgcctacggagctgccgtacaagcagctatacttatgggcgacaaaagcgaaaacgtgcaggatttgctgctgctggatgttgccccattgtcgcttgggctggagacggctggtggcgtcatgacagctctgataaaaagaaatagcacaattccaactaagcaaactcaaattttcactacctatagtgacaaccagcctggcgtgctcattcaggtgtacgagggggaaagagcgatgaccaaagataacaacctgctaggcaggtttgagctttctggaattcctcctgcgccacggggtgtcccacagatcgaggtgacttttgatatcgacgccaacggaatcctcaacgtgaccgctacagacaagtcgacaggcaaagctaataaaatcacaattaccaatgacaagggtcggctgagtaaagaagaaattgagcggatggtgcaggaggcagaaaagtataaggcagaggacgaggtccagcgtgaacgtgtctctgcgaagaacgcccttgagagttatgcttttaacatgaagagcgcagttgaggatgaaggcctgaagggcaagatttccgaggctgacaagaaaaaagtgctcgataaatgccaggaggtgatctcctggctcgatgctaacacactggcagagaaggatgaatttgaacataagcgcaaagagttggagcaggtctgcaatcccatcatttccgggctctaccaaggcgctggagggccaggccctggaggcttcggagcacaggggcctaaaggcggatccgggtcaggccctaccatcgaggaagttgattag

SEQ ID NO: 155202 - DNA, 1857 bp, Artificial Sequence
  derived and/or modified sequence
atggcaaaggcagccgcaatcggaatcgatctgggtaccacttattcgtgtgtgggtgtgttccagcacggaaaggtggagattattgccaacgaccagggcaaccgaacaactccctcttacgtagcgttcaccgataccgagagactcataggcgacgcagccaaaaatcaggtcgtgcagagtgacatgaagcactggccttttcaggtgattaacgatggggataaaccaaaagtgcaggtctcatacaaaggggaaaccaaggcattttacccagaggagattagcagtatggtgctcaccaaaatgaaggagatcgccgaagcttatctgggctatcccgtgacaaacgcagtaattaccgtgcccgcttactttaacgattctcagcgtcaggccactaaggatgctggcgtcatcgccggactgaacgtgctccgcataatcaacgaacctactgccgcagcaatagcatatggcctggaccgaaccggtaaaggggagagaaacgtcctgattttcgatctcggcggtgggacattcgacgtctcaatacttaccatcgatgacggtatcttcgaagtgaaggctaccgcgggtgatacccacttgggcggagaggacttcgacaatagattggtgaaccattttgtagaggaatttaagcggaaacacaaaaaagatatctcccagaacaaacgtgccgtgaggagacttcgtactgcctgtgagagggcgaaaagaaccctgtccagctccacgcaggcctcactcgaaattgatagtttattcgaaggcatcgacttctatacatctatcacccgcgctaggttcgaagagctctgcagtgatctgttccggtctaccctcgaacctgtggaaaaggctctgcgagacgccaagttagataaagcacagatccatgatctggtgctggtgggcggaagtactcggatccctaaggtgcaaaagttactgcaagacttttttaacggcagggatttgaacaagagcataaatcctgatgaggctgtcgcctatggcgctgccgtgcaggcggctattctcatgggagataagagtgagaacgtccaggatctgttacttctggacgtcgctccattatcgctgggactcgaaaccgctggaggggtgatgacggcactgattaaacggaacagcacaatcccaactaaacagactcagatttttaccacctactcagataaccagccgggtgtgctaatccaagtgtatgagggtgagagggccatgactaaagacaataacctgcttggacgattcgaactgagtggtattccccctgccccaagaggggtgccccagattgaagtcaccttcgacattgacgccaacggaattctgaacgttacagccacggacaagtcaacaggtaaagctaacaaaatcacgattacgaatgataagggcagactaagcaaagaggagattgaacggatggtccaggaggctgagaaatacaaggcggaagacgaggtccagagagagcgggtcagcgcaaagaacgcactggagtcttatgctttcaacatgaagtcggccgtagaggacgagggtctcaagggcaagatctccgaggccgataagaagaaggttctcgacaagtgtcaggaggtgatttcctggcttgatgccaataccctcgcggagaaggacgagtttgaacataaacgtaaagagcttgagcaggtgtgcaatccgatcatatcgggtctctatcagggggctggaggtcccggaccaggcggttttggtgctcaggggccaaaaggtgggtctggctctggtcccaccattgaggaggtggattag

SEQ ID NO: 155203 - DNA, 1857 bp, Artificial Sequence
  derived and/or modified sequence
atggctaaggcggctgctattggcatcgaccttgggactacttatagctgcgtgggggtgtttcagcatggcaaagtcgaaatcattgccaacgaccaggggaacagaactaccccaagttacgtagcgttcaccgacaccgaacggctgattggagatgctgcaaaaaaccaggtagtgcagagcgacatgaaacactggcccttccaggtcattaatgatggagacaagccgaaagtgcaagtttcttataagggcgaaaccaaggctttttacccagaggaaatttcctccatggtgctcaccaagatgaaggagatcgccgaagcttacctggggtacccagtgaccaatgccgtgatcaccgtgcccgcatactttaatgacagccagagacaagcgaccaaagacgccggagtgattgccggtttgaacgtactgcgcattatcaatgagcccactgctgcagctattgcctacggtttggatagaactggcaagggcgaacgaaacgttctgatctttgatctgggtggcggtacgttcgacgtgtccatccttactattgacgatggcattttcgaggtaaaggctacagccggagatacccacctcggcggagaggattttgataataggcttgttaaccactttgtcgaggaattcaaaaggaaacataagaaagatatctcccaaaataagcgggctgtccggaggttgaggacagcatgtgaaagagcaaagcgaacactgtccagttctacccaagctagcttggaaatcgatagcttattcgagggcatcgacttctatacgtcaatcacgcgcgctcgttttgaagagttgtgctcagatctatttaggtccaccttggagcctgtcgagaaagccctccgcgacgctaagctggacaaggcccagattcatgatttagtgcttgtgggcggaagcacacggatccctaaggtgcaaaaattgctccaggacttcttcaacggcagagacttaaacaaatctatcaacccagatgaggcagtcgcttatggagccgctgtccaggccgcaatccttatgggtgataagagtgaaaatgtccaggacctgcttcttctggatgtcgcccctctttcactgggcttggagaccgccggtggggtgatgacagccttgatcaaacgtaacagcacgatccctaccaagcagacccagatttttaccacttatagcgataaccagccaggcgtcctgattcaggtgtacgaaggagaacgggctatgacaaaggataacaaccttctgggcagattcgaactgagcggtattcctcctgctccccgtggcgtcccgcagattgaagtgaccttcgatatcgacgccaatgggatcctgaacgtgactgctaccgacaaaagtaccggcaaggctaacaaaattacaattacaaacgataaagggaggctgtcgaaggaggagatcgagaggatggtgcaggaagccgaaaagtacaaagctgaggatgaggtgcagagagaaagagtctccgccaagaatgcgctggagtcatacgcattcaacatgaagtcagccgtcgaggacgaaggcctgaaggggaagatctcggaggccgataaaaaaaaagttttggacaagtgtcaagaggtgatctcctggctagacgccaatacattggccgagaaggatgagttcgaacacaagcggaaggaacttgagcaggtctgcaaccccattatcagcggcctgtaccagggagccggagggcctggaccaggaggtttcggcgcacagggtcctaagggtggaagcggtagcggtccaaccattgaggaagtggattag

SEQ ID NO: 155204 - DNA, 1653 bp, Artificial Sequence
  derived and/or modified sequence
atggctaaggcagcagccataggaattgacttaggcacaacttattcttgcgtcggcgtcttccagcacggaaaggtgcagatttcaagtatggtgcttaccaaaatgaaggagattgctgaagcgtatcttggctatcctgtgacaaatgcagtcatcacagttcccgcatactttaacgattcccaaagacaggccactaaagacgcaggtgtgatagctgggctgaatgtgctacgaatcatcaacgaaccaacagccgctgccattgcctacggtctggaccggaccgggaagggagaaaggaacgtactcatatttgatcttggcggagggacgttcgatgtgtcaattctgaccattgacgatggaatatttgaagttaaggccacggccggtgacacccacctcggtggtgaggacttcgacaacagactagtgaatcactttgttgaggagtttaaaaggaagcacaagaaggatatctctcagaataagagagcagtgaggcgtctcaggactgcctgcgaacgagccaagaggacgctgagctcaagtacccaagcaagccttgaaattgatagcctcttcgaagggattgacttttatacttctataacacgcgctcgctttgaggaactttgctcagatctgttcaggagcacccttgaaccagtggaaaaggcactgcgggacgcaaaactggataaagcacaaatccacgacctggtgctcgtaggtggctcaaccagaataccaaaagttcagaaattgctgcaagattttttcaatggcagagacctcaataaaagcattaacccggacgaagctgtcgcttatggggcagcagtccaagctgccattctgatgggggacaagtctgaaaatgtgcaggatctgctgctgctggacgttgcccctctatcacttggtctggagaccgcagggggagtgatgacggccttaataaaacggaacagtaccataccaactaagcagacacagatctttaccacctattccgataatcaaccaggagtgttaatccaggtgtatgagggagagagggcaatgacgaaggacaataatctcctgggtaggtttgagctgagcggtatccccccagctccacgcggagtgccacagattgaggtaaccttcgacatcgacgcgaacggtattttgaatgtaacagcaaccgataagagtaccggaaaagccaacaaaatcacaattaccaatgataagggaaggctctccaaagaagagatcgagagaatggttcaggaggctgaaaagtacaaggccgaggacgaggtgcagcgcgagcgggtgtcagccaagaatgctctagaatcttacgcttttaatatgaaaagcgcagtcgaagacgaaggtctgaagggaaaaataagcgaagctgataaaaaaaaagttctggataaatgccaggaagtcatctcttggcttgacgcaaatacactggccgagaaagacgagttcgagcataaacggaaagaattggagcaggtgtgtaacccgatcatctctggcctctatcagggagcaggagggccaggccctggcggttttggagcgcagggaccaaaaggcggatctggctctggccctactattgaagaggttgattag

SEQ ID NO: 155205 - DNA, 1857 bp, Artificial Sequence
  derived and/or modified sequence
atggcaaaggccgctgctataggtatcgacctgggaacaacctacagctgcgtgggggtgtttcagcatggcaaagtcgaaattatcgcaaacgaccaggggaataggaccacgccttcctatgtggcattcactgatacagagcgcctcataggagatgccgctaaaaaccaggtggttcagagcgacatgaagcactggcccttccaggtaatcaatgacggggacaagcctaaggtccaggtatcgtataagggagagactaaagctttttacccagaggaaattagttccatggtccttaccaaaatgaaggagatagccgaggcctacctggggtaccccgtgaccaacgccgtaattacggtgcctgcctacttcaacgattctcagcgccaggccacaaaggacgctggcgtgatagccggtctgaatgtgcttaggattattaacgagccgactgccgctgcaattgcatacggcctcgatcggaccgggaaaggggagcgcaatgtcttgatctttgatctgggaggcggaacttttgatgtgagtattttgacaatcgacgatggcatcttcgaagtgaaggccacggctggcgacacacatctcggcggagaggatttcgacaacagattggttaatcacttcgtagaggaattcaaacgaaagcataagaaagacataagtcagaacaaacgcgctgttcgccgactgagaacagcctgcgaaagagccaagcggaccctttcctccagcacacaggcctcccttgagattgatagcctgtttgaggggatagatttctatacgtccatcacacgggctagattcgaggaactgtgctccgacctgtttcgtagtacactggaacctgtggaaaaggctttgcgagatgcaaagcttgataaggcccagatccatgatttagttttagtgggcggatccactagaatcccaaaggtgcagaagctgctgcaggattttttcaacggtcgggacttgaacaagagtatcaaccctgacgaagccgtcgcctacggcgctgccgtgcaggctgcaattctgatgggtgacaagtcagagaacgtgcaagacctgctgcttctggacgttgcgcctctgtctctcggacttgaaacagctggcggtgttatgaccgccttaattaagcgaaactctaccatccctactaaacaaacccaaatctttaccacctactctgataaccagcccggagtgctgattcaggtctacgaaggggagcgggcaatgacaaaagataacaacttgctgggtcgctttgaactctctggcattcccccagccccaaggggagtgccccaaattgaggtcacattcgacatcgatgctaatggcatcctgaatgttaccgccacagacaagagtactgggaaggcgaacaaaattaccattacaaatgataaaggccgactgtccaaagaagagatcgagagaatggtccaggaagctgagaagtataaagctgaggatgaggttcagagagagcgggttagcgcaaagaatgcactggaatcctatgcctttaatatgaagtccgcggttgaagatgaaggcttaaaaggtaagatcagcgaggctgataaaaagaaggtcctggataagtgccaggaggtgatttcatggctggatgccaacacgctggccgagaaggatgaatttgaacataagcggaaggaactcgaacaagtctgcaaccccattatttctggattgtaccagggcgctgggggtcctggaccaggcggttttggcgcacagggccctaaagggggttctggctctggaccaacaatcgaagaggttgattag

SEQ ID NO: 155206 - DNA, 1653 bp, Artificial Sequence
  derived and/or modified sequence
atggcaaaagccgctgcaattggaattgatcttggaaccacgtactcgtgtgtcggcgtgtttcagcacggtaaggtccagatctcatcaatggtgctcactaaaatgaaggaaatcgccgaagcctatctgggttatccagtcaccaatgctgttatcacagtgccagcctatttcaatgattctcagagacaggcaacaaaggacgctggagtgatcgccggtctgaacgttctcagaataatcaacgagcccacggctgcagctatcgcatatgggctcgataggacaggcaagggtgaacggaacgtgctgatcttcgatctagggggaggaacgttcgatgtgagcattctgaccatcgatgacggcatttttgaagtaaaggctaccgccggtgatacgcacctaggaggcgaggacttcgataaccgcctcgtgaaccatttcgtggaagagttcaaacggaagcacaagaaggatatcagccagaataaaagagcggtgcggcgattaagaacggcatgtgaacgggctaaaagaacactgtcctccagcacccaggcttctttggagatcgactctctgtttgagggcattgacttttacactagtattactagagctagatttgaagaactctgctccgatttgtttcggagcactctggagcctgtcgagaaggcccttcgagatgcaaagttggacaaggcacagatccatgatctggtgctagtcggtggcagtactcgcatcccaaaggtgcaaaagctgctgcaggattttttcaatggcagagacctgaacaaatcgataaacccagatgaagccgtagcctacggtgccgctgtgcaggcagctatactgatgggagataagagcgagaatgttcaagatctcctgctgttagatgtagcgcctctttcacttggcctggagaccgccggtggcgtgatgactgctctgatcaagaggaatagtaccatcccaactaaacagacgcagatctttaccacatactctgataaccaacccggtgttctaattcaggtctacgagggcgaacgagcgatgacaaaagataataaccttctgggcaggtttgagctcagtgggatccccccagcgcctcggggagtcccccagatcgaagtaacttttgatattgatgccaatggtatcctcaacgtgaccgccaccgataaatcaaccggtaaggccaacaaaatcacgatcacaaatgacaaaggaaggctttcaaaggaggaaatcgaaagaatggtgcaggaggctgagaaatataaagcggaagacgaagtacaacgagagcgcgtgtctgcaaagaatgcgttagaatcatatgcctttaacatgaaaagcgctgtggaagacgaaggcttgaaggggaagatcagcgaagctgataagaagaaggtgctagataagtgtcaggaggttatttcctggcttgatgctaacaccttggccgagaaggacgagttcgagcacaagcgaaaagaacttgaacaagtttgcaatccaattatttctggcctataccagggcgctggaggccctggccctggaggattcggcgcacaggggcctaagggcggttcaggtagcgggcctaccattgaggaagtagattag

SEQ ID NO: 155207 - DNA, 1926 bp, Artificial Sequence
  derived and/or modified sequence
atggccaaggccgccgccatcggcatcgacctgggcaccacctacagctgcgtgggcgtgttccagcacggcaaggtggagatcatcgccaacgaccagggcaacagaaccacccccagctacgtggccttcaccgacaccgagagactgatcggcgacgccgccaagaaccaggtggccctgaacccccagaacaccgtgttcgacgccaagagactgatcggcagaaagttcggcgaccccgtggtgcagagcgacatgaagcactggcccttccaggtgatcaacgacggcgacaagcccaaggtgcaggtgagctacaagggcgagaccaaggccttctaccccgaggagatcagcagcatggtgctgaccaagatgaaggagatcgccgaggcctacctgggctaccccgtgaccaacgccgtgatcaccgtgcccgcctacttcaacgacagccagagacaggccaccaaggacgccggcgtgatcgccggcctgaacgtgctgagaatcatcaacgagcccaccgccgccgccatcgcctacggcctggacagaaccggcaagggcgagagaaacgtgctgatcttcgacctgggcggcggcaccttcgacgtgagcatcctgaccatcgacgacggcatcttcgaggtgaaggccaccgccggcgacacccacctgggcggcgaggacttcgacaacagactggtgaaccacttcgtggaggagttcaagagaaagcacaagaaggacatcagccagaacaagagagccgtgagaagactgagaaccgcctgcgagagagccaagagaaccctgagcagcagcacccaggccagcctggagatcgacagcctgttcgagggcatcgacttctacaccagcatcaccagagccagattcgaggagctgtgcagcgacctgttcagaagcaccctggagcccgtggagaaggccctgagagacgccaagctggacaaggcccagatccacgacctggtgctggtgggcggcagcaccagaatccccaaggtgcagaagctgctgcaggacttcttcaacggcagagacctgaacaagagcatcaaccccgacgaggccgtggcctacggcgccgccgtgcaggccgccatcctgatgggcgacaagagcgagaacgtgcaggacctgctgctgctggacgtggcccccctgagcctgggcctggagaccgccggcggcgtgatgaccgccctgatcaagagaaacagcaccatccccaccaagcagacccagatcttcaccacctacagcgacaaccagcccggcgtgctgatccaggtgtacgagggcgagagagccatgaccaaggacaacaacctgctgggcagattcgagctgagcggcatcccccccgcccccagaggcgtgccccagatcgaggtgaccttcgacatcgacgccaacggcatcctgaacgtgaccgccaccgacaagagcaccggcaaggccaacaagatcaccatcaccaacgacaagggcagactgagcaaggaggagatcgagagaatggtgcaggaggccgagaagtacaaggccgaggacgaggtgcagagagagagagtgagcgccaagaacgccctggagagctacgccttcaacatgaagagcgccgtggaggacgagggcctgaagggcaagatcagcgaggccgacaagaagaaggtgctggacaagtgccaggaggtgatcagctggctggacgccaacaccctggccgagaaggacgagttcgagcacaagagaaaggagctggagcaggtgtgcaaccccatcatcagcggcctgtaccagggcgccggcggccccggccccggcggcttcggcgcccagggccccaagggcggcagcggcagcggccccaccatcgaggaggtggactag

SEQ ID NO: 155208 - DNA, 1431 bp, Artificial Sequence
  derived and/or modified sequence
atggccaaggccgccgccatcggcatcgacctgggcaccacctacagctgcgtgggcgtgttccagcacggcaagggcgagagaaacgtgctgatcttcgacctgggcggcggcaccttcgacgtgagcatcctgaccatcgacgacggcatcttcgaggtgaaggccaccgccggcgacacccacctgggcggcgaggacttcgacaacagactggtgaaccacttcgtggaggagttcaagagaaagcacaagaaggacatcagccagaacaagagagccgtgagaagactgagaaccgcctgcgagagagccaagagaaccctgagcagcagcacccaggccagcctggagatcgacagcctgttcgagggcatcgacttctacaccagcatcaccagagccagattcgaggagctgtgcagcgacctgttcagaagcaccctggagcccgtggagaaggccctgagagacgccaagctggacaaggcccagatccacgacctggtgctggtgggcggcagcaccagaatccccaaggtgcagaagctgctgcaggacttcttcaacggcagagacctgaacaagagcatcaaccccgacgaggccgtggcctacggcgccgccgtgcaggccgccatcctgatgggcgacaagagcgagaacgtgcaggacctgctgctgctggacgtggcccccctgagcctgggcctggagaccgccggcggcgtgatgaccgccctgatcaagagaaacagcaccatccccaccaagcagacccagatcttcaccacctacagcgacaaccagcccggcgtgctgatccaggtgtacgagggcgagagagccatgaccaaggacaacaacctgctgggcagattcgagctgagcggcatcccccccgcccccagaggcgtgccccagatcgaggtgaccttcgacatcgacgccaacggcatcctgaacgtgaccgccaccgacaagagcaccggcaaggccaacaagatcaccatcaccaacgacaagggcagactgagcaaggaggagatcgagagaatggtgcaggaggccgagaagtacaaggccgaggacgaggtgcagagagagagagtgagcgccaagaacgccctggagagctacgccttcaacatgaagagcgccgtggaggacgagggcctgaagggcaagatcagcgaggccgacaagaagaaggtgctggacaagtgccaggaggtgatcagctggctggacgccaacaccctggccgagaaggacgagttcgagcacaagagaaaggagctggagcaggtgtgcaaccccatcatcagcggcctgtaccagggcgccggcggccccggccccggcggcttcggcgcccagggccccaagggcggcagcggcagcggccccaccatcgaggaggtggactag

SEQ ID NO: 155209 - DNA, 1926 bp, Artificial Sequence
  derived and/or modified sequence
atggccaaggccgccgccatcggcatcgacctgggcaccacctacagctgcgtgggcgtgttccagcacggcaaggtggagatcatcgccaacgaccagggcaacagaaccacccccagctacgtggccttcaccgacaccgagagactgatcggcgacgccgccaagaaccaggtggccctgaacccccagaacaccgtgttcgacgccaagagactgatcggcagaaagttcggcgaccccgtggtgcagagcgacatgaagcactggcccttccaggtgatcaacgacggcgacaagcccaaggtgcaggtgagctacaagggcgacaccaaggccttctaccccgaggagatcagcagcatggtgctgaccaagatgaaggagatcgccgaggcctacctgggctaccccgtgaccaacgccgtgatcaccgtgcccgcctacttcaacgacagccagagacaggccaccaaggacgccggcgtgatcgccggcctgaacgtgctgagaatcatcaacgagcccaccgccgccgccatcgcctacggcctggacagaaccggcaagggcgagagaaacgtgctgatcttcgacctgggcggcggcaccttcgacgtgagcatcctgaccatcgacgacggcatcttcgaggtgaaggccaccgccggcgacacccacctgggcggcgaggacttcgacaacagactggtgaaccacttcgtggaggagttcaagagaaagcacaagaaggacatcagccagaacaagagagccgtgagaagactgagaaccgcctgcgagagagccaagagaaccctgagcagcagcacccaggccagcctggagatcgacagcctgttcgagggcatcgacttctacaccagcatcaccagagccagattcgaggagctgtgcagcgacctgttcagaagcaccctggagcccgtggagaaggccctgagagacgccaagctggacaaggcccagatccacgacctggtgctggtgggcggcagcaccagaatccccaaggtgcagaagctgctgcaggacttcttcaacggcagagacctgaacaagagcatcaaccccgacgaggccgtggcctacggcgccgccgtgcaggccgccatcctgatgggcgacaagagcgagaacgtgcaggacctgctgctgctggacgtggcccccctgagcctgggcctggagaccgccggcggcgtgatgaccgccctgatcaagagaaacagcaccatccccaccaagcagacccagatcttcaccacctacagcgacaaccagcccggcgtgctgatccaggtgtacgagggcgagagagccatgaccaaggacaacaacctgctgggcagattcgagctgagcggcatcccccccgcccccagaggcgtgccccagatcgaggtgaccttcgacatcgacgccaacggcatcctgaacgtgaccgccaccgacaagagcaccggcaaggccaacaagatcaccatcaccaacgacaagggcagactgagcaaggaggagatcgagagaatggtgcaggaggccgagaagtacaaggccgaggacgaggtgcagagagagagagtgagcgccaagaacgccctggagagctacgccttcaacatgaagagcgccgtggaggacgagggcctgaagggcaagatcagcgaggccgacaagaagaaggtgctggacaagtgccaggaggtgatcagctggctggacgccaacaccctggccgagaaggacgagttcgagcacaagagaaaggagctggagcaggtgtgcaaccccatcatcagcggcctgtaccagggcgccggcggccccggccccggcggcttcggcgcccagggccccaagggcggcagcggcagcggccccaccatcgaggaggtggactag

SEQ ID NO: 155210 - DNA, 699 bp, Artificial Sequence
  derived and/or modified sequence
atggccaaggccgccgccatcggcatcgacctgggcaccacctacagctgcgtgggcgtgttccagcacggcaaggtggagatcatcgccaacgaccagggcaacagaaccacccccagctacgtggccttcaccgacaccgagagactgatcggcgacgccggcgtgatcgccggcctgaacgtgctgagaatcatcaacgagcccaccgccgccgccatcgcctacggcctggacagaaccggcaagggcgagagaaacgtgctgatcttcgacctgggcggcggcaccttcgacgtgagcatcctgaccatcgacgacggcatcttcgaggtgaaggccaccgccggcgacacccacctgggcggcgaggacttcgacaacagactggtgaaccacttcgtggaggagttcaagagaaagcacaagaaggacatcagccagaacaagagagccgtgagaagactgagaaccgcctgcgagagagccaagagaaccctgagcagcagcacccaggccagcctggagatcgacagcctgttcgagggcatcgacttctacaccagcatcaccagagccagattcgaggagctgtgcagcgacctgttcagaagcaccctggagcccgtggagaaggccccccccgccagccccagatgcagaagctgctgcagaaccagcagcaccggcgccacctag

SEQ ID NO: 155211 - DNA, 1653 bp, Artificial Sequence
  derived and/or modified sequence
atggccaaggccgccgccatcggcatcgacctgggcaccacctacagctgcgtgggcgtgttccagcacggcaaggtgcagatcagcagcatggtgctgaccaagatgaaggagatcgccgaggcctacctgggctaccccgtgaccaacgccgtgatcaccgtgcccgcctacttcaacgacagccagagacaggccaccaaggacgccggcgtgatcgccggcctgaacgtgctgagaatcatcaacgagcccaccgccgccgccatcgcctacggcctggacagaaccggcaagggcgagagaaacgtgctgatcttcgacctgggcggcggcaccttcgacgtgagcatcctgaccatcgacgacggcatcttcgaggtgaaggccaccgccggcgacacccacctgggcggcgaggacttcgacaacagactggtgaaccacttcgtggaggagttcaagagaaagcacaagaaggacatcagccagaacaagagagccgtgagaagactgagaaccgcctgcgagagagccaagagaaccctgagcagcagcacccaggccagcctggagatcgacagcctgttcgagggcatcgacttctacaccagcatcaccagagccagattcgaggagctgtgcagcgacctgttcagaagcaccctggagcccgtggagaaggccctgagagacgccaagctggacaaggcccagatccacgacctggtgctggtgggcggcagcaccagaatccccaaggtgcagaagctgctgcaggacttcttcaacggcagagacctgaacaagagcatcaaccccgacgaggccgtggcctacggcgccgccgtgcaggccgccatcctgatgggcgacaagagcgagaacgtgcaggacctgctgctgctggacgtggcccccctgagcctgggcctggagaccgccggcggcgtgatgaccgccctgatcaagagaaacagcaccatccccaccaagcagacccagatcttcaccacctacagcgacaaccagcccggcgtgctgatccaggtgtacgagggcgagagagccatgaccaaggacaacaacctgctgggcagattcgagctgagcggcatcccccccgcccccagaggcgtgccccagatcgaggtgaccttcgacatcgacgccaacggcatcctgaacgtgaccgccaccgacaagagcaccggcaaggccaacaagatcaccatcaccaacgacaagggcagactgagcaaggaggagatcgagagaatggtgcaggaggccgagaagtacaaggccgaggacgaggtgcagagagagagagtgagcgccaagaacgccctggagagctacgccttcaacatgaagagcgccgtggaggacgagggcctgaagggcaagatcagcgaggccgacaagaagaaggtgctggacaagtgccaggaggtgatcagctggctggacgccaacaccctggccgagaaggacgagttcgagcacaagagaaaggagctggagcaggtgtgcaaccccatcatcagcggcctgtaccagggcgccggcggccccggccccggcggcttcggcgcccagggccccaagggcggcagcggcagcggccccaccatcgaggaggtggactag

SEQ ID NO: 155212 - DNA, 1872 bp, Artificial Sequence
  derived and/or modified sequence
atggccaaggccgccgccatcggcatcgacctgggcaccacctacagctgcgtgggcgtgttccagcacggcaaggtggagatcatcgccaacgaccagggcaacagaaccacccccagctacgtggccttcaccgacaccgagagactgatcggcgacgccgccaagaaccaggtggccctgaaccccgtggtgcagagcgacatgaagcactggcccttccaggtgatcaacgacggcgacaagcccaaggtgcaggtgagctacaagggcgagaccaaggccttctaccccgaggagatcagcagcatggtgctgaccaagatgaaggagatcgccgaggcctacctgggctaccccgtgaccaacgccgtgatcaccgtgcccgcctacttcaacgacagccagagacaggccaccaaggacgccggcgtgatcgccggcctgaacgtgctgagaatcatcaacgagcccaccgccgccgccatcgcctacggcctggacagaaccggcaagggcgagagaaacgtgctgatcttcgacctgggcggcggcaccttcgacgtgagcatcctgaccatcgacgacggcatcttcgaggtgaaggccaccgccggcgacacccacctgggcggcgaggacttcgacaacagactggtgaaccacttcgtggaggagttcaagagaaagcacaagaaggacatcagccagaacaagagagccgtgagaagactgagaaccgcctgcgagagagccaagagaaccctgagcagcagcacccaggccagcctggagatcgacagcctgttcgagggcatcgacttctacaccagcatcaccagagccagattcgaggagctgtgcagcgacctgttcagaagcaccctggagcccgtggagaaggccctgagagacgccaagctggacaaggcccagatccacgacctggtgctggtgggcggcagcaccagaatccccaaggtgcagaagctgctgcaggacttcttcaacggcagagacctgaacaagagcatcaaccccgacgaggccgtggcctacggcgccgccgtgcaggccgccatcctgatgggcgacaagagcgagaacgtgcaggacctgctgctgctggacgtggcccccctgagcctgggcctggagaccgccggcggcgtgatgaccgccctgatcaagagaaacagcaccatccccaccaagcagacccagatcttcaccacctacagcgacaaccagcccggcgtgctgatccaggtgtacgagggcgagagagccatgaccaaggacaacaacctgctgggcagattcgagctgagcggcatcccccccgcccccagaggcgtgccccagatcgaggtgaccttcgacatcgacgccaacggcatcctgaacgtgaccgccaccgacaagagcaccggcaaggccaacaagatcaccatcaccaacgacaagggcagactgagcaaggaggagatcgagagaatggtgcaggaggccgagaagtacaaggccgaggacgaggtgcagagagagagagtgagcgccaagaacgccctggagagctacgccttcaacatgaagagcgccgtggaggacgagggcctgaagggcaagatcagcgaggccgacaagaagaaggtgctggacaagtgccaggaggtgatcagctggctggacgccaacaccctggccgagaaggacgagttcgagcacaagagaaaggagctggagcaggtgtgcaaccccatcatcagcggcctgtaccagggcgccggcggccccggccccggcggcttcggcgcccagggccccaagggcggcagcggcagcggccccaccatcgaggaggtggactag

SEQ ID NO: 155213 - DNA, 2127 bp, Artificial Sequence
  derived and/or modified sequence
ctgagaagctgctgcgagggccccctgagactgagcagagtgacccccgccgtgcccagactgagcagagccaacctgtgcggctgcagacacagaagagtggagttccccgccttcagaagaaccgagctgctgagcagaatccccagcgccgtgagcagcccccagagccagagcggcgcccacagacagggcaccggcatggccaaggccgccgccatcggcatcgacctgggcaccacctacagctgcgtgggcgtgttccagcacggcaaggtggagatcatcgccaacgaccagggcaacagaaccacccccagctacgtggccttcaccgacaccgagagactgatcggcgacgccgccaagaaccaggtggccctgaacccccagaacaccgtgttcgacgccaagagactgatcggcagaaagttcggcgaccccgtggtgcagagcgacatgaagcactggcccttccaggtgatcaacgacggcgacaagcccaaggtgcaggtgagctacaagggcgagaccaaggccttctaccccgaggagatcagcagcatggtgctgaccaagatgaaggagatcgccgaggcctacctgggctaccccgtgaccaacgccgtgatcaccgtgcccgcctacttcaacgacagccagagacaggccaccaaggacgccggcgtgatcgccggcctgaacgtgctgagaatcatcaacgagcccaccgccgccgccatcgcctacggcctggacagaaccggcaagggcgagagaaacgtgctgatcttcgacctgggcggcggcaccttcgacgtgagcatcctgaccatcgacgacggcatcttcgaggtgaaggccaccgccggcgacacccacctgggcggcgaggacttcgacaacagactggtgaaccacttcgtggaggagttcaagagaaagcacaagaaggacatcagccagaacaagagagccgtgagaagactgagaaccgcctgcgagagagccaagagaaccctgagcagcagcacccaggccagcctggagatcgacagcctgttcgagggcatcgacttctacaccagcatcaccagagccagattcgaggagctgtgcagcgacctgttcagaagcaccctggagcccgtggagaaggccctgagagacgccaagctggacaaggcccagatccacgacctggtgctggtgggcggcagcaccagaatccccaaggtgcagaagctgctgcaggacttcttcaacggcagagacctgaacaagagcatcaaccccgacgaggccgtggcctacggcgccgccgtgcaggccgccatcctgatgggcgacaagagcgagaacgtgcaggacctgctgctgctggacgtggcccccctgagcctgggcctggagaccgccggcggcgtgatgaccgccctgatcaagagaaacagcaccatccccaccaagcagacccagatcttcaccacctacagcgacaaccagcccggcgtgctgatccaggtgtacgagggcgagagagccatgaccaaggacaacaacctgctgggcagattcgagctgagcggcatcccccccgcccccagaggcgtgccccagatcgaggtgaccttcgacatcgacgccaacggcatcctgaacgtgaccgccaccgacaagagcaccggcaaggccaacaagatcaccatcaccaacgacaagggcagactgagcaaggaggagatcgagagaatggtgcaggaggccgagaagtacaaggccgaggacgaggtgcagagagagagagtgagcgccaagaacgccctggagagctacgccttcaacatgaagagcgccgtggaggacgagggcctgaagggcaagatcagcgaggccgacaagaagaaggtgctggacaagtgccaggaggtgatcagctggctggacgccaacaccctggccgagaaggacgagttcgagcacaagagaaaggagctggagcaggtgtgcaaccccatcatcagcggcctgtaccagggcgccggcggccccggccccggcggcttcggcgcccagggccccaagggcggcagcggcagcggccccaccatcgaggaggtggactag

SEQ ID NO: 155214 - DNA, 1875 bp, Artificial Sequence
  derived and/or modified sequence
atggccaaggccgccgccatcggcatcgacctgggcaccacctacagctgcgtgggcgtgttccagcacggcaaggtggagatcatcgccaacgaccagggcaacagaaccacccccagctacgtggccttcaccgacaccgagagactgatcggcgacgccgccaagaaccaggtggccctgaacccccccgtggtgcagagcgacatgaagcactggcccttccaggtgatcaacgacggcgacaagcccaaggtgcaggtgagctacaagggcgagaccaaggccttctaccccgaggagatcagcagcatggtgctgaccaagatgaaggagatcgccgaggcctacctgggctaccccgtgaccaacgccgtgatcaccgtgcccgcctacttcaacgacagccagagacaggccaccaaggacgccggcgtgatcgccggcctgaacgtgctgagaatcatcaacgagcccaccgccgccgccatcgcctacggcctggacagaaccggcaagggcgagagaaacgtgctgatcttcgacctgggcggcggcaccttcgacgtgagcatcctgaccatcgacgacggcatcttcgaggtgaaggccaccgccggcgacacccacctgggcggcgaggacttcgacaacagactggtgaaccacttcgtggaggagttcaagagaaagcacaagaaggacatcagccagaacaagagagccgtgagaagactgagaaccgcctgcgagagagccaagagaaccctgagcagcagcacccaggccagcctggagatcgacagcctgttcgagggcatcgacttctacaccagcatcaccagagccagattcgaggagctgtgcagcgacctgttcagaagcaccctggagcccgtggagaaggccctgagagacgccaagctggacaaggcccagatccacgacctggtgctggtgggcggcagcaccagaatccccaaggtgcagaagctgctgcaggacttcttcaacggcagagacctgaacaagagcatcaaccccgacgaggccgtggcctacggcgccgccgtgcaggccgccatcctgatgggcgacaagagcgagaacgtgcaggacctgctgctgctggacgtggcccccctgagcctgggcctggagaccgccggcggcgtgatgaccgccctgatcaagagaaacagcaccatccccaccaagcagacccagatcttcaccacctacagcgacaaccagcccggcgtgctgatccaggtgtacgagggcgagagagccatgaccaaggacaacaacctgctgggcagattcgagctgagcggcatcccccccgcccccagaggcgtgccccagatcgaggtgaccttcgacatcgacgccaacggcatcctgaacgtgaccgccaccgacaagagcaccggcaaggccaacaagatcaccatcaccaacgacaagggcagactgagcaaggaggagatcgagagaatggtgcaggaggccgagaagtacaaggccgaggacgaggtgcagagagagagagtgagcgccaagaacgccctggagagctacgccttcaacatgaagagcgccgtggaggacgagggcctgaagggcaagatcagcgaggccgacaagaagaaggtgctggacaagtgccaggaggtgatcagctggctggacgccaacaccctggccgagaaggacgagttcgagcacaagagaaaggagctggagcaggtgtgcaaccccatcatcagcggcctgtaccagggcgccggcggccccggccccggcggcttcggcgcccagggccccaagggcggcagcggcagcggccccaccatcgaggaggtggactag

SEQ ID NO: 155215 - DNA, 1857 bp, Artificial Sequence
  derived and/or modified sequence
atggccaaggccgccgccatcggcatcgacctgggcaccacctacagctgcgtgggcgtgttccagcacggcaaggtggagatcatcgccaacgaccagggcaacagaaccacccccagctacgtggccttcaccgacaccgagagactgatcggcgacgccgccaagaaccaggtggtgcagagcgacatgaagcactggcccttccaggtgatcaacgacggcgacaagcccaaggtgcaggtgagctacaagggcgagaccaaggccttctaccccgaggagatcagcagcatggtgctgaccaagatgaaggagatcgccgaggcctacctgggctaccccgtgaccaacgccgtgatcaccgtgcccgcctacttcaacgacagccagagacaggccaccaaggacgccggcgtgatcgccggcctgaacgtgctgagaatcatcaacgagcccaccgccgccgccatcgcctacggcctggacagaaccggcaagggcgagagaaacgtgctgatcttcgacctgggcggcggcaccttcgacgtgagcatcctgaccatcgacgacggcatcttcgaggtgaaggccaccgccggcgacacccacctgggcggcgaggacttcgacaacagactggtgaaccacttcgtggaggagttcaagagaaagcacaagaaggacatcagccagaacaagagagccgtgagaagactgagaaccgcctgcgagagagccaagagaaccctgagcagcagcacccaggccagcctggagatcgacagcctgttcgagggcatcgacttctacaccagcatcaccagagccagattcgaggagctgtgcagcgacctgttcagaagcaccctggagcccgtggagaaggccctgagagacgccaagctggacaaggcccagatccacgacctggtgctggtgggcggcagcaccagaatccccaaggtgcagaagctgctgcaggacttcttcaacggcagagacctgaacaagagcatcaaccccgacgaggccgtggcctacggcgccgccgtgcaggccgccatcctgatgggcgacaagagcgagaacgtgcaggacctgctgctgctggacgtggcccccctgagcctgggcctggagaccgccggcggcgtgatgaccgccctgatcaagagaaacagcaccatccccaccaagcagacccagatcttcaccacctacagcgacaaccagcccggcgtgctgatccaggtgtacgagggcgagagagccatgaccaaggacaacaacctgctgggcagattcgagctgagcggcatcccccccgcccccagaggcgtgccccagatcgaggtgaccttcgacatcgacgccaacggcatcctgaacgtgaccgccaccgacaagagcaccggcaaggccaacaagatcaccatcaccaacgacaagggcagactgagcaaggaggagatcgagagaatggtgcaggaggccgagaagtacaaggccgaggacgaggtgcagagagagagagtgagcgccaagaacgccctggagagctacgccttcaacatgaagagcgccgtggaggacgagggcctgaagggcaagatcagcgaggccgacaagaagaaggtgctggacaagtgccaggaggtgatcagctggctggacgccaacaccctggccgagaaggacgagttcgagcacaagagaaaggagctggagcaggtgtgcaaccccatcatcagcggcctgtaccagggcgccggcggccccggccccggcggcttcggcgcccagggccccaagggcggcagcggcagcggccccaccatcgaggaggtggactag

SEQ ID NO: 155216 - DNA, 2551 bp, Artificial Sequence
  derived and/or modified sequence
ggaaaacggccagcctgaggagctgctgcgagggtccgcttcgtctttcgagagtgactcccgcggtcccaaggctttccagagcgaacctgtgcggctgcaggcaccggcgtgttgagtttccggcgttccgaaggactgagctcttgtcgcggatcccgtccgccgtttccagcccccagtctcagagcggagcccacagagcagggcaccggcatggccaaagccgcggcgatcggcatcgacctgggcaccacctactcctgcgtgggggtgttccaacacggcaaggtggagatcatcgccaacgaccagggcaaccgcaccacccccagctacgtggccttcacggacaccgagcggctcatcggggatgcggccaagaaccaggtggcgctgaacccgcagaacaccgtgtttgacgcgaagcggctgatcggccgcaagttcggcgacccggtggtgcagtcggacatgaagcactggcctttccaggtgatcaacgacggagacaagcccaaggtgcaggtgagctacaagggggagaccaaggcattctaccccgaggagatctcgtccatggtgctgaccaagatgaaggagatcgccgaggcgtacctgggctacccggtgaccaacgcggtgatcaccgtgccggcctacttcaacgactcgcagcgccaggccaccaaggatgcgggtgtgatcgcggggctcaacgtgctgcggatcatcaacgagcccacggccgccgccatcgcctacggcctggacagaacgggcaagggggagcgcaacgtgctcatctttgacctgggcgggggcaccttcgacgtgtccatcctgacgatcgacgacggcatcttcgaggtgaaggccacggccggggacacccacctgggtggggaggactttgacaacaggctggtgaaccacttcgtggaggagttcaagagaaaacacaagaaggacatcagccagaacaagcgagccgtgaggcggctgcgcaccgcctgcgagagggccaagaggaccctgtcgtccagcacccaggccagcctggagatcgactccctgtttgagggcatcgacttctacacgtccatcaccagggcgaggttcgaggagctgtgctccgacctgttccgaagcaccctggagcccgtggagaaggctctgcgcgacgccaagctggacaaggcccagattcacgacctggtcctggtcgggggctccacccgcatccccaaggtgcagaagctgctgcaggacttcttcaacgggcgcgacctgaacaagagcatcaaccccgacgaggctgtggcctacggggcggcggtgcaggcggccatcctgatgggggacaagtccgagaacgtgcaggacctgctgctgctggacgtggctcccctgtcgctggggctggagacggccggaggcgtgatgactgccctgatcaagcgcaactccaccatccccaccaagcagacgcagatcttcaccacctactccgacaaccaacccggggtgctgatccaggtgtacgagggcgagagggccatgacgaaagacaacaatctgttggggcgcttcgagctgagcggcatccctccggcccccaggggcgtgccccagatcgaggtgaccttcgacatcgatgccaacggcatcctgaacgtcacggccacggacaagagcaccggcaaggccaacaagatcaccatcaccaacgacaagggccgcctgagcaaggaggagatcgagcgcatggtgcaggaggcggagaagtacaaagcggaggacgaggtgcagcgcgagagggtgtcagccaagaacgccctggagtcctacgccttcaacatgaagagcgccgtggaggatgaggggctcaagggcaagatcagcgaggcggacaagaagaaggttctggacaagtgtcaagaggtcatctcgtggctggacgccaacaccttggccgagaaggacgagtttgagcacaagaggaaggagctggagcaggtgtgtaaccccatcatcagcggactgtaccagggtgccggtggtcccgggcctggcggcttcggggctcagggtcccaagggagggtctgggtcaggccctaccattgaggaggtggattaggggcctttgttctttagtatgtttgtctttgaggtggactgttgggactcaaggactttgctgctgttttcctatgtcatttctgcttcagctctttgctgcttcacttctttgtaaagttgtaacctgatggtaattagctggcttcattatttttgtagtacaaccgatatgttcattagaattctttgcatttaatgttgatactgtaagggtgtttcgttccctttaaatgaatcaacactgccaccttctgtacgagtttgtttgttttttttttttttttttttttttgcttggcgaaaacactacaaaggctgggaatgtatgtttttataatttgtttatttaaatatgaaaaataaaatgttaaactttaaaaaaaaaaaaaaaaaaaaaaaaaaaaaaa

SEQ ID NO: 155217 - DNA, 2445 bp, Artificial Sequence
  derived and/or modified sequence
ataaaagcccaggggcaagcggtccggataacggctagcctgaggagctgctgcgacagtccactacctttttcgagagtgactcccgttgtcccaaggcttcccagagcgaacctgtgcggctgcaggcaccggcgcgtcgagtttccggcgtccggaaggaccgagctcttctcgcggatccagtgttccgtttccagcccccaatctcagagcggagccgacagagagcagggaaccggcatggccaaagccgcggcgatcggcatcgacctgggcaccacctactcctgcgtgggggtgttccaacacggcaaggtggagatcatcgccaacgaccagggcaaccgcaccacccccagctacgtggccttcacggacaccgagcggctcatcggggatgcggccaagaaccaggtggcgctgaacccgcagaacaccgtgtttgacgcgaagcggctgattggccgcaagttcggcgacccggtggtgcagtcggacatgaagcactggcctttccaggtgatcaacgacggagacaagcccaaggtgcaggtgagctacaagggggagaccaaggcattctaccccgaggagatctcgtccatggtgctgaccaagatgaaggagatcgccgaggcgtacctgggctacccggtgaccaacgcggtgatcaccgtgccggcctacttcaacgactcgcagcgccaggccaccaaggatgcgggtgtgatcgcggggctcaacgtgctgcggatcatcaacgagcccacggccgccgccatcgcctacggcctggacagaacgggcaagggggagcgcaacgtgctcatctttgacctgggcgggggcaccttcgacgtgtccatcctgacgatcgacgacggcatcttcgaggtgaaggccacggccggggacacccacctgggtggggaggactttgacaacaggctggtgaaccacttcgtggaggagttcaagagaaaacacaagaaggacatcagccagaacaagcgagccgtgaggcggctgcgcaccgcctgcgagagggccaagaggaccctgtcgtccagcacccaggccagcctggagatcgactccctgtttgagggcatcgacttctacacgtccatcaccagggcgaggttcgaggagctgtgctccgacctgttccgaagcaccctggagcccgtggagaaggctctgcgcgacgccaagctggacaaggcccagattcacgacctggtcctggtcgggggctccacccgcatccccaaggtgcagaagctgctgcaggacttcttcaacgggcgcgacctgaacaagagcatcaaccccgacgaggctgtggcctacggggcggcggtgcaggcggccatcctgatgggggacaagtccgagaacgtgcaggacctgctgctgctggacgtggctcccctgtcgctggggctggagacggccggaggcgtgatgactgccctgatcaagcgcaactccaccatccccaccaagcagacgcagatcttcaccacctactccgacaaccaacccggggtgctgatccaggtgtacgagggcgagagggccatgacgaaagacaacaatctgttggggcgcttcgagctgagcggcatccctccggcccccaggggcgtgccccagatcgaggtgaccttcgacatcgatgccaacggcatcctgaacgtcacggccacggacaagagcaccggcaaggccaacaagatcaccatcaccaacgacaagggccgcctgagcaaggaggagatcgagcgcatggtgcaggaggcggagaagtacaaagcggaggacgaggtgcagcgcgagagggtgtcagccaagaacgccctggagtcctacgccttcaacatgaagagcgccgtggaggatgaggggctcaagggcaagatcagcgaggcggacaagaagaaggtgctggacaagtgtcaagaggtcatctcgtggctggacgccaacaccttggccgagaaggacgagtttgagcacaagaggaaggagctggagcaggtgtgtaaccccatcatcagcggactgtaccagggtgccggtggtcccgggcctgggggcttcggggctcagggtcccaagggagggtctgggtcaggccccaccattgaggaggtagattaggggcctttccaagattgctgtttttgttttggagcttcaagactttgcatttcctagtatttctgtttgtcagttctcaatttcctgtgtttgcaatgttgaaattttttggtgaagtactgaacttgctttttttccggtttctacatgcagagatgaatttatactgccatcttacgactatttcttctttttaatacacttaactcaggccattttttaagttggttacttcaaagtaaataaactttaaaattcaaaaaaaaaaaaaaaaaa

SEQ ID NO: 155218 - protein, 654 aa, Artificial Sequence
  derived and/or modified sequence
MKLSLVAAMLLLLSAARAEEEDKKEDVGTVVGIDLGTTYSCVGVFKNGRVEIIANDQGNRITPSYVAFTPEGERLIGDAAKNQLTSNPENTVFDAKRLIGRTWNDPSVQQDIKFLPFKVVEKKTKPYIQVDIGGGQTKTFAPEEISAMVLTKMKETAEAYLGKKVTHAVVTVPAYFNDAQRQATKDAGTIAGLNVMRIINEPTAAAIAYGLDKREGEKNILVFDLGGGTFDVSLLTIDNGVFEVVATNGDTHLGGEDFDQRVMEHFIKLYKKKTGKDVRKDNRAVQKLRREVEKAKRALSSQHQARIEIESFYEGEDFSETLTRAKFEELNMDLFRSTMKPVQKVLEDSDLKKSDIDEIVLVGGSTRIPKIQQLVKEFFNGKEPSRGINPDEAVAYGAAVQAGVLSGDQDTGDLVLLDVCPLTLGIETVGGVMTKLIPRNTVVPTKKSQIFSTASDNQPTVTIKVYEGERPLTKDNHLLGTFDLTGIPPAPRGVPQIEVTFEIDVNGILRVTAEDKGTGNKNKITITNDQNRLTPEEIERMVNDAEKFAEEDKKLKERIDTRNELESYAYSLKNQIGDKEKLGGKLSSEDKETMEKAVEEKIEWLESHQDADIEDFKAKKKELEEIVQPIISKLYGSAGPPPTGEEDTAEKDEL

SEQ ID NO: 155219 - protein, 278 aa, Artificial Sequence [sequence omitted]

SEQ ID NO: 155220 - DNA, 1965 bp, Artificial Sequence
  derived and/or modified sequence
atgaagctatctttggtggcggcgatgttgctgctgctatccgcggcacgcgctgaagaagaggacaagaaagaggacgtggggaccgtcgtcggtatcgacctggggaccacttattcctgcgtgggagtctttaaaaacggtcgggttgagatcattgcaaacgatcagggcaacaggatcactccatcatacgttgcctttacacccgaaggggagagactgattggagacgccgcaaagaatcagcttacctcaaacccggaaaataccgtattcgatgctaagcggcttatcggaaggacctggaacgatccaagtgtccagcaagacattaagtttctaccctttaaagttgtcgagaagaagaccaaaccatatattcaggtcgacatcgggggagggcagacaaaaacatttgcgccagaagagatcagtgccatggtcctgaccaaaatgaaagaaacagccgaggcttatttagggaagaaggtgactcacgctgtggtgaccgtcccagcgtatttcaatgatgcgcaacggcaggcgaccaaagacgctgggaccattgccgggctgaacgtgatgcggatcattaacgaacctacagctgctgctatcgcctacggactcgataagagagagggcgagaaaaatattttggtcttcgacctgggaggaggtacttttgatgtctctcttctcaccatagataatggggtgttcgaggtcgtggccaccaatggggacacacatctgggaggagaggacttcgaccaaagagtgatggaacacttcattaagttgtacaagaagaagacgggaaaggacgtgagaaaggacaacagagctgtccaaaaactgcggagagaagtggagaaagcaaaacgcgctttaagctctcaacaccaagcccgaattgaaatcgaaagtttttacgagggagaggatttctccgagacattgactagagcaaaatttgaggaactgaacatggacctcttcaggtctacgatgaagcctgtgcagaaagtgctggaagacagcgacctgaagaagagtgatattgacgaaatcgtactggtcggcggctccacacggatcccgaaaatacagcagctcgtcaaggaattctttaatggtaaagaacccagtagaggcattaacccggatgaagccgtagcctacggagccgcggtccaggccggggtcttgtccggtgatcaggacaccggggatctcgtgctgttggacgtctgccccttgacgctgggtatagagactgtagggggtgttatgaccaaactgatacccaggaacaccgttgtgcccaccaaaaagtcacaaatattctccactgcgtcagataaccagcccacggtaaccattaaagtgtacgagggtgaaaggccactgaccaaagacaatcacctactgggcaccttcgatctgacaggaatcccccccgcaccccggggtgtacctcaaatcgaggtgacattcgagatcgacgtcaacggaatcctgagagttacggcggaggacaaggggaccggaaataaaaacaagatcaccattactaatgatcaaaatcgactcactcccgaagaaatagagaggatggtgaatgacgctgaaaagtttgccgaagaggataaaaaattgaaagagagaatagacactagaaacgaactggaatcctacgcctattccctgaaaaaccagatcggagacaaagagaagcttggcggaaagctctctagcgaggacaaggagaccatggagaaagcagtagaggaaaagatagaatggctggaatcacaccaggacgctgacatcgaggattttaaagcgaaaaagaaagagcttgaagaaatcgtgcagccaattatcagcaagctctacggttccgcgggcccccctccaaccggcgaagaagacacagctgagaaagatgagctttag

SEQ ID NO: 155221 - DNA, 837 bp, Artificial Sequence
  derived and/or modified sequence
atgaaactaagcctggttgccgccatgctcctgctgctgagtgctgctcgagccgaagaagaggataaaaaagaggatgtggggacagtagttgggatcgatttaggcaccacctactcatgcgtgggagtcttcaaaaacgggcgagtggagattatcgccaacgaccagggtaatcgaattactccatcatacgtggcctttacgccagaaggcgagcgtctgatcggggatgcagccaaaaaccagttgacgtctaatcccgagaataccgtatttgacgcaaaacggctaatcggccgaacctggaacgatccctcagtccagcaggacattaaattcctaccctttaaagtcgtggaaaagaaaactaaaccatatatacaggtggacattgggggaggccaaacgaaaacatttgccccggaagaaatctccgctatggtgctaacaaagatgaaggaaactgctgaggcctacctcggtaagaaagtgacgcatgcggttgtgacagtccctgcctactttaacgacgctcagcggcaggctactaaggatgctggcaccatcgcagggttgaacgtcatgcgtatcatcaatgaacccacagcggccgcaatcgcctatggactggataaaagagagggggagaaaaacattctcgtgtttgaccttggcggcgggacattcgacgtgtctctgctaacaattgacaacggtgttttcgaagtcgtggcgaccaacggagatacccacttgggaggagaggacttcgatcaaagggtgatggagcacttcatcaaactgtacaagaaaaaaactttcctgcgaccctag

SEQ ID NO: 155222 - DNA, 3908 bp, Artificial Sequence
  derived and/or modified sequence
acagcacagacagattgacctattggggtgtttcgcgagtgtgagagggaagcgccgcggcctgtatttctagacctgcccttcgcctggttcgtggcgccttgtgaccccgggcccctgccgcctgcaagtcggaaattgcgctgtgctcctgtgctacggcctgtggctggactgcctgctgctgcccaactggctggcaagatgaagctctccctggtggccgcgatgctgctgctgctcagcgcggcgcgggccgaggaggaggacaagaaggaggacgtgggcacggtggtcggcatcgacctggggaccacctactcctgcgtcggcgtgttcaagaacggccgcgtggagatcatcgccaacgatcagggcaaccgcatcacgccgtcctatgtcgccttcactcctgaaggggaacgtctgattggcgatgccgccaagaaccagctcacctccaaccccgagaacacggtctttgacgccaagcggctcatcggccgcacgtggaatgacccgtctgtgcagcaggacatcaagttcttgccgttcaaggtggttgaaaagaaaactaaaccatacattcaagttgatattggaggtgggcaaacaaagacatttgctcctgaagaaatttctgccatggttctcactaaaatgaaagaaaccgctgaggcttatttgggaaagaaggttacccatgcagttgttactgtaccagcctattttaatgatgcccaacgccaagcaaccaaagacgctggaactattgctggcctaaatgttatgaggatcatcaacgagcctacggcagctgctattgcttatggcctggataagagggagggggagaagaacatcctggtgtttgacctgggtggcggaaccttcgatgtgtctcttctcaccattgacaatggtgtcttcgaagttgtggccactaatggagatactcatctgggtggagaagactttgaccagcgtgtcatggaacacttcatcaaactgtacaaaaagaagacgggcaaagatgtcaggaaagacaatagagctgtgcagaaactccggcgcgaggtagaaaaggccaaacgggccctgtcttctcagcatcaagcaagaattgaaattgagtccttctatgaaggagaagacttttctgagaccctgactcgggccaaatttgaagagctcaacatggatctgttccggtctactatgaagcccgtccagaaagtgttggaagattctgatttgaagaagtctgatattgatgaaattgttcttgttggtggctcgactcgaattccaaagattcagcaactggttaaagagttcttcaatggcaaggaaccatcccgtggcataaacccagatgaagctgtagcgtatggtgctgctgtccaggctggtgtgctctctggtgatcaagatacaggtgacctggtactgcttgatgtatgtccccttacacttggtattgaaactgtgggaggtgtcatgaccaaactgattccaaggaacacagtggtgcctaccaagaagtctcagatcttttctacagcttctgataatcaaccaactgttacaatcaaggtctatgaaggtgaaagacccctgacaaaagacaatcatcttctgggtacatttgatctgactggaattcctcctgctcctcgtggggtcccacagattgaagtcacctttgagatagatgtgaatggtattcttcgagtgacagctgaagacaagggtacagggaacaaaaataagatcacaatcaccaatgaccagaatcgcctgacacctgaagaaatcgaaaggatggttaatgatgctgagaagtttgctgaggaagacaaaaagctcaaggagcgcattgatactagaaatgagttggaaagctatgcctattctctaaagaatcagattggagataaagaaaagctgggaggtaaactttcctctgaagataaggagaccatggaaaaagctgtagaagaaaagattgaatggctggaaagccaccaagatgctgacattgaagacttcaaagctaagaagaaggaactggaagaaattgttcaaccaattatcagcaaactctatggaagtgcaggccctcccccaactggtgaagaggatacagcagaaaaagatgagttgtagacactgatctgctagtgctgtaatattgtaaatactggactcaggaacttttgttaggaaaaaattgaaagaacttaagtctcgaatgtaattggaatcttcacctcagagtggagttgaaactgctatagcctaagcggctgtttactgcttttcattagcagttgctcacatgtctttgggtgggggggagaagaagaattggccatcttaaaaagcgggtaaaaaacctgggttagggtgtgtgttcaccttcaaaatgttctatttaacaactgggtcatgtgcatctggtgtaggaagttttttctaccataagtgacaccaataaatgtttgttatttacactggtctaatgtttgtgagaagcttctaattagatcaattacttattttaggaaatttaagactagatactcgtgtgtggggtgaggggagggagtatttggtatgttgggataaggaaacacttctatttaatgcttccagggatttttttttttttttttaaccctcctgggcccaagtgatccttccacctcagtctcccagctaattgagaccacaggcttgttaccaccatgctcggcttttgcattaatctaagaaaaggggagagaagttaatccacatctttactcaggcaaggggcatttcacagtgcccaagagtggggttttcttgaacatacttggtttcctatttccccttatctttctaaaactgcctttctggtggctttttttaaaattattactaatgatgcttttatagctgcttggattctctgagaaatgatggggagtgagtgatcactggtattaactttatacacttggatttcatttgtaactttaggatgtaaaggtatattgtgaaccctagctgtgtcagaatctccatccctgaaatttctcattagtggtactggggtgggatcttggatggtgacattgaaactacactaaatcccctcactatgaatgggttgttaaaggcaatggtttgtgtcaaaactggtttaggattacttagattgtgttcctgaagaaaagagtccaggtaaatggtatgatcaataaaggacaggctggtgctaacataaaatccaatattgtaatcctagcactttgggaggccaaggcgggtggatcacaaggtcaagagatagagaccatctttgccaacatggtgaaactccatctctactgaaaatacaaaaattagctgggcgtggtagtgcaagctgaaggctgaggcaggagaatcactcgaacccgggaggcagaggttgcagtgagccgagatcacaccactgtactccagcccggcactccagcctggcgacaagagtgagactccacctcaaaaaaaaaaaaaagaatccaatactgcccaaggataggtattttatagatgggcaactggctgaaaggttaattctctagggctagtagaactggatcccaacaccaaactcttaattagacctaggcctcagctgcactgcccgaaaagcatttgggcagaccctgagcagaatactggtctcaggccaagcccaatacagccattaaagatgacctacagtgctgtgtaccctggggcaatagggttaaatggtagttagcaactagggctagtcttcccttacctcaaaggctctcactaccgtggaccacctagtctgtaactctttctgaggagctgttactgaatattaaaaagatagacttcaa

SEQ ID NO: 155223 - DNA, 1141 bp, Artificial Sequence
  derived and/or modified sequence
gacgccggccaagacagcacagacagattgacctattggggtgtttcgcgagtgtgagagggaagcgccgcggcctgtatttctagacctgcccttcgcctggttcgtggcgccttgtgaccccgggcccctgccgcctgcaagtcggaaattgcgctgtgctcctgtgctacggcctgtggctggactgcctgctgctgcccaactggctggcaagatgaagctctccctggtggccgcgatgctgctgctgctcagcgcggcgcgggccgaggaggaggacaagaaggaggacgtgggcacggtggtcggcatcgacctggggaccacctactcctgcgtcggcgtgttcaagaacggccgcgtggagatcatcgccaacgatcagggcaaccgcatcacgccgtcctatgtcgccttcactcctgaaggggaacgtctgattggcgatgccgccaagaaccagctcacctccaaccccgagaacacggtctttgacgccaagcggctcatcggccgcacgtggaatgacccgtctgtgcagcaggacatcaagttcttgccgttcaaggtggttgaaaagaaaactaaaccatacattcaagttgatattggaggtgggcaaacaaagacatttgctcctgaagaaatttctgccatggttctcactaaaatgaaagaaaccgctgaggcttatttgggaaagaaggttacccatgcagttgttactgtaccagcctattttaatgatgcccaacgccaagcaaccaaagacgctggaactattgctggcctaaatgttatgaggatcatcaacgagcctacggcagctgctattgcttatggcctggataagagggagggggagaagaacatcctggtgtttgacctgggtggcggaaccttcgatgtgtctcttctcaccattgacaatggtgtcttcgaagttgtggccactaatggagatactcatctgggtggagaagactttgaccagcgtgtcatggaacacttcatcaaactgtacaaaaagaagacttttctgagaccctgactcgggccaaatttgaagagctcaacatggatctgttccggtctactatgaagcccgtccagaaagtgttggaagattctgatttga

SEQ ID NO: 155224 - DNA, 1965 bp, Artificial Sequence
  derived and/or modified sequence
atgaagctgagcctggtggccgccatgctgctgctgctgtctgctgcccgggcagaggaggaggacaagaaggaggatgtgggcaccgtggtgggcatcgacctgggcaccacctacagctgtgtgggcgtcttcaagaatggccgggtggagatcatcgccaatgaccagggcaaccgcatcacccccagctatgtggccttcaccccagagggggagcggctgattggagatgctgccaagaaccagctgaccagcaacccagaaaatacagtgtttgatgccaagaggctgattggaagaacctggaatgaccccagcgtgcagcaggacatcaagttcctgcccttcaaggtggtggagaagaagaccaagccctacatccaggtggacatcggcggcggccagaccaagacctttgcccctgaggagatcagcgccatggtgctgaccaagatgaaggagacagctgaggcctacctgggcaagaaggtgacccatgctgtggtgacagtgcctgcctacttcaatgatgcccagaggcaggccaccaaggatgctggcaccatcgccggcctgaatgtgatgaggatcatcaatgagcccacagctgctgccatcgcctacggcctggacaagcgggagggggagaagaacatcctggtgtttgacctgggcggcggcacctttgatgtgtccctgctgaccatcgacaatggagtgtttgaggtggtggccaccaacggggacacccacctgggcggggaggactttgaccagagggtgatggagcacttcatcaagctgtacaagaagaagacaggcaaggatgtgaggaaggacaacagagctgtgcagaagctgcggcgggaggtggagaaggccaagagggccctgagcagccagcaccaggccagaattgaaattgagagcttctatgaaggagaggacttcagcgagaccctgacccgggccaagtttgaggagctgaacatggacctcttccgcagcaccatgaagcctgtgcagaaggtgctggaggacagcgacctgaagaagagtgacattgatgaaattgtgctggtgggcggcagcacccgcatccccaagatccagcagctggtgaaggagttcttcaacgggaaggagcccagccggggcatcaacccagatgaagctgtggcctacggggctgctgtgcaggccggcgtgctgagcggggaccaggacacaggagacctggtgctgctggatgtgtgccccctgaccctgggcatcgagaccgtgggcggcgtgatgaccaagctgatccccaggaacacagtggtgcccaccaagaagagccagatcttcagcacagccagtgacaaccagcccaccgtgaccatcaaggtgtatgaaggagagcggcccctgaccaaggacaaccacctgctgggcacctttgacctgaccggcatccccccagccccccggggcgtgccccagatcgaggtgacctttgaaattgatgtgaatggcatcctgcgggtgacagctgaggacaagggcaccggcaacaagaacaagatcaccatcaccaatgaccagaaccggctgaccccagaggagattgaaagaatggtgaatgatgctgagaagtttgctgaggaggacaagaagctgaaggagagaattgacaccagaaatgagctggagagctatgcctacagcctgaagaaccagatcggggacaaggagaagctgggcggcaagctgagcagcgaggacaaggagaccatggagaaggctgtggaggagaagattgagtggctggagagccaccaggatgctgacatcgaggacttcaaggccaagaagaaggagctggaggagatcgtgcagcccatcatcagcaagctgtatggcagcgctggccccccacccactggagaggaggacacagctgagaaggatgagctgtag

SEQ ID NO: 155225 - DNA, 837 bp, Artificial Sequence
  derived and/or modified sequence
atgaagctgagcctggtggccgccatgctgctgctgctgtctgctgcccgggcagaggaggaggacaagaaggaggatgtgggcaccgtggtgggcatcgacctgggcaccacctacagctgtgtgggcgtcttcaagaatggccgggtggagatcatcgccaatgaccagggcaaccgcatcacccccagctatgtggccttcaccccagagggggagcggctgattggagatgctgccaagaaccagctgaccagcaacccagaaaatacagtgtttgatgccaagaggctgattggaagaacctggaatgaccccagcgtgcagcaggacatcaagttcctgcccttcaaggtggtggagaagaagaccaagccctacatccaggtggacatcggcggcggccagaccaagacctttgcccctgaggagatcagcgccatggtgctgaccaagatgaaggagacagctgaggcctacctgggcaagaaggtgacccatgctgtggtgacagtgcctgcctacttcaatgatgcccagaggcaggccaccaaggatgctggcaccatcgccggcctgaatgtgatgaggatcatcaatgagcccacagctgctgccatcgcctacggcctggacaagcgggagggggagaagaacatcctggtgtttgacctgggcggcggcacctttgatgtgtccctgctgaccatcgacaatggagtgtttgaggtggtggccaccaacggggacacccacctgggcggggaggactttgaccagagggtgatggagcacttcatcaagctgtacaagaagaagaccttcctgcggccctag

SEQ ID NO: 155226 - DNA, 1965 bp, Artificial Sequence
  derived and/or modified sequence
atgaagctgagcctggtggccgccatgctgctgctgctgagcgccgccagagccgaagaagaggacaaaaaggaagatgtcggtacagttgttggcattgacctcgggactacatattcgtgtgtgggcgtgttcaaaaacggacgcgtggagattatcgccaatgatcagggaaatcggattaccccctcctacgtagcctttacccctgaaggtgagcggctgatcggagacgcagccaaaaaccagctgacatccaaccccgagaacacggtttttgacgccaagcgtcttattggccgaacatggaatgacccttctgtccagcaggatatcaaattcttgccttttaaggtagtagaaaagaagaccaaaccttatatacaggtggatatagggggaggccagacgaagaccttcgctcccgaggaaatcagcgcgatggttttgacgaagatgaaggaaacggcggaggcttatttgggaaagaaggtcacccatgccgtggtcactgtaccagcttactttaatgacgcgcagcggcaggctactaaagacgcaggaacaatcgctggtctaaatgtaatgcgcatcataaacgaaccgaccgccgccgccatcgcttatggactggataaacgtgaaggcgagaagaacattctcgtttttgatctcggcggtggaacattcgatgtgagtctgttgacaattgacaatggagtatttgaggttgttgccaccaacggggatacccatctagggggcgaggattttgaccagcgggtgatggagcactttataaagttgtataagaagaaaactggcaaggatgttcgtaaagacaatcgtgctgtgcagaaactgcgacgcgaagtcgaaaaagccaaacgggctctgagctctcagcatcaggctcgaatcgagatagaaagcttttacgaaggcgaagacttctctgaaactctgacgcgagcaaaatttgaagagcttaatatggacctgtttcggagtacaatgaaacctgtgcagaaggtcctggaggactccgacctgaaaaaaagtgacatcgacgagatagttctggtgggcggttctacccgcatccctaaaattcagcaactcgtcaaggaatttttcaacggaaaggagccgtctcgtggcatcaaccccgatgaagctgtcgcttatggggcagctgttcaagccggggtcctttcgggtgaccaggacaccggcgatttggtgctcctggacgtgtgcccactcaccttaggcatcgagactgttggaggggtgatgaccaagctgatcccccggaacactgttgtgccaactaagaagtcccagatcttttcgactgcatctgataaccagcctaccgttacaatcaaagtttatgagggggagaggccactgactaaagataatcacctactgggcacattcgatctcactggaatcccccccgccccccgtggagtcccccagatagaggtgaccttcgaaattgatgtaaacggcatcctccgggttacagctgaggataagggaactggtaataagaacaaaatcactattacaaacgatcagaaccgattaacgcctgaggagattgagagaatggtgaacgacgctgagaaatttgctgaagaagacaaaaagctcaaggagcgcatcgatacccgaaatgaacttgagtcatacgcctacagtctgaagaatcagatcggcgacaaggaaaaactcggaggaaagctgagttctgaggacaaggaaacgatggaaaaagccgtggaagagaaaatcgagtggttggagagtcatcaggacgcagatatcgaggattttaaggcgaagaagaaagagctcgaggagattgttcagcccatcataagtaaattgtatggtagtgccggtcccccccccacgggcgaggaagacacagcggagaaagacgaactgtag

SEQ ID NO: 155227 - DNA, 837 bp, Artificial Sequence
  derived and/or modified sequence
atgaagctgagcctggtggccgccatgctgctgctgctgagcgccgctagagccgaagaggaagacaaaaaggaggacgtaggcacggtggtgggaatagatctcggcacaacatattcttgcgttggcgtttttaaaaatggccgggtcgaaattatcgccaatgaccagggcaaccgcattactccgtcgtacgtggcttttactcccgagggcgagcgtttaatcggagacgcggctaagaatcagttgacttcaaatccagagaatactgttttcgacgcgaagagactgattggacggacctggaatgacccaagcgtccagcaagatattaagtttctgccttttaaggttgtagaaaagaaaactaaaccgtatatacaagtcgatattggcggggggcagacaaaaacgtttgctcctgaagaaatctctgccatggtgctgacgaaaatgaaggagactgctgaagcctatctgggcaagaaagttactcatgcagttgttacggtgccggcttatttcaatgatgctcagagacaggcgacaaaggatgccggcactatcgccggcttgaacgtgatgcgtattattaatgagccaactgcagcagcaatagcttatggacttgataaaagagaaggtgaaaaaaacattttggtctttgatttgggaggtggaacctttgatgtgtctcttctgactattgataatggcgttttcgaggtggtcgccacaaatggcgacactcaccttggcggcgaagactttgaccagagagtgatggaacatttcattaagctgtataagaagaagaccttcctccgtccatag

SEQ ID NO: 155228 - DNA, 1965 bp, Artificial Sequence
  derived and/or modified sequence
atgaagctgtccctggtggcagccatgttgctgctgctgtctgccgcaagggccgaagaggaagacaagaaggaggacgtcggcacggtcgttggtatcgatctcgggaccacttatagttgtgtgggggtattcaaaaatggtagagtggagattattgctaatgatcagggaaatcggatcaccccctcttatgtagccttcacaccagagggagagcggctgatcggagatgcggctaagaatcagctgacctccaaccccgaaaatacagtgttcgacgctaagcgcctcatcggcagaacatggaacgatccaagcgtgcagcaggatataaagtttctgcccttcaaggtggtagaaaagaagaccaagccctacatccaagtggacatcgggggtggacaaacaaaaactttcgccccagaggagatatccgctatggtgcttaccaagatgaaggagacagcagaggcctacctgggtaagaaagtcacccatgctgtggtcactgtgcccgcttacttcaatgacgctcagcgacaggctactaaggatgccggaactatcgctgggctgaatgttatgagaattattaatgaacctaccgccgcagctattgcctatggcctggataagcgtgagggtgagaagaacatcctagtgttcgatctcggtgggggtacattcgacgtcagtttgctcacgatagataatggcgtcttcgaggtcgtagccactaacggagatacacatctgggaggcgaggactttgaccaacgcgtcatggaacattttattaagctgtataagaagaagactgggaaagacgtgagaaaggataaccgtgcggtgcagaaactccgtagggaagttgaaaaggcaaagagagccctgagctctcagcaccaggctcgcatcgaaatcgagtctttttatgaaggggaagacttttcagaaacccttactagagcgaagttcgaggagctgaacatggacctttttaggtccaccatgaagccggtacagaaggtcctcgaagattctgatcttaaaaagtcagacattgacgaaattgtgctagtggggggatcaacaaggatcccaaagatacagcagctggtcaaggagtttttcaacggtaaggagccctcccgagggatcaaccccgatgaagccgtggcctacggagccgcagtgcaagctggggtgctgagcggcgaccaggatacgggggacctggtgcttctggacgtgtgcccccttacgctgggcatagagactgtcggcggagtaatgaccaagctcattccaaggaacacagtggtccctactaagaagagccagatctttagtacagcaagtgacaaccagccaaccgtaacaattaaggtgtacgaaggtgaacgcccattgactaaagataaccacttgctcggtacgtttgacctgacagggattccacccgctccaaggggagtgccacagatagaggtgacctttgagatagatgtgaatggcatcctcagggtgaccgccgaggacaagggaaccggaaataagaataagattactatcactaacgatcagaaccgcctcacgccagaagagatcgaaagaatggtcaatgatgccgaaaagttcgcagaggaagataaaaagctgaaggagaggatagatacgcggaacgagcttgagtcctatgcttatagcctcaaaaatcagatcggggacaaggaaaaactcggcggaaaactctccagcgaggataaagagacgatggagaaggcagtagaggaaaaaatagagtggctggagagccaccaggatgccgacatagaggatttcaaggcgaagaagaaagagttggaagagatcgtgcagcctataatatcaaagttatacggcagtgcagggcctcctcctactggggaggaggacactgctgagaaggacgaactgtag

SEQ ID NO: 155229 - DNA, 837 bp, Artificial Sequence
  derived and/or modified sequence
atgaaactgagcctggtagctgcaatgctgctgttgctctctgcagctagagcggaagaagaggacaagaaagaggatgtgggcacagtggtaggaatcgatctcggtacaacttattcttgtgtgggcgtgttcaagaacggtagggtggagattatcgccaatgaccaggggaacaggattactccgagttacgtggcattcaccccagagggggaacgcctcatcggggatgctgctaagaatcagctgacgtccaaccctgaaaacactgtgttcgatgcaaagaggctgatcggacgtacttggaatgacccgagcgtgcagcaggacataaaattcctgccgtttaaggtcgtggagaagaaaacaaaaccttacatccaagtggatataggcggaggccagacaaagaccttcgcgccagaagaaatcagcgcaatggtgttgaccaagatgaaagagaccgctgaagcatatctgggaaagaaggtgacgcatgctgtggttaccgtacccgcatattttaatgatgcccagcggcaggcaaccaaggacgccggaactattgcgggactgaatgttatgcggattatcaacgagccaaccgctgcagccatcgcatacggactcgacaagcgcgagggcgaaaagaatattctggtgtttgatctaggcggagggaccttcgatgtgtctctcctcacaatcgataatggggtgtttgaagtagtggctacgaatggtgacacccacctcggaggcgaggacttcgatcagagagtcatggaacacttcatcaagctatacaagaagaagactttccttagaccatag

SEQ ID NO: 155230 - DNA, 1965 bp, Artificial Sequence
  derived and/or modified sequence
atgaagctgagcctggtggccgccatgctgctgctgctgagcgccgccagagccgaggaggaggacaagaaggaggacgtgggcaccgtggtgggcatcgacctgggcaccacctacagctgcgtgggcgtgttcaagaacggcagagtggagatcatcgccaacgaccagggcaacagaatcacccccagctacgtggccttcacccccgagggcgagagactgatcggcgacgccgccaagaaccagctgaccagcaaccccgagaacaccgtgttcgacgccaagagactgatcggcagaacctggaacgaccccagcgtgcagcaggacatcaagttcctgcccttcaaggtggtggagaagaagaccaagccctacatccaggtggacatcggcggcggccagaccaagaccttcgcccccgaggagatcagcgccatggtgctgaccaagatgaaggagaccgccgaggcctacctgggcaagaaggtgacccacgccgtggtgaccgtgcccgcctacttcaacgacgcccagagacaggccaccaaggacgccggcaccatcgccggcctgaacgtgatgagaatcatcaacgagcccaccgccgccgccatcgcctacggcctggacaagagagagggcgagaagaacatcctggtgttcgacctgggcggcggcaccttcgacgtgagcctgctgaccatcgacaacggcgtgttcgaggtggtggccaccaacggcgacacccacctgggcggcgaggacttcgaccagagagtgatggagcacttcatcaagctgtacaagaagaagaccggcaaggacgtgagaaaggacaacagagccgtgcagaagctgagaagagaggtggagaaggccaagagagccctgagcagccagcaccaggccagaatcgagatcgagagcttctacgagggcgaggacttcagcgagaccctgaccagagccaagttcgaggagctgaacatggacctgttcagaagcaccatgaagcccgtgcagaaggtgctggaggacagcgacctgaagaagagcgacatcgacgagatcgtgctggtgggcggcagcaccagaatccccaagatccagcagctggtgaaggagttcttcaacggcaaggagcccagcagaggcatcaaccccgacgaggccgtggcctacggcgccgccgtgcaggccggcgtgctgagcggcgaccaggacaccggcgacctggtgctgctggacgtgtgccccctgaccctgggcatcgagaccgtgggcggcgtgatgaccaagctgatccccagaaacaccgtggtgcccaccaagaagagccagatcttcagcaccgccagcgacaaccagcccaccgtgaccatcaaggtgtacgagggcgagagacccctgaccaaggacaaccacctgctgggcaccttcgacctgaccggcatcccccccgcccccagaggcgtgccccagatcgaggtgaccttcgagatcgacgtgaacggcatcctgagagtgaccgccgaggacaagggcaccggcaacaagaacaagatcaccatcaccaacgaccagaacagactgacccccgaggagatcgagagaatggtgaacgacgccgagaagttcgccgaggaggacaagaagctgaaggagagaatcgacaccagaaacgagctggagagctacgcctacagcctgaagaaccagatcggcgacaaggagaagctgggcggcaagctgagcagcgaggacaaggagaccatggagaaggccgtggaggagaagatcgagtggctggagagccaccaggacgccgacatcgaggacttcaaggccaagaagaaggagctggaggagatcgtgcagcccatcatcagcaagctgtacggcagcgccggccccccccccaccggcgaggaggacaccgccgagaaggacgagctgtag

SEQ ID NO: 155231 - DNA, 837 bp, Artificial Sequence
  derived and/or modified sequence
atgaagctgagcctggtggccgccatgctgctgctgctgagcgccgccagagccgaggaggaggacaagaaggaggacgtgggcaccgtggtgggcatcgacctgggcaccacctacagctgcgtgggcgtgttcaagaacggcagagtggagatcatcgccaacgaccagggcaacagaatcacccccagctacgtggccttcacccccgagggcgagagactgatcggcgacgccgccaagaaccagctgaccagcaaccccgagaacaccgtgttcgacgccaagagactgatcggcagaacctggaacgaccccagcgtgcagcaggacatcaagttcctgcccttcaaggtggtggagaagaagaccaagccctacatccaggtggacatcggcggcggccagaccaagaccttcgcccccgaggagatcagcgccatggtgctgaccaagatgaaggagaccgccgaggcctacctgggcaagaaggtgacccacgccgtggtgaccgtgcccgcctacttcaacgacgcccagagacaggccaccaaggacgccggcaccatcgccggcctgaacgtgatgagaatcatcaacgagcccaccgccgccgccatcgcctacggcctggacaagagagagggcgagaagaacatcctggtgttcgacctgggcggcggcaccttcgacgtgagcctgctgaccatcgacaacggcgtgttcgaggtggtggccaccaacggcgacacccacctgggcggcgaggacttcgaccagagagtgatggagcacttcatcaagctgtacaagaagaagaccttcctgagaccctag

SEQ ID NO: 155232 - protein, 732 aa, Artificial Sequence
  derived and/or modified sequence
MPEETQTQDQPMEEEEVETFAFQAEIAQLMSLIINTFYSNKEIFLRELISNSSDALDKIRYESLTDPSKLDSGKELHINLIPNKQDRTLTIVDTGIGMTKADLINNLGTIAKSGTKAFMEALQAGADISMIGQFGVGFYSAYLVAEKVTVITKHNDDEQYAWESSAGGSFTVRTDTGEPMGRGTKVILHLKEDQTEYLEERRIKEIVKKHSQFIGYPITLFVEKERDKEVSDDEAEEKEDKEEEKEKEEKESEDKPEIEDVGSDEEEEKKDGDKKKKKKIKEKYIDQEELNKTKPIWTRNPDDITNEEYGEFYKSLTNDWEDHLAVKHFSVEGQLEFRALLFVPRRAPFDLFENRKKKNNIKLYVRRVFIMDNCEELIPEYLNFIRGVVDSEDLPLNISREMLQQSKILKVIRKNLVKKCLELFTELAEDKENYKKFYEQFSKNIKLGIHEDSQNRKKLSELLRYYTSASGDEMVSLKDYCTRMKENQKHIYYITGETKDQVANSAFVERLRKHGLEVIYMIEPIDEYCVQQLKEFEGKTLVSVTKEGLELPEDEEEKKKQEEKKTKFENLCKIMKDILEKKVEKVVVSNRLVTSPCCIVTSTYGWTANMERIMKAQALRDNSTMGYMAAKKHLEINPDHSIIETLRQKAEADKNDKSVKDLVILLYETALLSSGFSLEDPQTHANRIYRMIKLGLGIDEDDPTADDTSAAVTEEMPPLEGDDDTSRMEEVD

SEQ ID NO: 155233 - protein, 413 aa, Artificial Sequence
  derived and/or modified sequence
MGRGTKVILHLKEDQTEYLEERRIKEIVKKHSQFIGYPITLFVEKERDKEVSDDEAEEKEDKEEEKEKEEKESEDKPEIEDVGSDEEEEKKDGDKKKKKKIKEKYIDQEELNKTKPIWTRNPDDITNEEYGEFYKSLTNDWEDHLAVKHFSVEGQLEFRALLFVPRRAPFDLFENRKKKNNIKLYVRRVFIMDNCEELIPEYLNFIRGVVDSEDLPLNISREMLQQSKILKVIRKNLVKKCLELFTELAEDKENYKKFYEQFSKNIKLGIHEDSQNRKKLSELLRYYTSASGDEMVSLKDYCTRMKENQKHIYYITGETKDQVANSAFVERLRKHGLEVIYMIEPIDEYCVQQLKEFEGKTLVSVTKEGLELPEDEEEKKKQEEKKTKFENLCKIMKDILEKKVEKVCEYSIS

SEQ ID NO: 155234 - DNA, 1242 bp, Artificial Sequence
  derived and/or modified sequence
atgggcagaggcaccaaggtgatcctgcacctgaaggaggaccagaccgagtacctggaggagagaagaatcaaggagatcgtgaagaagcacagccagttcatcggctaccccatcaccctgttcgtggagaaggagagagacaaggaggtgagcgacgacgaggccgaggagaaggaggacaaggaggaggagaaggagaaggaggagaaggagagcgaggacaagcccgagatcgaggacgtgggcagcgacgaggaggaggagaagaaggacggcgacaagaagaagaagaagaagatcaaggagaagtacatcgaccaggaggagctgaacaagaccaagcccatctggaccagaaaccccgacgacatcaccaacgaggagtacggcgagttctacaagagcctgaccaacgactgggaggaccacctggccgtgaagcacttcagcgtggagggccagctggagttcagagccctgctgttcgtgcccagaagagcccccttcgacctgttcgagaacagaaagaagaagaacaacatcaagctgtacgtgagaagagtgttcatcatggacaactgcgaggagctgatccccgagtacctgaacttcatcagaggcgtggtggacagcgaggacctgcccctgaacatcagcagagagatgctgcagcagagcaagatcctgaaggtgatcagaaagaacctggtgaagaagtgcctggagctgttcaccgagctggccgaggacaaggagaactacaagaagttctacgagcagttcagcaagaacatcaagctgggcatccacgaggacagccagaacagaaagaagctgagcgagctgctgagatactacaccagcgccagcggcgacgagatggtgagcctgaaggactactgcaccagaatgaaggagaaccagaagcacatctactacatcaccggcgagaccaaggaccaggtggccaacagcgccttcgtggagagactgagaaagcacggcctggaggtgatctacatgatcgagcccatcgacgagtactgcgtgcagcagctgaaggagttcgagggcaagaccctggtgagcgtgaccaaggagggcctggagctgcccgaggacgaggaggagaagaagaagcaggaggagaagaagaccaagttcgagaacctgtgcaagatcatgaaggacatcctggagaagaaggtggagaaggtgtgcgagtacagcatcagctag

SEQ ID NO: 155235 - DNA, 1242 bp, Artificial Sequence
  derived and/or modified sequence
atggggcgggggactaaagtgatcctgcacctgaaagaagaccaaactgaatacctggaggagaggcgcatcaaagagatcgtgaaaaagcattcgcagttcattggataccctataaccttgttcgtggagaaagaacgcgacaaggaggtctcagacgatgaggctgaggaaaaggaagacaaggaggaggaaaaagagaaggaggagaaggagagcgaggataagcctgaaattgaagacgtgggatctgatgaggaggaagaaaagaaagacggagataaaaagaaaaagaaaaagatcaaagagaaatacattgaccaggaggaattgaataagaccaaaccgatatggacacgaaaccctgacgacatcacaaatgaggagtatggggagttttataagtcgcttacgaacgactgggaggatcacttggccgtcaagcacttcagcgtagaaggccagctagagtttagggccctcttattcgttcctaggcgagctccgttcgatcttttcgaaaatagaaagaaaaagaataatatcaaactatacgtccgtcgcgttttcattatggataattgcgaagaacttattcctgagtacctaaattttattcggggcgtagtagatagtgaagaccttcctctgaacatctctcgagagatgctccagcagagcaagatcctgaaagtgatcagaaaaaatcttgtgaagaaatgcctagagttgtttactgaactggccgaggacaaggagaactataagaaattttatgagcagttcagtaaaaacataaaactcgggatacatgaggacagccagaatcgaaagaaactttcagaactgcttaggtattatacaagtgcatccggcgacgaaatggtctctctgaaggactactgcactcggatgaaggagaatcagaagcatatctactatattacaggggagactaaggatcaggtcgccaacagcgcatttgtggaacggctgagaaagcacggtcttgaggttatctatatgattgagcccattgacgaatactgtgtccagcagcttaaggaattcgagggcaagacattagtatccgtaacaaaggagggcttagaactccccgaggatgaggaagaaaaaaagaagcaggaagagaagaaaactaagttcgagaatctttgcaaaatcatgaaagatattctggagaagaaagttgaaaaagtttgtgagtattctatcagttag

SEQ ID NO: 155236 - DNA, 1710 bp, Artificial Sequence
  derived and/or modified sequence
ggttgagacgttcgcctttcaggcagaaattgcccagttgatgtcattgatcatcaatactttctactcgaacaaagagatctttctgagagagctcatttcaaattcatcagatgtgaacctatgggtcgtggaacaaaagttatcctacacctgaaagaagaccaaactgagtacttggaggaacgaagaataaaggagattgtgaagaaacattctcagtttattggatatcccattactctttttgtggagaaggaacgtgataaagaagtaagcgatgatgaggctgaagaaaaggaagacaaagaagaagaaaaagaaaaagaagagaaagagtcggaagacaaacctgaaattgaagatgttggttctgatgaggaagaagaaaagaaggatggtgacaagaagaagaagaagaagattaaggaaaagtacatcgatcaagaagagctcaacaaaacaaagcccatctggaccagaaatcccgacgatattactaatgaggagtacggagaattctataagagcttgaccaatgactgggaagatcacttggcagtgaagcatttttcagttgaaggacagttggaattcagagcccttctatttgtcccacgacgtgctccttttgatctgtttgaaaacagaaagaaaaagaacaacatcaaattgtatgtacgcagagttttcatcatggataactgtgaggagctaatccctgaatatctgaacttcattagaggggtggtagactcggaggatctccctctaaacatatcccgtgagatgttgcaacaaagcaaaattttgaaagttatcaggaagaatttggtcaaaaaatgcttagaactctttactgaactggcggaagataaagagaactacaagaaattctatgagcagttctctaaaaacataaagcttggaatacacgaagactctcaaaatcggaagaagctttcagagctgttaaggtactacacatctgcctctggtgatgagatggtttctctcaaggactactgcaccagaatgaaggagaaccagaaacatatctattatatcacaggtgagaccaaggaccaggtagctaactcagcctttgtggaacgtcttcggaaacatggcttagaagtgatctatatgattgagcccattgatgagtactgtgtccaacagctgaaggaatttgaggggaagactttagtgtcagtcaccaaagaaggcctggaacttccagaggatgaagaagagaaaaagaagcaggaagagaaaaaaacaaagtttgagaacctctgcaaaatcatgaaagacatattggagaaaaaagttgaaaaggtatgtgaatacagcatttcctgatcattgatacttctaaggtgctttcaagcttagtcatacatagcccattttcgcatgttttcaacttaaaacagaaaactatgttgtgtgtggctgggcgcggtggctcacgcctgcaatcccagcactttgggaggctgaggcagcggatcacaaggtcaggagatcgagaccatcctggctaacacggtgaaactcagtctctactaaaaatagaaaaaaataaaccaggcgtggtggcacggcctgtaatcctagccacttgggaggctgaggcaggagaatcgcctgaacccaggaggcggaggttgcagtgagccaagatcgcaccactgcactccagcc

SEQ ID NO: 155237 - DNA, 1242 bp, Artificial Sequence
  derived and/or modified sequence
atgggccggggcaccaaggtgatcctgcacctgaaggaggaccagacagagtacctggaggagcggcgcatcaaggagatcgtgaagaagcacagccagttcatcggctaccccatcaccctgtttgtggagaaggagcgggacaaggaggtgtctgatgatgaggccgaggagaaggaggacaaggaggaggagaaggagaaggaggagaaggagagcgaggacaagccagaaattgaagatgtgggcagtgatgaggaggaggagaagaaggatggagacaagaagaagaagaagaagatcaaggagaagtacatcgaccaggaggagctgaacaagaccaagcccatctggaccaggaacccagatgacatcaccaatgaggagtatggagagttctacaagagcctgaccaatgactgggaggaccacctggccgtgaagcacttctctgtggagggccagctggagttccgggccctgctgtttgtgccccggcgggccccctttgacctgtttgagaacaggaagaagaagaacaacatcaagctgtatgtgagaagagtcttcatcatggacaactgtgaggagctgatccctgagtacctgaacttcatccggggcgtggtggacagcgaggacctgcccctgaacatcagccgggagatgctgcagcagagcaagatcctgaaggtgatcaggaagaacctggtgaagaagtgcctggagctgttcacagagctggccgaggacaaggagaactacaagaagttctatgagcagttcagcaagaacatcaagctgggcatccacgaggacagccagaacaggaagaagctgtctgagctgctgcgctactacaccagcgccagcggagatgagatggtgtccctgaaggactactgcaccaggatgaaggagaaccagaagcacatctactacatcaccggggagaccaaggaccaggtggccaacagcgcctttgtggagcggctgaggaagcacggcctggaggtgatctacatgattgagcccattgatgagtactgtgtgcagcagctgaaggagtttgagggcaagaccctggtgtctgtgaccaaggagggcctggagctgcctgaagatgaggaggagaagaagaagcaggaggagaagaagaccaagtttgagaacctgtgcaagatcatgaaggacatcctggagaagaaggtggagaaggtgtgtgagtacagcatctcctag

SEQ ID NO: 155238 - DNA, 1242 bp, Artificial Sequence
  derived and/or modified sequence
atgggccggggcaccaaggtgatcctgcacctgaaggaggaccagacggaatacttagaggagcgcagaataaaagagatcgtcaagaaacactctcagttcatcggctacccaatcacgttgtttgtggagaaagaaagagacaaggaggtctctgacgacgaggccgaagagaaggaagacaaggaggaagagaaggaaaaggaggaaaaagagtccgaagacaagcctgaaattgaagacgttggttcagacgaggaagaggaaaagaaggacggcgacaagaaaaaaaagaaaaaaataaaggagaaatatattgaccaagaggaactgaacaaaacaaagcccatctggaccagaaatcccgatgacataactaatgaagaatatggcgagttttataagtccctaacaaacgattgggaggatcacttagcagtgaagcactttagtgtggagggacagctcgagttcagggctctgctgttcgtcccgagacgggctccatttgatctgtttgaaaatcgcaagaagaagaataacataaagctgtatgttcggagagtgttcatcatggacaattgcgaggaactgattcccgagtacctgaattttatccgcggagttgtggatagcgaagacctccctctgaatatttctagagagatgctgcagcagtctaagatcttgaaggtcatacgcaagaacctcgttaaaaagtgtcttgagctgtttaccgaactggccgaggataaagagaattataagaagttttacgagcaattcagtaagaatatcaaactgggtatccacgaagactctcaaaataggaagaaactatccgagctgctgcgatactatacgtctgcgtcgggtgacgagatggttagcctgaaggattattgcactaggatgaaagaaaaccaaaaacacatttactacatcacaggagagaccaaggatcaggtggcaaattctgcatttgtggaacggttgaggaaacacggccttgaggtgatttacatgattgaacccattgacgagtactgcgtacaacagctgaaggagtttgagggaaaaacgttggtctcagtaaccaaagaaggactcgaattaccggaagatgaggaggagaaaaaaaagcaggaggagaagaagaccaagttcgaaaatctgtgcaagatcatgaaagacattctggaaaaaaaagtggaaaaggtatgcgagtactctatttcgtag

SEQ ID NO: 155239 - DNA, 1242 bp, Artificial Sequence
  derived and/or modified sequence
atgggacggggaaccaaagtaattctacacctgaaagaagaccaaaccgaatacctggaggaacgacggatcaaagagatcgtgaagaaacactctcagttcatcggctatcccataacgcttttcgtggagaaagaacgggataaggaagtgagcgatgacgaagcagaggaaaaggaggacaaggaggaagaaaaagagaaagaagaaaaggagagcgaagataaaccagaaatcgaggatgtcggtagtgatgaggaggaagaaaagaaggatggcgataagaagaaaaagaagaagatcaaagagaaatacattgatcaggaggagctgaataagaccaaaccaatatggacccggaaccctgacgacattaccaacgaggagtacggcgagttttataaatcactcacgaacgactgggaggatcatctcgccgtgaagcacttctccgtcgaaggtcagctagagtttcgggcactgctattcgtgcctaggcgagctcccttcgacctttttgaaaaccggaagaagaaaaataatataaaattatacgttcgcagggttttcattatggataattgtgaggagttgattcctgagtatctgaacttcattagaggagtcgtcgactctgaggatctccccctaaatatttcgcgagagatgctccagcagtccaagatccttaaggtgattagaaaaaaccttgtgaagaaatgcttagagctgttcacagaactggccgaggacaaggagaattataagaagttttatgaacaattctcaaagaatataaagctcggcatccacgaggactctcaaaaccgcaagaaactgtccgagttactgagatactatacgagtgcttcaggtgatgaaatggtcagcttaaaggattattgcacccgaatgaaggagaatcagaagcatatatattatataactggcgagaccaaggaccaagtcgctaacagcgcattcgttgaacggctgcgaaagcatggccttgaagtaatttacatgatcgagcctatcgacgaatactgcgtgcagcagctcaaggagtttgaggggaagaccctggtgtccgtgacaaaagaaggtctggagcttccagaggatgaagaggaaaagaagaagcaggaagagaaaaagacaaagtttgagaacctgtgcaagatcatgaaggacatcctggaaaagaaagtggagaaggtatgcgagtactccattagctag

SEQ ID NO: 155240 - protein, 500 aa, Artificial Sequence
  derived and/or modified sequence
MDHTEGSPAEEPPAHAPSPGKFGERPPPKRLTREAMRNYLKERGDQTVLILHAKVAQKSYGNEKRFFCPPPCVYLMGSGWKKKKEQMERDGCSEQESQPCAFIGIGNSDQEMQQLNLEGKNYCTAKTLYISDSDKRKHFMLSVKMFYGNSDDIGVFLSKRIKVISKPSKKKQSLKNADLCIASGTKVALFNRLRSQTVSTRYLHVEGGNFHASSQQWGAFFIHLLDDDESEGEEFTVRDGYIHYGQTVKLVCSVTGMALPRLIIRKVDKQTALLDADDPVSQLHKCAFYLKDTERMYLCLSQERIIQFQATPCPKEPNKEMINDGASWTIISTDKAEYTFYEGMGPVLAPVTPVPVVESLQLNGGGDVAMLELTGQNFTPNLRVWFGDVEAETMYRCGESMLCVVPDISAFREGWRWVRQPVQVPVTLVRNDGIIYSTSLTFTYTPEPGPRPHCSAAGAILRANSSQVPPNESNTNSEGSYTNASTNSTSVTSSTATVVS

SEQ ID NO: 155241 - protein, 143 aa, Artificial Sequence
  derived and/or modified sequence
MRNYLKERGDQTVLILHAKVAQKSYGNEKRFFCPPPCVYLMGSGWKKKKEQMERDGCSEQESQPCAFIGIGNSDQEMQQLNLEGKNYCTAKTLYISDSDKRKHFMLSVKMFYGNSDDIGVFLSKRIKVISKPSKKKQSLKNAD

SEQ ID NO: 155242 - protein, 157 aa, Artificial Sequence
  derived and/or modified sequence
MRNYLKERGDQTVLILHAKVAQKSYGNEKRFFCPPPCVYLMGSGWKKKKEQMERDGCSEQESQPCAFIGIGNSDQEMQQLNLEGKNYCTAKTLYISDSDKRKHFMLSVKMFYGNSDDIGVFLSKRIKVISKPSKKKQSLKNADLCIASGTKVALFNR

SEQ ID NO: 155243 - protein, 178 aa, Artificial Sequence
  derived and/or modified sequence
MDHTEGSPAEEPPAHAPSPGKFGERPPPKRLTREAMRNYLKERGDQTVLILHAKVAQKSYGNEKRFFCPPPCVYLMGSGWKKKKEQMERDGCSEQESQPCAFIGIGNSDQEMQQLNLEGKNYCTAKTLYISDSDKRKHFMLSVKMFYGNSDDIGVFLSKRIKVISKPSKKKQSLKNAD

SEQ ID NO: 155244 - protein, 189 aa, Artificial Sequence
  derived and/or modified sequence
MRNYLKERGDQTVLILHAKVAQKSYGNEKRFFCPPPCVYLMGSGWKKKKEQMERDGCSEQESQPCAFIGIGNSDQEMQQLNLEGKNYCTAKTLYISDSDKRKHFMLSVKMFYGNSDDIGVFLSKRIKVISKPSKKKQSLKNADLCIASGTKVALFNRLRSQTVSTRYLHVEGGNFHASSQQWGAFFIHL

SEQ ID NO: 155245 - DNA, 1503 bp, Artificial Sequence
  derived and/or modified sequence
atggatcacacagagggttccccggccgaagagcctcccgcgcacgcaccctctcctggaaagtttggggagcgccctcctcctaaaagactcacccgtgaagccatgcgaaactacctcaaggaacgaggagatcagaccgtactgatcctgcatgccaaagtcgcccagaagtcctatggaaatgagaagaggtttttctgcccgccgccctgtgtatacctgatgggaagcggttggaagaagaagaaagaacaaatggaacgggacgggtgctcagaacaggaaagccagccgtgcgcctttattgggataggaaacagtgatcaggaaatgcagcagctgaatttggaaggaaagaactattgtaccgctaaaactctgtacatatccgattctgataagaggaaacactttatgctgagcgttaagatgttctacggaaatagtgacgacataggagtgttcttgtccaaacggattaaggtgatctcaaagccctcgaagaaaaaacagtccctgaagaatgccgacctgtgtatcgcatctggtactaaggtggctctcttcaatcgcctgagatctcagacagtgtcaactaggtatctgcacgttgaaggtggcaacttccacgcctcatcacagcaatggggtgcatttttcatccatctcctggatgatgatgagtcagagggcgaggagtttactgttagagatggctatattcactacggccagacagtgaaactcgtttgctccgtcacaggaatggcccttccacggctcatcatccggaaggtggataaacagaccgccctgctggatgcagacgacccagtgtctcaattgcacaagtgcgccttctatctcaaggatactgagcgtatgtatctttgtctttcccaggaaagaatcatacagttccaggccactccctgtccaaaggagccaaataaggaaatgatcaacgacggtgcttcgtggacaatcattagtaccgacaaagccgagtataccttttacgaggggatgggaccagtgttggctcctgtgacgccagttccagtggtggaatccttgcagctcaatggtggcggcgacgtggccatgttagaactgacagggcagaacttcactccgaatctaagagtttggttcggcgacgtggaagctgaaacaatgtacaggtgtggggagtccatgctgtgtgtggtgcccgacatatcagcattcagagaggggtggcgctgggtacgacagccagtgcaggttccagtcactcttgttaggaacgacgggattatttatagtacttctctcactttcacctacacccctgagccagggccccgtccccactgtagcgccgcaggcgcaatcctgagagccaactccagccaggtcccccccaacgagtccaacacaaatagcgaggggtcctacacaaacgcctccacaaactcaacgagcgtaaccagcagcactgccactgtggtctcctag

SEQ ID NO: 155246 - DNA, 1503 bp, Artificial Sequence
  derived and/or modified sequence
atggatcacactgaaggatcacccgcagaagagcctcccgctcatgccccctcccccggaaaattcggagagcggccccccccaaagagattgactagggaggccatgcgcaattatttaaaagagagaggagaccagaccgtgttaatactccacgctaaggtcgcccaaaagtcctacggtaacgagaaaagattcttttgtcctccaccatgcgtctacttgatgggttctggttggaaaaaaaagaaggagcaaatggagagagacgggtgcagtgagcaagaatcccagccttgtgcttttatcggcataggcaacagcgatcaagagatgcagcagctgaatctagaaggtaagaactactgtactgctaagaccttatacatatccgacagcgataaaaggaaacactttatgttgtctgtgaagatgttctacggaaattccgatgatattggtgtgttcctcagcaagcggataaaagtgatctctaaacctagcaaaaagaaacagtccttgaagaatgctgacctgtgtatcgcctccgggaccaaagtagcgctgttcaataggctacggagccagaccgtgagcacccgctatctgcacgtggaaggtggaaacttccatgcatcctcacagcaatggggcgctttttttattcacctgttggatgatgacgagtcagagggcgaagaattcacggtaagggatggatacattcattacggccagacggtcaaactcgtttgctctgtaacaggtatggccctgccacgcctcattatacgaaaagtggacaaacagactgctctgctcgacgccgacgatcccgtctcacagctgcataaatgtgccttctacctcaaagatactgagcgcatgtacctctgcttgtcacaggagcgtattatacagtttcaagctacaccatgcccgaaagaaccaaacaaggagatgattaacgatggcgcctcctggacgattattagtaccgacaaggcagaatacacattctatgaaggcatgggaccggttctggctcctgtgacaccagttcccgtcgtggagagcctccagctcaacggtgggggcgatgtggccatgctcgaattgaccgggcagaatttcacacctaacctcagggtgtggttcggcgacgtggaagcggagactatgtataggtgtggggaaagcatgctttgcgtcgtgccagatatctcggcttttcgcgaaggatggcgctgggtgcgccagccagtgcaggtccccgttaccttggtccgcaatgatggaatcatttactccacatccctgacgtttacctatacccccgagccgggtccaaggccacattgcagtgcagccggcgccattctacgcgcgaattcctctcaggtaccgccaaacgagtctaacaccaatagtgagggaagttataccaacgcctcaactaattcaacctccgtgacatcaagcactgctactgtggtctcctag

SEQ ID NO: 155247 - DNA, 537 bp, Artificial Sequence
  derived and/or modified sequence
atggaccatactgaagggagccctgccgaggagccaccggcccacgcaccctcacccggtaaatttggcgaacggccaccgccgaagcgcctcacccgagaagcaatgcgcaattacctgaaggaacgtggggaccagactgttctgattctacacgcaaaagtggcacaaaaaagctacggcaacgagaagagattcttttgcccacccccttgcgtttatttgatgggctccggttggaagaagaagaaggagcagatggaaagggatggatgttcagagcaggagtcacaaccgtgcgctttcatcggtattgggaacagtgatcaggaaatgcagcaactgaacctggagggcaagaactactgtaccgctaaaacactgtatatctcagattctgacaaacggaagcatttcatgctgtccgtgaaaatgttctacggaaacagtgacgacatcggagttttcctgagtaagcgaataaaggttatcagcaaaccaagtaaaaaaaagcagagccttaaaaatgcggattag

SEQ ID NO: 155248 - DNA, 1503 bp, Artificial Sequence
  derived and/or modified sequence
atggaccacacagagggcagccctgctgaggagcccccagcccacgcccccagccctgggaagtttggagagcggcccccacccaagaggctgacccgggaggccatgaggaactacctgaaggagcggggggaccagacagtgctgatcctgcacgccaaggtggcccagaagagctatggaaatgagaagcgcttcttctgccccccaccctgtgtgtacctgatgggcagcggctggaagaagaagaaggagcagatggagagagatggctgcagcgagcaggagagccagccctgtgccttcatcggcatcggcaacagcgaccaggagatgcagcagctgaacctggagggcaagaactactgcacagccaagaccctgtacatcagtgacagcgacaagaggaagcacttcatgctgtctgtgaagatgttttatggcaacagtgatgacattggagtcttcctgagcaagaggatcaaggtgatcagcaagcccagcaagaagaagcagagcctgaagaatgctgacctgtgcatcgccagcggcaccaaggtggccctcttcaaccggctgcggagccagacagtgtccacccgctacctgcacgtggagggcggcaacttccacgccagcagccagcagtggggcgccttcttcatccacctgctggatgatgatgagagcgagggggaggagttcaccgtgagagatggctacatccactacggccagacagtgaagctggtgtgcagcgtgacaggcatggccctgcccaggctcatcatcaggaaggtggacaagcagacagccctgctggatgctgatgatcctgtgtcccagctgcacaagtgtgccttctacctgaaggacacagagaggatgtacctgtgcctgagccaggagcgcatcatccagttccaggccaccccctgccccaaggagcccaacaaggagatgatcaatgatggagcctcctggaccatcatcagcacagacaaggccgagtacaccttctatgagggcatgggccctgtgctggcccctgtgacccctgtgcctgtggtggagagcctgcagctgaatggaggaggagatgtggccatgctggagctgaccggccagaacttcacccccaacctgcgggtgtggtttggagatgtggaggccgagaccatgtaccgctgtggggagagcatgctgtgtgtggtgcctgacatcagcgccttccgggagggctggcgctgggtgcggcagcctgtgcaggtgcctgtgaccctggtgagaaatgatggcatcatctacagcaccagcctgaccttcacctacaccccagagcccggcccccggccccactgcagcgctgctggggccatcctgcgggccaacagcagccaggtgcccccaaatgaaagcaacaccaacagcgagggcagctacaccaatgccagcaccaacagcacctctgtgaccagcagcacagccaccgtggtgtcctag

SEQ ID NO: 155249 - DNA, 537 bp, Artificial Sequence
  derived and/or modified sequence
atggaccacacagagggcagccctgctgaggagcccccagcccacgcccccagccctgggaagtttggagagcggcccccacccaagaggctgacccgggaggccatgaggaactacctgaaggagcggggggaccagacagtgctgatcctgcacgccaaggtggcccagaagagctatggaaatgagaagcgcttcttctgccccccaccctgtgtgtacctgatgggcagcggctggaagaagaagaaggagcagatggagagagatggctgcagcgagcaggagagccagccctgtgccttcatcggcatcggcaacagcgaccaggagatgcagcagctgaacctggagggcaagaactactgcacagccaagaccctgtacatcagtgacagcgacaagaggaagcacttcatgctgtctgtgaagatgttttatggcaacagtgatgacattggagtcttcctgagcaagaggatcaaggtgatcagcaagcccagcaagaagaagcagagcctgaagaatgctgactag

SEQ ID NO: 155250 - DNA, 1503 bp, Artificial Sequence
  derived and/or modified sequence
atggaccacaccgagggcagccccgccgaggagccccccgcccacgctccctcgcctggaaagtttggcgagaggccacctcctaaaaggcttactagagaggcaatgaggaactatctgaaggagagaggcgaccagacggttctgatactccacgctaaggtggcccaaaaatcgtatggaaatgagaaacggttcttttgccccccaccgtgtgtgtatctcatggggtcagggtggaaaaaaaaaaaagagcagatggaaagagacgggtgctctgagcaggagagtcagccttgtgccttcatcggaattggcaactccgaccaggagatgcaacagcttaatctggaagggaaaaattactgtactgccaagacactctatatttccgactctgataagcgaaaacacttcatgttgtcagtgaagatgttctacggaaacagcgacgacatcggcgtgttcttgtcaaaacgaattaaggtcattagcaagcctagtaagaaaaagcaatctctgaagaatgcagacctatgtattgcaagcggaacaaaggtggctctcttcaataggctgagatcacagaccgtgtcaacgcgctatttgcatgtcgaaggcgggaacttccatgccagttcccaacaatggggagcttttttcatacacctgctcgacgatgatgaatccgaaggcgaggagttcaccgtgcgtgacggatacattcattatggacaaaccgtaaaactggtgtgctccgtcacgggcatggctcttcctcgtctcatcatccgcaaggtagataaacagacagcactgctcgacgcagatgaccctgtcagtcaactccacaaatgtgcattttacttaaaagatactgagcggatgtatctgtgtctgtctcaggaaaggattattcagtttcaggcaaccccgtgccctaaagaacccaataaagagatgattaacgacggtgctagctggactattatctccacagacaaagctgagtacaccttctacgagggaatgggaccagttctggctccagtgaccccggtgccagtggtggaatctctgcaacttaacggtggcggagacgtggccatgctggagctgacaggtcagaacttcacccccaatctccgcgtatggtttggtgacgtggaggcagaaaccatgtatcggtgcggagaatcaatgctctgcgtcgttcctgacatctccgcctttcgtgagggctggcggtgggtgcggcagccggtgcaggtgcctgtgacattggtccgaaatgacggcattatatactcaacttcactgaccttcacctacactccagaacccggacccagaccacattgtagtgctgccggcgcaatcctgcgcgccaactctagccaggtgccccccaacgagtcaaataccaattcagagggctcttacacgaatgccagcactaactcaacttcagttacatcctcgacggctacggtggtgtcttag

SEQ ID NO: 155251 - DNA, 1503 bp, Artificial Sequence
  derived and/or modified sequence
atggaccacaccgagggcagccccgccgaggagccccccgcccacgccccatctcctggcaagtttggtgaacgaccaccccccaaacgtctgacccgagaggctatgcggaattatcttaaagagcgtggcgaccagactgtgctcatcctgcacgctaaagtcgcccaaaagtcttacggaaacgagaagaggttcttctgcccccccccatgtgtctacctcatgggcagcgggtggaagaagaaaaaagagcaaatggaaagggatggatgtagcgaacaggagtctcagccctgtgcttttattggcatcggcaattccgatcaggaaatgcaacagttaaacctcgagggcaagaattattgcactgcaaaaaccctgtatattagcgacagtgacaaaaggaagcacttcatgttgagcgtcaagatgttttacgggaatagtgacgatattggcgtgtttctgtccaaaagaatcaaggtgatcagtaaaccatccaagaaaaagcaatctttaaagaacgctgacctgtgtatcgcttccggaacaaaagtggcgctcttcaatcgattgcggagtcaaacggttagcacgagatacctgcacgtggaggggggcaattttcacgcatcttcccagcagtggggcgcattttttattcacctcttagatgatgatgaatccgaaggcgaggagttcactgtgcgcgacggatacatccactatggccagaccgttaagcttgtgtgctcggtgaccggaatggctcttccgcgcctcatcattagaaaagtggataaacagacggcgctgctggatgccgatgaccctgtcagccagctgcataaatgtgctttttatttaaaggatactgagcgcatgtacctttgcctgtcccaggaacgaattattcagttccaggctaccccatgtcccaaagagccaaataaggagatgatcaatgacggtgctagctggactattatcagcacggataaagccgaatacaccttctatgaggggatggggcccgtcctagcacctgtaactcccgtcccagtcgtggaatccctgcaattaaacgggggcggcgatgtggcaatgttggagctcaccggtcagaacttcactcctaacctgcgcgtttggtttggtgatgtcgaggcagagactatgtatcggtgcggggagagtatgctctgtgtggtaccggacatttcagcttttagagaaggctggaggtgggtgcgacagcccgttcaggtgccggtgaccctcgtacggaatgacggtatcatttactctactagccttaccttcacctatacaccagaacccggtccgcgcccgcactgctccgccgccggtgcaatcctgcgagccaactcctcacaggtgcccccaaatgaatctaataccaactctgagggttcctatacgaacgcatccaccaattccacaagtgtaactagttccacagctacagtcgtttcatag

SEQ ID NO: 155252 - DNA, 537 bp, Artificial Sequence
  derived and/or modified sequence
atggaccacaccgagggcagccccgccgaggagccccccgcccacgccccttccccaggtaagttcggcgagaggcctccacctaagcggttgactcgcgaggccatgaggaattatcttaaagagagaggcgatcaaactgtgctcatccttcacgccaaagtggcacagaagtcctatggcaatgaaaagagatttttttgtcctccgccctgcgtttatctcatgggctccggatggaaaaaaaaaaaggaacaaatggagcgcgacggatgctccgagcaggagtcccagccttgcgcgttcatcggcattggcaatagcgatcaggagatgcagcagctcaacctggaaggtaagaactactgtacagcaaaaaccctgtatatctctgactccgacaaaagaaagcatttcatgctatccgtgaaaatgttctatgggaactccgatgatataggggtatttctctcaaagcgtataaaagtgatttccaaacctagtaagaagaagcagtcactgaaaaatgcggactag

SEQ ID NO: 155253 - DNA, 1503 bp, Artificial Sequence
  derived and/or modified sequence
atggatcacacagaagggtcccctgccgaagagcctccagcccatgctcccagtcctgggaagtttggcgaacggccaccccctaagcgactcacgcgtgaggcgatgagaaattatctcaaggagcgtggcgatcagaccgtgctgatcctccatgccaaagtcgcccagaaatcgtacggcaacgagaagcgcttcttttgtcctccaccgtgcgtttatttgatgggctctggttggaaaaagaaaaaggagcagatggaaagggacggatgctctgagcaggaatcacaaccctgtgcgttcatagggattggcaactcagaccaggagatgcagcagctaaacctcgagggaaaaaattattgcacagctaagacattgtacatttcagactctgataagcgaaaacattttatgctaagcgtcaaaatgttttacggaaatagtgatgacatcggagtgttcttgagcaaacgcatcaaagtcataagtaaaccttcaaagaagaaacaatcattgaagaacgccgatctctgcatcgcaagcggcactaaagtcgctcttttcaatagactgagatcccagactgtgtccacacgttatctgcacgtcgaaggcggtaactttcatgcatcttcacagcaatggggggcattcttcatccatttactggatgatgacgaatcagaaggcgaagaattcaccgtgcgagatggttatatccattatgggcagactgtgaagctagtgtgctccgtgacaggcatggcgttaccaaggctaatcatcaggaaggtagacaagcagacggctctgctggacgctgacgacccggttagccagcttcacaagtgtgccttttacctgaaagatactgagcgcatgtacctgtgcctgtctcaggaacgtatcattcagttccaagccactccatgccccaaagaacctaacaaggagatgatcaacgacggggctagctggacaattattagcactgacaaggcagaatacactttttacgaggggatggggccagttcttgcacccgtcactcccgtccccgttgtggagtcccttcagttgaacggcggtggggacgtcgccatgctcgagcttacgggacaaaacttcacaccaaatctcagggtgtggtttggcgacgtcgaggccgaaaccatgtatcgctgcggcgaatccatgctctgcgtggtgcctgacataagtgcttttcgagaggggtggcgctgggtgcgccagcctgttcaggtccccgtgaccctggtaagaaatgatggtataatttatagtacgagcctcacgttcacttacacacctgagccagggcctcggccacactgcagcgctgccggagccattctcagagctaactcctctcaggtgcccccaaacgagtccaataccaacagcgaaggctcttataccaatgctagcacgaatagtacaagcgtgacatcgtccacagctactgtggtgtcttag

SEQ ID NO: 155254 - DNA, 1503 bp, Artificial Sequence
  derived and/or modified sequence
atggaccacaccgaaggcagcccagctgaggagccacctgcacatgcacccagcccaggcaagttcggagaacgtcccccaccgaaacggctgaccagggaggctatgcgcaactacctcaaggagcgcggagatcagacggttctgattctccatgccaaggtggctcagaagtcctatggtaacgagaagaggttcttctgtccaccgccttgtgtgtaccttatgggctcgggctggaagaagaaaaaggaacaaatggagagagatggatgctcagaacaggaatcacaaccttgcgcttttataggtataggtaactctgaccaagagatgcagcagctcaatctggaggggaaaaattattgcaccgccaagacactctatatcagcgattccgataaacggaaacactttatgctaagcgtgaaaatgttctacggcaactctgatgacattggagttttcttgtcaaaacgcataaaggttatctcaaaacccagtaagaagaaacaaagccttaaaaacgccgatctgtgcatagcatccgggaccaaagttgcgctatttaacaggctgaggagtcagaccgtcagtacccgataccttcacgtggagggtggtaattttcatgcttcatcacagcagtggggcgcttttttcattcatctgctggatgacgatgaaagtgagggcgaggagtttaccgtgagggacggctatattcattacgggcagaccgtaaaacttgtttgctcagtgacggggatggccttgcctcgactgattattagaaaggttgataagcagactgccttgctcgacgcagatgaccccgtctcccaactgcataagtgcgccttttacctgaaggataccgagcggatgtatctgtgcctgtcacaagagaggatcatccaatttcaagctactccctgtcccaaagagccaaacaaggagatgatcaatgacggagcgtcctggacgataatctctactgataaggcagagtacaccttttatgaaggtatgggtccggtacttgcccctgtgacccctgtgccagtggtagagagtctgcaactaaatggcggtggagacgtagccatgctcgagctcacaggccagaattttaccccgaacctgagagtgtggttcggtgacgtcgaagcagagaccatgtaccgctgcggggagtctatgttatgcgtggtcccggatattagcgcgttccgggagggctggcgttgggttaggcagcctgtgcaggttccagtgactcttgtccggaacgatgggataatctatagcacctcattaacatttacatacactcccgagcccggaccgaggccccattgctctgctgcaggcgctattctgcgcgctaacagttctcaggtccctccaaatgagagtaacaccaacagtgagggatcttacaccaatgctagcaccaactctaccagcgtgaccagttccacagccactgtcgtaagctag

SEQ ID NO: 155255 - DNA, 537 bp, Artificial Sequence
  derived and/or modified sequence
atggaccatactgagggatcaccggcagaagagcctcctgcccacgcgccttcacccggtaagttcggagagcgaccaccgccaaagagactgacgcgagaagcaatgcgcaattacctaaaagagaggggcgaccagactgtgctcatccttcacgctaaagtggcacaaaaatcctatgggaatgagaaacgcttcttctgcccacctccttgtgtctatctaatggggagcggatggaagaagaaaaaagagcagatggagagggacgggtgttctgaacaggaaagtcagccatgcgcttttattggaatcggcaacagtgaccaggaaatgcaacagctaaatcttgaggggaaaaattattgcacggctaaaacactttacatctctgattccgacaaacggaagcatttcatgctctctgttaagatgttctatggaaactccgacgacatcggagtttttctgtcaaaacgcattaaagttattagtaaaccatctaaaaagaagcagagtctcaaaaacgctgactag

SEQ ID NO: 155256 - DNA, 2388 bp, Artificial Sequence
  derived and/or modified sequence
attgggtacatgcgcagtgccgctcgcgcgggccgcgccaatcctgcagcgccttcaacaggtttcgggcggcgaattccagttctccgggttttggggctccctgcgggaggcagtgctggatctgggaatctctaggaaaggaaagagcaaaggaggggaaagatggggggctgcagtctccacgtacgtccctcaaagcgcgtcctaaaacccggataaccggagcgctccccatggaccacacggagggctcgcccgcggaggagccgcctgcgcatgctccatcgcctgggaaatttggtgagcggcctccacctaaacgacttactagggaagctatgcgaaattatttaaaagagcgaggggatcaaacagtacttattcttcatgcaaaagttgcacagaagtcatatggaaatgaaaaaaggtttttttgcccacctccttgtgtatatcttatgggcagtggatggaagaaaaaaaaagaacaaatggaacgcgatggttgttctgaacaagagtctcaaccgtgtgcatttattgggataggaaatagtgaccaagaaatgcagcagctaaacttggaaggaaagaactattgcacagccaaaacattgtatatatctgactcagacaagcgaaagcacttcatgttgtctgtaaagatgttctatggcaacagtgatgacattggtgtgttcctcagcaagcggataaaagtcatctccaaaccttccaaaaagaagcagtcattgaaaaatgctgacttatgcattgcctcaggaacaaaggtggctctgtttaatcgactacgatcccagacagttagtaccagatacttgcatgtagaaggaggtaattttcatgccagttcacagcagtggggagccttttttattcatctcttggatgatgatgaatcagaaggagaagaattcacagtccgagatggctacatccattatggacaaacagtcaaacttgtgtgctcagttactggcatggcactcccaagattgataattaggaaagttgataagcagaccgcattattggatgcagatgatcctgtgtcacaactccataaatgtgcattttaccttaaggatacagaaagaatgtatttgtgcctttctcaagaaagaataattcaatttcaggccactccatgtccaaaagaaccaaataaagagatgataaatgatggcgcttcctggacaatcattagcacagataaggcagagtatacattttatgagggaatgggccctgtccttgccccagtcactcctgtgcctgtggtagagagccttcagttgaatggcggtggggacgtagcaatgcttgaacttacaggacagaatttcactccaaatttacgagtgtggtttggggatgtagaagctgaaactatgtacaggtgtggagagagtatgctctgtgtcgtcccagacatttctgcattccgagaaggttggagatgggtccggcaaccagtccaggttccagtaactttggtccgaaatgatggaatcatttattccaccagccttacctttacctacacaccagaaccagggccgcggccacattgcagtgcagcaggagcaatccttcgagccaattcaagccaggtgccccctaacgaatcaaacacaaacagcgagggaagttacacaaacgccagcacaaattcaaccagtgtcacatcatctacagccacagtggtatcctaactaccgtctttttgctaggacttaaactgacttgagtgtggcaaaaagttaacaaaaaaggagaaaaaatgaacaatcgtttgtggtttcttgggaaaacttttcataccaggtgatactattcaaaaaccccgttgtctccctgcaagtgctgatttgaaatgcagaagccacagtaaaaaaaaaaaaaaaaaaaaaaaaaaagaaaaaaaaatcaaaatgtataaatattggaaatcaagtttttcagctgttttgttggttggttggttggtttttgtttggttttgtttaaatgggcaagaagtaaataatgtggctggaatacaagttgaacaaactagaagacacaaatctaacatagtttttatggaccaaggaacttgtatattgtataagctttagtaaaaggtacattttcaccatacctttttttatatcacggtattatagtacaccttgttaccaaataggttgttctcttccccacccacctttgagcttttgctctaaaatacattcaggttccaagcctgaccatccttgtttaatctatcatactcttccaggttttttttttttggtctaaggctggaacttttttcttttttttcagctgaagtcttatgacttttcatgagtcaaaatt

SEQ ID NO: 155257 - DNA, 1697 bp, Artificial Sequence
  derived and/or modified sequence
acccattgaggaggtgtttcatctaggcctgtgaaacgcagcccattttcccaggacccctcctcccttctcctcggccccgcctcctgacccctccattcctcgtccccgtagtaatcccctccggttttcctcagtctccacgtacgtccctcaaagcgcgtcctaaaacccggataaccggagcgctccccatggaccacacggagggctcgcccgcggaggagccgcctgcgcatgctccatcgcctgggaaatttggtgagcggcctccacctaaacgacttactagggaagctatgcgaaattatttaaaagagcgaggggatcaaacagtacttattcttcatgcaaaagttgcacagaagtcatatggaaatgaaaaaaggtttttttgcccacctccttgtgtatatcttatgggcagtggatggaagaaaaaaaaagaacaaatggaacgcgatggttgttctgaacaagagtctcaaccgtgtgcatttattgggataggaaatagtgaccaagaaatgcagcagctaaacttggaaggaaagaactattgcacagccaaaacattgtatatatctgactcagacaagcgaaagcacttcatgttgtctgtaaagatgttctatggcaacagtgatgacattggtgtgttcctcagcaagcggataaaagtcatctccaaaccttccaaaaagaagcagtcattgaaaaatgctgacttatgcattgcctcaggaacaaaggtggctctgtttaatcgactacgatcccagacagttagtaccagatacttgcatgtagaaggaggtaattttcatgccagttcacagcagtggggagccttttttattcatctcttggatgatgatgaatcagaaggagaagaattcacagtccgagatggctacatccattatggacaaacagtcaaacttgtgtgctcagttactggcatggcactcccaagattgataattaggaaagttgataagcagaccgcattattggatgcagatgatcctgtgtcacaactccataaatgtgcattttaccttaaggatacagaaagaatgtatttgtgcctttctcaagaaagaataattcaatttcaggccactccatgtccaaaagaaccaaataaagagatgataaatgatggcgcttcctggacaatcattagcacagataaggcagagtatacattttatgagggaatgggccctgtccttgccccagtcactcctgtgcctgtggtagagagccttcagttgaatggcggtggggacgtagcaatgcttgaacttacaggacagaatttcactccaaatttacgagtgtggtttggggatgtagaagctgaaactatgtacaggtgtggagagagtatgctctgtgtcgtcccagacatttctgcattccgagaaggttggagatgggtccggcaaccagtccaggttccagtaactttggtccgaaatgatggaatcatttattccaccagccttacctttacctacacaccagaaccagggccgcggccacattgcagtgcagcaggagcaatccttcgagccaattcaagccaggtgccccctaacgaatcaaacacaaacagcgagggaagttacacaaacgccagcacaaattcaaccagtgtcacatcatctacagccacagtggtatcctaa

SEQ ID NO: 155258 - DNA, 795 bp, Artificial Sequence
  derived and/or modified sequence
gtagcgtgagactggactgcccgcattgggtacatgcgcagtgccgctcgcgcgggccgcgccaatcctgcagcgccttcaacaggtttcgggcggcgaattccagttctccgggttttggggctccctgcgggaggcagtgctggatctgggaatctctaggaaaggaaagagcaaaggaggggaaagatggggggctgcagtctccacgtacgtccctcaaagcgcgtcctaaaacccggataaccggagcgctccccatggaccacacggagggctcgcccgcggaggagccgcctgcgcatgctccatcgcctgggaaatttggtgagcggcctccacctaaacgacttactagggaagctatgcgaaattatttaaaagagcgaggggatcaaacagtacttattcttcatgcaaaagttgcacagaagtcatatggaaatgaaaaaaggtttttttgcccacctccttgtgtatatcttatgggcagtggatggaagaaaaaaaaagaacaaatggaacgcgatggttgttctgaacaagagtctcaaccgtgtgcatttattgggataggaaatagtgaccaagaaatgcagcagctaaacttggaaggaaagaactattgcacagccaaaacattgtatatatctgactcagacaagcgaaagcacttcatgttgtctgtaaagatgttctatggcaacagtgatgacattggtgtgttcctcagcaagcggataaaagtcatctccaaaccttccaaaaagaagcagtcattgaaaaatgctgact

SEQ ID NO: 155259 - DNA, 1503 bp, Artificial Sequence
  derived and/or modified sequence
atggaccacaccgagggcagccccgccgaggagccccccgcccacgcccccagccccggcaagttcggcgagagacccccccccaagagactgaccagagaggccatgagaaactacctgaaggagagaggcgaccagaccgtgctgatcctgcacgccaaggtggcccagaagagctacggcaacgagaagagattcttctgcccccccccctgcgtgtacctgatgggcagcggctggaagaagaagaaggagcagatggagagagacggctgcagcgagcaggagagccagccctgcgccttcatcggcatcggcaacagcgaccaggagatgcagcagctgaacctggagggcaagaactactgcaccgccaagaccctgtacatcagcgacagcgacaagagaaagcacttcatgctgagcgtgaagatgttctacggcaacagcgacgacatcggcgtgttcctgagcaagagaatcaaggtgatcagcaagcccagcaagaagaagcagagcctgaagaacgccgacctgtgcatcgccagcggcaccaaggtggccctgttcaacagactgagaagccagaccgtgagcaccagatacctgcacgtggagggcggcaacttccacgccagcagccagcagtggggcgccttcttcatccacctgctggacgacgacgagagcgagggcgaggagttcaccgtgagagacggctacatccactacggccagaccgtgaagctggtgtgcagcgtgaccggcatggccctgcccagactgatcatcagaaaggtggacaagcagaccgccctgctggacgccgacgaccccgtgagccagctgcacaagtgcgccttctacctgaaggacaccgagagaatgtacctgtgcctgagccaggagagaatcatccagttccaggccaccccctgccccaaggagcccaacaaggagatgatcaacgacggcgccagctggaccatcatcagcaccgacaaggccgagtacaccttctacgagggcatgggccccgtgctggcccccgtgacccccgtgcccgtggtggagagcctgcagctgaacggcggcggcgacgtggccatgctggagctgaccggccagaacttcacccccaacctgagagtgtggttcggcgacgtggaggccgagaccatgtacagatgcggcgagagcatgctgtgcgtggtgcccgacatcagcgccttcagagagggctggagatgggtgagacagcccgtgcaggtgcccgtgaccctggtgagaaacgacggcatcatctacagcaccagcctgaccttcacctacacccccgagcccggccccagaccccactgcagcgccgccggcgccatcctgagagccaacagcagccaggtgccccccaacgagagcaacaccaacagcgagggcagctacaccaacgccagcaccaacagcaccagcgtgaccagcagcaccgccaccgtggtgagctag

SEQ ID NO: 155260 - DNA, 537 bp, Artificial Sequence
  derived and/or modified sequence
atggaccacaccgagggcagccccgccgaggagccccccgcccacgcccccagccccggcaagttcggcgagagacccccccccaagagactgaccagagaggccatgagaaactacctgaaggagagaggcgaccagaccgtgctgatcctgcacgccaaggtggcccagaagagctacggcaacgagaagagattcttctgcccccccccctgcgtgtacctgatgggcagcggctggaagaagaagaaggagcagatggagagagacggctgcagcgagcaggagagccagccctgcgccttcatcggcatcggcaacagcgaccaggagatgcagcagctgaacctggagggcaagaactactgcaccgccaagaccctgtacatcagcgacagcgacaagagaaagcacttcatgctgagcgtgaagatgttctacggcaacagcgacgacatcggcgtgttcctgagcaagagaatcaaggtgatcagcaagcccagcaagaagaagcagagcctgaagaacgccgactag

SEQ ID NO: 155261 - protein, 1161 aa, Artificial Sequence
  derived and/or modified sequence
MTFGTVLLLSVLASYHGFNLDVEEPTIFQEDAGGFGQSVVQFGGSRLVVGAPLEVVAANQTGRLYDCAAATGMCQPIPLHIRPEAVNMSLGLTLAASTNGSRLLACGPTLHRVCGENSYSKGSCLLLGSRWEIIQTVPDATPECPHQEMDIVFLIDGSGSIDQNDFNQMKGFVQAVMGQFEGTDTLFALMQYSNLLKIHFTFTQFRTSPSQQSLVDPIVQLKGLTFTATGILTVVTQLFHHKNGARKSAKKILIVITDGQKYKDPLEYSDVIPQAEKAGIIRYAIGVGHAFQGPTARQELNTISSAPPQDHVFKVDNFAALGSIQKQLQEKIYAVEGTQSRASSSFQHEMSQEGFSTALTMDGLFLGAVGSFSWSGGAFLYPPNMSPTFINMSQENVDMRDSYLGYSTELALWKGVQNLVLGAPRYQHTGKAVIFTQVSRQWRKKAEVTGTQIGSYFGASLCSVDVDSDGSTDLILIGAPHYYEQTRGGQVSVCPLPRGRVQWQCDAVLRGEQGHPWGRFGAALTVLGDVNEDKLIDVAIGAPGEQENRGAVYLFHGASESGISPSHSQRIASSQLSPRLQYFGQALSGGQDLTQDGLMDLAVGARGQVLLLRSLPVLKVGVAMRFSPVEVAKAVYRCWEEKPSALEAGDATVCLTIQKSSLDQLGDIQSSVRFDLALDPGRLTSRAIFNETKNPTLTRRKTLGLGIHCETLKLLLPDCVEDVVSPIILHLNFSLVREPIPSPQNLRPVLAVGSQDLFTASLPFEKNCGQDGLCEGDLGVTLSFSGLQTLTVGSSLELNVIVTVWNAGEDSYGTVVSLYYPAGLSHRRVSGAQKQPHQSALRLACETVPTEDEGLRSSRCSVNHPIFHEGSNGTFIVTFDVSYKATLGDRMLMRASASSENNKASSSKATFQLELPVKYAVYTMISRQEESTKYFNFATSDEKKMKEAEHRYRVNNLSQRDLAISINFWVPVLLNGVAVWDVVMEAPSQSLPCVSERKPPQHSDFLTQISRSPMLDCSIADCLQFRCDVPSFSVQEELDFTLKGNLSFGWVRETLQKKVLVVSVAEITFDTSVYSQLPGQEAFMRAQMEMVLEEDEVYNAIPIIMGSSVGALLLLALITATLYKLGFFKRHYKEMLEDKPEDTATFSGDDFSCVAPNVPLS

SEQ ID NO: 155262 - protein, 1177 aa, Artificial Sequence
  derived and/or modified sequence
CALSPTFHFPSTRCSGMTFGTVLLLSVLASYHGFNLDVEEPTIFQEDAGGFGQSVVQFGGSRLVVGAPLEVVAANQTGRLYDCAAATGMCQPIPLHIRPEAVNMSLGLTLAASTNGSRLLACGPTLHRVCGENSYSKGSCLLLGSRWEIIQTVPDATPECPHQEMDIVFLIDGSGSIDQNDFNQMKGFVQAVMGQFEGTDTLFALMQYSNLLKIHFTFTQFRTSPSQQSLVDPIVQLKGLTFTATGILTVVTQLFHHKNGARKSAKKILIVITDGQKYKDPLEYSDVIPQAEKAGIIRYAIGVGHAFQGPTARQELNTISSAPPQDHVFKVDNFAALGSIQKQLQEKIYAVEGTQSRASSSFQHEMSQEGFSTALTMDGLFLGAVGSFSWSGGAFLYPPNMSPTFINMSQENVDMRDSYLGYSTELALWKGVQNLVLGAPRYQHTGKAVIFTQVSRQWRKKAEVTGTQIGSYFGASLCSVDVDSDGSTDLILIGAPHYYEQTRGGQVSVCPLPRGRVQWQCDAVLRGEQGHPWGRFGAALTVLGDVNEDKLIDVAIGAPGEQENRGAVYLFHGASESGISPSHSQRIASSQLSPRLQYFGQALSGGQDLTQDGLMDLAVGARGQVLLLRSLPVLKVGVAMRFSPVEVAKAVYRCWEEKPSALEAGDATVCLTIQKSSLDQLGDIQSSVRFDLALDPGRLTSRAIFNETKNPTLTRRKTLGLGIHCETLKLLLPDCVEDVVSPIILHLNFSLVREPIPSPQNLRPVLAVGSQDLFTASLPFEKNCGQDGLCEGDLGVTLSFSGLQTLTVGSSLELNVIVTVWNAGEDSYGTVVSLYYPAGLSHRRVSGAQKQPHQSALRLACETVPTEDEGLRSSRCSVNHPIFHEGSNGTFIVTFDVSYKATLGDRMLMRASASSENNKASSSKATFQLELPVKYAVYTMISRQEESTKYFNFATSDEKKMKEAEHRYRVNNLSQRDLAISINFWVPVLLNGVAVWDVVMEAPSQSLPCVSERKPPQHSDFLTQISRSPMLDCSIADCLQFRCDVPSFSVQEELDFTLKGNLSFGWVRETLQKKVLVVSVAEITFDTSVYSQLPGQEAFMRAQMEMVLEEDEVYNAIPIIMGSSVGALLLLALITATLYKLGFFKRHYKEMLEDKPEDTATFSGDDFSCVAPNVPLS

SEQ ID NO: 155263 - DNA, 3486 bp, Artificial Sequence
  derived and/or modified sequence
atgactttcggtactgtgctcctgctgagcgtcctagctagctaccacggctttaatctggatgttgaggaaccgacaatttttcaggaggacgcaggaggtttcggccagagcgtggtccagtttggggggtccaggcttgtggtaggtgcccccttagaagtcgtggctgccaaccagactggaagactctatgactgcgcggccgctaccggcatgtgccagccgataccactgcacatcagacctgaggcagtcaacatgtctctgggtctcacacttgctgcctcaacaaacggatctcgacttcttgcctgtggtcctactctccaccgagtatgcggagagaatagttattctaagggcagttgccttctgttaggaagtcgctgggagattattcagaccgtcccagacgccactcctgagtgtccacaccaggagatggatatcgttttcctcatcgacggctctggcagtatcgatcagaacgactttaaccaaatgaagggatttgttcaggcagtgatgggtcagtttgagggaactgatactctgtttgcgctgatgcagtactcaaacctgctcaagattcactttactttcacgcagttccggacctccccaagtcagcagagtcttgtcgacccaattgtccagctgaagggcctgacctttaccgcaaccgggattttgaccgtggtcacccaactctttcaccacaaaaatggggcacgcaagagtgctaagaagattctgatcgtgattacggacggccagaaatataaagaccccctcgagtactctgatgtgatcccccaagccgaaaaggccggcattataaggtatgctatcggggtgggtcacgcatttcagggacccactgcccgccaagagcttaatacgatctcaagtgcacccccgcaggatcacgtttttaaagtggacaactttgccgccctcggatccatacagaaacagctccaggagaagatttacgctgtggaaggtacacagagtagggcatcatccagcttccagcacgagatgtcgcaggagggattcagcacagccctgaccatggacggcctctttctgggggcagtcgggtcatttagctggtctggcggggcgtttctgtatcccccaaatatgagccccacctttatcaatatgagtcaggagaatgtcgatatgagagacagctatcttgggtacagcactgagttggctctctggaaaggcgtccagaacctggtgctgggggccccacgttaccagcacactggtaaagccgtgatctttacacaggtatccagacaatggagaaaaaaagcagaagtcactgggacccaaattggcagttattttggcgcatccttatgctcggtggacgtagacagtgatggttccacagaccttatactgattggcgctcctcattactacgagcaaacccgtggtggtcaggtgtcagtgtgtcctttgccgaggggacgcgtgcagtggcagtgcgacgccgtgctgaggggcgaacagggccatccatggggtagatttggggccgcccttactgtcctgggggatgttaacgaagataagctgatagacgtggccatcggcgccccgggagagcaagaaaacaggggagccgtttatctcttccacggcgccagtgagagtggaattagcccttcccatagccagaggatcgcctcgtcgcagctatccccccgactacaatattttggccaggctctgtccggaggacaggacctgacacaggatggtctcatggacctggctgtgggagccaggggccaggtgttactactgcgatcactgcccgtgctcaaggtcggcgtggccatgcgcttctccccggtcgaggtcgccaaggccgtctaccggtgttgggaagagaagccatcagccttagaagctggggatgctactgtctgcttaacgatccagaaatcctcactagaccagctgggagatatccagagttccgtgaggtttgatttggcccttgatcccgggcgacttacttcccgcgccattttcaatgaaacaaaaaaccctaccctcactcgcagaaagaccctgggattaggcatccactgcgaaactctgaaacttctcctcccagactgcgtcgaggacgttgtcagtcctatcatacttcatcttaacttcagtcttgtcagggagcccattcccagcccccaaaatctgaggcctgttttggctgttgggagtcaggaccttttcactgcttcgctgccttttgagaaaaattgcggccaggatgggctttgcgagggcgacctcggcgtgaccctgtctttctctggtctgcagaccctgacggtaggaagctctctggaactgaacgtgatcgtgacagtttggaacgccggcgaagatagctacggcaccgtggtgtctctgtactatcctgccgggctgtcccatcggagagtcagtggggcacagaaacagccccaccaatcggcgctccgactcgcatgcgagactgttccaaccgaggacgagggtctgcggtcttcacggtgcagcgtcaatcatccaatttttcacgaaggatccaatgggacctttatagtgaccttcgacgtatcctataaagctacactcggcgaccgaatgcttatgcgcgccagcgcctccagcgaaaacaataaggcttcttcgtccaaggccaccttccagctggaactgccagtgaagtatgctgtctacacgatgatcagccgccaggaggaatccactaaatacttcaacttcgccacatccgatgagaaaaagatgaaggaggcagagcacagataccgggtgaataatctgagtcagagggacttggctatttctatcaatttctgggtacctgtgctactcaacggcgtggcagtttgggacgtggttatggaggcacccagccagtcactcccttgcgtgtcagagaggaaaccccctcagcactccgacttcctgacacaaattagccgcagccccatgcttgactgctctatcgctgattgtctccagttccgttgtgatgtcccttcattctctgtgcaggaagaactggatttcacgcttaaaggtaatctgtcttttggttgggtgagagaaaccctgcagaaaaaggtcctggtagtgtccgtggccgagattacattcgacaccagtgtctacagccagctgcccggacaggaggcattcatgcgggcccaaatggagatggttttggaagaggacgaggtatataatgcgatcccgattattatgggatcctcagtcggcgctctcctgcttctggccttgatcacggccactctctataaactgggcttcttcaagcggcactacaaagagatgctggaggacaaacccgaggataccgctacattctcaggtgatgacttcagctgtgttgctcctaatgttcccctcagttag

SEQ ID NO: 155264 - DNA, 3534 bp, Artificial Sequence
  derived and/or modified sequence
tgcgcactgagccctacttttcactttccatccacaaggtgttcaggcatgacgttcggcacagttttgctcttatcagtcctcgcctcatatcacggattcaatttggacgttgaagagccaacaatttttcaagaggacgccgggggcttcggacagtctgtggtgcagtttggcgggtcccgtcttgtcgtgggagcaccactcgaggtggtggcagcaaaccagactgggagactttatgactgtgcagctgccactgggatgtgccagcccattccattgcacatccgccctgaggccgtgaatatgagtcttggcttaacactggccgcaagcaccaacggtagtcgactgcttgcctgcgggcccaccttgcatcgagtttgtggcgagaattcatattcgaaaggatcgtgcttgttgctgggatcacgctgggagattatacagactgtcccggatgctacacctgagtgtccccaccaagaaatggacatagtcttccttattgacggtagcggaagtattgaccagaatgattttaaccagatgaaaggcttcgtgcaggccgtaatggggcagttcgaaggcaccgatactctgtttgcactgatgcagtatagtaatctgttaaagattcattttacttttacacagtttaggacttctccttctcagcagtcactggtcgatccgatcgttcagctaaaaggtctgacattcacagctacgggcatcctcactgtggtgacccagctgttccatcataagaacggcgctaggaagagtgctaagaagatcctcattgtaattacggacggacagaaatataaggatccgttggagtactccgacgtcattccacaagcagaaaaggccgggattatacggtacgcaatcggtgtcggccacgccttccagggacctaccgcacggcaagaactgaacactatctctagtgctcctccccaggaccacgtattcaaagtcgataacttcgccgcacttggaagcattcagaaacagctccaggaaaaaatttacgctgttgagggcactcagtccagagcctcaagcagctttcaacatgagatgtcgcaagaaggcttctctaccgctctgactatggatggcctgtttctgggggccgttggatcattctcctggagcgggggcgcatttttatatccaccgaatatgtcaccgacttttattaatatgtcacaggaaaatgtggacatgagggattcctaccttggctacagcacggaactcgccctgtggaagggagtgcagaatctcgtcctcggggccccccgttaccagcatacagggaaggcggtcatcttcactcaggtttcccggcaatggagaaagaaagcagaggtcaccggcacccagattgggtcttatttcggcgccagtctttgtagtgtcgatgtggattcagacgggagcactgacctgattctcatcggggccccgcattactacgagcagactcggggtggacaggtcagtgtgtgtccgctccctagggggagggtgcagtggcagtgcgatgcagtcctaaggggtgagcagggccatccctggggcaggttcggagccgcactgacagttctaggcgatgttaacgaggataagctgatcgatgtggccattggtgcaccgggtgagcaggagaacaggggcgccgtctaccttttccacggtgcttcagaatctggaatcagcccatctcatagccagcgaatcgcttcatctcagctatctcctagactccaatacttcggtcaggctctttcaggtggccaagatctaactcaggacggcctaatggaccttgccgtgggcgcgcgtggccaggtcttgctgttgcgcagtctcccagtgttgaaagtcggcgtagcaatgcgattttcacccgtggaagtggccaaagccgtctaccgatgttgggaagaaaagccaagcgctctggaggcaggagacgctaccgtctgtctcactatccaaaagtctagcttggatcagctcggggacatacaatcgagtgtgcggtttgatttggcgctggatcctggacgtttaacctctcgcgccatatttaatgagacgaaaaaccccacactgacccggcggaagactttagggctggggattcattgtgaaactctgaaactgctgctgccagactgtgtggaggacgttgtctccccaataattctgcatttaaatttttccctggtaagggagcctatccccagcccccagaacttacgcccagtcctggcagtggggtcacaggacctgtttaccgcatcccttcctttcgaaaagaactgcggccaagacggcttatgtgaaggcgatctcggcgtgacactatcctttagcggactgcaaactttaacagtagggagctctttagaactcaatgttatcgtcaccgtttggaacgctggagaagacagttacgggaccgtggtatccctttattaccccgcgggccttagtcatcgccgggtgagcggggcccagaaacaacctcaccagtctgccctgcgattagcctgtgagacagtaccaacagaggatgaagggcttcgaagttccaggtgctcggtcaatcaccctattttccatgaagggagtaatggtaccttcattgttacattcgacgttagttataaagctaccctgggcgatcgtatgctgatgagggcttcagcttcctctgaaaacaataaggcaagcagcagtaaagccacattccagttggagctcccagttaaatacgcggtgtacacaatgatttcacgacaggaggagagtacaaagtacttcaacttcgcaactagcgacgagaaaaagatgaaggaggctgaacaccgataccgagtgaataacctgagccagcgtgatctcgcaatctctataaatttctgggtgcctgtgctgctaaatggcgtcgccgtgtgggacgtcgtgatggaagccccaagccagtccctgccatgcgttagtgaacggaaacccccgcagcattccgactttcttacccaaatttccaggtcgccgatgctcgactgctccatcgccgactgtctgcagttcaggtgcgatgtgccaagtttttcagtgcaggaggaactggattttacactcaaggggaatctgtcatttgggtgggtaagggaaaccctgcaaaaaaaggtcctggtagtgtcagtggctgagatcacgttcgatacatctgtgtattcccaattgcccggccaagaagcattcatgcgcgctcagatggagatggttctggaggaggacgaagtgtacaacgcaatccctatcatcatgggatcctcagttggggcgttgctcctactggctctaataacagcaaccttgtataagttggggttttttaagaggcattacaaagagatgctcgaggataaaccagaggacacggccaccttttccggggatgacttctcttgcgtcgcgcccaacgtgcctttgagctag

SEQ ID NO: 155265 - DNA, 3912 bp, Artificial Sequence
  derived and/or modified sequence
ctgtgctctgtccccaaccttccacttcccctcaacgcgctgctcagggatgaccttcggcactgtgcttcttctgagtgtcctggcttcttatcatggattcaacctggatgtggaggagcctacgatcttccaggaggatgcaggcggctttgggcagagcgtggtgcagttcggtggatctcgactcgtggtgggagcacccctggaggtggtggcggccaaccagacgggacggctgtatgactgcgcagctgccaccggcatgtgccagcccatcccgctgcacatccgccctgaggccgtgaacatgtccttgggcctgaccctggcagcctccaccaacggctcccggctcctggcctgtggcccgaccctgcacagagtctgtggggagaactcatactcaaagggttcctgcctcctgctgggctcgcgctgggagatcatccagacagtccccgacgccacgccagagtgtccacatcaagagatggacatcgtcttcctgattgacggctctggaagcattgaccaaaatgactttaaccagatgaagggctttgtccaagctgtcatgggccagtttgagggcactgacaccctgtttgcactgatgcagtactcaaacctcctgaagatccacttcaccttcacccaattccggaccagcccgagccagcagagcctggtggatcccatcgtccaactgaaaggcctgacgttcacggccacgggcatcctgacagtggtgacacagctatttcatcataagaatggggcccgaaaaagtgccaagaagatcctcattgtcatcacagatgggcagaagtacaaagaccccctggaatacagtgatgtcatcccccaggcagagaaggctggcatcatccgctacgctatcggggtgggacacgctttccagggacccactgccaggcaggagctgaataccatcagctcagcgcctccgcaggaccacgtgttcaaggtggacaactttgcagcccttggcagcatccagaagcagctgcaggagaagatctatgcagttgagggaacccagtccagggcaagcagctccttccagcacgagatgtcccaagaaggcttcagcacagccctcacaatggatggcctcttcctgggggctgtggggagctttagctggtctggaggtgccttcctgtatcccccaaatatgagccccaccttcatcaacatgtctcaggagaatgtggacatgagggactcttacctgggttactccaccgagctagccctgtggaagggggtacagaacctggtcctgggggccccccgctaccagcataccgggaaggctgtcatcttcacccaggtgtccaggcaatggaggaagaaggccgaagtcacagggacgcagatcggctcctacttcggggcctccctctgctctgtggatgtggacagcgatggcagcaccgacctgatcctcattggggccccccattactatgagcagacccgagggggccaggtgtccgtgtgtcccttgcctagggggagggtgcagtggcagtgtgacgctgttctccgtggtgagcagggccacccctggggccgctttggggcagccctgacagtgttgggggatgtgaatgaggacaagctgatagacgtggccattggggccccgggagagcaggagaaccggggtgctgtctacctgtttcacggagcctcagaatccggcatcagcccctcccacagccagcggattgccagctcccagctctcccccaggctgcagtattttgggcaggcgctgagtgggggtcaggacctcacccaggatggactgatggacctggccgtgggggcccggggccaggtgctcctgctcaggagtctgccggtgctgaaagtgggggtggccatgagattcagccctgtggaggtggccaaggctgtgtaccggtgctgggaagagaagcccagtgccctggaagctggggacgccaccgtctgtctcaccatccagaaaagctcactggaccagctaggtgacatccaaagctctgtcaggtttgatctggcactggacccaggtcgtctgacttctcgtgccattttcaatgaaaccaagaaccccactttgactcgaagaaaaaccctgggactggggattcactgtgaaaccctgaagctgcttttgccagattgtgtggaggatgtggtgagccccatcattctgcacctcaacttctcactggtgagagagcccatcccctccccccagaacctgcgtcctgtgctggccgtgggctcacaagacctcttcactgcttctctccccttcgagaagaactgtgggcaagatggcctctgtgaaggggacctgggtgtcaccctcagcttctcaggcctgcagaccctgaccgtggggagctccctggagctcaacgtgattgtgactgtgtggaacgcaggtgaggattcctacggaaccgtggtcagcctctactatccagcagggctgtcgcaccgacgggtgtcaggagcccagaagcagccccatcagagtgccctgcgcctggcatgtgagacagtgcccactgaggatgagggcctaagaagcagccgctgcagtgtcaaccaccccatcttccatgagggctctaacggcaccttcatagtcacattcgatgtctcctacaaggccaccctgggagacaggatgcttatgagggccagtgcaagcagtgagaacaataaggcttcaagcagcaaggccaccttccagctggagctcccggtgaagtatgcagtctacaccatgatcagcaggcaggaagaatccaccaagtacttcaactttgcaacctccgatgagaagaaaatgaaagaggctgagcatcgataccgtgtgaataacctcagccagcgagatctggccatcagcattaacttctgggttcctgtcctgctgaacggggtggctgtgtgggatgtggtcatggaggccccatctcagagtctcccctgtgtttcagagagaaaacctccccagcattctgacttcctgacccagatttcaagaagtcccatgctggactgctccattgctgactgcctgcagttccgctgtgacgtcccctccttcagcgtccaggaggagctggatttcaccctgaagggcaatctcagtttcggctgggtccgcgagacattgcagaagaaggtgttggtcgtgagtgtggctgaaattacgttcgacacatccgtgtactcccagcttccaggacaggaggcatttatgagagctcagatggagatggtgctagaagaagacgaggtctacaatgccattcccatcatcatgggcagctctgtgggggctctgctactgctggcgctcatcacagccacactgtacaagcttggcttcttcaaacgccactacaaggaaatgctggaggacaagcctgaagacactgccacattcagtggggacgatttcagctgtgtggccccaaatgtgcctttgtcctaataatccactttcctgtttatctctaccactgtgggctggacttgcttgcaaccataaatcaacttacatggaaacaacttctgcatagatctgcactggcctaagcaacctaccaggtgctaagcaccttctcggagagatagagattgtaatgtttttacatatctgtccatctttttcagcaatgacccactttttacagaagcaggcatggtgccagcataaattttcatatgcttaagaattgtcacatgaaatgaggatgtttatagcacactttccttgcgtggaagagctataacccagggacctgagtgcctctctgggaatagtcgggggaacctatttgtgggcattgaaaaagttttttcactttc

SEQ ID NO: 155266 - DNA, 3486 bp, Artificial Sequence
  derived and/or modified sequence
atgacctttggaacagtgctgctgctgtctgtgctggccagctaccacggcttcaacctggatgtggaggagcccaccatcttccaggaggatgctgggggcttcggccagagcgtggtgcagtttggaggcagccggctggtggtgggcgcccccctggaggtggtggccgccaaccagacaggccgcctgtatgactgtgccgccgccaccggcatgtgccagcccatccccctgcacatccggcctgaggccgtgaacatgagcctgggcctgaccctggccgccagcaccaacggcagccggctgctggcctgtggccccaccctgcaccgggtgtgtggggagaacagctacagcaagggcagctgcctgctgctgggcagccgctgggagatcatccagacagtgcctgatgccaccccagaatgtccccaccaggagatggacatcgtgttcctgattgatggcagcggcagcattgaccagaatgacttcaaccagatgaagggctttgtgcaggccgtgatgggccagtttgagggcacagacaccctgtttgccctgatgcagtacagcaacctgctgaagatccacttcaccttcacccagttccgcaccagccccagccagcagagcctggtggaccccatcgtgcagctgaagggcctgaccttcaccgccaccggcatcctgactgtggtgacccagctgttccaccacaagaatggagccaggaagagcgccaagaagatcctgattgtcatcacagatggccagaagtacaaggaccccctggagtacagtgatgtgatcccccaggccgagaaggccggcatcatccgctatgccatcggcgtgggccacgccttccagggccccacagcccggcaggagctgaacaccatcagcagcgccccaccccaggaccacgtgttcaaggtggacaactttgctgccctgggcagcatccagaagcagctgcaggagaagatctatgctgtggagggcacccagagccgggccagcagcagcttccagcacgagatgagccaggagggcttcagcacagccctgaccatggatggcctcttcctgggcgctgtgggcagcttctcctggagcggcggggccttcctgtacccacccaacatgagccccaccttcatcaacatgagccaggagaatgtggacatgagggacagctacctgggctacagcacagagctggccctgtggaagggcgtgcagaacctggtgctgggcgccccccgctaccagcacacaggcaaggccgtcatcttcacccaggtgtcccggcagtggaggaagaaggccgaggtgacaggcacccagatcggcagctactttggagccagcctgtgcagcgtggatgtggacagtgatggcagcacagacctgatcctgattggagccccccactactatgagcagacccggggcggccaggtgtctgtgtgccccctgccccggggccgggtgcagtggcagtgtgatgctgtgctgcggggggagcagggccacccctggggccgctttggagctgccctgactgtgctgggagatgtgaatgaagacaagctgattgatgtggccatcggggcccctggagagcaggagaacagaggagctgtgtacctgttccacggggccagcgagagcggcatcagccccagccacagccagagaattgccagcagccagctgagcccccggctgcagtacttcggccaggccctgagcggcggccaggacctgacccaggacggcctgatggacctggccgtgggcgcccggggccaggtgctgctgctgcggagcctgcctgtgctgaaggtgggcgtggccatgaggttcagccctgtggaggtggccaaggctgtgtaccgctgctgggaggagaagcccagcgccctggaggccggagatgccaccgtgtgcctgaccatccagaagagcagcctggaccagctgggggacatccagagctctgtgcgctttgacctggccctggaccccggccgcctgaccagccgggccatcttcaatgagaccaagaaccccaccctgaccaggaggaagaccctgggcctgggcatccactgtgagaccctgaagctgctgctgcctgactgtgtggaggatgtggtgagccccatcatcctgcacctgaacttcagcctggtgcgggagcccatccccagcccccagaacctgcggcctgtgctggccgtgggcagccaggacctcttcaccgccagcctgccctttgagaagaactgtggccaggacggcctgtgtgagggggacctgggcgtgaccctgtccttcagcggcctgcagaccctgactgtgggcagcagcctggagctgaatgtgattgtgacagtgtggaatgctggagaagattcctatggcaccgtggtgtccctgtactacccagctggcctgagccacagaagagtgtctggggcccagaagcagccccaccagagcgccctgcggctggcctgtgaaacagtgcccacagaagatgagggcctgcggagcagccgctgcagcgtgaaccaccccatcttccacgagggcagcaatggcaccttcatcgtgacctttgatgtgtcctacaaggccaccctgggggacaggatgctgatgagggccagcgccagcagcgagaacaacaaggccagcagcagcaaggccaccttccagctggagctgcctgtgaagtatgctgtgtacaccatgatcagccggcaggaggagagcaccaagtacttcaactttgccaccagtgatgagaagaagatgaaggaggccgagcaccgctacagagtgaacaacctgagccagagggacctggccatcagcatcaacttctgggtgcctgtgctgctgaatggagtggccgtgtgggatgtggtgatggaggcccccagccagagcctgccctgtgtgtctgagaggaagccaccccagcacagcgacttcctgacccagatcagccgcagccccatgctggactgcagcattgctgactgcctgcagttccgctgtgatgtgcccagcttctctgtgcaggaggagctggacttcaccctgaagggcaacctgagctttggctgggtgcgggagaccctgcagaagaaggtgctggtggtgtctgtggccgagatcacctttgacacctctgtgtacagccagctgcccggccaggaggccttcatgagggcccagatggagatggtgctggaggaggatgaggtgtacaatgccatccccatcatcatgggcagctctgtgggcgccctgctgctgctggccctgatcacagccaccctgtacaagctgggcttcttcaagaggcactacaaggagatgctggaggacaagccagaggacacagccaccttctctggagatgacttcagctgtgtggccccaaatgtgcccctgtcctag

SEQ ID NO: 155267 - DNA, 3534 bp, Artificial Sequence
  derived and/or modified sequence
tgtgccctgagccccaccttccacttccccagcacccgctgcagcggcatgacctttggaacagtgctgctgctgtctgtgctggccagctaccacggcttcaacctggatgtggaggagcccaccatcttccaggaggatgctgggggcttcggccagagcgtggtgcagtttggaggcagccggctggtggtgggcgcccccctggaggtggtggccgccaaccagacaggccgcctgtatgactgtgccgccgccaccggcatgtgccagcccatccccctgcacatccggcctgaggccgtgaacatgagcctgggcctgaccctggccgccagcaccaacggcagccggctgctggcctgtggccccaccctgcaccgggtgtgtggggagaacagctacagcaagggcagctgcctgctgctgggcagccgctgggagatcatccagacagtgcctgatgccaccccagaatgtccccaccaggagatggacatcgtgttcctgattgatggcagcggcagcattgaccagaatgacttcaaccagatgaagggctttgtgcaggccgtgatgggccagtttgagggcacagacaccctgtttgccctgatgcagtacagcaacctgctgaagatccacttcaccttcacccagttccgcaccagccccagccagcagagcctggtggaccccatcgtgcagctgaagggcctgaccttcaccgccaccggcatcctgactgtggtgacccagctgttccaccacaagaatggagccaggaagagcgccaagaagatcctgattgtcatcacagatggccagaagtacaaggaccccctggagtacagtgatgtgatcccccaggccgagaaggccggcatcatccgctatgccatcggcgtgggccacgccttccagggccccacagcccggcaggagctgaacaccatcagcagcgccccaccccaggaccacgtgttcaaggtggacaactttgctgccctgggcagcatccagaagcagctgcaggagaagatctatgctgtggagggcacccagagccgggccagcagcagcttccagcacgagatgagccaggagggcttcagcacagccctgaccatggatggcctcttcctgggcgctgtgggcagcttctcctggagcggcggggccttcctgtacccacccaacatgagccccaccttcatcaacatgagccaggagaatgtggacatgagggacagctacctgggctacagcacagagctggccctgtggaagggcgtgcagaacctggtgctgggcgccccccgctaccagcacacaggcaaggccgtcatcttcacccaggtgtcccggcagtggaggaagaaggccgaggtgacaggcacccagatcggcagctactttggagccagcctgtgcagcgtggatgtggacagtgatggcagcacagacctgatcctgattggagccccccactactatgagcagacccggggcggccaggtgtctgtgtgccccctgccccggggccgggtgcagtggcagtgtgatgctgtgctgcggggggagcagggccacccctggggccgctttggagctgccctgactgtgctgggagatgtgaatgaagacaagctgattgatgtggccatcggggcccctggagagcaggagaacagaggagctgtgtacctgttccacggggccagcgagagcggcatcagccccagccacagccagagaattgccagcagccagctgagcccccggctgcagtacttcggccaggccctgagcggcggccaggacctgacccaggacggcctgatggacctggccgtgggcgcccggggccaggtgctgctgctgcggagcctgcctgtgctgaaggtgggcgtggccatgaggttcagccctgtggaggtggccaaggctgtgtaccgctgctgggaggagaagcccagcgccctggaggccggagatgccaccgtgtgcctgaccatccagaagagcagcctggaccagctgggggacatccagagctctgtgcgctttgacctggccctggaccccggccgcctgaccagccgggccatcttcaatgagaccaagaaccccaccctgaccaggaggaagaccctgggcctgggcatccactgtgagaccctgaagctgctgctgcctgactgtgtggaggatgtggtgagccccatcatcctgcacctgaacttcagcctggtgcgggagcccatccccagcccccagaacctgcggcctgtgctggccgtgggcagccaggacctcttcaccgccagcctgccctttgagaagaactgtggccaggacggcctgtgtgagggggacctgggcgtgaccctgtccttcagcggcctgcagaccctgactgtgggcagcagcctggagctgaatgtgattgtgacagtgtggaatgctggagaagattcctatggcaccgtggtgtccctgtactacccagctggcctgagccacagaagagtgtctggggcccagaagcagccccaccagagcgccctgcggctggcctgtgaaacagtgcccacagaagatgagggcctgcggagcagccgctgcagcgtgaaccaccccatcttccacgagggcagcaatggcaccttcatcgtgacctttgatgtgtcctacaaggccaccctgggggacaggatgctgatgagggccagcgccagcagcgagaacaacaaggccagcagcagcaaggccaccttccagctggagctgcctgtgaagtatgctgtgtacaccatgatcagccggcaggaggagagcaccaagtacttcaactttgccaccagtgatgagaagaagatgaaggaggccgagcaccgctacagagtgaacaacctgagccagagggacctggccatcagcatcaacttctgggtgcctgtgctgctgaatggagtggccgtgtgggatgtggtgatggaggcccccagccagagcctgccctgtgtgtctgagaggaagccaccccagcacagcgacttcctgacccagatcagccgcagccccatgctggactgcagcattgctgactgcctgcagttccgctgtgatgtgcccagcttctctgtgcaggaggagctggacttcaccctgaagggcaacctgagctttggctgggtgcgggagaccctgcagaagaaggtgctggtggtgtctgtggccgagatcacctttgacacctctgtgtacagccagctgcccggccaggaggccttcatgagggcccagatggagatggtgctggaggaggatgaggtgtacaatgccatccccatcatcatgggcagctctgtgggcgccctgctgctgctggccctgatcacagccaccctgtacaagctgggcttcttcaagaggcactacaaggagatgctggaggacaagccagaggacacagccaccttctctggagatgacttcagctgtgtggccccaaatgtgcccctgtcctag

SEQ ID NO: 155268 - DNA, 3486 bp, Artificial Sequence
  derived and/or modified sequence
atgaccttcggcaccgtgctgctgctgagcgtgctggccagctaccatggcttcaacctcgacgtggaagagcccaccatcttccaagaagatgctggggggtttggccagtcagtcgtgcaatttggcggaagcagactcgtggttggcgccccattggaggtggtggccgctaaccagaccgggcgcctgtatgattgtgcggcagccaccggaatgtgccagccgatccccttacacatccgcccagaagccgtgaacatgtctctcggactgacactggcagcctccaccaacgggagtcggctgcttgcctgtggtcctactctgcatcgggtgtgtggggagaattcctattccaagggtagttgtctgcttctaggctcccgatgggaaattatccagactgttcccgacgccactccagagtgtcctcaccaggaaatggacattgtctttcttattgatggcagcgggtctatagatcaaaacgactttaaccaaatgaaaggtttcgtgcaggcagtgatgggacaatttgaggggaccgacacgcttttcgcactgatgcagtactctaaccttctgaagattcattttaccttcacacagttcagaacttccccaagccagcagtccctggtcgatccaattgtccagctcaagggcctgaccttcaccgccactggcatcctaacagttgtgacacagctgttccaccataagaatggcgctcgaaagtctgccaagaaaatcttgatagttatcacagatggccagaagtataaagaccccctagaatattccgacgtgataccccaggcagagaaagctggaattatcaggtacgcaatcggagtgggtcacgcctttcagggcccaactgctcgccaggagctaaatacgattagtagcgctccacctcaagaccacgtcttcaaggtggacaacttcgctgctctgggttccatccagaaacagcttcaagagaagatctacgcagtagaaggaactcaatctcgagcgtcatcatctttccagcacgaaatgtcccaggagggattttctaccgctcttactatggacgggctgtttctcggggcggtaggaagcttctcttggtcaggcggcgccttcctctatccccccaatatgtctccaacttttattaacatgtcgcaggaaaacgttgacatgcgagattcctatctggggtattctacggagctggcgttatggaaaggggtccagaacctcgtactcggtgcgccacggtatcagcacaccgggaaagcggtcatctttactcaggtctcccggcagtggcgaaaaaaggctgaagtgacaggcacccaaatcggcagctatttcggggcctccttgtgtagtgtggatgtggatagcgatggatccaccgatctcattctgatcggtgcgcctcactattacgagcagacacgaggcggacaggtttctgtatgccccctgcccagagggagggtccaatggcagtgtgacgcagtgctgagaggtgaacaaggtcatccctggggcaggttcggtgcagccctgacagtccttggagacgtcaatgaggacaagctgatcgacgtcgccattggggccccaggtgaacaggaaaaccggggggctgtatacctgttccatggcgctagtgagtccggaataagtcctagccattctcaacgaatagcctcgtcccagctctcaccacgactgcagtatttcggtcaggctctgtctgggggacaggacctcacccaggacgggctgatggacctcgccgtgggagctaggggtcaagtcctcctgctgagatcactgccggttctcaaagttggagtagccatgaggttctcacctgttgaagtggctaaagcggtgtaccgttgttgggaagagaaaccaagcgctctcgaggcgggggatgctacagtatgtctcaccattcagaaatccagcctggaccagctgggcgatatccaatcatctgtgagatttgacctcgcactggacccgggcagactcacgtccagagctatctttaatgaaactaagaatccaacacttacaaggaggaagaccttaggcctcggcatccactgcgaaactctcaaactgctcctgccagattgcgtggaagacgtggttagccctataattctgcaccttaactttagcctggtgcgagagccaatcccaagtcctcagaatttacgccctgttttagctgtgggaagtcaggatttgttcacagctagccttccttttgaaaagaactgcggtcaggatgggctgtgcgaaggcgatctaggcgtcacattgtccttctctggactccagaccctcacagtcggctcaagcctggagcttaatgtcattgtgacagtctggaacgcaggcgaggattcctatggtaccgtggtgtccctctattatcccgccggattgagtcaccgaagggtctccggcgcgcagaagcaaccacaccagtccgccctgaggcttgcttgtgagactgtgcccaccgaagatgagggtctgcggagctctagatgcagcgttaaccacccgatttttcacgaggggtcaaacggcaccttcatcgttactttcgatgtgtcttataaagcgacgctcggcgataggatgcttatgcgagcatccgcctctagtgagaataataaagcatccagctcaaaggctaccttccagctggaacttccggtgaagtatgccgtgtacactatgatctccaggcaggaggaatccactaagtacttcaatttcgcaacaagcgacgagaaaaagatgaaagaagccgaacacaggtaccgggtaaataatctgtctcaacgggacctggcaatttccatcaatttttgggttcccgtcctgctgaacggagtggctgtttgggacgttgtgatggaagccccatctcagtcactgccttgtgtgtctgaaaggaagcccccgcaacactccgattttctaacacagatcagccgctctcccatgctcgactgctccattgcagactgccttcagtttcgctgtgatgtcccaagtttcagtgtgcaggaggagctagattttacactgaagggcaatctcagctttggctgggtaagggaaactctccagaaaaaagtgttggtggtgagcgttgcggagattacgtttgacactagcgtttactctcaactacctgggcaggaagcgttcatgagagcgcaaatggaaatggtgttagaggaagatgaagtctacaatgctataccaatcattatgggctcaagcgtgggcgccctgctgctgctggccctgatcacagccacactctacaagctcggctttttcaaacggcactacaaggagatgctggaagataagcccgaggacactgccacgttctccggagacgattttagttgtgtggcacccaatgtcccactgagctag

SEQ ID NO: 155269 - DNA, 3534 bp, Artificial Sequence
  derived and/or modified sequence
tgcgccctgagccccaccttccacttccccagcacccggtgcagcgggatgaccttcggtactgtgctcctgttaagtgtcctcgcctcgtatcacgggttcaacctagatgtagaggagcccaccatttttcaggaggatgctggaggctttggtcaatccgtcgttcaatttgggggctcgaggctcgtggtgggcgcccctctggaggtggttgcagctaatcagaccggaaggctgtatgattgtgcggcagccacaggaatgtgccaacctattcctctgcatatccgaccagaagcagtcaatatgagtctcgggctgactctcgccgcgagcactaatggaagcaggctgttagcctgtggcccaactctgcatagggtgtgtggcgaaaacagctactccaaaggcagctgcttgctgttgggctcacggtgggaaataatccagacggtccccgacgccacccccgagtgtccgcaccaggaaatggatatagtgttcctgattgacggctcggggtctatcgaccagaatgacttcaaccagatgaaaggctttgtgcaggccgtcatgggacagttcgaggggacggacaccctgttcgctctaatgcaatactccaatctgctgaagatccatttcacgttcacccagttcaggactagtccaagccagcagagtctcgtggacccaattgttcaattgaaaggactgacgtttactgccaccggaatcttgacagtcgtaacacagttgtttcaccataagaatggtgccagaaaatctgccaagaagattctgatcgtgatcacggacggacagaagtataaagaccccctagaatactccgacgttattccccaagcagagaaggcgggtatcattagatatgcgattggtgttggtcatgcatttcaggggccaacggcacgccaggagctgaacacgatcagctctgccccaccccaagatcacgtcttcaaggtggacaacttcgcggccctgggcagtatccagaagcagctgcaggagaaaatctatgccgtggagggtacccagagtcgcgccagttcatcctttcagcacgaaatgtcccaggagggattcagcactgctctgacgatggatgggctgtttctcggggcggtcggcagcttcagttggtcaggaggggccttcctgtacccaccaaacatgtcccctactttcataaacatgagccaggaaaacgtggacatgagggattcctatctgggttactccacggaactggcgttatggaaaggggtgcagaacctcgttttgggtgcaccaaggtaccagcataccggaaaagccgtgatcttcacacaagtttcacggcagtggcgaaaaaaagccgaagtgacaggcacccagatcggcagttatttcggagccagcctgtgttccgtcgacgttgacagcgacggcagcaccgatctgatcttgatcggcgctcctcattactatgaacagacgaggggtggccaggtgtctgtgtgccccctgccaagaggtagagttcagtggcagtgtgacgccgtcctgcgaggcgaacaaggccatccctggggccggttcggcgcagccctgaccgtactgggtgatgtgaacgaggacaagttgatcgatgtggccataggagcccctggtgaacaggagaacagaggcgctgtatatctcttccatggtgcaagtgagtcgggaattagccccagccacagccagcgcatcgcaagtagccagctttcgccacggcttcagtactttggacaggccctctcgggaggtcaggacctgacccaggacgggctgatggacctcgcagtgggggcacgtggccaggtacttctgctgagatctctgcctgtgctcaaggtgggggtggccatgcgcttctcaccagtagaggtggcgaaagctgtgtatcgttgttgggaagagaaaccttccgccctggaggccggtgatgccaccgtgtgtctgaccattcagaaatctagtctggatcagctgggggacatccagagctctgtccgcttcgaccttgccctagatccggggcgcctgactagcagagccatatttaatgagaccaaaaaccccactctaacccgacggaaaacattgggcctggggattcattgcgaaacactcaaattactcctccctgactgtgtggaggatgtggtgagccccattatcttacacctcaattttagtcttgtaagggagccaataccctcgcctcagaaccttcggcccgtgctagccgtgggaagccaagatttatttacagcatcactcccattcgaaaaaaattgcggccaggacggactgtgcgagggagacttgggtgtgaccctttcattcagcgggctccagacactgaccgtgggatcttcactagaactcaatgttatagtaactgtgtggaacgccggggaggacagttacggaaccgtggtctctctatactacccagccgggctgagccataggagggtgtctggcgcgcagaagcagccccaccagtccgcactcaggctggcctgtgagactgttcccacggaagatgaaggcctgagatcctcacgatgctcagttaatcatccgatttttcatgagggctccaatgggactttcatcgtgacgtttgacgtatcttacaaagctacgctgggcgatagaatgctgatgcgggcatccgctagctccgagaacaataaggcttccagctctaaggctacctttcaactggagttgcccgtaaagtatgcagtgtacacgatgatctcacgtcaggaggaatccactaaatatttcaacttcgccacaagcgacgagaagaagatgaaagaagccgaacaccgctatagagtgaacaatctgagccagagggatttagcaatcagcataaacttctgggtacccgtgctgctgaacggcgtggccgtttgggatgtggtgatggaagccccctcgcagtccctcccttgtgtgtccgagaggaaacctccacagcacagcgactttctgacccagatctccagatcccccatgctggattgttcgatcgctgactgcctccagttcagatgtgacgttccttccttttccgtgcaggaagaactggatttcacgttaaaaggaaaccttagtttcggatgggtgcgggaaacattgcagaaaaaggtgttagtggtgagtgtggctgagatcacatttgatacttcagtttactcccaactacccggacaggaagcttttatgcgggctcagatggaaatggtgctggaagaagacgaagtctacaatgccatcccaataattatggggagctccgtgggcgctttacttttgctggcgttaatcaccgcgactctctacaaactggggttttttaaacggcattataaagaaatgttggaagataaaccagaggacactgccaccttctccggcgatgacttttcctgtgtggcacccaacgtacctcttagttag

SEQ ID NO: 155270 - DNA, 3486 bp, Artificial Sequence
  derived and/or modified sequence
atgacctttggcaccgtcctgttgctgagtgtcctcgcctcataccacggctttaacctggacgtggaggagcctaccatattccaggaagacgcagggggattcgggcagagcgtggtgcagtttggtggatcacgtctggtagtaggggctccactagaagtggtggccgcaaaccagacaggacggctctacgactgcgccgcagccaccggtatgtgccagccaattcccctgcatatcaggcctgaggcagtgaatatgagcctcggcttgactcttgctgctagtactaatggaagtagattactagcctgcggccctactctgcatagagtctgtggggagaacagttattccaaaggttcatgccttctgctgggatccagatgggagatcatccagactgtcccagatgctaccccagagtgccctcaccaggagatggacattgtgtttctcatagacggcagcgggtcaatcgatcagaacgactttaaccagatgaaagggtttgtccaggctgtgatgggccaatttgaaggaacagataccctctttgccctgatgcaatactcaaacctgcttaagatccattttaccttcacacagttccgtacgagcccatcacagcagtcactggtggaccccatcgttcagctgaaaggcttaacattcacggcaaccgggattctgacagtcgtaactcaactgtttcatcataaaaacggagcccgtaaatcagccaagaagatcctgatcgtaattaccgacggccaaaagtataaagaccccctcgagtacagtgatgtgattccacaggccgaaaaggccggaatcatcaggtacgccattggtgtaggtcatgcctttcaaggacccacagctcggcaggagttgaatactatttcaagcgcccctcctcaggaccacgtgtttaaagtggataacttcgcagctctcggctccattcagaaacagcttcaggagaagatctatgccgtggagggcacacagtcacgagccagcagcagcttccaacatgaaatgtcgcaggaaggattttctacagcactgacgatggacggactctttctgggcgcagtcggcagtttttcttggtctggcggagcttttttgtatcccccaaatatgtccccgacatttatcaacatgtctcaagaaaacgtggatatgagagattcctatctagggtacagtaccgaactggcactatggaagggagtgcagaacctggtgctgggcgctcctagatatcagcacacaggaaaagcagtgattttcactcaggtgagccgccaatggcggaagaaagcggaggtcaccgggactcagattggcagttactttggtgcctccctttgtagtgtcgatgtcgactcggacggcagcaccgacctgatactgattggcgctccgcactactacgaacaaacaagggggggacaggtttctgtatgcccccttcctcgaggccgtgtgcaatggcagtgcgatgctgttttgagaggtgaacagggacacccatggggcaggttcggcgctgcgctaactgtcctgggagacgtcaacgaggataaactgatcgacgtagccattggggctcccggtgaacaggaaaaccgaggggcagtatacctgtttcatggagctagcgaatcaggaatcagcccaagccattcccaacgcatcgcttcaagtcagttatctcctagactccagtacttcgggcaggcgctgtccgggggacaggatcttacacaggatggcctcatggacctggcggtgggggcacgcggacaggttttgctgctccgcagtctgcctgtgttgaaggtgggagtagcgatgcgcttttccccggtggaggtggccaaggctgtttataggtgttgggaggagaaacccagcgcgcttgaagcaggggatgcgaccgtatgcctcaccatccagaagagctctctcgaccagctcggagatattcagtcttcagtgcgattcgaccttgcactggatccagggaggcttacatcgagagcaatattcaatgagactaagaatcctaccctcacacgccgaaaaaccctcggcctggggattcactgcgagaccctcaagctgttattacccgactgtgtggaagatgtggtctcaccaattattttacacctgaatttctccttggtgcgggagcccatcccatctccccagaaccttagacctgtgctggctgtaggatcacaggatcttttcaccgcatctctgccgtttgagaaaaattgtggccaggatggtctgtgtgaaggagatttaggggtgacactaagtttttccggcctgcaaacactgaccgtgggatcctccctggagctgaatgtgatcgtaacggtctggaacgccggtgaggattcgtatggcactgtggtgtccctgtactaccccgctggcctgtctcaccgccgagtttccggggcacaaaagcagccacaccaatccgcattgaggctcgcgtgtgaaactgtacccactgaggacgaggggctcaggagcagcaggtgctctgtcaatcatccaatttttcatgaaggttctaacgggacttttatagtcaccttcgatgtttcctataaagcaacactcggggataggatgctcatgcgagcttccgcttctagtgaaaataataaggctagcagcagcaaagcaaccttccagctggaactccctgtcaaatacgccgtatataccatgataagcagacaagaagagtccacaaaatactttaactttgcaacctcagacgagaaaaaaatgaaggaagctgagcacaggtatcgcgttaataatctaagccagagggacctggccatcagcataaatttctgggtacccgtcctgctcaacggtgtggcagtttgggatgtggtgatggaagccccttctcagtcactgccctgcgtgtccgaacgtaagcctcctcagcacagcgattttctaacacagatatccaggagtcctatgttggactgtagcatcgccgactgcttgcaattcagatgtgacgtgccaagttttagtgttcaagaagagctggattttaccctgaagggtaacctttcttttggatgggttagagagaccttgcagaagaaagtcctggttgtatccgtggcagagatcacgtttgacacgagcgtctatagccaattacccggacaggaggccttcatgagagcgcagatggagatggtgctcgaggaggacgaggtttataacgcgatccccatcatcatgggctcaagcgtcggggcactgctgctgttggccctcatcacagccacactgtacaagctgggcttttttaagcggcactacaaagagatgctggaggataagcccgaagacactgccacctttagcggagatgatttctcttgtgttgcccctaacgttcccctgagttag

SEQ ID NO: 155271 - DNA, 3534 bp, Artificial Sequence
  derived and/or modified sequence
tgcgccctctcaccaacctttcatttccctagtaccagatgttctggcatgactttcggcactgtgcttctcctctctgtgttagcaagttaccacggattcaatctcgatgttgaggagcccacgatctttcaggaggacgccggtggcttcggtcagagcgttgtgcagttcggtggtagccgactggtggtcggggcaccactcgaggtggtcgctgccaatcaaacgggcaggttatacgattgtgcggcagcgacaggcatgtgtcaacctatccctctgcacattcgcccagaagccgtgaatatgagcctcggtctgaccttggctgctagtacgaatgggagcaggctcttagcctgtgggcctaccctgcatagggtctgtggtgaaaacagctacagcaagggttcctgccttctgctggggtcacgttgggagataatacaaacggtacccgacgctacacctgagtgccctcatcaggaaatggacatcgttttcctcattgatggatcggggagtatcgatcagaatgacttcaatcagatgaaaggcttcgtgcaggccgtcatggggcagttcgaaggcaccgatacactttttgcactgatgcagtatagtaacctgcttaaaatacatttcacctttacccagttccggaccagtccttcacagcagtcattagtggatcctattgtgcaacttaagggcctcacttttactgctacgggaattctgaccgtggtgacacagctgtttcaccacaagaatggcgctcgaaagtccgctaagaaaattctgattgtgataaccgacggacaaaaatataaagatcctttagagtactccgacgtgatcccacaggccgagaaagcgggtatcatccgatatgccataggtgtaggtcacgccttccagggccctaccgcccgtcaggagctgaatacaatcagctcagccccaccccaggatcacgtcttcaaggtggacaatttcgcagccctcgggtccatccagaagcaactgcaagaaaaaatctacgcagttgagggcacacagtcacgcgcttctagttcatttcaacatgaaatgagtcaggaggggttcagtaccgccctaacaatggacggactgttcctgggcgcagtcggaagcttttcttggagtggcggagcttttctgtaccctcccaacatgtcaccaacgttcataaatatgtcccaggaaaatgttgacatgagagactcgtacttaggctattcaacagagctagctctatggaaaggagtgcagaatcttgtcttgggggctccgagataccaacacaccggcaaagccgtgatcttcacccaggtatctcgccagtggagaaaaaaggccgaggtgaccggcactcagatcgggtcctatttcggcgcttctctctgcagcgttgatgtcgactccgatggcagcacggacctcattctcatcggagcccctcactactacgaacagacacgagggggacaggtatcagtgtgtcccttgccgaggggcagggtccagtggcaatgcgatgcagttctgcggggtgagcaggggcatccttggggacgttttggcgctgcgctaacagtgcttggcgacgtgaacgaagataaactcatcgacgtggccataggcgcaccgggagagcaggagaatagaggcgcagtttacttgtttcacggcgcttctgagagtggcatctccccttcgcactcacagcggattgcttcatcacagttgagccctcgccttcagtattttgggcaagcactgtcgggtgggcaggacttaactcaagacggtctgatggatctcgctgtgggagcccgtggacaggtgttacttttgcggtcactgcccgtcctgaaggtgggcgtggctatgcggttctcccccgtggaggtggcaaaagctgtgtatcgatgttgggaggaaaagccatcagccttagaggccggtgacgctaccgtgtgcctgactatccagaaatcgtccctggatcaacttggggacattcagtccagtgtgagatttgatctcgccctggatcctggcaggttgacgagcagggccattttcaacgagacgaaaaacccaacacttacacggagaaagacgttggggttgggcatccactgcgaaacgctcaagcttctgctgccagactgcgtggaagacgtggtttcccctatcatcttgcacctgaatttctctctggttagagagcccattccgtccccccagaatctgcgtccggtgctcgcagtcggctctcaagacctgttcacggcttctttgcccttcgagaagaactgcgggcaggacgggttgtgtgagggagacctgggcgtgactctgtccttctctggcttacagacgcttaccgtagggagcagcctggaactgaacgtcattgtgacagtatggaacgccggagaggactcgtatggaaccgtagtatctctgtattatccggcaggactttcccatcgtcgggtcagtggagcacaaaaacagcctcaccaatctgccctgcgccttgcttgtgagactgttcctactgaggatgaaggtcttaggtcttcacggtgctcagtaaatcaccccatcttccatgaaggctccaacggtacttttatagtaaccttcgatgtgtcctacaaagctactctcggagacaggatgttgatgagggcgtcagctagtagcgagaacaataaagctagttcatctaaggcaacatttcagctcgagctgccagtgaagtacgcggtgtacaccatgataagccgacaggaggaatcaaccaagtactttaacttcgccaccagcgatgaaaaaaagatgaaggaggccgagcatagatatcgagtcaacaatcttagccagcgcgacttagcaatatccatcaatttttgggtaccagtgttgctgaatggggtagccgtatgggatgtggttatggaagccccatcgcagtccctgccttgtgtctccgaaagaaaacctcctcaacactccgattttctgacacagatcagcaggtcacccatgctcgactgtagcatcgctgactgcttacaatttaggtgtgacgtcccatcattctcagtccaggaagaactcgactttacactgaaagggaacctgtccttcggatgggtccgggaaactctgcagaagaaggtgctggtggtgtcagtggcggaaatcacatttgacacgtctgtctatagccagctgccaggacaggaggctttcatgcgagcccaaatggagatggtgctcgaagaggacgaggtgtataatgctataccgattatcatggggtccagcgtaggagccctgctgttactggccctgatcacagcgaccctgtataagttggggtttttcaagcgccactacaaggaaatgctggaggataagccagaagacaccgcaactttcagcggggatgacttttcatgtgtcgccccaaatgttccactctcatag

SEQ ID NO: 155272 - DNA, 3486 bp, Artificial Sequence
  derived and/or modified sequence
atgaccttcggcaccgtgctgctgctgagcgtgctggccagctaccacggcttcaacctggacgtggaggagcccaccatcttccaggaggacgccggcggcttcggccagagcgtggtgcagttcggcggcagcagactggtggtgggcgcccccctggaggtggtggccgccaaccagaccggcagactgtacgactgcgccgccgccaccggcatgtgccagcccatccccctgcacatcagacccgaggccgtgaacatgagcctgggcctgaccctggccgccagcaccaacggcagcagactgctggcctgcggccccaccctgcacagagtgtgcggcgagaacagctacagcaagggcagctgcctgctgctgggcagcagatgggagatcatccagaccgtgcccgacgccacccccgagtgcccccaccaggagatggacatcgtgttcctgatcgacggcagcggcagcatcgaccagaacgacttcaaccagatgaagggcttcgtgcaggccgtgatgggccagttcgagggcaccgacaccctgttcgccctgatgcagtacagcaacctgctgaagatccacttcaccttcacccagttcagaaccagccccagccagcagagcctggtggaccccatcgtgcagctgaagggcctgaccttcaccgccaccggcatcctgaccgtggtgacccagctgttccaccacaagaacggcgccagaaagagcgccaagaagatcctgatcgtgatcaccgacggccagaagtacaaggaccccctggagtacagcgacgtgatcccccaggccgagaaggccggcatcatcagatacgccatcggcgtgggccacgccttccagggccccaccgccagacaggagctgaacaccatcagcagcgcccccccccaggaccacgtgttcaaggtggacaacttcgccgccctgggcagcatccagaagcagctgcaggagaagatctacgccgtggagggcacccagagcagagccagcagcagcttccagcacgagatgagccaggagggcttcagcaccgccctgaccatggacggcctgttcctgggcgccgtgggcagcttcagctggagcggcggcgccttcctgtacccccccaacatgagccccaccttcatcaacatgagccaggagaacgtggacatgagagacagctacctgggctacagcaccgagctggccctgtggaagggcgtgcagaacctggtgctgggcgcccccagataccagcacaccggcaaggccgtgatcttcacccaggtgagcagacagtggagaaagaaggccgaggtgaccggcacccagatcggcagctacttcggcgccagcctgtgcagcgtggacgtggacagcgacggcagcaccgacctgatcctgatcggcgccccccactactacgagcagaccagaggcggccaggtgagcgtgtgccccctgcccagaggcagagtgcagtggcagtgcgacgccgtgctgagaggcgagcagggccacccctggggcagattcggcgccgccctgaccgtgctgggcgacgtgaacgaggacaagctgatcgacgtggccatcggcgcccccggcgagcaggagaacagaggcgccgtgtacctgttccacggcgccagcgagagcggcatcagccccagccacagccagagaatcgccagcagccagctgagccccagactgcagtacttcggccaggccctgagcggcggccaggacctgacccaggacggcctgatggacctggccgtgggcgccagaggccaggtgctgctgctgagaagcctgcccgtgctgaaggtgggcgtggccatgagattcagccccgtggaggtggccaaggccgtgtacagatgctgggaggagaagcccagcgccctggaggccggcgacgccaccgtgtgcctgaccatccagaagagcagcctggaccagctgggcgacatccagagcagcgtgagattcgacctggccctggaccccggcagactgaccagcagagccatcttcaacgagaccaagaaccccaccctgaccagaagaaagaccctgggcctgggcatccactgcgagaccctgaagctgctgctgcccgactgcgtggaggacgtggtgagccccatcatcctgcacctgaacttcagcctggtgagagagcccatccccagcccccagaacctgagacccgtgctggccgtgggcagccaggacctgttcaccgccagcctgcccttcgagaagaactgcggccaggacggcctgtgcgagggcgacctgggcgtgaccctgagcttcagcggcctgcagaccctgaccgtgggcagcagcctggagctgaacgtgatcgtgaccgtgtggaacgccggcgaggacagctacggcaccgtggtgagcctgtactaccccgccggcctgagccacagaagagtgagcggcgcccagaagcagccccaccagagcgccctgagactggcctgcgagaccgtgcccaccgaggacgagggcctgagaagcagcagatgcagcgtgaaccaccccatcttccacgagggcagcaacggcaccttcatcgtgaccttcgacgtgagctacaaggccaccctgggcgacagaatgctgatgagagccagcgccagcagcgagaacaacaaggccagcagcagcaaggccaccttccagctggagctgcccgtgaagtacgccgtgtacaccatgatcagcagacaggaggagagcaccaagtacttcaacttcgccaccagcgacgagaagaagatgaaggaggccgagcacagatacagagtgaacaacctgagccagagagacctggccatcagcatcaacttctgggtgcccgtgctgctgaacggcgtggccgtgtgggacgtggtgatggaggcccccagccagagcctgccctgcgtgagcgagagaaagcccccccagcacagcgacttcctgacccagatcagcagaagccccatgctggactgcagcatcgccgactgcctgcagttcagatgcgacgtgcccagcttcagcgtgcaggaggagctggacttcaccctgaagggcaacctgagcttcggctgggtgagagagaccctgcagaagaaggtgctggtggtgagcgtggccgagatcaccttcgacaccagcgtgtacagccagctgcccggccaggaggccttcatgagagcccagatggagatggtgctggaggaggacgaggtgtacaacgccatccccatcatcatgggcagcagcgtgggcgccctgctgctgctggccctgatcaccgccaccctgtacaagctgggcttcttcaagagacactacaaggagatgctggaggacaagcccgaggacaccgccaccttcagcggcgacgacttcagctgcgtggcccccaacgtgcccctgagctag

SEQ ID NO: 155273 - DNA, 3534 bp, Artificial Sequence
  derived and/or modified sequence
tgcgccctgagccccaccttccacttccccagcaccagatgcagcggcatgaccttcggcaccgtgctgctgctgagcgtgctggccagctaccacggcttcaacctggacgtggaggagcccaccatcttccaggaggacgccggcggcttcggccagagcgtggtgcagttcggcggcagcagactggtggtgggcgcccccctggaggtggtggccgccaaccagaccggcagactgtacgactgcgccgccgccaccggcatgtgccagcccatccccctgcacatcagacccgaggccgtgaacatgagcctgggcctgaccctggccgccagcaccaacggcagcagactgctggcctgcggccccaccctgcacagagtgtgcggcgagaacagctacagcaagggcagctgcctgctgctgggcagcagatgggagatcatccagaccgtgcccgacgccacccccgagtgcccccaccaggagatggacatcgtgttcctgatcgacggcagcggcagcatcgaccagaacgacttcaaccagatgaagggcttcgtgcaggccgtgatgggccagttcgagggcaccgacaccctgttcgccctgatgcagtacagcaacctgctgaagatccacttcaccttcacccagttcagaaccagccccagccagcagagcctggtggaccccatcgtgcagctgaagggcctgaccttcaccgccaccggcatcctgaccgtggtgacccagctgttccaccacaagaacggcgccagaaagagcgccaagaagatcctgatcgtgatcaccgacggccagaagtacaaggaccccctggagtacagcgacgtgatcccccaggccgagaaggccggcatcatcagatacgccatcggcgtgggccacgccttccagggccccaccgccagacaggagctgaacaccatcagcagcgcccccccccaggaccacgtgttcaaggtggacaacttcgccgccctgggcagcatccagaagcagctgcaggagaagatctacgccgtggagggcacccagagcagagccagcagcagcttccagcacgagatgagccaggagggcttcagcaccgccctgaccatggacggcctgttcctgggcgccgtgggcagcttcagctggagcggcggcgccttcctgtacccccccaacatgagccccaccttcatcaacatgagccaggagaacgtggacatgagagacagctacctgggctacagcaccgagctggccctgtggaagggcgtgcagaacctggtgctgggcgcccccagataccagcacaccggcaaggccgtgatcttcacccaggtgagcagacagtggagaaagaaggccgaggtgaccggcacccagatcggcagctacttcggcgccagcctgtgcagcgtggacgtggacagcgacggcagcaccgacctgatcctgatcggcgccccccactactacgagcagaccagaggcggccaggtgagcgtgtgccccctgcccagaggcagagtgcagtggcagtgcgacgccgtgctgagaggcgagcagggccacccctggggcagattcggcgccgccctgaccgtgctgggcgacgtgaacgaggacaagctgatcgacgtggccatcggcgcccccggcgagcaggagaacagaggcgccgtgtacctgttccacggcgccagcgagagcggcatcagccccagccacagccagagaatcgccagcagccagctgagccccagactgcagtacttcggccaggccctgagcggcggccaggacctgacccaggacggcctgatggacctggccgtgggcgccagaggccaggtgctgctgctgagaagcctgcccgtgctgaaggtgggcgtggccatgagattcagccccgtggaggtggccaaggccgtgtacagatgctgggaggagaagcccagcgccctggaggccggcgacgccaccgtgtgcctgaccatccagaagagcagcctggaccagctgggcgacatccagagcagcgtgagattcgacctggccctggaccccggcagactgaccagcagagccatcttcaacgagaccaagaaccccaccctgaccagaagaaagaccctgggcctgggcatccactgcgagaccctgaagctgctgctgcccgactgcgtggaggacgtggtgagccccatcatcctgcacctgaacttcagcctggtgagagagcccatccccagcccccagaacctgagacccgtgctggccgtgggcagccaggacctgttcaccgccagcctgcccttcgagaagaactgcggccaggacggcctgtgcgagggcgacctgggcgtgaccctgagcttcagcggcctgcagaccctgaccgtgggcagcagcctggagctgaacgtgatcgtgaccgtgtggaacgccggcgaggacagctacggcaccgtggtgagcctgtactaccccgccggcctgagccacagaagagtgagcggcgcccagaagcagccccaccagagcgccctgagactggcctgcgagaccgtgcccaccgaggacgagggcctgagaagcagcagatgcagcgtgaaccaccccatcttccacgagggcagcaacggcaccttcatcgtgaccttcgacgtgagctacaaggccaccctgggcgacagaatgctgatgagagccagcgccagcagcgagaacaacaaggccagcagcagcaaggccaccttccagctggagctgcccgtgaagtacgccgtgtacaccatgatcagcagacaggaggagagcaccaagtacttcaacttcgccaccagcgacgagaagaagatgaaggaggccgagcacagatacagagtgaacaacctgagccagagagacctggccatcagcatcaacttctgggtgcccgtgctgctgaacggcgtggccgtgtgggacgtggtgatggaggcccccagccagagcctgccctgcgtgagcgagagaaagcccccccagcacagcgacttcctgacccagatcagcagaagccccatgctggactgcagcatcgccgactgcctgcagttcagatgcgacgtgcccagcttcagcgtgcaggaggagctggacttcaccctgaagggcaacctgagcttcggctgggtgagagagaccctgcagaagaaggtgctggtggtgagcgtggccgagatcaccttcgacaccagcgtgtacagccagctgcccggccaggaggccttcatgagagcccagatggagatggtgctggaggaggacgaggtgtacaacgccatccccatcatcatgggcagcagcgtgggcgccctgctgctgctggccctgatcaccgccaccctgtacaagctgggcttcttcaagagacactacaaggagatgctggaggacaagcccgaggacaccgccaccttcagcggcgacgacttcagctgcgtggcccccaacgtgcccctgagctag

SEQ ID NO: 155274 - protein, 347 aa, Artificial Sequence
  derived and/or modified sequence
METPFYGDEALSGLGGGASGSGGSFASPGRLFPGAPPTAAAGSMMKKDALTLSLSEQVAAALKPAAAPPPTPLRADGAPSAAPPDGLLASPDLGLLKLASPELERLIIQSNGLVTTTPTSSQFLYPKVAASEEQEFAEGFVKALEDLHKQNQLGAGAAAAAAAAAAGGPSGTATGSAPPGELAPAAAAPEAPVYANLSSYAGGAGGAGGAATVAFAAEPVPFPPPPPPGALGPPRLAALKDEPQTVPDVPSFGESPPLSPIDMDTQERIKAERKRLRNRIAASKCRKRKLERISRLEEKVKTLKSQNTELASTASLLREQVAQLKQKVLSHVNSGCQLLPQHQVPAY

SEQ ID NO: 155275 - DNA, 1890 bp, Artificial Sequence
  derived and/or modified sequence
aggagccgccgccagtggagggccgggcgctgcggccgcggccggggcgggcgcagggccgagcggacgggggggcgcgggccccccgggaggccgcggccactcccccccgggccggcgcggcgggggaggcggaggatggaaacacccttctacggcgatgaggcgctgagcggcctgggcggcggcgccagtggcagcggcggcagcttcgcgtccccgggccgcttgttccccggggcgcccccgacggccgcggccggcagcatgatgaagaaggacgcgctgacgctgagcctgagtgagcaggtggcggcagcgctcaagcctgcggccgcgccgcctcctacccccctgcgcgccgacggcgcccccagcgcggcaccccccgacggcctgctcgcctctcccgacctggggctgctgaagctggcctcccccgagctcgagcgcctcatcatccagtccaacgggctggtcaccaccacgccgacgagctcacagttcctctaccccaaggtggcggccagcgaggagcaggagttcgccgagggcttcgtcaaggccctggaggatttacacaagcagaaccagctcggcgcgggcgcggccgctgccgccgccgccgccgccgccggggggccctcgggcacggccacgggctccgcgccccccggcgagctggccccggcggcggccgcgcccgaagcgcctgtctacgcgaacctgagcagctacgcgggcggcgccgggggcgcggggggcgccgcgacggtcgccttcgctgccgaacctgtgcccttcccgccgccgccacccccaggcgcgttggggccgccgcgcctggctgcgctcaaggacgagccacagacggtgcccgacgtgccgagcttcggcgagagcccgccgttgtcgcccatcgacatggacacgcaggagcgcatcaaggcggagcgcaagcggctgcgcaaccgcatcgccgcctccaagtgccgcaagcgcaagctggagcgcatctcgcgcctggaagagaaagtgaagaccctcaagagtcagaacacggagctggcgtccacggcgagcctgctgcgcgagcaggtggcgcagctcaagcagaaagtcctcagccacgtcaacagcggctgccagctgctgccccagcaccaggtgcccgcgtactgagtccgcgcgcggggcgcatgcgcggccaccctccccaaggggcgggctcgcgggggggtgtcgtgggcgccccggacttggagagggtgcggccctggggaccccccctccccgagtgtgcccaggaactcagagagggcgcggcccccggggattccccccccccgagggtgcccaggactcgacaagctggaccccctgctcccgggggggcgagcgcatgacccccccgccctcgcgctgcctctttcccccgcgcggccgccccgtgttgcacaaacccgcgcgtctcggctgcccctttgtacaccgcgccgcggaagggggctccgagggggcgcagcctcaaaccctgcctttcctttacttttacttttttttttttttctttggaagagagaagaacagagtgttcgattctgccctatttatgtttctactcgggaacaaacgttggttgtgtgtgtgtgtgttttcttgtgttggttttttaaagaaatgggaagaagaaaaaaaaattctccgcccctttcctcgatctcgctccccccttcggttctttcgaccggtcccccctcccttttttgttctgttttgttttgttttgctacgagtccacattcctgtttgtaatccttggttcgcccggttttctgttttcagtaaagtctcgttacgccagctcggcaaaaaaaaaaaaaaaaaaaa

SEQ ID NO: 155276 - DNA, 1044 bp, Artificial Sequence
  derived and/or modified sequence
atggaaacacccttttacggggatgaggctttgagcgggctgggaggcggagcctcaggaagcgggggatcgttcgccagccccggcaggctgtttccaggcgcgcctccgacagcagcagcaggctcaatgatgaagaaggatgcgttaaccctctcactgtcagagcaagtggcggcggcccttaagcctgccgctgcccctccacccaccccccttcgggccgatggcgctccaagcgcagccccccccgatggactgctggccagcccagatctgggtctattgaagttagcctctcccgagctggagagattaatcattcagtcaaacggactggtgacaactacaccgacatcatcgcagtttttgtatccgaaagttgctgcgtcagaagaacaggagttcgctgaaggatttgtgaaggctctggaagatttacacaagcagaaccaactcggtgccggggccgcggccgcagctgccgcagccgccgccggaggtccatccggcacggcaaccggtagcgcaccgcctggcgagttagcaccagctgccgccgccccagaggccccagtctacgcaaatctgtcttcatatgccgggggggcaggtggtgcagggggagcggctaccgttgcgtttgcggcagagccggtccccttccctccccctcccccaccaggggccttgggaccaccaaggctggccgcactgaaagacgagccacagactgtgcccgacgtgcccagctttggcgagtcccctcctctcagtcctatcgacatggacacacaggagcggattaaggctgaacggaagcggcttagaaatcgtatcgctgcaagcaagtgtagaaaaagaaaacttgaacgcatatcacgccttgaggagaaggtcaaaactctaaagagccagaatactgagctcgcgagcacagcaagtctgttgcgcgagcaggtcgcccagctgaagcagaaggtgctgtcccatgtgaactccggctgccaactcctgcctcagcatcaggtgcccgcctattag

SEQ ID NO: 155277 - DNA, 1870 bp, Artificial Sequence
  derived and/or modified sequence
aggagccgccgccagtggagggccgggcgctgcggccgcggccggggcgggcgcagggccgagcggacgggggggcgcgggccccccgggaggccgcggccactcccccccgggccggcgcggcgggggaggcggaggatggaaacacccttctacggcgatgaggcgctgagcggcctgggcggcggcgccagtggcagcggcggcagcttcgcgtccccgggccgcttgttccccggggcgcccccgacggccgcggccggcagcatgatgaagaaggacgcgctgacgctgagcctgagtgagcaggtggcggcagcgctcaagcctgcggccgcgccgcctcctacccccctgcgcgccgacggcgcccccagcgcggcaccccccgacggcctgctcgcctctcccgacctggggctgctgaagctggcctcccccgagctcgagcgcctcatcatccagtccaacgggctggtcaccaccacgccgacgagctcacagttcctctaccccaaggtggcggccagcgaggagcaggagttcgccgagggcttcgtcaaggccctggaggatttacacaagcagaaccagctcggcgcgggcgcggccgctgccgccgccgccgccgccgccggggggccctcgggcacggccacgggctccgcgccccccggcgagctggccccggcggcggccgcgcccgaagcgcctgtctacgcgaacctgagcagctacgcgggcggcgccgggggcgcggggggcgccgcgacggtcgccttcgctgccgaacctgtgcccttcccgccgccgccacccccaggcgcgttggggccgccgcgcctggctgcgctcaaggacgagccacagacggtgcccgacgtgccgagcttcggcgagagcccgccgttgtcgcccatcgacatggacacgcaggagcgcatcaaggcggagcgcaagcggctgcgcaaccgcatcgccgcctccaagtgccgcaagcgcaagctggagcgcatctcgcgcctggaagagaaagtgaagaccctcaagagtcagaacacggagctggcgtccacggcgagcctgctgcgcgagcaggtggcgcagctcaagcagaaagtcctcagccacgtcaacagcggctgccagctgctgccccagcaccaggtgcccgcgtactgagtccgcgcgcggggcgcatgcgcggccaccctccccaaggggcgggctcgcgggggggtgtcgtgggcgccccggacttggagagggtgcggccctggggaccccccctccccgagtgtgcccaggaactcagagagggcgcggcccccggggattccccccccccgagggtgcccaggactcgacaagctggaccccctgctcccgggggggcgagcgcatgacccccccgccctcgcgctgcctctttcccccgcgcggccgccccgtgttgcacaaacccgcgcgtctcggctgcccctttgtacaccgcgccgcggaagggggctccgagggggcgcagcctcaaaccctgcctttcctttacttttacttttttttttttttctttggaagagagaagaacagagtgttcgattctgccctatttatgtttctactcgggaacaaacgttggttgtgtgtgtgtgtgttttcttgtgttggttttttaaagaaatgggaagaagaaaaaaaaattctccgcccctttcctcgatctcgctccccccttcggttctttcgaccggtcccccctcccttttttgttctgttttgttttgttttgctacgagtccacattcctgtttgtaatccttggttcgcccggttttctgttttcagtaaagtctcgttacgccagctcggc

SEQ ID NO: 155278 - DNA, 1044 bp, Artificial Sequence
  derived and/or modified sequence
atggagacccccttctatggagatgaggccctgagcggcctgggcggcggggccagcggcagcggcggcagctttgccagccctggccgcctcttccctggggccccacccacagctgctgctggctccatgatgaagaaggatgccctgaccctgagcctgtctgagcaggtggccgccgccctgaagccagctgctgcccccccacccacccccctgcgggcagatggagcccccagcgctgcccccccagatggcctgctggccagcccagacctgggcctgctgaagctggccagccctgagctggagcggctcatcatccagagcaatggcctggtgaccaccacccccaccagcagccagttcctgtaccccaaggtggccgccagcgaggagcaggagtttgctgagggctttgtgaaggccctggaggacctgcacaagcagaaccagctgggcgctggagctgctgctgctgctgctgctgctgctgctgggggccccagcggcacagccaccggcagcgcccctcctggagagctggccccagctgctgctgcccctgaggcccctgtgtatgccaacctgagcagctatgccggcggggccggcggggccggcggggccgccaccgtggcctttgctgctgagcctgtgcccttccccccacctcctcctcctggggccctgggccccccccggctggccgccctgaaggatgagccccagacagtgcctgatgtgcccagctttggagagagcccccccctgagccccatcgacatggacacccaggagcgcatcaaggccgagaggaagaggctgaggaacagaattgctgccagcaagtgcaggaagaggaagctggagcgcatcagccggctggaggagaaggtgaagaccctgaagagccagaacacagagctggccagcacagccagcctgctgcgggagcaggtggcccagctgaagcagaaggtgctgagccacgtgaacagcggctgccagctgctgccccagcaccaggtgcctgcctactag

SEQ ID NO: 155279 - DNA, 1044 bp, Artificial Sequence
  derived and/or modified sequence
atggagacccccttctacggcgacgaggccctgagcggcctgggcgggggcgcctctggctccggcggctctttcgccagcccgggaaggctgtttccaggagcacctccaactgctgctgctggaagcatgatgaagaaagacgcactcaccctgtcactgtcagagcaggtggccgctgccctgaagccggccgccgccccccctcctacccctctgcgggcagatggcgccccatctgccgcccctccggacggtctgctggctagccccgatctgggactgctgaagctcgcatcaccggagctagaaaggctgattatacagagtaacggactggtgaccacaacaccaacaagttcccagttcctgtatcccaaagtggcagcatcagaggagcaggaattcgccgagggttttgttaaggcactcgaagatttgcacaaacagaatcagcttggcgctggagcagctgccgccgcagccgccgccgccgccggaggcccgagtggaaccgctacgggatcagctcctcctggggaactggcccccgcagccgccgccccagaggctcctgtgtatgccaatttgtcatcctacgcggggggcgctggcggtgccgggggcgccgcaacggtagcctttgccgctgagcctgtacccttcccgccaccacccccaccaggtgccctcggccctccgaggctagccgcactgaaggacgagccacagactgtccccgacgtgcctagcttcggggagtcccctcctctgtcacccatcgatatggacacacaagagcggatcaaagctgagcgtaagaggttgcgaaaccgcatcgcagcctcaaaatgcagaaaaagaaagctcgagcgtatctctcggctcgaggagaaagtcaaaaccctgaaatctcaaaatacggaattggcaagcactgctagcctgttgcgcgaacaggtcgcacagctcaagcagaaagtactaagtcatgttaactctggttgccagctacttcctcagcaccaggtcccagcctactag

SEQ ID NO: 155280 - DNA, 1044 bp, Artificial Sequence
  derived and/or modified sequence
atggaaaccccattctacggggatgaggccctgtcaggactcggtgggggtgcctcgggatcagggggatcatttgcgagtcccggtcggttgttcccaggagcacctccgaccgccgctgcgggatctatgatgaagaaggacgctctgaccctgagcttgagtgagcaggttgcagccgctcttaaacctgccgcagcgccaccaccaactcctctgcgggctgacggggcaccatccgccgcacctccagatggcctattggcctcccccgacttagggctcctgaagctggcctctccggagctagaacggctaatcatacagtcaaacggtctggttacgactacgcctacatcatcccaatttctgtaccctaaggtagcagcatccgaggaacaggagtttgctgaggggtttgttaaagccttggaagatctgcataagcagaatcagttgggagcaggtgctgccgcagccgctgccgcagctgccgcagggggtccaagcggcaccgccaccggcagtgctcctcctggcgaactcgcgcctgccgcagctgcccctgaggcccctgtgtacgctaatcttagttcctatgccggtggcgctgggggagctgggggagctgcgactgtagccttcgccgcagaacccgtgccattcccccctcctccaccccctggtgccttggggcctccacggcttgctgccctaaaggatgagccgcagaccgtgccagacgtgccctcgtttggggagtctcccccattgagtcccatcgatatggacactcaggaacggatcaaggccgagcggaaacgacttcgcaatcgcatcgcagcttcaaaatgtcggaagagaaaattggagagaatttcaaggctcgaggagaaagtcaagacactcaagtctcagaacacggaactggcgagcaccgctagcctgctgcgggaacaagtggcccagctgaaacagaaagttctgtcccatgtgaatagcggctgtcagttgttacctcagcatcaggttcctgcttattag

SEQ ID NO: 155281 - DNA, 1044 bp, Artificial Sequence
  derived and/or modified sequence
atggagacccccttctacggcgacgaggccctgagcggcctgggcggcggcgccagcggcagcggcggcagcttcgccagccccggcagactgttccccggcgccccccccaccgccgccgccggcagcatgatgaagaaggacgccctgaccctgagcctgagcgagcaggtggccgccgccctgaagcccgccgccgcccccccccccacccccctgagagccgacggcgcccccagcgccgccccccccgacggcctgctggccagccccgacctgggcctgctgaagctggccagccccgagctggagagactgatcatccagagcaacggcctggtgaccaccacccccaccagcagccagttcctgtaccccaaggtggccgccagcgaggagcaggagttcgccgagggcttcgtgaaggccctggaggacctgcacaagcagaaccagctgggcgccggcgccgccgccgccgccgccgccgccgccgccggcggccccagcggcaccgccaccggcagcgccccccccggcgagctggcccccgccgccgccgcccccgaggcccccgtgtacgccaacctgagcagctacgccggcggcgccggcggcgccggcggcgccgccaccgtggccttcgccgccgagcccgtgcccttcccccccccccccccccccggcgccctgggcccccccagactggccgccctgaaggacgagccccagaccgtgcccgacgtgcccagcttcggcgagagcccccccctgagccccatcgacatggacacccaggagagaatcaaggccgagagaaagagactgagaaacagaatcgccgccagcaagtgcagaaagagaaagctggagagaatcagcagactggaggagaaggtgaagaccctgaagagccagaacaccgagctggccagcaccgccagcctgctgagagagcaggtggcccagctgaagcagaaggtgctgagccacgtgaacagcggctgccagctgctgccccagcaccaggtgcccgcctactag

SEQ ID NO: 155282 - protein, 332 aa, Artificial Sequence
  derived and/or modified sequence
MTWTSGQLQREKQARPGSGAVLAFPDDKDLRVYGPAESQSAVFGDVCPLLTSLLDGYNVCVMAYGQTGSGKSYTMLGRHSDDGPVLPLDPQSDLGIIPRVAEELFRLILENTSRSPKVEVSIVEVYNNDIFDLLAKDSIAAVSGVKREVVTAKDGRTEVALLASEAVGSASKLMELVHGGLQLRAKHPTLVHADSSRSHLIITVTLTTASCSDSTADQACSATLPREQTEAGRAGRSRRASQGALAPQLVPGNPAGHAEQVQARLQLVDSAGSECVGGDAKLLVILCISPSQRHLAQTLQGLGFGIRARQVQRGPARKKPPSSQTEGKRRPD

SEQ ID NO: 155283 - DNA, 999 bp, Artificial Sequence
  derived and/or modified sequence
atgacatggacctcgggtcaattacagcgcgaaaagcaggcccgcccaggtagcggagccgtacttgcctttccagatgacaaggacctccgagtttatgggccagcagagtctcaaagtgctgtttttggcgacgtatgtcctttgttaacctctctgctggacggctacaacgtgtgtgtaatggcatacggtcagactggttcagggaagtcttataccatgctcggccgacattcagatgatgggcctgtcctcccactcgatccccaaagtgaccttggcatcatccctagagtcgccgaagaactctttcgcctgattctggagaatacaagtcgatcccccaaggtcgaggtgtcaatcgttgaagtatacaataacgatatctttgacctgctagcgaaggactcaatcgccgctgtatccggggttaaaagggaagtcgtaactgccaaggatggcagaaccgaagtcgcgctgctagccagcgaagcagtcggttcagccagtaagctgatggaattggtccacggaggcctgcagcttagggcaaagcaccccaccttggttcacgcagatagctcgcgcagccacttaattattacagtaacactgactacagccagctgcagcgattctacagcagaccaagcctgcagcgctactctgccaagggagcagactgaggccgggagagcagggaggtcaagacgggcatctcaaggcgccctggctccacagctcgtgcctggaaacccagccggtcacgcagagcaagtgcaggcgaggctgcagcttgtggactctgctggaagcgagtgtgttggcggcgacgctaaacttctcgttattctctgtatcagcccctcccagagacatctggcccagacactgcagggcttggggttcggcatccgggccagacaggtgcagcgcggacctgcgaggaagaagcctccctcgtctcaaacggagggaaagcgacgaccagattag

SEQ ID NO: 155284 - DNA, 1326 bp, Artificial Sequence
  derived and/or modified sequence
ggttggtggggcttgtgtttaattaacgcagcacacaaagtcttatgacgtcgttttactcttttctctcaggaaacaattctggtgaaatgtgatcgtcctggccaccctctgattgataagacatatcattttgaaagatatactggccttcccagctgacatggacctcaggtcagcttcagcgtgagaagcaggccaggcctgggtctggagccgtcctggccttcccagatgacatggacctcaggtcagcttcagcgtgagaagcaggccaggcctgggtctggagccgtcctggccttcccagatgacaaggacctcagggtttatggtccagcagagtctcagagcgcggtctttggagatgtgtgccccctactcacttctctcttggatgggtacaatgtttgtgttatggcgtatggacagacgggcagcggaaagagctataccatgctgggacgccattcggacgacggccctgttctgccgcttgacccacagagtgacttaggaattatccctagagtggctgaggagctcttcaggctcattttggaaaatacctcaagaagcccaaaggttgaagtctccatagtggaagtttacaataatgacatttttgaccttctggccaaagacagcattgcagcagtgtcgggggtcaagcgtgaggtggtgacagccaaggatggacggacagaggttgcgctgctggcctctgaggctgtcggcagcgcctcgaaactgatggagctcgttcatggaggtctgcagctcagggcgaagcaccccaccctggtgcacgcggattcctccaggtctcacctgataattacggtgactctaaccacagcctcctgctctgacagcactgcagaccaagcctgcagtgccaccctccccagggagcaaacagaggcaggaagggcaggaaggagccgcagagcttctcaaggggccttggctccacagctggttcctgggaaccccgcagggcatgcggagcaggtgcaggctcgactacagctcgtggactcggccggcagcgagtgcgttggaggcgatgcgaagttactggtgattctctgcatttctcccagccagaggcacctggcacagacgttgcagggcctgggtttcgggatccgagctcggcaagtccagcgaggccctgcccgaaagaagccgcccagctcccaaacggaggggaagaggaggccggattgaatgcattaacaagtttttctcctaaaactgtgtttcttgtccttgctttataatgcatatgtgcttagaaataaacaggtttcacgtggactc

SEQ ID NO: 155285 - DNA, 999 bp, Artificial Sequence
  derived and/or modified sequence
atgacctggaccagcggccagctgcagcgggagaagcaggcccggcccggcagcggggctgtgctggccttcccagatgacaaggacctgcgggtgtatggccctgctgagagccagagcgctgtgtttggagatgtgtgccccctgctgaccagcctgctggatggctacaacgtgtgtgtgatggcctacggccagacaggcagcggcaagagctacaccatgctgggccgccacagtgatgatggccctgtgctgcccctggacccccagagcgacctgggcatcatcccccgggtggccgaggagctgttccgcctcatcctggagaacaccagccgcagccccaaggtggaggtgtccatcgtggaggtgtacaacaatgacatctttgacctgctggccaaggacagcattgctgctgtgtctggagtgaagcgggaggtggtgacagccaaggatggccgcacagaggtggccctgctggccagcgaggccgtgggcagcgccagcaagctgatggagctggtgcacggcggcctgcagctgcgggccaagcaccccaccctggtgcatgctgacagcagccgcagccacctgatcatcaccgtgaccctgaccacagccagctgcagcgacagcacagctgaccaggcctgcagcgccaccctgccccgggagcagacagaagctggccgggccggccgcagccggcgggccagccagggcgccctggccccccagctggtgcccggcaacccagctggccacgccgagcaggtgcaggcccggctgcagctggtggacagcgctggctctgaatgtgtgggcggagatgccaagctgctggtgatcctgtgcatcagccccagccagaggcacctggcccagaccctgcagggcctgggcttcggcatccgggcccggcaggtgcagaggggccctgccaggaagaagccacccagcagccagacagagggcaagagaagaccagactag

SEQ ID NO: 155286 - DNA, 999 bp, Artificial Sequence
  derived and/or modified sequence
atgacctggaccagcggccagctgcagcgggagaagcaggcccggcccggctccggcgccgtgttagcctttccagacgacaaagatctgcgcgtatacggtccagcagagtcacagagcgcagtgtttggcgatgtgtgccctttactgactagccttttggatggatacaatgtctgtgtgatggcatacggccaaacagggagcggtaaatcctacactatgctgggtagacacagcgacgatggccctgtgttgccacttgatccccaatccgatcttgggatcattcctcgggtggctgaggaactcttccggctgattctggagaacacctcccggtcaccgaaggtggaagtttctatcgttgaggtctacaacaatgatatctttgatctactcgcaaaggattccatcgcggcagtatcaggggtgaaacgggaagtggtgaccgctaaggacggaaggacagaagtggccttactcgcttcagaggcagtggggtccgcctccaaattaatggagctggttcacggagggctccagctccgagctaagcacccaaccttagtccatgcagattcttcgaggtctcacctgataatcactgtgactttgaccacggcgtcatgtagcgattccacagccgatcaagcgtgcagcgcgactctgccacgcgagcagactgaagccggacgtgcagggcggagcagacgggcctctcagggagccctggctccccagcttgtgcccgggaatcctgccggccacgctgagcaggttcaagcccgactccagctggtggactctgcagggtccgagtgtgtgggaggtgacgcaaagctcctggtgatcctttgtatttctccgagccagaggcacttagctcagacactgcagggcttgggcttcggcatcagagcacggcaggttcagaggggtcctgctcgaaagaaacccccttccagtcagaccgagggaaagcggagacctgattag

SEQ ID NO: 155287 - DNA, 999 bp, Artificial Sequence
  derived and/or modified sequence
atgacatggacttctgggcagctgcaacgcgaaaagcaggcacgtcccggttctggtgcggtgttagcgttccccgatgataaggacctacgggtgtacggtcctgcagaatcccagagcgctgtctttggcgatgtctgcccactgctcacaagcctcctggatggctataatgtatgtgtcatggcttatgggcagacaggctctgggaaatcatacactatgctaggaaggcactccgatgacgggcctgtcttaccccttgacccccagtccgatctgggcatcattccacgcgtcgctgaggaattatttcgcttgatcctggagaacaccagtcgctccccaaaagtagaggtgtcaatcgttgaggtgtataataacgacatttttgatctcctagccaaggattctatcgctgcggtttctggagttaaacgggaggtagtcacagcaaaagacggacgcacagaggtagctctgctagcaagtgaagccgttggatcagcctccaagttaatggagctcgtgcacgggggtttacaattgcgggctaaacatcccacgctggtgcatgccgacagctctcgatctcacctgattatcacagtgacattgaccacggctagttgctctgatagcacggccgaccaggcgtgctctgcgacactgccaagagagcagacggaagcaggtagagccggaaggtctcggagagcttctcaaggagcactagcaccccaactcgtgcccggaaatccagcgggtcacgcagagcaggtgcaggccaggctgcagctggtagatagtgccggtagcgaatgtgttggtggcgacgccaaattactggtcatcctgtgcatctctccatcgcagcggcatctggcccaaacattacagggactcggtttcggcattcgggcaaggcaggttcagcgaggcccagcaaggaagaaacccccatccagccagactgaagggaagaggagaccggactag

SEQ ID NO: 155288 - DNA, 999 bp, Artificial Sequence
  derived and/or modified sequence
atgacctggaccagcggccagctgcagagagagaagcaggccagacccggcagcggcgccgtgctggccttccccgacgacaaggacctgagagtgtacggccccgccgagagccagagcgccgtgttcggcgacgtgtgccccctgctgaccagcctgctggacggctacaacgtgtgcgtgatggcctacggccagaccggcagcggcaagagctacaccatgctgggcagacacagcgacgacggccccgtgctgcccctggacccccagagcgacctgggcatcatccccagagtggccgaggagctgttcagactgatcctggagaacaccagcagaagccccaaggtggaggtgagcatcgtggaggtgtacaacaacgacatcttcgacctgctggccaaggacagcatcgccgccgtgagcggcgtgaagagagaggtggtgaccgccaaggacggcagaaccgaggtggccctgctggccagcgaggccgtgggcagcgccagcaagctgatggagctggtgcacggcggcctgcagctgagagccaagcaccccaccctggtgcacgccgacagcagcagaagccacctgatcatcaccgtgaccctgaccaccgccagctgcagcgacagcaccgccgaccaggcctgcagcgccaccctgcccagagagcagaccgaggccggcagagccggcagaagcagaagagccagccagggcgccctggccccccagctggtgcccggcaaccccgccggccacgccgagcaggtgcaggccagactgcagctggtggacagcgccggcagcgagtgcgtgggcggcgacgccaagctgctggtgatcctgtgcatcagccccagccagagacacctggcccagaccctgcagggcctgggcttcggcatcagagccagacaggtgcagagaggccccgccagaaagaagccccccagcagccagaccgagggcaagagaagacccgactag

SEQ ID NO: 155289 - protein, 1076 aa, Artificial Sequence
  derived and/or modified sequence
MEPGSKSVSRSDWQPEPHQRPITPLEPGPEKTPIAQPESKTLQGSNTQQKPASNQRPLTQQETPAQHDAESQKEPRAQQKSASQEEFLAPQKPAPQQSPYIQRVLLTQQEAASQQGPGLGKESITQQEPALRQRHVAQPGPGPGEPPPAQQEAESTPAAQAKPGAKREPSAPTESTSQETPEQSDKQTTPVQGAKSKQGSLTELGFLTKLQELSIQRSALEWKALSEWVTDSESESDVGSSSDTDSPATMGGMVAQGVKLGFKGKSGYKVMSGYSGTSPHEKTSARNHRHYQDTASRLIHNMDLRTMTQSLVTLAEDNIAFFSSQGPGETAQRLSGVFAGVREQALGLEPALGRLLGVAHLFDLDPETPANGYRSLVHTARCCLAHLLHKSRYVASNRRSIFFRTSHNLAELEAYLAALTQLRALVYYAQRLLVTNRPGVLFFEGDEGLTADFLREYVTLHKGCFYGRCLGFQFTPAIRPFLQTISIGLVSFGEHYKRNETGLSVAASSLFTSGRFAIDPELRGAEFERITQNLDVHFWKAFWNITEMEVLSSLANMASATVRVSRLLSLPPEAFEMPLTADPTLTVTISPPLAHTGPGPVLVRLISYDLREGQDSEELSSLIKSNGQRSLELWPRPQQAPRSRSLIVHFHGGGFVAQTSRSHEPYLKSWAQELGAPIISIDYSLAPEAPFPRALEECFFAYCWAIKHCALLGSTGERICLAGDSAGGNLCFTVALRAAAYGVRVPDGIMAAYPATMLQPAASPSRLLSLMDPLLPLSVLSKCVSAYAGAKTEDHSNSDQKALGMMGLVRRDTALLLRDFRLGASSWLNSFLELSGRKSQKMSEPIAEPMRRSVSEAALAQPQGPLGTDSLKNLTLRDLSLRGNSETSSDTPEMSLSAETLSPSTPSDVNFLLPPEDAGEEAEAKNELSPMDRGLGVRAAFPEGFHPRRSSQGATQMPLYSSPIVKNPFMSPLLAPDSMLKSLPPVHIVACALDPMLDDSVMLARRLRNLGQPVTLRVVEDLPHGFLTLAALCRETRQAAELCVERIRLVLTPPAGAGPSGETGAAGVDGGCGGRH

SEQ ID NO: 155290 - DNA, 3231 bp, Artificial Sequence
  derived and/or modified sequence
atggaaccagggagcaaaagtgtttcacgttctgactggcaaccagagcctcaccagcggccgatcacacccctggagcctggtcccgagaagactcccattgcacagccagaatctaagaccttgcagggctctaacactcagcagaagcctgcttctaatcaaaggccccttacccagcaggaaacacccgctcagcacgacgcagaatcccaaaaagagcctagggctcagcagaagagtgcgtcccaggaagagttcctggccccccagaagcccgcgcctcagcagtcaccctacattcagcgggtacttttaacgcaacaagaagccgcaagtcagcaaggccccgggctcgggaaagagagcataactcaacaggagcccgcactacgacagcggcatgtcgcccagcctggacccgggcctggggagcccccccctgctcaacaagaagccgagagcacaccagccgctcaggccaagcctggggctaaacgcgagccaagtgcacctacagaatcaacatcccaggagacccccgagcaatcagacaaacagaccactcctgtgcagggagcaaagtcaaaacagggctccctgacagaacttggctttttaaccaaactccaggagcttagcatccagcggagcgcactggagtggaaggcactttccgagtgggtcaccgatagcgagtctgaatctgatgtggggagcagtagcgatacagactccccagccactatggggggaatggtcgctcaaggcgtgaagctggggttcaaaggcaaaagtggctataaagtcatgagtggttactcaggaacatctccccatgagaagaccagcgcccgaaatcaccgacattaccaagacactgccagcagattgatccacaatatggatttacgaaccatgactcagagcctggtgacactggcggaggacaatatcgccttcttcagtagtcaaggcccaggggaaacagctcagcgtttgtccggcgtgttcgccggcgttcgcgaacaagcgcttgggctggagccagctctgggcaggctactcggggtggcccacctgtttgacctggatccagagacccccgctaacggctaccgcagcctcgtgcacacagctagatgttgcctggctcacctgctccacaagagccgatacgttgctagcaaccggagatccatcttttttaggacttcacataacttggccgagctggaagcctacctcgctgcacttacacagctccgggctttggtgtattatgcccaacgcctgttagttacaaatcggcctggcgtgctgttctttgaaggcgatgaaggtttgacggccgactttctgcgcgaatacgtgacactgcacaaaggatgcttttatgggcgctgtcttgggttccaatttactcccgcaattcggcctttcttgcagactataagtataggtcttgtcagttttggcgagcattacaagagaaatgagacaggcctgtccgttgccgcttccagcctgtttacttctggaaggttcgccatcgatccagagttgcgcggagccgaattcgagcgcataacacaaaatctcgacgtacacttttggaaagcattctggaacattactgagatggaggtgttgtcgtcccttgcaaacatggcctccgctaccgtccgagtgtctagactcttatctcttccaccggaggcattcgagatgcctctcacagctgacccaaccctcaccgtcacgatctccccacctctggctcacactgggccaggcccagtgctcgtccggttaattagttatgatttgagggaaggacaggactccgaagaactgagcagcctcattaagtctaatggccaaaggtccctggagctgtggccccgtccacaacaggcccccagatctagaagcctgattgtccattttcatggaggtggatttgttgcccaaacttctcgaagccacgagccataccttaaatcctgggcccaagaactcggagctccgatcatctctatcgattactccttggcgccggaggcacctttcccacgggcactcgaagagtgttttttcgcctattgttgggctattaagcactgcgctcttctcggttccacaggcgagcggatctgcctcgccggcgatagcgccggcggcaacctctgtttcactgtggcattgagggcggccgcatatggcgttagggtccccgatggaatcatggccgcctaccccgcaaccatgctgcagccagcagcttcaccgtcacgattactctccctaatggacccacttctccccctatctgttctgagtaagtgtgtgtcagcctacgccggagccaaaaccgaggaccactcaaacagcgaccagaaggcacttggcatgatgggactcgttcggagggacactgccctcctgctccgcgacttcagacttggagcaagtagttggttgaatagttttctggaactgtctggtcgtaagtcccagaagatgtctgagcctatcgctgaacccatgaggcgcagcgtgtcagaggcagcgttagcccagcctcagggcccattggggaccgacagtctgaaaaaccttaccttacgagacctgagcctgcgaggcaacagcgagacgagtagtgatacccccgagatgagtctgagtgccgaaaccttgtccccctccacacccagcgatgtaaatttccttctccctcccgaggatgccggcgaggaggccgaggctaaaaatgagttgagccccatggaccgcggactcggcgtgcgcgcagcttttccagaaggttttcacccaagacgttcaagccagggggccactcagatgcccctttactccagcccgatcgtgaagaaccctttcatgtccccgctcctggcaccagactcaatgctgaagagtctccccccggtgcatatagttgcttgtgcgttggaccccatgttagatgactcagtcatgctcgcaagacggctgcgcaacctcgggcagcccgtgaccttgcgagtggtggaagacctgccccacggtttccttactctcgctgcgttatgccgggaaacacgtcaggcagctgagctctgtgttgagaggattagactggtcttaacaccgcctgctggcgcagggccttccggtgaaacaggggcagcaggtgtcgatggagggtgtggaggacgccactag

SEQ ID NO: 155291 - DNA, 3231 bp, Artificial Sequence
  derived and/or modified sequence
atggagcccggcagcaagtctgtgtccagaagtgactggcagcctgagccccaccagaggcccatcacccccctggagcccggccctgagaagacccccatcgcccagcctgagagcaagaccctgcagggcagcaacacccagcagaagccagccagcaaccagaggcccctgacccagcaggagaccccagcccagcatgatgctgagagccagaaggagccccgggcccagcagaagagcgccagccaggaggagttcctggccccccagaagccagccccccagcagagcccctacatccagagggtgctgctgacccagcaggaggccgccagccagcagggccctggcctgggcaaggagagcatcacccagcaggagcccgccctgcggcagagacatgtggcccagcccggccctggccctggagagcccccaccagcccagcaggaggccgagagcaccccagctgcccaggccaagccaggggccaagcgggagcccagcgcccccacagagagcaccagccaggagaccccagagcagagcgacaagcagaccacccctgtgcagggcgccaagagcaagcagggcagcctgacagagctgggcttcctgaccaagctgcaggagctgagcatccagaggtctgccctggagtggaaggccctgtctgagtgggtgacagacagcgagagcgagagtgatgtgggcagcagcagtgacacagacagccctgccaccatgggcggcatggtggcccagggcgtgaagctgggcttcaagggcaagagcggctacaaggtgatgagcggctacagcggcaccagcccccatgagaagaccagcgccaggaaccaccgccactaccaggacacagccagccgcctcatccacaacatggacctgcggaccatgacccagagcctggtgaccctggccgaggacaacatcgccttcttcagcagccagggccctggagaaacagcccagaggctgtctggagtgtttgctggggtgcgggagcaggccctgggcctggagcccgccctgggccgcctgctgggcgtggcccacctgtttgacctggaccctgagaccccagccaacggctaccgcagcctggtgcacacagcccgctgctgcctggcccacctgctgcacaagagccgctacgtggccagcaacagaagaagcatcttcttccgcaccagccacaacctggccgagctggaggcctacctggccgccctgacccagctgcgggccctggtgtactatgcccagaggctgctggtgaccaacagacctggggtgctcttctttgaaggagatgagggcctgacagctgacttcctgcgggagtatgtgaccctgcacaagggctgcttctacggccgctgcctgggcttccagttcaccccagccatccggcccttcctgcagaccatcagcatcggcctggtgtcctttggagagcactacaagagaaatgaaacaggcctgtctgtggccgccagcagcctcttcaccagcggccgctttgccatcgaccctgagctgcggggagctgagtttgagcgcatcacccagaacctggatgtgcacttctggaaggccttctggaacatcacagagatggaggtgctgagcagcctggccaacatggccagcgccaccgtgcgggtgtcccggctgctgagcctgcccccagaggcctttgagatgcccctgacagctgaccccaccctgactgtgaccatcagcccccccctggcccacacaggccctggccctgtgctggtgcggctcatctcctatgacctgcgggagggccaggacagcgaggagctgagcagcctcatcaagagcaatggccagaggagcctggagctgtggccccggccccagcaggcccccaggagccgcagcctgattgtgcacttccatggaggcggctttgtggcccagaccagccgcagccatgagccctacctgaagtcctgggcccaggagctgggcgcccccatcatcagcattgactacagcctggcccctgaggcccccttcccccgggccctggaggagtgcttctttgcctactgctgggccatcaagcactgtgccctgctgggcagcactggagagcgcatctgcctggccggggacagcgctgggggcaacctgtgcttcaccgtggccctgcgggctgctgcctatggagtgcgggtgcctgatggcatcatggccgcctacccagccaccatgctgcagcctgctgccagccccagccggctgctgagcctgatggaccccctgctgcccctgtctgtgctgagcaaatgtgtgtctgcctatgctggggccaagacagaggaccacagcaacagcgaccagaaggccctgggcatgatgggcctggtgcggcgggacacagccctgctgctgcgggacttccggctgggcgccagctcctggctgaacagcttcctggagctgagcggcaggaagagccagaagatgtctgagcccatcgccgagcccatgagaagatctgtgtctgaggccgccctggcccagccccagggccccctgggcacagacagcctgaagaacctgaccctgcgggacctgagcctgcggggcaacagcgagaccagcagtgacaccccagagatgagcctgtctgctgagaccctgagccccagcacccccagtgatgtgaacttcctgctgcccccagaagatgctggggaggaggccgaggccaagaatgagctgagccccatggaccggggcctgggcgtgcgggccgccttccctgagggcttccacccccggcgcagcagccagggcgccacccagatgcccctgtacagcagccccatcgtgaagaaccccttcatgagccccctgctggccccagacagcatgctgaagagcctgccccctgtgcacatcgtggcctgtgccctggaccccatgctggatgacagcgtgatgctggcccggcggctgaggaacctgggccagcctgtgaccctgcgggtggtggaggacctgccccacggcttcctgaccctggccgccctgtgccgggagacccggcaggccgctgagctgtgtgtggagcgcatccggctggtgctgaccccacctgctggagctggccccagcggggagactggagctgctggggtggatggcggctgcggcggccgccactag

SEQ ID NO: 155292 - DNA, 3806 bp, Artificial Sequence
  derived and/or modified sequence
cttcttgtaagagagtgctaggcacatagcctcctcctattcctaatcctcccaccaaagaaagaggcacagagttcattacttagtgggggccagctgtgatcggccaactgccagctgccttaaaaaggaagaccagtgatgctaggatggagtgaaacccaagaggaagtgccatcatgaggaatcaatgagagatctgtgaagagagagggctgggtgggagcccagaaggatagaacctggaagatcaatatctcccgtgagggaaataacaatggagccaggttctaagtcagtgtctaggtcagactggcaacctgaaccacaccagaggcctataaccccgctagagcctgggccagaaaagacacccatagcccagccagaatcgaagactctgcagggatccaatacccaacagaagcctgcttcaaaccaaagacccctcacccagcaggagacccctgcacaacatgatgctgaatcccagaaggaacctagagcccaacaaaaatctgcttcacaagaggaatttcttgccccacagaagcccgcaccacagcaatcaccttacatccaaagggtgctgctcactcaacaggaagctgcctcccagcagggacctgggctaggaaaagaatctataactcaacaggagccagcattgagacaaagacatgtagcccagccagggcctgggccaggagagccacctccagctcaacaagaagctgaatcaacacctgcggcccaggctaaacctggagccaaaagggagccatctgccccgactgaatctacgtcccaagagacacctgaacagtcagacaagcaaacaacgccagtccagggagccaaatccaagcagggatctttgacagagctgggatttctaacaaaacttcaggaactatccatacagcgatcagccctagagtggaaggcactttctgagtgggtcacagattctgagtcagaatcagatgtgggatcatcttcagacacagattctccagccacgatgggtggaatggtggcccagggagtgaagctaggcttcaaaggaaaatctggttataaagtgatgtcaggatacagtgggacgtcgccacatgagaaaaccagtgctcggaatcacagacactaccaggatacagcctcaaggctcatccacaacatggacctgcgcacaatgacacagtcgctggtgactctggcggaggacaacatagccttcttctcgagccagggtcctggggaaacggcccagcggctgtcaggcgtttttgccggtgtacgggagcaggcgctggggctggagccggccctgggccgcctgctgggtgtggcgcacctctttgacctggacccagagacaccggccaacgggtaccgcagcctagtgcacacagcccgctgctgcctggcgcacctcctgcacaaatcccgctatgtggcctccaaccgccgcagcatcttcttccgcaccagccacaacctggccgagctggaggcctacctggctgccctcacccagctccgcgctctggtctactacgcccagcgcctgctggttaccaatcggccgggggtactcttctttgagggcgacgaggggctcaccgccgacttcctccgggagtatgtcacgctgcataagggatgcttctatggccgctgcctgggcttccagttcacgcctgccatccggccattcctgcagaccatctccattgggctggtgtccttcggggagcactacaaacgcaacgagacaggcctcagtgtggccgccagctctctcttcaccagcggccgctttgccatcgaccccgagctgcgtggggctgagtttgagcggatcacacagaacctggacgtgcacttctggaaagccttctggaacatcaccgagatggaagtgctatcgtctctggccaacatggcatcggccaccgtgagggtaagccgcctgctcagcctgccacccgaagcctttgagatgccactgactgccgaccccacgctcacggtcaccatctcacccccactggcccacacaggccctgggcccgtcctcgtcaggctcatctcctatgacctgcgtgaaggacaggacagtgaggagctcagcagcctgataaagtccaacggccaacggagcctggagctgtggccgcgcccccagcaggcaccccgctcgcggtccctgatagtgcacttccacggcggtggctttgtggcccagacctccagatcccacgagccctacctcaagagctgggcccaggagctgggcgcccccatcatctccatcgactactccctggcccctgaggcccccttcccccgtgcgctggaggagtgcttcttcgcctactgctgggccatcaagcactgcgccctccttggctcaacaggggaacgaatctgccttgcgggggacagtgcaggcgggaacctctgcttcaccgtggctcttcgggcagcagcctacggggtgcgggtgccagatggcatcatggcagcctacccggccacaatgctgcagcctgccgcctctccctcccgcctgctgagcctcatggaccccttgctgcccctcagtgtgctctccaagtgtgtcagcgcctatgctggtgcaaagacggaggaccactccaactcagaccagaaagccctcggcatgatggggctggtgcggcgggacacagccctgctcctccgagacttccgcctgggtgcctcctcatggctcaactccttcctggagttaagtgggcgcaagtcccagaagatgtcggagcccatagcagagccgatgcgccgcagtgtgtctgaagcagcactggcccagccccagggcccactgggcacggattccctcaagaacctgaccctgagggacttgagcctgaggggaaactccgagacgtcgtcggacacccccgagatgtcgctgtcagctgagacacttagcccctccacaccctccgatgtcaacttcttattaccacctgaggatgcaggggaagaggctgaggccaaaaatgagctgagccccatggacagaggcctgggcgtccgtgccgccttccccgagggtttccacccccgacgctccagccagggtgccacacagatgcccctctactcctcacccatagtcaagaaccccttcatgtcgccgctgctggcacccgacagcatgctcaagagcctgccacctgtgcacatcgtggcgtgcgcgctggaccccatgctggacgactcggtcatgctcgcgcggcgactgcgcaacctgggccagccggtgacgctgcgcgtggtggaggacctgccgcacggcttcctgaccctagcggcgctgtgccgcgagacgcgccaggccgcagagctgtgcgtggagcgcatccgcctcgtcctcactcctcccgccggagccgggccgagcggggagacgggggctgcgggggtagacgggggctgcggggggcgacactaaaagcctgttgttcccatctgcgccggcctccgtcatgaatgccttccgggccgggcggaaggggacgcgggctgtgccttacttaagtcgggggtggcaagggggcggggcgggggcccgaaagctgagaccctcgccacggggagggggacgcgcacacacaccggtcaccgagacggctggacctgcacgccaccgctgccttttgctgctgctgctgcggcgaccgccgcagggacggggactggccctcccttgcaggtcggtttggtttgttgtaaataaaagtatttaatta

SEQ ID NO: 155293 - DNA, 3231 bp, Artificial Sequence
  derived and/or modified sequence
atggagcccggcagcaagagcgtgagccggagcgactggcagcccgagccccaccagcgacccatcactcccctggaacccggacccgaaaagacaccaatcgcacagcccgaatcaaagaccctccagggtagcaatacccaacagaagccagctagtaaccagcggccactgacacagcaagaaacacccgcgcagcatgacgccgagagtcaaaaagagccaagggctcaacagaaatccgcctcccaggaggaattccttgctccgcagaaacccgctcctcaacagtccccctacatccagcgcgtgctgctcactcagcaggaggccgcctctcagcaaggtccaggactgggcaaagagtctatcactcagcaggagcctgctttgcgccagcgccatgtcgcccagcccggaccaggccccggcgagcctccccccgcccagcaggaggcagagtccacccccgctgcccaagcgaaaccaggggccaagcgggagccctcagcaccaaccgagtctactagtcaggaaacccctgaacagagcgataagcagacaaccccagtccagggcgcaaagagcaaacaaggcagcctcacagagctgggatttctcaccaaacttcaggagctgagcatccaacgctctgctctcgagtggaaggcgctgagtgagtgggttactgattcggaatcggagtcagacgtcggctcctcttcagacaccgatagtcccgcaactatgggcggcatggtagctcagggggttaagctcggttttaaggggaagagcggctataaagtcatgagtggctactccggaacgagcccccacgagaaaacatccgcacggaatcacaggcactaccaagacacagctagtagattgatccataatatggatttgcggaccatgacacagtccctggtcacgttggcagaggacaatattgcgttcttcagcagtcagggcccgggagagaccgctcagagactgagcggggtctttgctggagtgagggagcaggcccttggcctggagccagctctcggacggttactgggagtcgcccatctcttcgaccttgaccccgaaacacccgccaacggctatcgcagtctcgtgcacacggcccgctgttgtttggctcacctgctgcacaagagtagatatgtggcgagtaacagacgttccattttttttcgtacatctcataatctggcggagctggaagcgtatctggccgcattaacacagctccgggctcttgtatattacgcccagcgccttctggtaactaaccgtccgggagtcctgttcttcgagggagatgagggcctgaccgctgattttctgcgcgagtacgtgaccctgcataagggttgtttttacggtcgctgcctggggttccagttcaccccagctattcgtcctttcctccaaacaatctccataggcctggtgtctttcggtgaacactacaagcgcaacgagaccggactctctgtagcagcctcgtctctttttactagtggccggttcgccattgacccagaactgcgcggggccgagtttgagcgcattacccagaatctggacgtgcacttttggaaggcattctggaatatcacggagatggaagtcctatcctccctggccaacatggccagcgcaaccgtgagagtctcacgcctcctgagtttgccacctgaagcttttgagatgccattgacggctgacccgacactgactgtcacgatctctccccctcttgcgcatactgggcccggcccagtgctcgtcaggctgatcagttacgatcttagggagggccaggacagcgaagagctcagttccctgattaagtccaatggccagaggagtcttgaactctggccacgaccacaacaggctcccaggtctagaagtttaatcgttcattttcatggtggcggattcgtagcccagactagcaggtcccacgaaccttacttgaagagctgggcccaggagttgggtgcgcccatcattagcattgactactcgctggcaccagaggcacctttccctagggccctggaggagtgttttttcgcttactgctgggcgataaagcattgtgcgttgctgggcagcaccggggaaaggatctgcctcgcaggcgatagcgcaggcggaaacctgtgttttacagtggcccttcgagcagcagcgtatggtgtccgcgtgccagatggtatcatggccgcttatccagccaccatgcttcagcctgctgcttcgcctagccggttgctgtctcttatggaccctctcctacctctatccgtcctgtccaaatgtgtgagtgcatatgccggggccaagacagaagaccacagcaattccgaccagaaggctttaggaatgatgggtctagtccgaagagacaccgcactactgctgcgtgattttcggctgggggcctcaagctggctcaattcatttctcgaactgtcaggtcgcaaatctcagaaaatgagcgaaccaatagctgagccaatgagaaggtccgtctctgaggcggctctggcccagcctcagggaccactcgggacggattctctgaaaaacctgactctgagggatctgtccctgagaggcaattccgaaactagctccgacacgccagagatgagcctaagtgccgagacgctttctccctccacgccttctgatgtaaacttccttctaccccccgaggacgcaggtgaagaggcagaggccaaaaacgaactgtcaccaatggacaggggcttgggcgtgagagcggcttttcctgaagggttccatccacggaggagcagccagggagccactcaaatgcccctttacagctcccccattgtgaaaaatcctttcatgtctccactgttggcgcctgacagcatgctgaaatccctgccaccagtgcacattgtggcgtgcgccttagatccaatgctggacgattctgtaatgttagccagaaggttgcggaacttgggccagcccgtgacactgcgcgttgtggaagatctgcctcatggatttttaacactcgctgcgttgtgccgagagacgcgccaggccgctgaattatgcgtggaaaggataaggttagtgttaaccccccccgctggagccggaccttccggagaaacaggagctgccggcgtcgatgggggatgcggcggacgacattag

SEQ ID NO: 155294 - DNA, 3231 bp, Artificial Sequence
  derived and/or modified sequence
atggaacccggtagcaaatcagtatcccgaagcgattggcagccagaaccccatcagcgccctatcacacctttagagccagggcctgaaaagacaccgatagcccagcctgagagtaagaccctccagggctctaacacacagcagaagccggcatctaaccagcggccacttacacagcaggaaacgcccgctcagcatgacgccgagagtcagaaggaacctagagcccagcagaaaagcgcttcacaggaagaatttctcgcaccccaaaaaccagccccacagcaaagcccttacatacaacgagttctgttgacccaacaagaagccgcatctcagcagggccctgggctgggcaaagaatccatcactcagcaggagcccgctcttagacagcgccacgtggcccagccaggaccaggtccgggtgaacccccaccagcacagcaagaagctgagtctacgcctgcagcccaagctaaacccggagccaaaagggagccatctgccccaacagagtccacctctcaagagacccccgagcagagtgacaagcaaactaccccagtgcaaggggctaagagcaagcagggcagcctgacggagctgggatttttaaccaagctgcaggagctcagtatccagagatctgctttggagtggaaggccctgtcagagtgggtgactgactctgaatcggaaagcgacgtgggctcctcttcagacaccgattcccccgctacaatgggcggaatggtagcccaaggtgtcaaactgggtttcaagggcaaatcaggatacaaagtaatgagcgggtacagtggaacttctccccacgagaagacatcggctcgaaatcatagacattatcaggatacagcttctcgtctgattcacaacatggatttaagaacaatgacacagagtctcgtaactttggcagaggataatatcgctttcttttcttctcagggcccaggggagaccgcacagaggcttagcggcgttttcgcaggggtcagggagcaggctctggggcttgaacccgctctcggtcgcttactcggcgtggctcacttattcgatctggatccggaaacaccagccaacgggtacagatcattggtccacacagcccgatgttgcctggctcatctacttcataagagccggtacgttgcctctaaccgtagaagcatcttcttcagaactagccacaacctcgcagagctggaggcctacctcgctgctctgacccagctccgcgcactggtgtattacgcacagagacttctggtgaccaataggcccggagtgttgtttttcgagggtgacgaggggctgaccgccgactttctgcgggagtatgtcactttacataaaggatgcttttacggacgctgtctgggattccaattcacaccagccatccgcccttttctgcagacgataagcattgggttggtctctttcggggaacactacaagcggaatgagaccgggctctcagtggcggctagttcgctctttacttcagggcgattcgccattgatcctgaacttcgcggtgctgagttcgagcgtataacccagaacctcgacgtacacttctggaaagccttctggaatataacggaaatggaggtgctatctagcctcgctaacatggcatcagctactgttcgggtaagccggcttctcagcctgcctccggaagcgttcgagatgcccctgaccgcggaccccactttgaccgtcactattagcccccctctggcccacaccgggccaggcccagtgcttgtgagactgatatcatacgacttaagagagggccaggactctgaggagctttcttctctgatcaagtcaaatgggcagcggtcgctggagttatggccaagaccccagcaggcaccacgctctcgctctctgatagtgcactttcatgggggaggcttcgttgctcaaacaagtcgttctcacgagccgtatctgaaatcatgggctcaggagctgggcgcacctattatctctatagattattctttggctccggaggcacccttccctcgcgctctcgaggaatgcttcttcgcatactgttgggctatcaaacactgtgctctcttggggtccactggtgaacggatttgtctggctggagactcagccggagggaatctgtgcttcacagttgcactgcgggctgctgcctatggtgtccgagtgcccgatggtatcatggcagcgtatcctgccaccatgctgcaacccgcagcttcaccttccagattattatccctgatggatccattactgcccttaagtgttctctcaaaatgcgtttctgcatatgccggagccaagaccgaggatcatagcaactccgaccagaaagccctgggtatgatggggcttgtgcgacgcgacaccgctctgctattgcgggacttccgactaggcgcttcctcatggctcaactccttcctcgagttgagtggtaggaagagccagaagatgtctgaacccatagccgaacctatgagaagatccgtctcggaagctgctctggctcaaccccagggccctctgggcaccgattcattaaagaatctgactctgcgagatttgagcctaagaggcaacagcgaaaccagcagcgacacccccgagatgtctttgtccgccgagacgctgtcaccttcaacgccatcagatgtgaattttctgttgcctccagaagatgctggagaggaggcagaggcaaagaacgaactttcaccgatggacagaggcctcggagtgcgagcagcctttcccgaaggatttcacccacgcaggtctagccagggggctactcagatgcctctgtacagtagccctatcgtgaaaaacccctttatgagcccacttctggcaccagacagtatgttgaagagtttaccaccagttcacatcgtcgcatgcgcactagatcctatgctggacgacagcgtgatgttagccagaagactgcgcaacttgggccagccagtcactctgagggtggtagaggatctccctcacgggtttctgaccctcgcagcactatgtagagagactcgccaagccgctgagctgtgcgttgagcggatacgccttgttctgactcccccagctggagccggaccatccggggaaacaggagccgcaggcgtggatggcggatgtggcggtcgccactag

SEQ ID NO: 155295 - DNA, 3231 bp, Artificial Sequence
  derived and/or modified sequence
atggagcccggcagcaagagcgtgagcagaagcgactggcagcccgagccccaccagagacccatcacccccctggagcccggccccgagaagacccccatcgcccagcccgagagcaagaccctgcagggcagcaacacccagcagaagcccgccagcaaccagagacccctgacccagcaggagacccccgcccagcacgacgccgagagccagaaggagcccagagcccagcagaagagcgccagccaggaggagttcctggccccccagaagcccgccccccagcagagcccctacatccagagagtgctgctgacccagcaggaggccgccagccagcagggccccggcctgggcaaggagagcatcacccagcaggagcccgccctgagacagagacacgtggcccagcccggccccggccccggcgagcccccccccgcccagcaggaggccgagagcacccccgccgcccaggccaagcccggcgccaagagagagcccagcgcccccaccgagagcaccagccaggagacccccgagcagagcgacaagcagaccacccccgtgcagggcgccaagagcaagcagggcagcctgaccgagctgggcttcctgaccaagctgcaggagctgagcatccagagaagcgccctggagtggaaggccctgagcgagtgggtgaccgacagcgagagcgagagcgacgtgggcagcagcagcgacaccgacagccccgccaccatgggcggcatggtggcccagggcgtgaagctgggcttcaagggcaagagcggctacaaggtgatgagcggctacagcggcaccagcccccacgagaagaccagcgccagaaaccacagacactaccaggacaccgccagcagactgatccacaacatggacctgagaaccatgacccagagcctggtgaccctggccgaggacaacatcgccttcttcagcagccagggccccggcgagaccgcccagagactgagcggcgtgttcgccggcgtgagagagcaggccctgggcctggagcccgccctgggcagactgctgggcgtggcccacctgttcgacctggaccccgagacccccgccaacggctacagaagcctggtgcacaccgccagatgctgcctggcccacctgctgcacaagagcagatacgtggccagcaacagaagaagcatcttcttcagaaccagccacaacctggccgagctggaggcctacctggccgccctgacccagctgagagccctggtgtactacgcccagagactgctggtgaccaacagacccggcgtgctgttcttcgagggcgacgagggcctgaccgccgacttcctgagagagtacgtgaccctgcacaagggctgcttctacggcagatgcctgggcttccagttcacccccgccatcagacccttcctgcagaccatcagcatcggcctggtgagcttcggcgagcactacaagagaaacgagaccggcctgagcgtggccgccagcagcctgttcaccagcggcagattcgccatcgaccccgagctgagaggcgccgagttcgagagaatcacccagaacctggacgtgcacttctggaaggccttctggaacatcaccgagatggaggtgctgagcagcctggccaacatggccagcgccaccgtgagagtgagcagactgctgagcctgccccccgaggccttcgagatgcccctgaccgccgaccccaccctgaccgtgaccatcagcccccccctggcccacaccggccccggccccgtgctggtgagactgatcagctacgacctgagagagggccaggacagcgaggagctgagcagcctgatcaagagcaacggccagagaagcctggagctgtggcccagaccccagcaggcccccagaagcagaagcctgatcgtgcacttccacggcggcggcttcgtggcccagaccagcagaagccacgagccctacctgaagagctgggcccaggagctgggcgcccccatcatcagcatcgactacagcctggcccccgaggcccccttccccagagccctggaggagtgcttcttcgcctactgctgggccatcaagcactgcgccctgctgggcagcaccggcgagagaatctgcctggccggcgacagcgccggcggcaacctgtgcttcaccgtggccctgagagccgccgcctacggcgtgagagtgcccgacggcatcatggccgcctaccccgccaccatgctgcagcccgccgccagccccagcagactgctgagcctgatggaccccctgctgcccctgagcgtgctgagcaagtgcgtgagcgcctacgccggcgccaagaccgaggaccacagcaacagcgaccagaaggccctgggcatgatgggcctggtgagaagagacaccgccctgctgctgagagacttcagactgggcgccagcagctggctgaacagcttcctggagctgagcggcagaaagagccagaagatgagcgagcccatcgccgagcccatgagaagaagcgtgagcgaggccgccctggcccagccccagggccccctgggcaccgacagcctgaagaacctgaccctgagagacctgagcctgagaggcaacagcgagaccagcagcgacacccccgagatgagcctgagcgccgagaccctgagccccagcacccccagcgacgtgaacttcctgctgccccccgaggacgccggcgaggaggccgaggccaagaacgagctgagccccatggacagaggcctgggcgtgagagccgccttccccgagggcttccaccccagaagaagcagccagggcgccacccagatgcccctgtacagcagccccatcgtgaagaaccccttcatgagccccctgctggcccccgacagcatgctgaagagcctgccccccgtgcacatcgtggcctgcgccctggaccccatgctggacgacagcgtgatgctggccagaagactgagaaacctgggccagcccgtgaccctgagagtggtggaggacctgccccacggcttcctgaccctggccgccctgtgcagagagaccagacaggccgccgagctgtgcgtggagagaatcagactggtgctgaccccccccgccggcgccggccccagcggcgagaccggcgccgccggcgtggacggcggctgcggcggcagacactag

SEQ ID NO: 155296 - protein, 1349 aa, Artificial Sequence
  derived and/or modified sequence
MKKIRICHIFTFYSWMSYDVLFQRTELGALEIWRQLICAHVCICVGWLYLRDRVCSKKDIILRTEQNSGRTILIKAVTEKNFETKDFRASLENGVLLCDLINKLKPGVIKKINRLSTPIAGLDNINVFLKACEQIGLKEAQLFHPGDLQDLSNRVTVKQEETDRRVKNVLITLYWLGRKAQSNPYYNGPHLNLKAFENLLGQALTKALEDSSFLKRSGRDSGYGDIWCPERGEFLAPPRHHKREDSFESLDSLGSRSLTSCSSDITLRGGREGFESDTDSEFTFKMQDYNKDDMSYRRISAVEPKTALPFNRFLPNKSRQPSYVPAPLRKKKPDKHEDNRRSWASPVYTEADGTFSRLFQKIYGENGSKSMSDVSAEDVQNLRQLRYEEMQKIKSQLKEQDQKWQDDLAKWKDRRKSYTSDLQKKKEEREEIEKQALEKSKRSSKTFKEMLQDRESQNQKSTVPSRRRMYSFDDVLEEGKRPPTMTVSEASYQSERVEEKGATYPSEIPKEDSTTFAKREDRVTTEIQLPSQSPVEEQSPASLSSLRSRSTQMESTRVSASLPRSYRKTDTVRLTSVVTPRPFGSQTRGISSLPRSYTMDDAWKYNGDVEDIKRTPNNVVSTPAPSPDASQLASSLSSQKEVAATEEDVTRLPSPTSPFSSLSQDQAATSKATLSSTSGLDLMSESGEGEISPQREVSRSQDQFSDMRISINQTPGKSLDFGFTIKWDIPGIFVASVEAGSPAEFSQLQVDDEIIAINNTKFSYNDSKEWEEAMAKAQETGHLVMDVRRYGKAGSPETKWIDATSGIYNSEKSSNLSVTTDFSESLQSSNIESKEINGIHDESNAFESKASESISLKNLKRRSQFFEQGSSDSVVPDLPVPTISAPSRWVWDQEEERKRQERWQKEQDRLLQEKYQREQEKLREEWQRAKQEAERENSKYLDEELMVLSSNSMSLTTREPSLATWEATWSEGSKSSDREGTRAGEEERRQPQEEVVHEDQGKKPQDQLVIERERKWEQQLQEEQEQKRLQAEAEEQKRPAEEQKRQAEIERETSVRIYQYRRPVDSYDIPKTEEASSGFLPGDRNKSRSTTELDDYSTNKNGNNKYLDQIGNMTSSQRRSKKEQVPSGAELERQQILQEMRKRTPLHNDNSWIRQRSASVNKEPVSLPGIMRRGESLDNLDSPRSNSWRQPPWLNQPTGFYASSSVQDFSRPPPQLVSTSNRAYMRNPSSSVPPPSAGSVKTSTTGVATTQSPTPRSHSPSASQSGSQLRNRSVSGKRICSYCNNILGKGAAMIIESLGLCYHLHCFKCVACECDLGGSSSGAEVRIRNHQLYCNDCYLRFKSGRPTAM

SEQ ID NO: 155297 - DNA, 7253 bp, Artificial Sequence
  derived and/or modified sequence
ggaaagaagtggaataattaggaacctagggtggggtagggtagcaggacatttcaaacattaatgagcatatgagattccaggtcttgttaaaatgcaaattctgattcagctggtaggtgaggtctgagattgtgcatttctaacaagcactcagataatcttaaggctgttggccccagggtcacacttatagtgattttctagaacccagttggggaagtgaatcttgggcaggagaaatacacacctcttgcattgagtttggagatctcatctgatataactttttaagaaagaaaaataattttccaaatatccaattgataagctttcccactaagtggctttcccactaagtggctgcgttatgaaaattgcttcactttgaaacttctggtcttggtaatatagaatttctgtgttctcacagtgcttgattgagaatatgatattgagattatggcataaaatatagtggctgtacaaaaaaaaatacattattaggatctctaacaattatgtaaaagtcattgcttcatgggtagagctcaaactttggtgtgagacctggttttattcttggcacttactctgagttgtcttaggcaaattaataccttaagcaaaaatattctcatgtacattttacatgagaattataaatgaagtacataaagtccagcagtcacaaatgttatctattattaccatcgtcctaagactgcaatcagctatagtgaaagtagtctcaaagattgtttcataaatcatcagattcacctaattttctaaagaatttaaataaggagatggaatgaatagattgcattttgtttccatgcacaggggaactgtgcatatttcttctgtgactcggaaatggtttaacttttaaaaatcccaaaatagctgaagttagcagacatgcaatttaccaaggatgattggaatttttatctttcctgtaataatactatacccaagcacactgctcatgaggaaaacatttttatgtgaatcttttactcttgggggcaaagaatgctgtttttctttttgataactatgtttatagaatctaaatcaccctgagcaattatttcaacatctaaagttattattaccattcatgtttcatttatagctatttgaattttgatgaatttcaatatggtgctacagtgatagggcaagtgcaaataagttcaatatatgggtacggtctaaagctattttaatttttttattacaactgctatgaagaaaattaggatatgccatattttcacgttttacagttggatgtcctatgatgttctcttccagagaacagagctcggagctctggaaatttggaggcaactgatatgtgctcatgtctgcatctgtgtgggttggctgtatctcagggacagagtctgcagcaaaaaagatataattttgaggactgaacaaaattcaggaaggactattctcattaaggcagtaacagagaagaattttgaaacaaaagattttcgagcctctctagaaaatggtgttctgctgtgtgatttgattaataagcttaaacctggcgtcattaagaagatcaatagactgtctacaccaatagcaggattggataatataaacgttttcttgaaagcttgtgaacagattggattgaaagaagcccagcttttccatcctggagatctacaggatttatcaaatcgagtcactgtcaagcaagaagagactgacaggagagtgaaaaatgttttgataacattgtactggctgggaagaaaagcacaaagcaacccgtactataatggtccccatcttaatttgaaagcgtttgagaatcttttaggacaagcactgacgaaggcactcgaagactccagcttcctgaaaagaagtggcagggacagtggctacggtgacatctggtgtcctgaacgtggagaatttcttgctcctccaaggcaccataagagagaagattcctttgaaagcttggactctttgggctcgaggtcattgacaagctgctcctctgatatcacgttgagaggggggcgtgaaggttttgaaagtgacacagattcggaatttacatttaagatgcaggattataataaagatgatatgtcgtatcgaaggatttcggctgttgagccaaagactgcgttacccttcaatcgttttttacccaacaaaagtagacagccatcctatgtaccagcacctctgagaaagaaaaagccagacaaacatgaggataacagaagaagttgggcaagcccggtttatacagaagcagatggaacattttcaagactctttcaaaagatttatggtgagaatgggagtaagtccatgagtgatgtcagcgcagaagatgttcaaaacttgcgtcagctgcgttacgaggagatgcagaaaataaaatcacaattaaaagaacaagatcagaaatggcaggatgaccttgcaaaatggaaagatcgtcgaaaaagttacacttcagatctgcagaagaaaaaagaagagagagaagaaattgaaaagcaggcacttgagaagtctaagagaagctctaagacgtttaaggaaatgctgcaggacagggaatcccaaaatcaaaagtctacagttccgtcaagaaggagaatgtattcttttgatgatgtgctggaggaaggaaagcgaccccctacaatgactgtgtcagaagcaagttaccagagtgagagagtagaagagaagggagcaacttatccttcagaaattcccaaagaagattctaccacttttgcaaaaagagaggaccgtgtaacaactgaaattcagcttccttctcaaagtcctgtggaagaacaaagcccagcctctttgtcttctctgcgttcacggagcacacaaatggaatcaactcgtgtttcagcttctctccccagaagttaccggaaaactgatacagtcaggttaacatctgtggtcacaccaagaccctttggctctcagacaaggggaatctcatcactccccagatcttacacgatggatgatgcttggaagtataatggagatgttgaagacattaagagaactccaaacaatgtggtcagcacccctgcaccaagcccggacgcaagccaactggcttcaagcttatctagccagaaagaggtagcagcaacagaagaagatgtgacaaggctgccctctcctacatcccccttctcatctctttcccaagaccaggctgccacttctaaagccacattgtcttccacatctggtcttgatttaatgtctgaatctggagaaggggaaatctccccacaaagagaagtctcaagatcccaggatcagttcagtgatatgagaatcagcataaaccagacgcctgggaagagtcttgactttgggtttacaataaaatgggatattcctgggatcttcgtagcatcagttgaagcaggtagcccagcagaattttctcagctacaagtagatgatgaaattattgctattaacaacaccaagttttcatataacgattcaaaagagtgggaggaagccatggctaaggctcaagaaactggacacctagtgatggatgtgaggcgctatggaaaggctggttcacctgaaacaaagtggattgatgcaacttctggaatttacaactcagaaaaatcttcaaatctatctgtaacaactgatttctccgaaagccttcagagttctaatattgaatccaaagaaatcaatggaattcatgatgaaagcaatgcttttgaatcaaaagcatctgaatccatttctttgaaaaacttaaaaaggcgatcacaattttttgaacaaggaagctctgattcggtggttcctgatcttccagttccaaccatcagtgccccgagtcgctgggtgtgggatcaagaggaggagcggaagcggcaggagaggtggcagaaggagcaggaccgcctactgcaggaaaaatatcaacgtgagcaggagaaactgagggaagagtggcaaagggccaaacaggaggcagagagagagaattccaagtacttggatgaggaactgatggtcctaagctcaaacagcatgtctctgaccacacgggagccctctcttgccacctgggaagctacctggagtgaagggtccaagtcttcagacagagaaggaacccgagcaggagaagaggagaggagacagccacaagaggaagttgttcatgaggaccaaggaaagaagccgcaggatcagcttgttattgagagagagaggaaatgggagcaacagcttcaggaagagcaagagcaaaagcggcttcaggctgaggctgaggagcagaagcgtcctgcggaggagcagaagcgccaggcagagatagagcgggaaacatcagtcagaatataccagtacaggaggcctgttgattcctatgatataccaaagacagaagaagcatcttcaggttttcttcctggtgacaggaataaatccagatctactactgaactggatgattactccacaaataaaaatggaaacaataaatatttagaccaaattgggaacatgacctcttcacagaggagatccaagaaagaacaagtaccatcaggagcagaattggagaggcaacaaatccttcaggaaatgaggaagagaacaccccttcacaatgacaacagctggatccgacagcgcagtgccagtgtcaacaaagagcctgttagtcttcctgggatcatgagaagaggcgaatctttagataacctggactccccccgatccaattcttggagacagcctccttggctcaatcagcccacaggattctatgcttcttcctctgtgcaagactttagtcgcccaccacctcagctggtgtccacatcaaaccgtgcctacatgcggaacccctcctccagcgtgcccccaccttcagctggctccgtgaagacctccaccacaggtgtggccaccacacagtcccccaccccgagaagccattccccttcagcttcacagtcaggctctcagctgcgtaacaggtcagtcagtgggaagcgcatatgctcctactgcaataacattctgggcaaaggagccgccatgatcatcgagtccctgggtctttgttatcatttgcattgttttaagtgtgttgcctgtgagtgtgacctcggaggctcttcctcaggagctgaagtcaggatcagaaaccaccaactgtactgcaacgactgctatctcagattcaaatctggacggccaaccgccatgtgatgtaagcctccatacgaaagcactgttgcagatagaagaagaggtggttgctgctcatgtagatctataaatatgtgttgtatgtcttttttgctttttttttaaaaaaaagaataactttttttgcctctttagattacatagaagcattgtagtcttggtagaaccagtatttttgttgtttatttataaggtaattgtgtgtggggaaaagtgcagtatttacctgttgaattcagcatcttgagagcacaagggaaaaaataagaacctacgaatatttttgaggcagataatgatctagtttgactttctagttagtggtgttttgaagagggtattttattgttttttaaaaaaaggttcttaaacattatttgaaatagttaatataaatacataattgcatttgctctgtttattgtaatgtattctaaattaatgcagaaccatatggaaaatttcattaaaatctatccccaaatgtgctttctgtatccttccttctacctattattctgatttttaaaaatgcagttaatgtaccatttatttgcttgatgaagggagctctattttctttaccagaaatgttgctaagtaattcccaatagaaagctgcttattttcattaatgaaaaataaccatggtttgtatactagaagtcttcttcagaaactggtgagcctttctgttcaattgcatttgtaaataaacttgctgatgcatttaacgagtgggtcgtctttttcttaggtgtatgtgtctgacctcaggccttttagccatatttcagtatgtggccttttttgatgttatgttttatccagtagctttactaaggtataattgatgtaataaactgcatatatttaaagtgtatactttgacaaattttgacatggtgtataccttcgaaactatgccacagtctggatgtgtttactgaaacattttaataaggaagtttatttttgataaagttatgtttttggatacaatatatttgtatggtgagagtgatgaattgttggatcatttgaataaaatcttttactaaccccatgataaaaggagaagacaacagtgagcttagaatatctataaagcaaaaaatgtagtctcttgtttaaaaaatctggagcgggaatgcaaggatacaaaactttagcatgctttgagcaaaaatttaaacttactggaatcttttataataatgtaagtggaatggaggattctaggaactgagaactgtattggaataggttcaaaatatgtaagaaatgctaatgtgggagataaaaattttatttagtacttattctgattattattaaagtaataatgtgttccttgaggataacttgtcaaatgccccaaagcataaagaatataattctgaatcccaaattccaaagacaagaactctgtgtttgaattcattctgcatataattatttataagtatagattgtgaatttttccatgttcttaaaattatttttatcttttttcatggttgcatagtgctccattgtttggccttggtaatatttagttgataattccattactgtgtatttttcacttgtttctaagatcaaacattttaatatgtgcatgttatatataaatatgtaaattctgtgatactctatgatcatctctttctttatattattttcatagacatgaaatagttgctcagagattatgcattttaagacactcatagtatatattgccaaagtggtttccagaaaggcactgctggcttcgactcctataagcagcacgtgggcttgttcatctcactgcatgtttatgaagatacagttcttttgccttgttctctgcctgatgtgtatgcagaggcagccctcaatatgcagtggttgaataaatgaatgaagaaaccactatcaaaaaaaaaaaaaaaaaa

SEQ ID NO: 155298 - DNA, 4050 bp, Artificial Sequence
  derived and/or modified sequence
atgaaaaaaattaggatttgccacatattcacgttctattcatggatgtcttatgatgtgctttttcagcgcaccgaactcggtgctctcgagatctggagacaactcatctgtgcccacgtgtgcatctgcgtgggttggttatacctgagggaccgggtgtgcagcaaaaaggatattatactacgaactgaacagaattcaggacgtactattcttattaaggcagtgaccgagaagaacttcgaaacaaaggacttccgcgcaagccttgaaaatggcgtcctgctgtgtgaccttattaacaaacttaaaccaggcgtcataaaaaagataaatcgtttatcaactccaattgcgggtcttgacaacattaacgtgtttttaaaagcctgcgagcagatcggcctaaaggaagcacagctgtttcatcccggcgacttgcaggatctgagtaaccgcgtgacagtgaaacaggaggagacggacaggcgcgtcaagaatgtgctgatcaccctgtattggctgggccgcaaggcacaaagcaatccctactataacggtccccatctgaatcttaaggccttcgagaacctcctgggacaggcccttactaaagcgctggaggactctagtttcctgaagagaagtgggcgggattctggctacggcgacatctggtgccctgaacgcggtgaattcctcgcaccgccaaggcaccataagcgcgaagacagtttcgagtctctggactcgcttggctctcggagcttgacctcttgctcctcagatattaccctccgggggggaagagaaggctttgagtcagatacggattctgagtttacctttaaaatgcaggactacaacaaggatgacatgagctatcgtaggatctcagctgtagaaccaaagactgcattaccatttaaccgctttcttcctaataaaagtcggcagccttcgtacgttcctgcgcctttaagaaagaagaagcccgacaagcacgaggacaatcgcaggagttgggccagtccagtatacacggaggccgatggcactttcagccgattatttcagaaaatttacggcgaaaacggctctaagtctatgtccgatgtatctgctgaggacgtccagaacttgcgacagctgagatacgaggaaatgcagaagattaagtcacagctgaaagagcaggaccaaaaatggcaggatgacctagctaagtggaaagatcgccgaaagagctatactagcgatttgcaaaaaaagaaagaagagcgagaggagatagagaagcaggcattggagaagtctaaacgcagcagcaaaacattcaaagaaatgttgcaggacagagaatcacagaaccagaagtctaccgttcctagcagacgcagaatgtattcctttgatgatgtgctggaggagggaaaaagacccccgactatgaccgtgagcgaggcctcctatcagagcgagcgcgtcgaggagaaaggcgccacttatccgagcgaaattccgaaggaggactctacaacattcgcaaaaagagaggatcgtgtgactaccgagattcaattaccttcccagagccctgtcgaggagcagagccccgctagcctctctagcctacgctccaggtccacacaaatggagtctaccagggtgagcgccagcttgccacggtcctacagaaagaccgacacggtcagacttacaagcgttgtaacccctcggccgtttggctcacagacacgtgggatcagttcacttccgagatcctacaccatggatgatgcttggaaatacaatggtgatgtggaggatatcaagcggacgcccaacaacgtggtcagcacaccagctccctctcccgacgccagccagctggcaagcagcctgagcagccagaaagaagtggccgccacagaggaggatgtgacgagactgccttcacctacctctcctttcagttctcttagccaggatcaggccgctacctcgaaagccacattgtccagtacatctggactcgacctgatgtccgagtctggcgaaggtgagatctctcctcaacgcgaagtcagtagatcccaagatcagttctctgacatgagaatctccatcaaccagaccccagggaagtcactcgattttggatttacgatcaagtgggatatccctgggattttcgttgctagcgtcgaggcaggcagccctgccgagttcagccagcttcaagttgacgatgaaataatcgccattaataatactaaattcagttacaatgattcaaaagaatgggaagaagctatggctaaggctcaggaaacaggccaccttgtcatggatgtgcggcggtatggaaaagctggaagtccggagaccaaatggatcgacgctacctcaggaatttacaacagcgagaaatcatcaaatctgagcgtgaccactgacttctctgagagccttcagtcgagcaatattgaatcaaaagagataaacggcattcacgatgaatctaatgcattcgaaagcaaagcctccgagtccatttctcttaagaatttaaaacgccgctcacagttctttgaacaaggcagctcagacagcgtggttcctgatcttcccgttccgacaataagtgcccccagccgctgggtgtgggaccaggaggaagagcgcaaacgccaggagcgatggcagaaagagcaagataggttgctccaagagaaataccagcgggagcaagaaaaacttcgcgaggagtggcagcgcgccaagcaggaggctgagcgggaaaactcaaagtatctcgacgaagagctgatggtgttgtcttctaatagcatgtccctgaccactcgggaacctagtcttgccacttgggaagctacttggagtgaaggctctaagtcgagcgatcgcgagggaacccgcgcaggtgaggaggagaggaggcaaccacaggaagaggtggtacatgaagaccaaggaaagaaaccacaagaccaactggttatcgagcgtgagcggaagtgggaacagcagttacaggaggagcaggagcaaaagagactgcaagctgaagccgaagagcaaaagcgccccgctgaagagcagaaaaggcaggctgagatcgaacgtgagacgtcggtgcgtatttaccagtatcgaaggcccgtcgattcgtatgatattcctaagaccgaggaggccagctcaggttttctgccgggagatagaaacaagagtcggtccactacggaactggacgattatagcaccaacaagaatggaaacaataaatacctcgatcagattggcaatatgacttccagccagcggagaagtaagaaggagcaggttcctagtggcgcggagctggaaaggcagcagattctgcaagaaatgagaaagagaaccccactgcacaacgacaacagttggattcgccaaaggagcgcaagtgtgaacaaagagccagtaagtctccctggcataatgcgacgcggtgaatccctcgataacttggatagtccgcgatctaacagctggcgccagcctccatggctcaatcaacccactggattttatgcttcctctagcgtgcaggactttagcagaccccctccccagttagtatccacttctaatagggcctatatgagaaatccctcttcatcagtaccacccccatccgctggatcagttaaaacctccactaccggagtggccactacccagtctcctactccccggtcgcacagcccgtcagcatcccagtctggaagccagctgcgaaatagaagtgtatctggtaaacgcatctgcagctactgcaacaatatactcgggaagggcgccgcaatgatcatcgagagtcttgggttgtgctaccacttgcattgctttaagtgcgtggcatgcgaatgtgatttaggcgggtcgagttccggggctgaggtccgaatcaggaatcatcagctgtactgcaatgactgttatttaaggtttaagagcggccggccgaccgccatgtag

SEQ ID NO: 155299 - DNA, 4050 bp, Artificial Sequence
  derived and/or modified sequence
atgaagaagatccgcatctgccacatcttcaccttctacagctggatgtcctatgatgtgctcttccagaggacagagctgggcgccctggagatctggaggcagctgatctgtgcccacgtgtgcatctgtgtgggctggctgtacctgcgggacagagtgtgcagcaagaaggacatcatcctgaggacagagcagaacagcggccgcaccatcctgatcaaggctgtgacagagaagaactttgagaccaaggacttccgggccagcctggagaatggagtgctgctgtgtgacctgatcaacaagctgaagccaggagtcatcaagaagatcaaccggctgagcacccccatcgccggcctggacaacatcaacgtgttcctgaaggcctgtgagcagatcggcctgaaggaggcccagctgttccaccctggggacctgcaggacctgagcaacagagtgacagtgaagcaggaggagacagaccggcgggtgaagaatgtgctgatcaccctgtactggctgggcaggaaggcccagagcaacccctactacaacggcccccacctgaacctgaaggcctttgagaacctgctgggccaggccctgaccaaggccctggaggacagcagcttcctgaagaggagcggccgggacagcggctatggagacatctggtgcccagagcggggggagttcctggccccacccaggcaccacaagcgggaggacagctttgagagcctggacagcctgggcagccgcagcctgaccagctgcagcagtgacatcaccctgcggggcggccgggagggctttgaaagtgacacagacagcgagttcaccttcaagatgcaggactacaacaaggatgacatgagctaccgccgcatctctgctgtggagcccaagacagccctgcccttcaaccgcttcctgcccaacaagagccggcagcccagctatgtgcctgcccccctgaggaagaagaagccagacaagcatgaggacaacagaagatcctgggccagccctgtgtacacagaagcagatggcaccttcagccgcctcttccagaagatctatggagaaaatggcagcaagtccatgtctgatgtgtctgcagaagatgtgcagaacctgcggcagctgcgctatgaggagatgcagaagatcaagagccagctgaaggagcaggaccagaagtggcaggatgacctggccaagtggaaggacaggaggaagagctacaccagtgacctgcagaagaagaaggaggagcgggaggagattgagaagcaggccctggagaagagcaagaggagcagcaagaccttcaaggagatgctgcaggaccgggagagccagaaccagaagagcacagtgcccagcagaagaaggatgtacagctttgatgatgtgctggaggagggcaagaggcctcccaccatgacagtgtctgaggccagctaccagagcgagcgggtggaggagaagggggccacctaccccagcgagatccccaaggaggacagcaccacctttgccaagcgggaggacagagtgaccacagagatccagctgcccagccagagccctgtggaggagcagagccctgccagcctgagcagcctgcggagccgcagcacccagatggagagcaccagggtgtctgccagcctgcccaggagctacaggaagacagacacagtgcggctgacctctgtggtgaccccccggcccttcggcagccagacccggggcatcagcagcctgcccaggagctacaccatggatgatgcctggaagtacaatggagatgtggaggacatcaagaggacccccaacaacgtggtgtccaccccagcccccagcccagatgccagccagctggccagcagcctgagcagccagaaggaggtggccgccacagaagaagatgtgacccggctgcccagccccaccagccccttcagcagcctgagccaggaccaggccgccaccagcaaggccaccctgagcagcaccagcggcctggacctgatgtctgagagcggggagggggagatcagcccccagcgggaggtgagccgcagccaggaccagttcagtgacatgaggatcagcatcaaccagaccccaggcaagagcctggactttggcttcaccatcaagtgggacatccctggcatctttgtggcctctgtggaggccggcagccctgctgagttcagccagctgcaggtggatgatgagatcatcgccatcaacaacaccaagttctcctacaatgacagcaaggagtgggaggaggccatggccaaggcccaggagaccggccacctggtgatggatgtgcggcgctatggcaaggccggcagccctgagaccaagtggattgatgccaccagcggcatctacaacagcgagaagagcagcaacctgtctgtgaccacagacttcagcgagagcctgcagagcagcaacatcgagagcaaggagatcaatggcatccatgatgagagcaatgcctttgagagcaaggccagcgagagcatcagcctgaagaacctgaagagaagaagccagttctttgagcagggcagcagtgacagcgtggtgcctgacctgcctgtgcccaccatcagcgcccccagccgctgggtgtgggaccaggaggaggagaggaagaggcaggagcgctggcagaaggagcaggaccggctgctgcaggagaagtaccagcgggagcaggagaagctgcgggaggagtggcagagggccaagcaggaggccgagcgggagaacagcaagtacctggatgaggagctgatggtgctgagcagcaacagcatgagcctgaccacccgggagcccagcctggccacctgggaggccacctggagcgagggcagcaagagcagtgaccgggagggcaccagggctggggaggaggagcggcggcagccccaggaggaggtggtgcatgaggaccagggcaagaagccccaggaccagctggtgattgaaagagagaggaagtgggagcagcagctgcaggaggagcaggagcagaagaggctgcaggccgaggccgaggagcagaagaggcctgctgaggagcagaagaggcaggccgagattgagcgggagacctctgtgcgcatctaccagtacagaagacctgtggacagctatgacatccccaagacagaggaggccagcagcggcttcctgcccggggacaggaacaagagccgcagcaccacagagctggatgactacagcaccaacaagaatggaaacaacaagtacctggaccagatcggcaacatgaccagcagccagaggaggagcaagaaggagcaggtgcccagcggggctgagctggagcggcagcagatcctgcaggagatgaggaagaggacccccctgcacaatgacaacagctggatccggcagaggtctgcctctgtgaacaaggagcctgtgtccctgcccggcatcatgagaagaggagagagcctggacaacctggacagccccaggagcaacagctggaggcagcccccctggctgaaccagcccaccggcttctacgccagcagctctgtgcaggacttcagccggcccccaccccagctggtgtccaccagcaacagagcctacatgaggaaccccagcagctctgtgcccccacccagcgctggctctgtgaagaccagcaccactggagtggccaccacccagagccccacccccaggagccacagccccagcgccagccagagcggcagccagctgaggaacagatctgtgtctgggaagaggatctgcagctactgcaacaacatcctgggcaaaggagctgccatgatcatcgagagcctgggcctgtgctaccacctgcactgcttcaagtgtgtggcctgtgaatgtgacctgggcggcagcagcagtggagctgaggtgcgcatccggaaccaccagctgtactgcaatgactgctacctgcgcttcaagagcggccggcccacagccatgtag

SEQ ID NO: 155300 - DNA, 7233 bp, Artificial Sequence
  derived and/or modified sequence
ggaaagaagtggaataattaggaacctagggtggggtagggtagcaggacatttcaaacattaatgagcatatgagattccaggtcttgttaaaatgcaaattctgattcagctggtaggtgaggtctgagattgtgcatttctaacaagcactcagataatcttaaggctgttggccccagggtcacacttatagtgattttctagaacccagttggggaagtgaatcttgggcaggagaaatacacacctcttgcattgagtttggagatctcatctgatataactttttaagaaagaaaaataattttccaaatatccaattgataagctttcccactaagtggctttcccactaagtggctgcgttatgaaaattgcttcactttgaaacttctggtcttggtaatatagaatttctgtgttctcacagtgcttgattgagaatatgatattgagattatggcataaaatatagtggctgtacaaaaaaaaatacattattaggatctctaacaattatgtaaaagtcattgcttcatgggtagagctcaaactttggtgtgagacctggttttattcttggcacttactctgagttgtcttaggcaaattaataccttaagcaaaaatattctcatgtacattttacatgagaattataaatgaagtacataaagtccagcagtcacaaatgttatctattattaccatcgtcctaagactgcaatcagctatagtgaaagtagtctcaaagattgtttcataaatcatcagattcacctaattttctaaagaatttaaataaggagatggaatgaatagattgcattttgtttccatgcacaggggaactgtgcatatttcttctgtgactcggaaatggtttaacttttaaaaatcccaaaatagctgaagttagcagacatgcaatttaccaaggatgattggaatttttatctttcctgtaataatactatacccaagcacactgctcatgaggaaaacatttttatgtgaatcttttactcttgggggcaaagaatgctgtttttctttttgataactatgtttatagaatctaaatcaccctgagcaattatttcaacatctaaagttattattaccattcatgtttcatttatagctatttgaattttgatgaatttcaatatggtgctacagtgatagggcaagtgcaaataagttcaatatatgggtacggtctaaagctattttaatttttttattacaactgctatgaagaaaattaggatatgccatattttcacgttttacagttggatgtcctatgatgttctcttccagagaacagagctcggagctctggaaatttggaggcaactgatatgtgctcatgtctgcatctgtgtgggttggctgtatctcagggacagagtctgcagcaaaaaagatataattttgaggactgaacaaaattcaggaaggactattctcattaaggcagtaacagagaagaattttgaaacaaaagattttcgagcctctctagaaaatggtgttctgctgtgtgatttgattaataagcttaaacctggcgtcattaagaagatcaatagactgtctacaccaatagcaggattggataatataaacgttttcttgaaagcttgtgaacagattggattgaaagaagcccagcttttccatcctggagatctacaggatttatcaaatcgagtcactgtcaagcaagaagagactgacaggagagtgaaaaatgttttgataacattgtactggctgggaagaaaagcacaaagcaacccgtactataatggtccccatcttaatttgaaagcgtttgagaatcttttaggacaagcactgacgaaggcactcgaagactccagcttcctgaaaagaagtggcagggacagtggctacggtgacatctggtgtcctgaacgtggagaatttcttgctcctccaaggcaccataagagagaagattcctttgaaagcttggactctttgggctcgaggtcattgacaagctgctcctctgatatcacgttgagaggggggcgtgaaggttttgaaagtgacacagattcggaatttacatttaagatgcaggattataataaagatgatatgtcgtatcgaaggatttcggctgttgagccaaagactgcgttacccttcaatcgttttttacccaacaaaagtagacagccatcctatgtaccagcacctctgagaaagaaaaagccagacaaacatgaggataacagaagaagttgggcaagcccggtttatacagaagcagatggaacattttcaagactctttcaaaagatttatggtgagaatgggagtaagtccatgagtgatgtcagcgcagaagatgttcaaaacttgcgtcagctgcgttacgaggagatgcagaaaataaaatcacaattaaaagaacaagatcagaaatggcaggatgaccttgcaaaatggaaagatcgtcgaaaaagttacacttcagatctgcagaagaaaaaagaagagagagaagaaattgaaaagcaggcacttgagaagtctaagagaagctctaagacgtttaaggaaatgctgcaggacagggaatcccaaaatcaaaagtctacagttccgtcaagaaggagaatgtattcttttgatgatgtgctggaggaaggaaagcgaccccctacaatgactgtgtcagaagcaagttaccagagtgagagagtagaagagaagggagcaacttatccttcagaaattcccaaagaagattctaccacttttgcaaaaagagaggaccgtgtaacaactgaaattcagcttccttctcaaagtcctgtggaagaacaaagcccagcctctttgtcttctctgcgttcacggagcacacaaatggaatcaactcgtgtttcagcttctctccccagaagttaccggaaaactgatacagtcaggttaacatctgtggtcacaccaagaccctttggctctcagacaaggggaatctcatcactccccagatcttacacgatggatgatgcttggaagtataatggagatgttgaagacattaagagaactccaaacaatgtggtcagcacccctgcaccaagcccggacgcaagccaactggcttcaagcttatctagccagaaagaggtagcagcaacagaagaagatgtgacaaggctgccctctcctacatcccccttctcatctctttcccaagaccaggctgccacttctaaagccacattgtcttccacatctggtcttgatttaatgtctgaatctggagaaggggaaatctccccacaaagagaagtctcaagatcccaggatcagttcagtgatatgagaatcagcataaaccagacgcctgggaagagtcttgactttgggtttacaataaaatgggatattcctgggatcttcgtagcatcagttgaagcaggtagcccagcagaattttctcagctacaagtagatgatgaaattattgctattaacaacaccaagttttcatataacgattcaaaagagtgggaggaagccatggctaaggctcaagaaactggacacctagtgatggatgtgaggcgctatggaaaggctggttcacctgaaacaaagtggattgatgcaacttctggaatttacaactcagaaaaatcttcaaatctatctgtaacaactgatttctccgaaagccttcagagttctaatattgaatccaaagaaatcaatggaattcatgatgaaagcaatgcttttgaatcaaaagcatctgaatccatttctttgaaaaacttaaaaaggcgatcacaattttttgaacaaggaagctctgattcggtggttcctgatcttccagttccaaccatcagtgccccgagtcgctgggtgtgggatcaagaggaggagcggaagcggcaggagaggtggcagaaggagcaggaccgcctactgcaggaaaaatatcaacgtgagcaggagaaactgagggaagagtggcaaagggccaaacaggaggcagagagagagaattccaagtacttggatgaggaactgatggtcctaagctcaaacagcatgtctctgaccacacgggagccctctcttgccacctgggaagctacctggagtgaagggtccaagtcttcagacagagaaggaacccgagcaggagaagaggagaggagacagccacaagaggaagttgttcatgaggaccaaggaaagaagccgcaggatcagcttgttattgagagagagaggaaatgggagcaacagcttcaggaagagcaagagcaaaagcggcttcaggctgaggctgaggagcagaagcgtcctgcggaggagcagaagcgccaggcagagatagagcgggaaacatcagtcagaatataccagtacaggaggcctgttgattcctatgatataccaaagacagaagaagcatcttcaggttttcttcctggtgacaggaataaatccagatctactactgaactggatgattactccacaaataaaaatggaaacaataaatatttagaccaaattgggaacatgacctcttcacagaggagatccaagaaagaacaagtaccatcaggagcagaattggagaggcaacaaatccttcaggaaatgaggaagagaacaccccttcacaatgacaacagctggatccgacagcgcagtgccagtgtcaacaaagagcctgttagtcttcctgggatcatgagaagaggcgaatctttagataacctggactccccccgatccaattcttggagacagcctccttggctcaatcagcccacaggattctatgcttcttcctctgtgcaagactttagtcgcccaccacctcagctggtgtccacatcaaaccgtgcctacatgcggaacccctcctccagcgtgcccccaccttcagctggctccgtgaagacctccaccacaggtgtggccaccacacagtcccccaccccgagaagccattccccttcagcttcacagtcaggctctcagctgcgtaacaggtcagtcagtgggaagcgcatatgctcctactgcaataacattctgggcaaaggagccgccatgatcatcgagtccctgggtctttgttatcatttgcattgttttaagtgtgttgcctgtgagtgtgacctcggaggctcttcctcaggagctgaagtcaggatcagaaaccaccaactgtactgcaacgactgctatctcagattcaaatctggacggccaaccgccatgtgatgtaagcctccatacgaaagcactgttgcagatagaagaagaggtggttgctgctcatgtagatctataaatatgtgttgtatgtcttttttgctttttttttaaaaaaaagaataactttttttgcctctttagattacatagaagcattgtagtcttggtagaaccagtatttttgttgtttatttataaggtaattgtgtgtggggaaaagtgcagtatttacctgttgaattcagcatcttgagagcacaagggaaaaaataagaacctacgaatatttttgaggcagataatgatctagtttgactttctagttagtggtgttttgaagagggtattttattgttttttaaaaaaaggttcttaaacattatttgaaatagttaatataaatacataattgcatttgctctgtttattgtaatgtattctaaattaatgcagaaccatatggaaaatttcattaaaatctatccccaaatgtgctttctgtatccttccttctacctattattctgatttttaaaaatgcagttaatgtaccatttatttgcttgatgaagggagctctattttctttaccagaaatgttgctaagtaattcccaatagaaagctgcttattttcattaatgaaaaataaccatggtttgtatactagaagtcttcttcagaaactggtgagcctttctgttcaattgcatttgtaaataaacttgctgatgcatttaacgagtgggtcgtctttttcttaggtgtatgtgtctgacctcaggccttttagccatatttcagtatgtggccttttttgatgttatgttttatccagtagctttactaaggtataattgatgtaataaactgcatatatttaaagtgtatactttgacaaattttgacatggtgtataccttcgaaactatgccacagtctggatgtgtttactgaaacattttaataaggaagtttatttttgataaagttatgtttttggatacaatatatttgtatggtgagagtgatgaattgttggatcatttgaataaaatcttttactaaccccatgataaaaggagaagacaacagtgagcttagaatatctataaagcaaaaaatgtagtctcttgtttaaaaaatctggagcgggaatgcaaggatacaaaactttagcatgctttgagcaaaaatttaaacttactggaatcttttataataatgtaagtggaatggaggattctaggaactgagaactgtattggaataggttcaaaatatgtaagaaatgctaatgtgggagataaaaattttatttagtacttattctgattattattaaagtaataatgtgttccttgaggataacttgtcaaatgccccaaagcataaagaatataattctgaatcccaaattccaaagacaagaactctgtgtttgaattcattctgcatataattatttataagtatagattgtgaatttttccatgttcttaaaattatttttatcttttttcatggttgcatagtgctccattgtttggccttggtaatatttagttgataattccattactgtgtatttttcacttgtttctaagatcaaacattttaatatgtgcatgttatatataaatatgtaaattctgtgatactctatgatcatctctttctttatattattttcatagacatgaaatagttgctcagagattatgcattttaagacactcatagtatatattgccaaagtggtttccagaaaggcactgctggcttcgactcctataagcagcacgtgggcttgttcatctcactgcatgtttatgaagatacagttcttttgccttgttctctgcctgatgtgtatgcagaggcagccctcaatatgcagtggttgaataaatgaatgaagaaaccacta

SEQ ID NO: 155301 - DNA, 4050 bp, Artificial Sequence
  derived and/or modified sequence
atgaagaagatccggatctgccacatcttcaccttctacagctggatgtcctatgatgtcctgtttcagcggaccgagttgggggcactggagatctggagacaattgatatgtgcccatgtgtgcatctgcgtcggttggttgtatctaagggatcgcgtgtgttcaaagaaagacatcatcctacggaccgagcagaacagcggcaggaccatcttaataaaagccgtcaccgagaagaattttgaaactaaagatttccgagccagcctcgaaaatggggtcctgctatgtgatctgattaacaaactgaagccaggggtgattaaaaaaattaatagactgagtacccctatcgcaggactggataacatcaacgtgttcctgaaagcctgcgagcagataggcctcaaggaggcccagctgtttcatccaggtgatctccaggatctttccaatcgggtcaccgtgaaacaggaggagacagaccgcagagttaaaaacgtgctgattacgctgtattggttaggccgcaaggctcagtctaacccatactataacggccctcacctgaacctcaaggcttttgagaacctgctgggccaagccttgacaaaggccctggaggactcctcgttcttgaaacgctcgggacgtgattcaggttatggcgacatttggtgccccgaacgcggagagtttctggctcctcctcggcaccacaaacgcgaggatagcttcgagagcctcgatagccttggatccagatcactcacctcctgttcgtccgatattacactccgggggggacgcgagggcttcgagtccgacacggattctgaatttacttttaagatgcaggattataacaaggacgacatgtcttatcggcggatctcggccgttgagcccaagaccgcgctgccattcaaccggttcctcccaaacaagagtcggcagccttcctacgtgccggcccctctcaggaagaagaagcccgataaacatgaagataaccgtaggagctgggcgagccctgtctataccgaggccgacggcactttttcgcggctgttccagaaaatttacggagaaaatgggtctaagagcatgtccgacgtgtccgccgaagatgtgcagaacctgcgtcaactgcggtacgaagaaatgcagaagattaaatctcagctgaaggagcaggaccagaaatggcaggatgacctagcgaagtggaaagacagacggaaatcgtacacctcggacttgcaaaagaagaaggaggaacgcgaagagatcgaaaaacaggcgctggagaaatccaaaagatcctcaaagacgtttaaagagatgcttcaggacagagaatctcagaaccaaaagtccactgttcctagtcgacggcgaatgtactcttttgacgacgtgctcgaagaaggaaaaagacctccaactatgaccgtctctgaggcctcataccagtccgagagggtcgaggagaagggagccacttacccttccgaaattcctaaggaggacagcaccacgttcgccaagagagaggacagggtgactaccgagattcaacttccaagccagtcccccgtcgaagagcagagtcctgccagtctgagttctttgagatcacgatccactcagatggaaagcactagagtgagtgccagtctccctagaagctatcgaaagacagacactgtgcgtctgacaagcgtggttacacccagaccttttgggagccagacccgggggatcagttccttgccacggtcctatactatggacgacgcctggaagtataatggcgatgtggaagatatcaaacgcacgcccaataatgttgtctctacccctgcaccctcccctgatgctagccagttagcctctagcctatccagccaaaaggaggtagccgcaacagaggaggatgtcacgcgcttgccaagccccacctctcctttttctagcctgagccaagaccaggctgccaccagtaaagccacactttccagtaccagcggcctagatctgatgtccgaaagcggggaaggggaaatttcaccccagcgcgaggtctcgcgctcgcaggatcagttttcagacatgcggatatcgataaaccagacgcccggtaaatcgctcgacttcggctttacaattaagtgggatatccccggcattttcgtcgcctctgtcgaagctggttccccggctgagttttctcagttacaggtggacgacgagattattgcgattaataataccaagttcagctataacgacagcaaggagtgggaagaggcgatggccaaagcacaagagacaggacatcttgttatggacgtgagacgctatggtaaagcggggtcccccgagaccaaatggattgatgcaactagcggcatctataattcagaaaagtcttctaacttatcagtaaccaccgatttcagtgaaagcttgcagagcagcaatatcgagtcgaaggagatcaacggcatccacgatgagtccaacgccttcgaatctaaggcatcggaaagcatctccttgaagaatctgaagcggcgttcacagttcttcgaacaggggtccagcgatagtgttgtgcctgacctgccggttcccaccatcagcgccccaagtcggtgggtctgggaccaggaagaagaaaggaagcggcaggagagatggcaaaaggagcaagatcgcctgttgcaggagaaatatcagagagaacaggagaaactaagggaggagtggcagagagccaaacaggaagctgagcgggagaactcgaaataccttgatgaagagttgatggtactgtctagcaactcaatgagtctgaccacaagagagcccagcctggcaacttgggaggctacatggtctgagggatctaagtcttctgaccgggaaggaacgagggccggtgaagaggaacggagacagccccaggaggaggtagtgcatgaagatcaggggaagaagccccaggatcagctggtgatagagcgcgaacgaaaatgggagcagcaactgcaagaggagcaggaacaaaagcggctgcaggcggaggccgaggaacagaaacggccagcagaagagcagaaaagacaagccgaaatcgagcgagaaactagtgtgagaatctatcaataccgaagaccggtcgactcatacgacatccccaagacagaggaggccagctctggatttttgccgggcgatcgaaacaagtctcgttccactacggagctggatgactactccacaaataagaacggcaataataaataccttgatcagatagggaacatgacatcttctcagaggcggagcaagaaagagcaggtgccatccggcgccgagctagagcgacaacagatccttcaggaaatgcggaagagaacacccctgcataacgacaacagctggattaggcagaggagtgcaagcgtcaacaaagagcctgtgtcactccccgggatcatgcgcagaggcgaatcactcgacaacctggactccccacggtcaaatagttggcggcagcctccttggctgaatcagcctaccgggttttacgccagcagctccgtgcaggatttctcacggccgccgccccagctagttagcacctctaaccgggcttatatgcgcaatccttcttcctctgtgccaccaccatccgccggctcagtgaagacctccacaacaggggttgccacaacacaatctcccaccccccggtctcattctccgtctgcgtcgcagtccggctctcagctgcgtaaccgaagcgtgtctggcaaacggatctgctcatactgcaacaatatcctgggcaagggagcagcaatgattattgaaagcctaggattgtgttaccatctgcattgctttaagtgtgtcgcttgtgaatgtgatttaggcggttccagcagcggcgcggaggtaagaataaggaatcaccagctatattgtaatgactgctacttgcgatttaagtccggtcgcccaaccgcaatgtag

SEQ ID NO: 155302 - DNA, 4050 bp, Artificial Sequence
  derived and/or modified sequence
atgaagaagattcgtatctgtcacatattcacattctactcctggatgtcatatgatgtcctctttcagagaacagaattgggggctctggagatctggcgacagctgatatgcgcacacgtgtgtatttgcgtcgggtggctgtatctcagagatagggtgtgcagtaagaaagacatcatcttgcgcaccgagcagaacagtggcagaactatactcatcaaggccgtaaccgagaaaaacttcgagacaaaggactttcgggcatcactagagaacggggttttactctgtgacctcattaacaaactcaagcccggagtgatcaagaagattaatcggctgtctacgccaattgcagggttagacaacatcaacgttttcctgaaggcgtgcgaacagatcggactgaaggaggcccagctatttcacccaggagatctgcaggatttaagcaaccgcgtaaccgtgaaacaggaggaaacagaccgcagggtgaaaaacgtgcttattacactttactggttagggcgaaaggctcaatcaaatccatactacaatgggccacatttaaacctcaaagcattcgaaaacctcttaggtcaagccctcaccaaggcgctggaagactccagctttttaaaaagatcaggtagagattccggctacggcgatatttggtgtccagagcgcggagagtttctcgctccgcctagacatcataaaagagaggactctttcgagtctctggactcactgggttctaggtctctgacgtcttgctcctccgacatcactcttcgaggcggtcgagagggattcgaatctgacaccgattcagaatttaccttcaagatgcaggattacaataaagatgatatgagctacagacgcatcagtgctgtggagcctaagaccgccctgccatttaataggttcctgcccaataagtcccgtcagcctagttatgttccagcacctttgcggaagaagaaaccagacaagcacgaagataatagaagatcctgggcttctccagtctacaccgaagccgatgggacatttagccgactctttcagaaaatttatggggaaaacggttccaagagcatgtcagatgtgtctgctgaagatgtccagaatctcaggcagctgagatacgaggagatgcagaagattaaatcacagttgaaggagcaggatcaaaagtggcaagacgatctagccaaatggaaggaccggcgaaaatcatacaccagcgacctccaaaaaaaaaaagaggaacgcgaggagatcgagaaacaggctcttgagaagagtaagcgcagcagtaaaacctttaaggagatgttgcaggatcgagaatctcaaaaccagaaatccaccgtgcccagcaggcgcaggatgtacagcttcgacgacgtgttagaagaagggaagcggcctccaaccatgacggtgagtgaggcctcgtaccagagtgagagggttgaggagaagggggctacatatccctccgagattccaaaagaggactctacaacttttgccaagcgagaggacagagtgaccactgagattcaactgccttcacaatcccccgttgaggagcagagtcctgcaagcctgtcatcactgcggagtaggagtactcagatggaaagtactagagtcagcgcatctcttccacggtcctatcggaaaacagacacagtccggctcacatccgtggttacgccccgacctttcggatctcagactcgcggaatatcttccctgccccgatcgtataccatggatgatgcctggaaatataatggagacgtcgaagacatcaagagaacacctaacaatgtggtaagcacgcccgcaccctcgcccgacgcatcacagctggcgtcatctcttagttcccagaaggaggtcgcagcgacggaagaggatgttacccggctcccttctcccacaagcccatttagtagcctgtctcaagaccaggccgcaacaagcaaagccacattgtcttctacatcaggcctagacctaatgtctgaatccggggaaggagagatcagccctcaacgcgaagtgtcacggtctcaggaccagttctccgacatgaggatctcaataaatcagacccccggaaagtctctggacttcggtttcaccataaaatgggacatacctggtatatttgtagcctcagtcgaagccggaagcccagccgaattcagccaactgcaagttgatgatgagataatcgccatcaataatacaaaattcagctacaatgatagcaaagaatgggaggaggccatggccaaggcacaggagactggtcacctagtcatggatgtgaggaggtacggaaaagcgggatctcctgaaactaaatggatcgatgctacgagcgggatctacaactctgaaaagtctagcaatctttccgtgacaactgacttttcagagtcccttcagagctctaacatagagtccaaggagattaacgggatccatgacgaatctaacgcatttgagtcaaaagctagcgaaagtattagtctgaaaaatttgaagcggagatctcagttttttgagcagggatctagcgattctgtagtgccagatcttcctgttcccaccatttccgccccttcccggtgggtgtgggatcaggaggaggagcggaagcgccaggaacgctggcaaaaggaacaagatagactgctccaggaaaagtatcagagggagcaggaaaagctgcgggaagagtggcagagggccaaacaggaggcggagcgagaaaattctaaatacctcgatgaggaactgatggtgctgagctccaactctatgtcgctgactaccagagaaccttcccttgcaacttgggaggctacatggagcgaagggtcaaagtcttccgacagagaaggaacacgtgcaggggaggaggagagaaggcagccccaggaagaggtcgtgcatgaggatcagggcaagaaaccacaggaccagctggtgattgagcgcgagcggaaatgggagcagcagctccaggaggagcaggaacagaagcgcctgcaagccgaggctgaggagcaaaagcggcctgcagaggaacagaagcgccaggcagaaatcgagcgtgagacttccgtccggatctatcaatataggcgcccagttgactcctatgatattcctaaaactgaggaggcctcttctggctttctccctggcgaccgcaacaaatcccgatctacaactgagctggacgactactcaacaaataaaaatggcaataacaaatatcttgatcagatcggtaacatgacttccagtcagagaaggtctaaaaaggaacaagtgccgtctggtgcagagctagagcggcagcagatcctgcaggagatgcgcaaacgcaccccacttcacaatgacaatagttggattcgacagaggtcagcatccgtcaataaagaaccagtgagtctgccgggaatcatgcgcaggggagaatcactcgacaatctggattctccaagatccaattcctggcgccagcccccttggctgaatcagccgactggcttttacgcctcctcttccgtccaggacttctcgcggccaccccctcagctggtatccacctcaaacagagcatatatgcggaatccctcatccagcgtcccgccacctagcgcaggctccgtgaaaaccagcacaaccggcgttgccacaacccaaagcccaactcctaggtcacattcccctagtgccagccagtccggatcacagttgcgcaaccgctccgtgtccggcaagcgaatctgctcttattgcaataacattctgggtaaaggagcagcaatgattattgagagtctcggcttatgttatcacctgcactgttttaaatgtgtggcctgcgaatgtgacctgggtggttcaagcagcggcgctgaggtgcgaattagaaaccatcaactctactgtaacgattgttacctgaggttcaagtcggggagacccacagctatgtag

SEQ ID NO: 155303 - DNA, 4050 bp, Artificial Sequence
  derived and/or modified sequence
atgaagaagatcagaatctgccacatcttcaccttctacagctggatgagctacgacgtgctgttccagagaaccgagctgggcgccctggagatctggagacagctgatctgcgcccacgtgtgcatctgcgtgggctggctgtacctgagagacagagtgtgcagcaagaaggacatcatcctgagaaccgagcagaacagcggcagaaccatcctgatcaaggccgtgaccgagaagaacttcgagaccaaggacttcagagccagcctggagaacggcgtgctgctgtgcgacctgatcaacaagctgaagcccggcgtgatcaagaagatcaacagactgagcacccccatcgccggcctggacaacatcaacgtgttcctgaaggcctgcgagcagatcggcctgaaggaggcccagctgttccaccccggcgacctgcaggacctgagcaacagagtgaccgtgaagcaggaggagaccgacagaagagtgaagaacgtgctgatcaccctgtactggctgggcagaaaggcccagagcaacccctactacaacggcccccacctgaacctgaaggccttcgagaacctgctgggccaggccctgaccaaggccctggaggacagcagcttcctgaagagaagcggcagagacagcggctacggcgacatctggtgccccgagagaggcgagttcctggccccccccagacaccacaagagagaggacagcttcgagagcctggacagcctgggcagcagaagcctgaccagctgcagcagcgacatcaccctgagaggcggcagagagggcttcgagagcgacaccgacagcgagttcaccttcaagatgcaggactacaacaaggacgacatgagctacagaagaatcagcgccgtggagcccaagaccgccctgcccttcaacagattcctgcccaacaagagcagacagcccagctacgtgcccgcccccctgagaaagaagaagcccgacaagcacgaggacaacagaagaagctgggccagccccgtgtacaccgaggccgacggcaccttcagcagactgttccagaagatctacggcgagaacggcagcaagagcatgagcgacgtgagcgccgaggacgtgcagaacctgagacagctgagatacgaggagatgcagaagatcaagagccagctgaaggagcaggaccagaagtggcaggacgacctggccaagtggaaggacagaagaaagagctacaccagcgacctgcagaagaagaaggaggagagagaggagatcgagaagcaggccctggagaagagcaagagaagcagcaagaccttcaaggagatgctgcaggacagagagagccagaaccagaagagcaccgtgcccagcagaagaagaatgtacagcttcgacgacgtgctggaggagggcaagagaccccccaccatgaccgtgagcgaggccagctaccagagcgagagagtggaggagaagggcgccacctaccccagcgagatccccaaggaggacagcaccaccttcgccaagagagaggacagagtgaccaccgagatccagctgcccagccagagccccgtggaggagcagagccccgccagcctgagcagcctgagaagcagaagcacccagatggagagcaccagagtgagcgccagcctgcccagaagctacagaaagaccgacaccgtgagactgaccagcgtggtgacccccagacccttcggcagccagaccagaggcatcagcagcctgcccagaagctacaccatggacgacgcctggaagtacaacggcgacgtggaggacatcaagagaacccccaacaacgtggtgagcacccccgcccccagccccgacgccagccagctggccagcagcctgagcagccagaaggaggtggccgccaccgaggaggacgtgaccagactgcccagccccaccagccccttcagcagcctgagccaggaccaggccgccaccagcaaggccaccctgagcagcaccagcggcctggacctgatgagcgagagcggcgagggcgagatcagcccccagagagaggtgagcagaagccaggaccagttcagcgacatgagaatcagcatcaaccagacccccggcaagagcctggacttcggcttcaccatcaagtgggacatccccggcatcttcgtggccagcgtggaggccggcagccccgccgagttcagccagctgcaggtggacgacgagatcatcgccatcaacaacaccaagttcagctacaacgacagcaaggagtgggaggaggccatggccaaggcccaggagaccggccacctggtgatggacgtgagaagatacggcaaggccggcagccccgagaccaagtggatcgacgccaccagcggcatctacaacagcgagaagagcagcaacctgagcgtgaccaccgacttcagcgagagcctgcagagcagcaacatcgagagcaaggagatcaacggcatccacgacgagagcaacgccttcgagagcaaggccagcgagagcatcagcctgaagaacctgaagagaagaagccagttcttcgagcagggcagcagcgacagcgtggtgcccgacctgcccgtgcccaccatcagcgcccccagcagatgggtgtgggaccaggaggaggagagaaagagacaggagagatggcagaaggagcaggacagactgctgcaggagaagtaccagagagagcaggagaagctgagagaggagtggcagagagccaagcaggaggccgagagagagaacagcaagtacctggacgaggagctgatggtgctgagcagcaacagcatgagcctgaccaccagagagcccagcctggccacctgggaggccacctggagcgagggcagcaagagcagcgacagagagggcaccagagccggcgaggaggagagaagacagccccaggaggaggtggtgcacgaggaccagggcaagaagccccaggaccagctggtgatcgagagagagagaaagtgggagcagcagctgcaggaggagcaggagcagaagagactgcaggccgaggccgaggagcagaagagacccgccgaggagcagaagagacaggccgagatcgagagagagaccagcgtgagaatctaccagtacagaagacccgtggacagctacgacatccccaagaccgaggaggccagcagcggcttcctgcccggcgacagaaacaagagcagaagcaccaccgagctggacgactacagcaccaacaagaacggcaacaacaagtacctggaccagatcggcaacatgaccagcagccagagaagaagcaagaaggagcaggtgcccagcggcgccgagctggagagacagcagatcctgcaggagatgagaaagagaacccccctgcacaacgacaacagctggatcagacagagaagcgccagcgtgaacaaggagcccgtgagcctgcccggcatcatgagaagaggcgagagcctggacaacctggacagccccagaagcaacagctggagacagcccccctggctgaaccagcccaccggcttctacgccagcagcagcgtgcaggacttcagcagaccccccccccagctggtgagcaccagcaacagagcctacatgagaaaccccagcagcagcgtgcccccccccagcgccggcagcgtgaagaccagcaccaccggcgtggccaccacccagagccccacccccagaagccacagccccagcgccagccagagcggcagccagctgagaaacagaagcgtgagcggcaagagaatctgcagctactgcaacaacatcctgggcaagggcgccgccatgatcatcgagagcctgggcctgtgctaccacctgcactgcttcaagtgcgtggcctgcgagtgcgacctgggcggcagcagcagcggcgccgaggtgagaatcagaaaccaccagctgtactgcaacgactgctacctgagattcaagagcggcagacccaccgccatgtag

SEQ ID NO: 155304 - protein, 552 aa, Artificial Sequence
  derived and/or modified sequence
MDNMSITNTPTSNDACLSIVHSLMCHRQGGESETFAKRAIESLVKKLKEKKDELDSLITAITTNGAHPSKCVTIQRTLDGRLQVAGRKGFPHVIYARLWRWPDLHKNELKHVKYCQYAFDLKCDSVCVNPYHYERVVSPGIDLSGLTLQSNAPSSMMVKDEYVHDFEGQPSLSTEGHSIQTIQHPPSNRASTETYSTPALLAPSESNATSTANFPNIPVASTSQPASILGGSHSEGLLQIASGPQPGQQQNGFTGQPATYHHNSTTTWTGSRTAPYTPNLPHHQNGHLQHHPPMPPHPGHYWPVHNELAFQPPISNHPAPEYWCSIAYFEMDVQVGETFKVPSSCPIVTVDGYVDPSGGDRFCLGQLSNVHRTEAIERARLHIGKGVQLECKGEGDVWVRCLSDHAVFVQSYYLDREAGRAPGDAVHKIYPSAYIKVFDLRQCHRQMQQQAATAQAAAAAQAAAVAGNIPGPGSVGGIAPAISLSAAAGIGVDDLRRLCILRMSFVKGWGPDYPRQSIKETPCWIEIHLHRALQLLDEVLHTMPIADPQPLD

SEQ ID NO: 155305 - protein, 177 aa, Artificial Sequence
  derived and/or modified sequence
MDNMSITNTPTSNDACLSIVHSLMCHRQGGESETFAKRAIESLVKKLKEKKDELDSLITAITTNGAHPSKCVTIQRTLDGRLQVAGRKGFPHVIYARLWRWPDLHKNELKHVKYCQYAFDLKCDSVCVNPYHYERVVSPGIDLSGLTLQSNENNWYFSQLLLDLDKGMIQEQAIHGP

SEQ ID NO: 155306 - protein, 436 aa, Artificial Sequence
  derived and/or modified sequence
MDNMSITNTPTSNDACLSIVHSLMCHRQGGESETFAKRAIESLVKKLKEKKDELDSLITAITTNGAHPSKCVTIQRTLDGRLQVAGRKGFPHVIYARLWRWPDLHKNELKHVKYCQYAFDLKCDSVCVNPYHYERVVSPGIDLSGLTLQSNAPSSMMVKDEYVHDFEGQPSLSTEGHSIQTIQHPPSNRASTETYSTPALLAPSESNATSTANFPNIPVASTSQPASILGGSHSEGLLQIASGPQPGQQQNGFTGQPATYHHNSTTTWTGSRTAPYTPNLPHHQNGHLQHHPPMPPHPGHYWPVHNELAFQPPISNHPAPEYWCSIAYFEMDVQVGETFKVPSSCPIVTVDGYVDPSGGDRFCLGQLSNVHRTEAIERARLHIGKGVQLECKGEGDVWVRCLSDHAVFVQSYYLDREAGRAPGDAVHKIYPSAYIK

SEQ ID NO: 155307 - DNA, 8789 bp, Artificial Sequence
  derived and/or modified sequence
atgctcagtggcttctcgacaagttggcagcaacaacacggccctggtcgtcgtcgccgctgcggtaacggagcggtttgggtggcggagcctgcgttcgcgccttcccgctctcctcgggaggcccttcctgctctcccctaggctccgcggccgcccagggggtgggagcgggtgaggggagccaggcgcccagcgagagaggccccccgccgcagggcggcccgggagctcgaggcggtccggcccgcgcgggcagcggcgcggcgctgaggaggggcggcctggccgggacgcctcggggcgggggccgaggagctctccgggccgccggggaaagctacgggcccggtgcgtccgcggaccagcagcgcgggagagcggactcccctcgccaccgcccgagcccaggttatcctgaatacatgtctaacaattttccttgcaacgttagctgttgtttttcactgtttccaaaggatcaaaattgcttcagaaattggagacatatttgatttaaaaggaaaaacttgaacaaatggacaatatgtctattacgaatacaccaacaagtaatgatgcctgtctgagcattgtgcatagtttgatgtgccatagacaaggtggagagagtgaaacatttgcaaaaagagcaattgaaagtttggtaaagaagctgaaggagaaaaaagatgaattggattctttaataacagctataactacaaatggagctcatcctagtaaatgtgttaccatacagagaacattggatgggaggcttcaggtggctggtcggaaaggatttcctcatgtgatctatgcccgtctctggaggtggcctgatcttcacaaaaatgaactaaaacatgttaaatattgtcagtatgcgtttgacttaaaatgtgatagtgtctgtgtgaatccatatcactacgaacgagttgtatcacctggaattgatctctcaggattaacactgcagagtaatgctccatcaagtatgatggtgaaggatgaatatgtgcatgactttgagggacagccatcgttgtccactgaaggacattcaattcaaaccatccagcatccaccaagtaatcgtgcatcgacagagacatacagcaccccagctctgttagccccatctgagtctaatgctaccagcactgccaactttcccaacattcctgtggcttccacaagtcagcctgccagtatactggggggcagccatagtgaaggactgttgcagatagcatcagggcctcagccaggacagcagcagaatggatttactggtcagccagctacttaccatcataacagcactaccacctggactggaagtaggactgcaccatacacacctaatttgcctcaccaccaaaacggccatcttcagcaccacccgcctatgccgccccatcccggacattactggcctgttcacaatgagcttgcattccagcctcccatttccaatcatcctgctcctgagtattggtgttccattgcttactttgaaatggatgttcaggtaggagagacatttaaggttccttcaagctgccctattgttactgttgatggatacgtggacccttctggaggagatcgcttttgtttgggtcaactctccaatgtccacaggacagaagccattgagagagcaaggttgcacataggcaaaggtgtgcagttggaatgtaaaggtgaaggtgatgtttgggtcaggtgccttagtgaccacgcggtctttgtacagagttactacttagacagagaagctgggcgtgcacctggagatgctgttcataagatctacccaagtgcatatataaaggtctttgatttgcgtcagtgtcatcgacagatgcagcagcaggcggctactgcacaagctgcagcagctgcccaggcagcagccgtggcaggaaacatccctggcccaggatcagtaggtggaatagctccagctatcagtctgtcagctgctgctggaattggtgttgatgaccttcgtcgcttatgcatactcaggatgagttttgtgaaaggctggggaccggattacccaagacagagcatcaaagaaacaccttgctggattgaaattcacttacaccgggccctccagctcctagacgaagtacttcataccatgccgattgcagacccacaacctttagactgaggtcttttaccgttggggcccttaaccttatcaggatggtggactacaaaatacaatcctgtttataatctgaagatatatttcacttttgttctgctttatcttttcataaagggttgaaaatgtgtttgctgccttgctcctagcagacagaaactggattaaaacaattttttttttcctcttcagaacttgtcaggcatggctcagagcttgaagattaggagaaacacattcttattaattcttcacctgttatgtatgaaggaatcattccagtgctagaaaatttagccctttaaaacgtcttagagccttttatctgcagaacatcgatatgtatatcattctacagaataatccagtattgctgattttaaaggcagagaagttctcaaagttaattcacctatgttattttgtgtacaagttgttattgttgaacatacttcaaaaataatgtgccatgtgggtgagttaattttaccaagagtaactttactctgtgtttaaaaagtaagttaataatgtattgtaatctttcatccaaaatattttttgcaagttatattagtgaagatggtttcaattcagattgtcttgcaacttcagttttatttttgccaaggcaaaaaactcttaatctgtgtgtatattgagaatcccttaaaattaccagacaaaaaaatttaaaattacgtttgttattcctagtggatgactgttgatgaagtatacttttcccctgttaaacagtagttgtattcttctgtatttctaggcacaaggttggttgctaagaagcctataagaggaatttcttttccttcattcatagggaaaggttttgtattttttaaaacactaaaagcagcgtcactctacctaatgtctcactgttctgcaaaggtggcaatgcttaaactaaataatgaataaactgaatattttggaaactgctaaattctatgttaaatactgtgcagaataatggaaacattacagttcataataggtagtttggatatttttgtacttgatttgatgtgactttttttggtataatgtttaaatcatgtatgttatgatattgtttaaaattcagtttttgtatcttggggcaagactgcaaacttttttatatcttttggttattctaagccctttgccatcaatgatcatatcaattggcagtgactttgtatagagaatttaagtagaaaagttgcagatgtattgactgtaccacagacacaatatgtatgctttttacctagctggtagcataaataaaactgaatctcaacatacaaagttgaattctaggtttgatttttaagattttttttttcttttgcacttttgagtccaatctcagtgatgaggtaccttctactaaatgacaggcaacagccagttctattgggcagctttgtttttttccctcacactctaccgggacttccccatggacattgtgtatcatgtgtagagttggttttttttttttttaatttttattttactatagcagaaatagacctgattatctacaagatgataaatagattgtctacaggataaatagtatgaaataaaatcaaggattatctttcagatgtgtttacttttgcctggagaacttttagctatagaaacacttgtgtgatgatagtcctccttatatcacctggaatgaacacagcttctactgccttgctcagaaggtcttttaaatagaccatcctagaaaccactgagtttgcttatttctgtgatttaaacatagatcttgatccaagctacatgacttttgtctttaaataacttatctaccacctcatttgtactcttgattacttacaaattctttcagtaaacacctaattttcttctgtaaaagtttggtgatttaagttttattggcagttttataaaaagacatcttctctagaaattgctaactttaggtccattttactgtgaatgaggaataggagtgagttttagaataacagatttttaaaaatccagatgatttgattaaaaccttaatcatacattgacataattcattgcttcttttttttgagatatggagtcttgctgtgttgcccaggcaggagtgcagtggtatgatctcagctcactgcaacctctgcctcccgggttcaactgattctcctgcctcagcctccctggtagctaggattacaggtgcccgccaccatgcctggctaacttttgtagttttagtagagacggggttttgcctgttggccaggctggtcttgaactcctgacctcaagtgatccatccaccttggcctcccaaagtgctgggattacgggcgtgagccactgtccctggcctcattgttcccttttctactttaaggaaagttttcatgtttaatcatctggggaaagtatgtgaaaaatatttgttaagaagtatctctttggagccaagccacctgtcttggtttctttctactaagagccataaagtatagaaatacttctagttgttaagtgcttatatttgtacctagatttagtcacacgcttttgagaaaacatctagtatgttatgatcagctattcctgagagcttggttgttaatctatatttctatttcttagtggtagtcatctttgatgaataagactaaagattctcacaggtttaaaattttatgtctactttaagggtaaaattatgaggttatggttctgggtgggttttctctagctaattcatatctcaaagagtctcaaaatgttgaatttcagtgcaagctgaatgagagatgagccatgtacacccaccgtaagacctcattccatgtttgtccagtgcctttcagtgcattatcaaagggaatccttcatggtgttgcctttattttccggggagtagatcgtgggatatagtctatctcatttttaatagtttaccgcccctggtatacaaagataatgacaataaatcactgccatataaccttgctttttccagaaacatggctgttttgtattgctgtaaccactaaataggttgcctataccattcctcctgtgaacagtgcagatttacaggttgcatggtctggcttaaggagagccatacttgagacatgtgagtaaactgaactcatattagctgtgctgcatttcagacttaaaatccatttttgtggggcagggtgtggtgtgtaaaggggggtgtttgtaatacaagttgaaggcaaaataaaatgtcctgtctcccagatgatatacatcttattatttttaaagtttattgctaattgtaggaaggtgagttgcaggtatctttgactatggtcatctggggaaggaaaattttacattttactattaatgctccttaagtgtctatggaggttaaagaataaaatggtaaatgtttctgtgcctggtttgatggtaactggttaatagttactcaccattttatgcagagtcacattagttcacaccctttctgagagccttttgggagaagcagttttattctctgagtggaacagagttctttttgttgataatttctagtttgctcccttcgttattgccaactttactggcattttatttaatgatagcagattgggaaaatggcaaatttaggttacggaggtaaatgagtatatgaaagcaattacctctaaagccagttaacaattattttgtaggtggggtacactcagcttaaagtaatgcatttttttttcccgtaaaggcagaatccatcttgttgcagatagctatctaaataatctcatatcctcttttgcaaagactacagagaataggctatgacaatcttgttcaagcctttccatttttttccctgataactaagtaatttctttgaacataccaagaagtatgtaaaaagtccatggccttattcatccacaaagtggcatcctaggcccagccttatccctagcagttgtcccagtgctgctaggttgcttatcttgtttatctggaatcactgtggagtgaaattttccacatcatccagaattgccttatttaagaagtaaaacgttttaatttttagcctttttttggtggagttatttaatatgtatatcagaggatatactagatggtaacatttctttctgtgcttggctatctttgtggacttcaggggcttctaaaacagacaggactgtgttgcctttactaaatggtctgagacagctatggttttgaatttttagttttttttttttaacccacttcccctcctggtctcttccctctctgataattaccattcatatgtgagtgttagtgtgcctccttttagcattttcttcttctctttctgattcttcatttctgactgcctaggcaaggaaaccagataaccaaacttactagaacgttctttaaaacacaagtacaaactctgggacaggacccaagacactttcctgtgaagtgctgaaaaagacctcattgtattggcatttgatatcagtttgatgtagcttagagtgcttcctgattcttgctgagtttcaggtagttgagatagagagaagtgagtcatattcatattttcccccttagaataatattttgaaaggtttcattgcttccacttgaatgctgctcttacaaaaactggggttacaagggttactaaattagcatcagtagccagaggcaataccgttgtctggaggacaccagcaaacaacacacaacaaagcaaaacaaaccttgggaaactaaggccatttgttttgttttggtgtcccctttgaagccctgccttctggccttactcctgtacagatatttttgacctataggtgcctttatgagaattgagggtctgacatcctgccccaaggagtagctaaagtaattgctagtgttttcagggattttaacatcagactggaatgaatgaatgaaactttttgtcctttttttttctgtttttttttttctaatgtagtaaggactaaggaaaacctttggtgaagacaatcatttctctctgttgatgtggatacttttcacaccgtttatttaaatgctttctcaataggtccagagccagtgttcttgttcaacctgaaagtaatggctctgggttgggccagacagttgcactctctagtttgccctctgccacaaatttgatgtgtgacctttgggcaagtcatttatcttctctgggccttagttgcctcatctgtaaaatgagggagttggagtagattaattattccagctctgaaattctaagtgaccttggctaccttgcagcagttttggatttcttccttatctttgttctgctgtttgagggggctttttacttatttccatgttattcaaaggagactaggcttgatattttattactgttcttttatggacaaaaggttacatagtatgcccttaagacttaattttaaccaaaggcctagcaccaccttaggggctgcaataaacacttaacgcgcgtgcgcacgcgcgcgcgcacacacacacacacacacacacacacacacaggtcagagtttaaggctttcgagtcatgacattctagcttttgaattgcgtgcacacacacacgcacgcacacactctggtcagagtttattaaggctttcgagtcatgacattatagcttttgagttggtgtgtgtgacaccaccctcctaagtggtgtgtgcttgtaattttttttttcagtgaaaatggattgaaaacctgttgttaatgcttagtgatattatgctcaaaacaaggaaattcccttgaaccgtgtcaattaaactggtttatatgactcaagaaaacaataccagtagatgattattaactttattcttggctctttttaggtccattttgattaagtgacttttggctggatcattcagagctctcttctagcctacccttggatgagtacaattaatgaaattcatattttcaaggacctgggagccttccttggggctgggttgagggtggggggttggggagtcctggtagaggccagctttgtggtagctggagaggaagggatgaaaccagctgctgttgcaaaggctgcttgtcattgatagaaggactcacgggcttggattgattaagactaaacatggagttggcaaactttcttcaagtattgagttctgttcaatgcattggacatgtgatttaagggaaaagtgtgaatgcttatagatgatgaaaacctggtgggctgcagagcccagtttagaagaagtgagttgggggttggggacagatttggtggtggtatttcccaactgtttcctcccctaaattcagaggaatgcagctatgccagaagccagagaagagccactcgtagcttctgctttggggacaactggtcagttgaaagtcccaggagttcctttgtggctttctgtatacttttgcctggttaaagtctgtggctaaaaaatagtcgaacctttcttgagaactctgtaacaaagtatgtttttgattaaaagagaaagccaactaaaaaaaaaaaaaaaaaaaa

SEQ ID NO: 155308 - DNA, 531 bp, Artificial Sequence
  derived and/or modified sequence
atgggctgctgtggctgttctggaggctgtggctctggctgtgggggctgtggctccggcagtgggggctgtggctctggctgtgggggctgtggctccagctgctgtgtgcccatttgctgctgcaagcctgtgtgctgctgtgtgccagcctgttcctgctccagctgtggctcctgtgggggctccaaagggggctgtggctcttgtgggagctccaagggtgggtgtggttcttgtggctgctcccagtccaactgctgtaagccctgctgctcctcctcaggctgtgggtcattctgctgccagtccagctgctccaaaccctgctgctgccaatccagctgctgccagtccagctgctgcaagccctgctgctgccaatccagctgctgccagtctagctgcttcaagccctgctgctgccagtccagctgctgtgtccccgtgtgctgccagtccagctgctgcaagccctgctgctcccagtccagctgctgtgtccctatttgctgtcagtacaagatctga

SEQ ID NO: 155309 - DNA, 1659 bp, Artificial Sequence
  derived and/or modified sequence
atggacaatatgagcataacgaatactccaacatctaacgacgcatgcctctctatcgtgcattcccttatgtgccaccggcaaggcggagagtcagaaaccttcgcaaaacgggccatagagtcactggtaaaaaaactgaaagaaaaaaaggatgaactcgatagtttaatcacggccattaccactaacggtgcccacccaagcaagtgtgttacaattcagcgcaccctagacgggaggctgcaggtggccggcaggaaagggttccctcacgtgatctatgctcggctctggaggtggcccgaccttcacaagaatgagcttaagcacgtcaagtactgccagtacgcctttgacttgaagtgcgatagtgtttgtgtcaacccataccactacgagagggtggtctcccccggaattgatctgtccggactaacactgcagtctaacgcgccaagctccatgatggtgaaggacgaatacgtgcacgactttgaaggccagccaagtctctctaccgaagggcactctatccagaccattcagcacccgcctagtaatcgcgctagcacggagacctactcaacgcctgccctcctggctccatcggaaagtaatgctactagcaccgctaatttccctaatatccccgtggcttccacctcgcagcccgcctcaatcctgggaggctcgcattctgagggactgttgcagatcgcatctggtccccagccaggacagcaacagaatggattcacagggcagcccgccacctaccaccacaactcaaccacaacctggacaggcagccgaaccgccccctacacgcccaatttaccccatcaccagaacggccacctgcagcatcatccacccatgcccccccatcccgggcattattggccagtccataatgaactagcattccagccaccaatctcaaatcacccagcacctgagtactggtgcagcatcgcgtactttgagatggacgtgcaggttggggagacctttaaggtgccttctagctgtcccatagtgacagtcgacgggtatgtggatccttccggtggagataggttctgtctggggcaactttccaacgtacatcggaccgaagctatcgaaagagcgaggcttcacatagggaagggcgtgcagcttgagtgtaaaggtgagggagatgtctgggtgcgatgtctgtccgaccatgccgtatttgtccagtcatactacttggaccgcgaggcagggagggcccctggggacgcagtgcataagatttatcctagtgcctacattaaggtctttgatctcaggcagtgccaccgacagatgcagcagcaggcagcaactgctcaggccgctgccgctgcccaggctgcggctgtggccgggaacatccctggccccggaagcgtgggcggcatagccccagctatttctttgagtgccgccgccggtatcggagtggatgatcttagacgcctgtgtatacttagaatgtcttttgtgaaaggatggggacccgattatccacgccagtcgattaaagaaaccccgtgctggatagagatccatctgcatagagctttgcagctcctggatgaggtcttgcacaccatgccaattgctgatccccagccattggattag

SEQ ID NO: 155310 - DNA, 1659 bp, Artificial Sequence
  derived and/or modified sequence
atggacaacatgtctatcaccaatacccctactagcaacgacgcctgtctctccattgtacattccttgatgtgtcaccgccagggcggcgagtctgagaccttcgccaaacgggccattgagtctttggttaaaaaactcaaggaaaagaaggacgagctcgactccctcatcacggccataaccacaaacggggctcatccaagcaagtgcgttactatccaaaggacactggacgggcgtctgcaggtcgctgggaggaagggttttcctcacgtgatctatgctaggctgtggagatggccggatctccacaaaaacgagctcaaacacgttaagtactgccagtatgcctttgatctgaaatgcgattccgtgtgcgttaatccctatcactacgagagagtagtttctccaggcatcgatctgtctgggctaacactgcaatccaatgcaccgtccagtatgatggtgaaggatgaatatgtgcacgatttcgaaggccagccttcattgagcaccgaaggacactccattcagacgatacaacacccacccagcaatcgtgccagtacagaaacatattctacacctgctctattggctcccagcgagagtaacgccacctctacagccaattttccaaacatcccagtggcctctacctctcagcctgctagcatccttggcgggagccactctgagggactccttcagattgcaagtggcccacagcccggccaacagcagaatgggtttactggtcaacctgccacttatcaccacaattccactactacctggactggctcccggactgctccatacaccccaaaccttcctcatcaccagaacggacacctacagcaccacccaccaatgccaccacacccgggccactactggcctgtccataacgagcttgccttccaacctcccattagcaatcacccagcacccgaatattggtgctcaatagcatacttcgaaatggacgtgcaggttggcgagacgttcaaagtcccttcatcatgtcctatcgttaccgtggatggctatgttgatccatccggcggtgaccgcttttgccttgggcagctctctaatgtgcacagaaccgaagctattgagagagcccggctccacataggcaagggggtgcagttagaatgcaaaggggaaggagatgtatgggtcaggtgcctgtctgatcatgctgtgttcgtccagtcttactatcttgacagggaggccggtcgagctccaggcgatgccgtgcataagatctaccctagtgcctacatcaaagtcttcgatctgaggcagtgtcatcgacaaatgcagcagcaagccgccacagctcaggcagccgccgcagcgcaggccgccgccgtggcaggaaatatccccgggcccggttcggttgggggcatcgccccagctatctctctgagcgccgccgctggcattggggtagacgatctgaggaggctctgcatcttgaggatgtccttcgtgaaaggatggggcccagattacccaagacagtctattaaagaaaccccctgctggatagaaatccacctccatcgggctctgcagctgctcgacgaggtgttgcatacaatgccaatagccgacccccagcccttggactag

SEQ ID NO: 155311 - DNA, 534 bp, Artificial Sequence
  derived and/or modified sequence
atggacaatatgtccattacaaatacaccaacatctaatgacgcctgcctctcaattgtccattccttgatgtgtcacagacaggggggtgagagtgagaccttcgccaaacgggctattgagagcctcgttaaaaaactcaaagagaaaaaggatgaactcgattccctgattacagccatcacaacaaacggagcacacccctcgaagtgcgtaacgattcagagaacattagacggtcgcctgcaagtcgcgggtcggaaaggctttccccacgtcatttatgcccgcctgtggaggtggcctgatctacacaagaacgaactgaaacatgtgaaatattgtcagtacgcttttgaccttaagtgcgactcggtctgtgtcaacccctaccactacgagagggtggtcagcccgggcatagacctctcaggcctgacactgcagagtaatgagaacaactggtacttttctcaactgcttctggacttagacaagggtatgatccaggagcaggcaatccacggcccatag

SEQ ID NO: 155312 - DNA, 1311 bp, Artificial Sequence
  derived and/or modified sequence
atggataatatgtcaattacaaatactccaacgagcaacgacgcttgtctctcaatagtccactcactgatgtgccatcgacagggcggcgaaagtgagacctttgcaaagcgagccatagagtctctggtgaagaagttgaaggaaaagaaggacgaactggactccttaattacggccattactactaacggcgctcaccctagtaaatgtgtgacgatccagaggactctggatggacgcctccaggtggctggccgcaaagggttccctcacgtgatctacgctaggctgtggaggtggccagatctgcacaagaatgagcttaaacacgttaaatattgtcaatatgcctttgatctgaaatgcgacagcgtttgtgtgaacccttaccactacgagcgcgtggtgagtccaggtatcgatctcagcggattgacacttcaatcgaacgctcctagttctatgatggtgaaggacgagtatgtgcatgatttcgaagggcagccttctctgagcacggagggccactctatccagacaatccagcacccacctagtaaccgcgcatccacagaaacctactcaactcctgctcttctcgctccatcagagtcaaacgccacctctaccgcgaatttcccaaacatacctgtagcatccacatcccagcccgcgtcaatcctggggggttcccacagtgagggactgctgcagatcgccagtgggccacagccgggacaacagcaaaacgggtttactggacaacctgctacataccatcacaacagtactacaacatggactggcagtcgcaccgccccctacacccccaatttgcctcatcaccagaatggtcatttgcagcatcacccaccaatgcctcctcacccgggacactactggccagtgcacaacgagctcgcctttcaaccaccaatctcaaaccatcctgctccagagtactggtgttccattgcgtattttgaaatggacgtccaagttggtgagacctttaaagtgccttcatcatgcccgatagttactgtagatggctatgttgatcctagcggaggggaccggttctgcctgggacaactcagcaacgttcacaggacagaagccatcgagagggcccgcctgcacatcggtaagggagtacagttagaatgcaagggagaaggtgacgtatgggtgaggtgcttatctgaccacgctgtgtttgtgcagagctattaccttgatcgagaggctgggcgtgcccccggcgacgctgtccacaaaatttaccccagtgcgtatatcaaatag

SEQ ID NO: 155313 - DNA, 1659 bp, Artificial Sequence
  derived and/or modified sequence
atggacaacatgagcatcaccaacacccccaccagcaatgatgcctgcctgagcatcgtgcacagcctgatgtgccaccggcagggcggggagagcgagacctttgccaagagggccatcgagagcctggtgaagaagctgaaggagaagaaggatgagctggacagcctcatcacagccatcaccaccaacggggcccaccccagcaaatgtgtgaccatccagaggaccctggatggccgcctgcaggtggccggcaggaagggcttcccccacgtgatctatgcccggctgtggcgctggccagacctgcacaagaatgagctgaagcacgtgaagtactgccagtatgcctttgacctgaagtgtgacagcgtgtgtgtgaacccctaccactatgagcgggtggtgtccccaggcatcgacctgagcggcctgaccctgcagagcaatgcccccagctccatgatggtgaaggatgaatatgtgcatgactttgagggccagcccagcctgagcacagagggccacagcatccagaccatccagcacccccccagcaacagagccagcacagagacctacagcaccccagccctgctggcccccagcgagagcaatgccaccagcacagccaacttccccaacatccctgtggccagcaccagccagcctgccagcatcctgggcggcagccacagcgagggcctgctgcagatcgccagcggcccccagcccggccagcagcagaatggcttcaccggccagcctgccacctaccaccacaacagcaccaccacctggacaggcagcaggacagccccctacacccccaacctgccccaccaccagaatggccacctgcagcaccacccccccatgccaccccaccctggccactactggcctgtgcacaatgagctggccttccagccccccatcagcaaccacccagcccctgagtactggtgcagcatcgcctactttgagatggatgtgcaggtgggggagaccttcaaggtgcccagcagctgccccatcgtgacagtggatggctacgtggaccccagcggcggggaccgcttctgcctgggccagctgagcaatgtgcacaggacagaggccatcgagcgggcccggctgcacatcggcaaaggagtgcagctggagtgcaagggggagggagatgtgtgggtgcgctgcctgagtgaccatgctgtgtttgtgcagagctactacctggaccgggaggccggccgggcccctggagatgctgtgcacaagatctaccccagcgcctacatcaaggtgtttgacctgcggcagtgccaccggcagatgcagcagcaggccgccacagcccaggccgctgctgctgcccaggccgctgctgtggccggcaacatccctggccctggctctgtgggcggcatcgccccagccatcagcctgtctgctgctgctggcatcggcgtggatgacctgcggcggctgtgcatcctgaggatgagctttgtgaagggctggggccctgactacccccggcagagcatcaaggagaccccctgctggattgagatccacctgcaccgggccctgcagctgctggatgaggtgctgcacaccatgcccatcgctgacccccagcccctggactag

SEQ ID NO: 155314 - DNA, 534 bp, Artificial Sequence
  derived and/or modified sequence
atggacaacatgagcatcaccaacacccccaccagcaatgatgcctgcctgagcatcgtgcacagcctgatgtgccaccggcagggcggggagagcgagacctttgccaagagggccatcgagagcctggtgaagaagctgaaggagaagaaggatgagctggacagcctcatcacagccatcaccaccaacggggcccaccccagcaaatgtgtgaccatccagaggaccctggatggccgcctgcaggtggccggcaggaagggcttcccccacgtgatctatgcccggctgtggcgctggccagacctgcacaagaatgagctgaagcacgtgaagtactgccagtatgcctttgacctgaagtgtgacagcgtgtgtgtgaacccctaccactatgagcgggtggtgtccccaggcatcgacctgagcggcctgaccctgcagagcaatgaaaacaactggtacttcagccagctgctgctggacctggacaagggcatgatccaggagcaggccatccacggcccctag

SEQ ID NO: 155315 - DNA, 1311 bp, Artificial Sequence
  derived and/or modified sequence
atggacaacatgagcatcaccaacacccccaccagcaatgatgcctgcctgagcatcgtgcacagcctgatgtgccaccggcagggcggggagagcgagacctttgccaagagggccatcgagagcctggtgaagaagctgaaggagaagaaggatgagctggacagcctcatcacagccatcaccaccaacggggcccaccccagcaaatgtgtgaccatccagaggaccctggatggccgcctgcaggtggccggcaggaagggcttcccccacgtgatctatgcccggctgtggcgctggccagacctgcacaagaatgagctgaagcacgtgaagtactgccagtatgcctttgacctgaagtgtgacagcgtgtgtgtgaacccctaccactatgagcgggtggtgtccccaggcatcgacctgagcggcctgaccctgcagagcaatgcccccagctccatgatggtgaaggatgaatatgtgcatgactttgagggccagcccagcctgagcacagagggccacagcatccagaccatccagcacccccccagcaacagagccagcacagagacctacagcaccccagccctgctggcccccagcgagagcaatgccaccagcacagccaacttccccaacatccctgtggccagcaccagccagcctgccagcatcctgggcggcagccacagcgagggcctgctgcagatcgccagcggcccccagcccggccagcagcagaatggcttcaccggccagcctgccacctaccaccacaacagcaccaccacctggacaggcagcaggacagccccctacacccccaacctgccccaccaccagaatggccacctgcagcaccacccccccatgccaccccaccctggccactactggcctgtgcacaatgagctggccttccagccccccatcagcaaccacccagcccctgagtactggtgcagcatcgcctactttgagatggatgtgcaggtgggggagaccttcaaggtgcccagcagctgccccatcgtgacagtggatggctacgtggaccccagcggcggggaccgcttctgcctgggccagctgagcaatgtgcacaggacagaggccatcgagcgggcccggctgcacatcggcaaaggagtgcagctggagtgcaagggggagggagatgtgtgggtgcgctgcctgagtgaccatgctgtgtttgtgcagagctactacctggaccgggaggccggccgggcccctggagatgctgtgcacaagatctaccccagcgcctacatcaagtag

SEQ ID NO: 155316 - DNA, 1659 bp, Artificial Sequence
  derived and/or modified sequence
atggacaacatgagcatcaccaacacccccaccagcaacgacgcctgtctgtcgatcgtacattcattaatgtgtcatcgacaagggggagaaagtgagaccttcgcaaagagggcaatagagagccttgtgaaaaagctaaaggaaaagaaggacgagctcgattccctgattaccgcaatcacaacaaacggagcgcatccatccaagtgtgtaacaatccagagaaccctggacggacgcctacaggtggctggccgcaaaggattcccccatgtcatttacgcccgactatggcgttggcccgatcttcacaaaaacgaactgaagcatgtcaagtactgtcagtacgcatttgatctaaagtgtgacagtgtgtgcgtgaatccttaccactacgagcgcgtggtatccccaggcattgatttgtctggactcacccttcagagcaacgcccccagctctatgatggtaaaggatgagtatgttcacgacttcgaaggacagccctccctgtcaactgaaggccattcaattcaaaccattcagcatcccccaagtaatcgtgccagcacagagacttacagtacaccggcactcctggcaccttctgagtcaaacgccacttctacggctaatttcccaaacattccagttgcatcaacatcgcagcctgcatcaatactgggcggatcccattcggaagggctgctgcagatagcaagtggccctcagccggggcagcagcagaatggtttcaccggacagccagccacttaccatcacaatagcaccacgacttggacaggctcccggaccgctccctacacccccaaccttcctcatcaccagaacggacacctacagcaccaccccccgatgcccccacaccctggacattactggcccgtccataatgaactggctttccagcccccaatatccaatcatcctgctccggaatactggtgtagtatagcatattttgagatggatgtgcaagtgggcgagacattcaaggtcccgagctcctgtcccatagtgacggtggacggttatgtggatcctagcggcggcgatcggttttgtctggggcaattgtccaacgtgcaccgcacagaggcaattgagcgggcccggttacacatcggcaaaggggtgcagctggagtgcaagggggaaggggatgtctgggttcgctgcttgtccgaccacgccgtcttcgtgcagagctattatttggacagggaggccgggcgcgcaccgggtgatgctgtgcacaaaatctacccgagtgcctacattaaagtcttcgatctgagacaatgccacaggcagatgcaacagcaagcggctaccgcgcaagctgctgctgctgctcaggcagctgccgtggccggcaatatccccgggccaggatctgtgggagggattgcacctgcgatcagcctcagcgctgccgccggcataggcgtagacgacctcaggcggctgtgcattctgcgcatgagctttgtgaaaggatggggccccgactatcccagacaatcaatcaaggagaccccctgctggatcgagatccacttacaccgcgccctccagctgcttgacgaggtgttacataccatgcctattgcagatcctcagcctctggactag

SEQ ID NO: 155317 - DNA, 1659 bp, Artificial Sequence
  derived and/or modified sequence
atggacaacatgagcatcaccaacacccccaccagcaacgacgcctgtctctcaattgttcattccttgatgtgccacaggcaaggaggcgagtcagagacgtttgctaagcgagctatagaaagcctcgtgaagaaacttaaggaaaagaaggacgagctcgatagcctgatcaccgccattacaactaatggcgcccaccctagcaaatgcgtgacaattcagcgcaccctggatgggaggctgcaagtggcaggccgcaagggctttccgcacgtgatctacgccagactgtggagatggccagacttgcacaagaatgaactgaagcatgttaaatactgccagtacgcttttgaccttaaatgtgactcggtctgtgtcaacccttatcactatgagagggtcgtcagccccggaattgatctaagcggactcaccttgcagtccaacgctccctcgagtatgatggtgaaggacgagtacgtgcacgactttgaagggcagccatccttatcaaccgagggacattcaatacagacaatacagcatccgccgtctaacagagcctccaccgaaacatactccactcccgcgcttttagcaccttcagagtccaatgccacctccaccgctaactttcctaatatccctgtagcatctacgagccagcccgcaagcatcctgggcgggtcacatagtgaggggttgcttcagattgcgtcagggccacaacccggccaacaacagaatggctttacaggacagccagccacatatcatcataattctactaccacatggaccggaagcagaaccgctccatacactcccaatctgccccaccaccagaatggccacttgcagcaccaccccccaatgccaccccatccagggcactactggcccgtgcataacgagcttgcttttcagccccccatctccaatcacccagctcccgaatactggtgctccatagcctatttcgagatggacgtacaggtgggagagaccttcaaagtcccttcctcttgcccgatcgtaactgtcgacggctacgttgaccccagtgggggagaccggttctgcctagggcagctgtccaatgtgcaccgaacggaggccattgaacgcgcgcggctgcacattggcaagggcgtgcaactggaatgcaaaggcgagggcgacgtctgggttcgctgcttgtctgaccatgccgtgttcgtgcagtcttattaccttgacagggaagctgggcgcgcccccggagatgctgtacacaagatctatccctctgcatatatcaaagtcttcgaccttagacagtgccatcgccaaatgcagcaacaggcagcgacagctcaagcagctgcagccgcccaggccgccgctgtggccgggaatatccctggacccggatcagtgggagggatagctccagcgatctccctgtctgccgctgcaggaattggggtggacgacctgcggcggctgtgtatcctgaggatgagctttgtgaagggctggggccctgattacccccgccaaagtatcaaggagacaccttgttggattgaaatccaccttcatagggccctgcagctgttggatgaagtgcttcacactatgcccatcgccgatcctcagccgctggactag

SEQ ID NO: 155318 - DNA, 534 bp, Artificial Sequence
  derived and/or modified sequence
atggacaacatgagcatcaccaacacccccaccagcaacgacgcctgcctatctattgtccattccttaatgtgccatcggcaaggaggagagagcgagacctttgcaaaacgggccattgaaagtttagttaaaaaattaaaagagaaaaaggatgagctggattctctcattaccgcaattaccacgaatggcgcacacccaagcaaatgtgtgactatacagagaaccctcgatggcaggctacaggttgcagggcgcaaagggttcccccacgtgatctacgcaaggctatggagatggccagatctccacaagaacgaactgaaacacgtcaagtactgtcagtatgcctttgatcttaaatgcgactccgtgtgtgtcaatccataccactatgagagagtggtgtctccgggaattgacctgtcaggcctcactctgcagtccaacgagaataactggtacttttctcaattgcttttggacctggacaaggggatgatccaagagcaagccatccatggaccttag

SEQ ID NO: 155319 - DNA, 1311 bp, Artificial Sequence
  derived and/or modified sequence
atggacaacatgagcatcaccaacacccccaccagcaacgacgcctgcctgagcatcgtccacagtctgatgtgccacaggcaggggggagagagcgagacttttgctaagcgtgctatcgaatcactggtgaagaagttgaaagagaagaaggatgagctggattctttgattaccgccataacaacgaacggggcacatccaagtaaatgtgttacaatccagagaaccctggacggtcgtctgcaggtggcaggacgcaagggctttccacacgtgatttatgctagactgtggcgctggccggacctacacaaaaatgagctgaagcatgtcaagtactgccagtatgctttcgatttgaagtgtgacagcgtgtgcgttaatccgtaccattacgagcgagtggtcagtccaggaattgatctgtctggcctaacccttcagtcaaatgcaccctctagcatgatggtcaaggacgagtacgtacacgacttcgaaggtcaaccctccctctctaccgaggggcattctatacagaccattcagcatcccccatccaatcgtgcatccacagagacttacagtacaccagcactgctcgccccatcggagagtaacgcaacttccaccgcgaactttccgaatattccagttgcaagcacgtctcaacccgcatccattctaggcggaagtcattcagagggtctcctgcagattgcctctggaccacagccagggcaacagcagaacggcttcacagggcagcccgctacctaccaccataattccacaactacatggactggtagtaggaccgccccatataccccaaatcttccccaccaccaaaatggacaccttcaacatcacccaccaatgcctccgcatccaggacactactggcccgtccacaacgaactcgctttccaaccaccaatctcaaatcatcccgcccctgagtattggtgttctatcgcttatttcgagatggacgtccaagtgggagagaccttcaaagtgcccagctcatgtccaatcgtgacagtagatggatatgtggatccatcaggcggggacaggttttgccttggccagctaagcaatgtccataggacggaagcgatagagcgcgcacgactccatatcgggaaaggcgtgcagctagagtgcaaaggggagggcgatgtgtgggtgcggtgcctctctgatcatgccgtgttcgtgcagagttattatctggatagagaagccggccgcgccccaggggatgctgttcacaagatttatccaagtgcctatattaaatag

SEQ ID NO: 155320 - DNA, 1659 bp, Artificial Sequence
  derived and/or modified sequence
atggataacatgtctataaccaacactcccacatctaatgacgcatgcctttcgatcgtgcactctctgatgtgccaccgtcagggcggtgaaagcgaaacattcgcaaaacgggctatcgagtccctcgtcaaaaagctcaaggaaaagaaagatgaactggatagcctgattacggccataaccaccaacggagcacatcctagtaagtgcgtaactatccagcgtacgcttgatggccgactgcaggtggctggacggaaaggattcccgcacgtgatctacgccagactctggcgttggcccgatcttcataagaacgagctcaagcacgtgaagtactgtcagtatgcctttgaccttaagtgtgacagcgtgtgtgtgaacccttatcactacgagagggtggtcagccccggtatagacctctccggcctcactctgcaatctaacgctccgtcatccatgatggttaaagatgagtacgtccacgacttcgagggccagccctctctcagcaccgaaggacattctatacaaaccatccagcaccccccttcgaatcgcgcatcgacagagacctactcaacacctgccctgctcgcaccctccgagtccaatgcgaccagcaccgccaattttccaaatatccctgtcgctagcacctctcagccagcctccattttgggcggttcgcactcagaaggattgttgcagattgccagcggaccgcagcctggccagcagcaaaatgggttcacaggacagcctgcgacctaccatcacaattctacaacaacttggaccggttcaaggaccgcaccatatacccctaacctgccacaccaccagaatgggcacctccagcaccaccctccaatgcctccccacccagggcactattggccagtccacaacgaattggcgttccagcctcccatctcaaatcaccccgctcctgaatattggtgcagcatagcttactttgagatggacgttcaggtcggggaaacgtttaaggtaccatcaagctgtccaatagtgacagtggacggatacgtagacccttccggtggcgatcggttttgcctcgggcagctgtcaaacgttcacagaaccgaagccattgagagggctagactgcatattgggaaaggtgtgcagctggagtgtaagggcgaaggcgatgtttgggtacggtgtctgtcggatcatgctgtgtttgtgcagagttactatcttgatagagaagctgggagggctcctggggacgccgtgcacaagatttatcccagtgcttatatcaaagtctttgatctacggcagtgccatagacagatgcagcagcaagctgctacagctcaggcggcagcagccgcacaggccgcagcagtggccggaaacatacctgggccagggtcagtgggcggaattgctcctgctatatctctttccgcagcagccggaattggcgttgatgacctcagaagactctgtattctgagaatgtcttttgtcaaaggatggggacccgactatccccgacaaagcatcaaggaaaccccgtgctggatcgaaatccatctccaccgcgcattacaacttctggacgaagtgttgcacaccatgcccattgccgaccctcagccgttagactag

SEQ ID NO: 155321 - DNA, 1659 bp, Artificial Sequence
  derived and/or modified sequence
atggataatatgtccatcaccaacacacctacctctaacgatgcatgtctatcaatagttcactcactgatgtgccaccgacaggggggagagagcgagacatttgcgaagagggcaatagaaagcctcgtgaaaaagctcaaagaaaagaaggacgaactggacagtctgatcaccgcaatcacaacaaacggggcacatccttccaaatgcgtgaccattcagaggacccttgatggcagactgcaagtagccggacgcaaggggttcccccacgtaatctatgcccgactatggcggtggccagacttacataagaatgaactgaaacatgtgaagtactgccagtatgcgttcgatctgaaatgcgattcagtttgcgttaacccctaccattacgaaagagtggtttccccaggtattgatctcagcggcctgaccttacaaagcaacgcaccaagcagcatgatggtcaaagacgaatatgtccatgacttcgaaggtcaaccttccttgtccaccgagggtcattctatacagaccatccagcaccccccttctaaccgcgctagtaccgaaacatattccactcctgccctgttggcacctagcgagtcaaacgctaccagcacagcaaatttccccaatatcccagtcgcctcgaccagccaaccagcatccatcttggggggaagccatagcgaagggttgttacagattgcatcaggcccacagccagggcaacagcagaatggtttcacgggacagcccgcaacttatcaccacaacagcacaacaacctggactggctcaagaactgctccctatacacccaacctccctcatcaccaaaatgggcatctgcagcatcatccaccaatgcctccacatcctgggcactattggcccgttcataacgagctcgcattccagcccccaatttccaaccatcccgcacctgagtactggtgttccatagcctactttgagatggacgttcaagtgggcgaaaccttcaaggtgccatcgtcatgtccaatcgtgacagtcgacgggtacgtcgacccttccgggggagatcgcttctgcctcggccagctgagcaatgttcatagaactgaagccatagaacgggcacggttgcacattgggaaaggggtacagctcgaatgcaaaggagaaggtgatgtttgggtacgttgcttgtctgaccacgccgtgtttgtacagtcatattaccttgaccgcgaagcagggcgtgctccaggcgacgccgtccacaagatttacccaagtgcctatatcaaggtcttcgatctgcgacaatgccaccgacagatgcagcagcaagctgctactgctcaggccgctgccgctgcacaggctgcagccgtggccggaaatattccaggccctggttcagtgggtggaatagcaccggctatcagcttaagtgcggcagccggtattggtgtcgacgatctgagaagactctgcatacttcggatgtcatttgttaaaggctgggggcctgactaccctagacagagcataaaggagacaccatgctggattgagatccacttgcacagggctctgcagctattagacgaagttcttcatacaatgccaatcgctgatccccagcctttagactag

SEQ ID NO: 155322 - DNA, 534 bp, Artificial Sequence
  derived and/or modified sequence
atggataacatgtcaataaccaatactcccacttcgaatgacgcctgtctgtctatcgtgcactcgctgatgtgtcaccgacagggtggcgagagtgaaacctttgctaagagggcaatcgaatctctggtcaagaagctcaaggagaagaaggacgagctggactcgttgataacagcaataacaacaaatggagcccacccatccaagtgcgtgactatccagaggacgcttgatgggagactgcaggtggccggacgcaagggattccctcatgtgatctacgcgcgtctgtggcggtggcccgacctgcacaagaatgaactaaagcacgtaaagtactgtcagtacgcctttgacctcaaatgcgacagcgtgtgtgtgaatccctatcattacgagcgggtagtgagcccgggtatagaccttagtggactgaccctgcaatctaacgaaaataattggtacttctctcaactgctactggaccttgacaagggtatgatacaagagcaggctatccatggcccatag

SEQ ID NO: 155323 - DNA, 1311 bp, Artificial Sequence
  derived and/or modified sequence
atggataatatgagcatcaccaacacccccacgagtaatgacgcatgtctgagcatagtccattccttaatgtgtcaccggcaggggggagagtctgaaacctttgcgaaacgggcaatagaatccctggttaagaaactgaaggagaaaaaagacgagctggacagtttaattacagccatcacaaccaatggggcacacccatctaaatgtgtcacgattcaacgcactctggatggtcggttacaggtggcaggcagaaagggttttcctcacgtgatctatgcccgactgtggcggtggcccgaccttcataaaaacgaattgaaacacgtcaagtactgccagtatgcctttgacctgaaatgcgattccgtgtgcgtaaacccctaccattatgagagggtggtttctcctggcatcgacctatctgggctgaccctgcagtccaatgcccctagtagtatgatggtcaaggatgaatatgtccatgattttgagggccagcctagtttgtctacggagggccacagcattcaaactatccagcacccgccttctaatcgtgcgagcaccgaaacttattcaacaccagcgctgcttgccccttcagagtcaaatgccactagtacagccaactttccgaacattcccgtcgcctcgacatcacagcccgcatctatcctaggtggctcccattcagaagggctgctgcagattgctagcgggccacagcctggccaacagcagaatggcttcacggggcaacctgcaacttatcaccataattccaccactacgtggactgggagcaggactgctccctacacacctaatcttcctcaccatcagaatggtcatcttcaacaccatccgcctatgccaccacaccccggacactattggccggtgcataatgaacttgcttttcagccgccaattagcaatcatccggcacccgagtactggtgctccatcgcatacttcgagatggacgtgcaggttggggagacctttaaggtgccttcttcctgtcctattgtcacagtagacggttacgtggatccgtcagggggtgacagattttgcctcgggcagctgtctaacgttcaccgcaccgaagctatcgagcgagccagacttcatatcggcaagggcgtgcagctagaatgcaaaggtgaaggtgatgtatgggttagatgcctctccgatcatgctgtctttgtgcagtcttattatttggatcgcgaagccggacgcgctccaggagacgccgtgcacaaaatttaccctagcgcttatattaagtag

SEQ ID NO: 155324 - DNA, 8769 bp, Artificial Sequence
  derived and/or modified sequence
atgctcagtggcttctcgacaagttggcagcaacaacacggccctggtcgtcgtcgccgctgcggtaacggagcggtttgggtggcggagcctgcgttcgcgccttcccgctctcctcgggaggcccttcctgctctcccctaggctccgcggccgcccagggggtgggagcgggtgaggggagccaggcgcccagcgagagaggccccccgccgcagggcggcccgggagctcgaggcggtccggcccgcgcgggcagcggcgcggcgctgaggaggggcggcctggccgggacgcctcggggcgggggccgaggagctctccgggccgccggggaaagctacgggcccggtgcgtccgcggaccagcagcgcgggagagcggactcccctcgccaccgcccgagcccaggttatcctgaatacatgtctaacaattttccttgcaacgttagctgttgtttttcactgtttccaaaggatcaaaattgcttcagaaattggagacatatttgatttaaaaggaaaaacttgaacaaatggacaatatgtctattacgaatacaccaacaagtaatgatgcctgtctgagcattgtgcatagtttgatgtgccatagacaaggtggagagagtgaaacatttgcaaaaagagcaattgaaagtttggtaaagaagctgaaggagaaaaaagatgaattggattctttaataacagctataactacaaatggagctcatcctagtaaatgtgttaccatacagagaacattggatgggaggcttcaggtggctggtcggaaaggatttcctcatgtgatctatgcccgtctctggaggtggcctgatcttcacaaaaatgaactaaaacatgttaaatattgtcagtatgcgtttgacttaaaatgtgatagtgtctgtgtgaatccatatcactacgaacgagttgtatcacctggaattgatctctcaggattaacactgcagagtaatgctccatcaagtatgatggtgaaggatgaatatgtgcatgactttgagggacagccatcgttgtccactgaaggacattcaattcaaaccatccagcatccaccaagtaatcgtgcatcgacagagacatacagcaccccagctctgttagccccatctgagtctaatgctaccagcactgccaactttcccaacattcctgtggcttccacaagtcagcctgccagtatactggggggcagccatagtgaaggactgttgcagatagcatcagggcctcagccaggacagcagcagaatggatttactggtcagccagctacttaccatcataacagcactaccacctggactggaagtaggactgcaccatacacacctaatttgcctcaccaccaaaacggccatcttcagcaccacccgcctatgccgccccatcccggacattactggcctgttcacaatgagcttgcattccagcctcccatttccaatcatcctgctcctgagtattggtgttccattgcttactttgaaatggatgttcaggtaggagagacatttaaggttccttcaagctgccctattgttactgttgatggatacgtggacccttctggaggagatcgcttttgtttgggtcaactctccaatgtccacaggacagaagccattgagagagcaaggttgcacataggcaaaggtgtgcagttggaatgtaaaggtgaaggtgatgtttgggtcaggtgccttagtgaccacgcggtctttgtacagagttactacttagacagagaagctgggcgtgcacctggagatgctgttcataagatctacccaagtgcatatataaaggtctttgatttgcgtcagtgtcatcgacagatgcagcagcaggcggctactgcacaagctgcagcagctgcccaggcagcagccgtggcaggaaacatccctggcccaggatcagtaggtggaatagctccagctatcagtctgtcagctgctgctggaattggtgttgatgaccttcgtcgcttatgcatactcaggatgagttttgtgaaaggctggggaccggattacccaagacagagcatcaaagaaacaccttgctggattgaaattcacttacaccgggccctccagctcctagacgaagtacttcataccatgccgattgcagacccacaacctttagactgaggtcttttaccgttggggcccttaaccttatcaggatggtggactacaaaatacaatcctgtttataatctgaagatatatttcacttttgttctgctttatcttttcataaagggttgaaaatgtgtttgctgccttgctcctagcagacagaaactggattaaaacaattttttttttcctcttcagaacttgtcaggcatggctcagagcttgaagattaggagaaacacattcttattaattcttcacctgttatgtatgaaggaatcattccagtgctagaaaatttagccctttaaaacgtcttagagccttttatctgcagaacatcgatatgtatatcattctacagaataatccagtattgctgattttaaaggcagagaagttctcaaagttaattcacctatgttattttgtgtacaagttgttattgttgaacatacttcaaaaataatgtgccatgtgggtgagttaattttaccaagagtaactttactctgtgtttaaaaagtaagttaataatgtattgtaatctttcatccaaaatattttttgcaagttatattagtgaagatggtttcaattcagattgtcttgcaacttcagttttatttttgccaaggcaaaaaactcttaatctgtgtgtatattgagaatcccttaaaattaccagacaaaaaaatttaaaattacgtttgttattcctagtggatgactgttgatgaagtatacttttcccctgttaaacagtagttgtattcttctgtatttctaggcacaaggttggttgctaagaagcctataagaggaatttcttttccttcattcatagggaaaggttttgtattttttaaaacactaaaagcagcgtcactctacctaatgtctcactgttctgcaaaggtggcaatgcttaaactaaataatgaataaactgaatattttggaaactgctaaattctatgttaaatactgtgcagaataatggaaacattacagttcataataggtagtttggatatttttgtacttgatttgatgtgactttttttggtataatgtttaaatcatgtatgttatgatattgtttaaaattcagtttttgtatcttggggcaagactgcaaacttttttatatcttttggttattctaagccctttgccatcaatgatcatatcaattggcagtgactttgtatagagaatttaagtagaaaagttgcagatgtattgactgtaccacagacacaatatgtatgctttttacctagctggtagcataaataaaactgaatctcaacatacaaagttgaattctaggtttgatttttaagattttttttttcttttgcacttttgagtccaatctcagtgatgaggtaccttctactaaatgacaggcaacagccagttctattgggcagctttgtttttttccctcacactctaccgggacttccccatggacattgtgtatcatgtgtagagttggttttttttttttttaatttttattttactatagcagaaatagacctgattatctacaagatgataaatagattgtctacaggataaatagtatgaaataaaatcaaggattatctttcagatgtgtttacttttgcctggagaacttttagctatagaaacacttgtgtgatgatagtcctccttatatcacctggaatgaacacagcttctactgccttgctcagaaggtcttttaaatagaccatcctagaaaccactgagtttgcttatttctgtgatttaaacatagatcttgatccaagctacatgacttttgtctttaaataacttatctaccacctcatttgtactcttgattacttacaaattctttcagtaaacacctaattttcttctgtaaaagtttggtgatttaagttttattggcagttttataaaaagacatcttctctagaaattgctaactttaggtccattttactgtgaatgaggaataggagtgagttttagaataacagatttttaaaaatccagatgatttgattaaaaccttaatcatacattgacataattcattgcttcttttttttgagatatggagtcttgctgtgttgcccaggcaggagtgcagtggtatgatctcagctcactgcaacctctgcctcccgggttcaactgattctcctgcctcagcctccctggtagctaggattacaggtgcccgccaccatgcctggctaacttttgtagttttagtagagacggggttttgcctgttggccaggctggtcttgaactcctgacctcaagtgatccatccaccttggcctcccaaagtgctgggattacgggcgtgagccactgtccctggcctcattgttcccttttctactttaaggaaagttttcatgtttaatcatctggggaaagtatgtgaaaaatatttgttaagaagtatctctttggagccaagccacctgtcttggtttctttctactaagagccataaagtatagaaatacttctagttgttaagtgcttatatttgtacctagatttagtcacacgcttttgagaaaacatctagtatgttatgatcagctattcctgagagcttggttgttaatctatatttctatttcttagtggtagtcatctttgatgaataagactaaagattctcacaggtttaaaattttatgtctactttaagggtaaaattatgaggttatggttctgggtgggttttctctagctaattcatatctcaaagagtctcaaaatgttgaatttcagtgcaagctgaatgagagatgagccatgtacacccaccgtaagacctcattccatgtttgtccagtgcctttcagtgcattatcaaagggaatccttcatggtgttgcctttattttccggggagtagatcgtgggatatagtctatctcatttttaatagtttaccgcccctggtatacaaagataatgacaataaatcactgccatataaccttgctttttccagaaacatggctgttttgtattgctgtaaccactaaataggttgcctataccattcctcctgtgaacagtgcagatttacaggttgcatggtctggcttaaggagagccatacttgagacatgtgagtaaactgaactcatattagctgtgctgcatttcagacttaaaatccatttttgtggggcagggtgtggtgtgtaaaggggggtgtttgtaatacaagttgaaggcaaaataaaatgtcctgtctcccagatgatatacatcttattatttttaaagtttattgctaattgtaggaaggtgagttgcaggtatctttgactatggtcatctggggaaggaaaattttacattttactattaatgctccttaagtgtctatggaggttaaagaataaaatggtaaatgtttctgtgcctggtttgatggtaactggttaatagttactcaccattttatgcagagtcacattagttcacaccctttctgagagccttttgggagaagcagttttattctctgagtggaacagagttctttttgttgataatttctagtttgctcccttcgttattgccaactttactggcattttatttaatgatagcagattgggaaaatggcaaatttaggttacggaggtaaatgagtatatgaaagcaattacctctaaagccagttaacaattattttgtaggtggggtacactcagcttaaagtaatgcatttttttttcccgtaaaggcagaatccatcttgttgcagatagctatctaaataatctcatatcctcttttgcaaagactacagagaataggctatgacaatcttgttcaagcctttccatttttttccctgataactaagtaatttctttgaacataccaagaagtatgtaaaaagtccatggccttattcatccacaaagtggcatcctaggcccagccttatccctagcagttgtcccagtgctgctaggttgcttatcttgtttatctggaatcactgtggagtgaaattttccacatcatccagaattgccttatttaagaagtaaaacgttttaatttttagcctttttttggtggagttatttaatatgtatatcagaggatatactagatggtaacatttctttctgtgcttggctatctttgtggacttcaggggcttctaaaacagacaggactgtgttgcctttactaaatggtctgagacagctatggttttgaatttttagttttttttttttaacccacttcccctcctggtctcttccctctctgataattaccattcatatgtgagtgttagtgtgcctccttttagcattttcttcttctctttctgattcttcatttctgactgcctaggcaaggaaaccagataaccaaacttactagaacgttctttaaaacacaagtacaaactctgggacaggacccaagacactttcctgtgaagtgctgaaaaagacctcattgtattggcatttgatatcagtttgatgtagcttagagtgcttcctgattcttgctgagtttcaggtagttgagatagagagaagtgagtcatattcatattttcccccttagaataatattttgaaaggtttcattgcttccacttgaatgctgctcttacaaaaactggggttacaagggttactaaattagcatcagtagccagaggcaataccgttgtctggaggacaccagcaaacaacacacaacaaagcaaaacaaaccttgggaaactaaggccatttgttttgttttggtgtcccctttgaagccctgccttctggccttactcctgtacagatatttttgacctataggtgcctttatgagaattgagggtctgacatcctgccccaaggagtagctaaagtaattgctagtgttttcagggattttaacatcagactggaatgaatgaatgaaactttttgtcctttttttttctgtttttttttttctaatgtagtaaggactaaggaaaacctttggtgaagacaatcatttctctctgttgatgtggatacttttcacaccgtttatttaaatgctttctcaataggtccagagccagtgttcttgttcaacctgaaagtaatggctctgggttgggccagacagttgcactctctagtttgccctctgccacaaatttgatgtgtgacctttgggcaagtcatttatcttctctgggccttagttgcctcatctgtaaaatgagggagttggagtagattaattattccagctctgaaattctaagtgaccttggctaccttgcagcagttttggatttcttccttatctttgttctgctgtttgagggggctttttacttatttccatgttattcaaaggagactaggcttgatattttattactgttcttttatggacaaaaggttacatagtatgcccttaagacttaattttaaccaaaggcctagcaccaccttaggggctgcaataaacacttaacgcgcgtgcgcacgcgcgcgcgcacacacacacacacacacacacacacacacaggtcagagtttaaggctttcgagtcatgacattctagcttttgaattgcgtgcacacacacacgcacgcacacactctggtcagagtttattaaggctttcgagtcatgacattatagcttttgagttggtgtgtgtgacaccaccctcctaagtggtgtgtgcttgtaattttttttttcagtgaaaatggattgaaaacctgttgttaatgcttagtgatattatgctcaaaacaaggaaattcccttgaaccgtgtcaattaaactggtttatatgactcaagaaaacaataccagtagatgattattaactttattcttggctctttttaggtccattttgattaagtgacttttggctggatcattcagagctctcttctagcctacccttggatgagtacaattaatgaaattcatattttcaaggacctgggagccttccttggggctgggttgagggtggggggttggggagtcctggtagaggccagctttgtggtagctggagaggaagggatgaaaccagctgctgttgcaaaggctgcttgtcattgatagaaggactcacgggcttggattgattaagactaaacatggagttggcaaactttcttcaagtattgagttctgttcaatgcattggacatgtgatttaagggaaaagtgtgaatgcttatagatgatgaaaacctggtgggctgcagagcccagtttagaagaagtgagttgggggttggggacagatttggtggtggtatttcccaactgtttcctcccctaaattcagaggaatgcagctatgccagaagccagagaagagccactcgtagcttctgctttggggacaactggtcagttgaaagtcccaggagttcctttgtggctttctgtatacttttgcctggttaaagtctgtggctaaaaaatagtcgaacctttcttgagaactctgtaacaaagtatgtttttgattaaaagagaaagccaact

SEQ ID NO: 155325 - DNA, 8365 bp, Artificial Sequence
  derived and/or modified sequence
ggttatcctgaatacatgtctaacaattttccttgcaacgttagctgttgtttttcactgtttccaaaggatcaaaattgcttcagaaattggagacatatttgatttaaaaggaaaaacttgaacaaatggacaatatgtctattacgaatacaccaacaagtaatgatgcctgtctgagcattgtgcatagtttgatgtgccatagacaaggtggagagagtgaaacatttgcaaaaagagcaattgaaagtttggtaaagaagctgaaggagaaaaaagatgaattggattctttaataacagctataactacaaatggagctcatcctagtaaatgtgttaccatacagagaacattggatgggaggcttcaggtggctggtcggaaaggatttcctcatgtgatctatgcccgtctctggaggtggcctgatcttcacaaaaatgaactaaaacatgttaaatattgtcagtatgcgtttgacttaaaatgtgatagtgtctgtgtgaatccatatcactacgaacgagttgtatcacctggaattgatctctcaggattaacactgcagagtaatgctccatcaagtatgatggtgaaggatgaatatgtgcatgactttgagggacagccatcgttgtccactgaaggacattcaattcaaaccatccagcatccaccaagtaatcgtgcatcgacagagacatacagcaccccagctctgttagccccatctgagtctaatgctaccagcactgccaactttcccaacattcctgtggcttccacaagtcagcctgccagtatactggggggcagccatagtgaaggactgttgcagatagcatcagggcctcagccaggacagcagcagaatggatttactggtcagccagctacttaccatcataacagcactaccacctggactggaagtaggactgcaccatacacacctaatttgcctcaccaccaaaacggccatcttcagcaccacccgcctatgccgccccatcccggacattactggcctgttcacaatgagcttgcattccagcctcccatttccaatcatcctgctcctgagtattggtgttccattgcttactttgaaatggatgttcaggtaggagagacatttaaggttccttcaagctgccctattgttactgttgatggatacgtggacccttctggaggagatcgcttttgtttgggtcaactctccaatgtccacaggacagaagccattgagagagcaaggttgcacataggcaaaggtgtgcagttggaatgtaaaggtgaaggtgatgtttgggtcaggtgccttagtgaccacgcggtctttgtacagagttactacttagacagagaagctgggcgtgcacctggagatgctgttcataagatctacccaagtgcatatataaaggtctttgatttgcgtcagtgtcatcgacagatgcagcagcaggcggctactgcacaagctgcagcagctgcccaggcagcagccgtggcaggaaacatccctggcccaggatcagtaggtggaatagctccagctatcagtctgtcagctgctgctggaattggtgttgatgaccttcgtcgcttatgcatactcaggatgagttttgtgaaaggctggggaccggattacccaagacagagcatcaaagaaacaccttgctggattgaaattcacttacaccgggccctccagctcctagacgaagtacttcataccatgccgattgcagacccacaacctttagactgaggtcttttaccgttggggcccttaaccttatcaggatggtggactacaaaatacaatcctgtttataatctgaagatatatttcacttttgttctgctttatcttttcataaagggttgaaaatgtgtttgctgccttgctcctagcagacagaaactggattaaaacaattttttttttcctcttcagaacttgtcaggcatggctcagagcttgaagattaggagaaacacattcttattaattcttcacctgttatgtatgaaggaatcattccagtgctagaaaatttagccctttaaaacgtcttagagccttttatctgcagaacatcgatatgtatatcattctacagaataatccagtattgctgattttaaaggcagagaagttctcaaagttaattcacctatgttattttgtgtacaagttgttattgttgaacatacttcaaaaataatgtgccatgtgggtgagttaattttaccaagagtaactttactctgtgtttaaaaagtaagttaataatgtattgtaatctttcatccaaaatattttttgcaagttatattagtgaagatggtttcaattcagattgtcttgcaacttcagttttatttttgccaaggcaaaaaactcttaatctgtgtgtatattgagaatcccttaaaattaccagacaaaaaaatttaaaattacgtttgttattcctagtggatgactgttgatgaagtatacttttcccctgttaaacagtagttgtattcttctgtatttctaggcacaaggttggttgctaagaagcctataagaggaatttcttttccttcattcatagggaaaggttttgtattttttaaaacactaaaagcagcgtcactctacctaatgtctcactgttctgcaaaggtggcaatgcttaaactaaataatgaataaactgaatattttggaaactgctaaattctatgttaaatactgtgcagaataatggaaacattacagttcataataggtagtttggatatttttgtacttgatttgatgtgactttttttggtataatgtttaaatcatgtatgttatgatattgtttaaaattcagtttttgtatcttggggcaagactgcaaacttttttatatcttttggttattctaagccctttgccatcaatgatcatatcaattggcagtgactttgtatagagaatttaagtagaaaagttgcagatgtattgactgtaccacagacacaatatgtatgctttttacctagctggtagcataaataaaactgaatctcaacatacaaagttgaattctaggtttgatttttaagattttttttttcttttgcacttttgagtccaatctcagtgatgaggtaccttctactaaatgacaggcaacagccagttctattgggcagctttgtttttttccctcacactctaccgggacttccccatggacattgtgtatcatgtgtagagttggttttttttttttttaatttttattttactatagcagaaatagacctgattatctacaagatgataaatagattgtctacaggataaatagtatgaaataaaatcaaggattatctttcagatgtgtttacttttgcctggagaacttttagctatagaaacacttgtgtgatgatagtcctccttatatcacctggaatgaacacagcttctactgccttgctcagaaggtcttttaaatagaccatcctagaaaccactgagtttgcttatttctgtgatttaaacatagatcttgatccaagctacatgacttttgtctttaaataacttatctaccacctcatttgtactcttgattacttacaaattctttcagtaaacacctaattttcttctgtaaaagtttggtgatttaagttttattggcagttttataaaaagacatcttctctagaaattgctaactttaggtccattttactgtgaatgaggaataggagtgagttttagaataacagatttttaaaaatccagatgatttgattaaaaccttaatcatacattgacataattcattgcttcttttttttgagatatggagtcttgctgtgttgcccaggcaggagtgcagtggtatgatctcagctcactgcaacctctgcctcccgggttcaactgattctcctgcctcagcctccctggtagctaggattacaggtgcccgccaccatgcctggctaacttttgtagttttagtagagacggggttttgcctgttggccaggctggtcttgaactcctgacctcaagtgatccatccaccttggcctcccaaagtgctgggattacgggcgtgagccactgtccctggcctcattgttcccttttctactttaaggaaagttttcatgtttaatcatctggggaaagtatgtgaaaaatatttgttaagaagtatctctttggagccaagccacctgtcttggtttctttctactaagagccataaagtatagaaatacttctagttgttaagtgcttatatttgtacctagatttagtcacacgcttttgagaaaacatctagtatgttatgatcagctattcctgagagcttggttgttaatctatatttctatttcttagtggtagtcatctttgatgaataagactaaagattctcacaggtttaaaattttatgtctactttaagggtaaaattatgaggttatggttctgggtgggttttctctagctaattcatatctcaaagagtctcaaaatgttgaatttcagtgcaagctgaatgagagatgagccatgtacacccaccgtaagacctcattccatgtttgtccagtgcctttcagtgcattatcaaagggaatccttcatggtgttgcctttattttccggggagtagatcgtgggatatagtctatctcatttttaatagtttaccgcccctggtatacaaagataatgacaataaatcactgccatataaccttgctttttccagaaacatggctgttttgtattgctgtaaccactaaataggttgcctataccattcctcctgtgaacagtgcagatttacaggttgcatggtctggcttaaggagagccatacttgagacatgtgagtaaactgaactcatattagctgtgctgcatttcagacttaaaatccatttttgtggggcagggtgtggtgtgtaaaggggggtgtttgtaatacaagttgaaggcaaaataaaatgtcctgtctcccagatgatatacatcttattatttttaaagtttattgctaattgtaggaaggtgagttgcaggtatctttgactatggtcatctggggaaggaaaattttacattttactattaatgctccttaagtgtctatggaggttaaagaataaaatggtaaatgtttctgtgcctggtttgatggtaactggttaatagttactcaccattttatgcagagtcacattagttcacaccctttctgagagccttttgggagaagcagttttattctctgagtggaacagagttctttttgttgataatttctagtttgctcccttcgttattgccaactttactggcattttatttaatgatagcagattgggaaaatggcaaatttaggttacggaggtaaatgagtatatgaaagcaattacctctaaagccagttaacaattattttgtaggtggggtacactcagcttaaagtaatgcatttttttttcccgtaaaggcagaatccatcttgttgcagatagctatctaaataatctcatatcctcttttgcaaagactacagagaataggctatgacaatcttgttcaagcctttccatttttttccctgataactaagtaatttctttgaacataccaagaagtatgtaaaaagtccatggccttattcatccacaaagtggcatcctaggcccagccttatccctagcagttgtcccagtgctgctaggttgcttatcttgtttatctggaatcactgtggagtgaaattttccacatcatccagaattgccttatttaagaagtaaaacgttttaatttttagcctttttttggtggagttatttaatatgtatatcagaggatatactagatggtaacatttctttctgtgcttggctatctttgtggacttcaggggcttctaaaacagacaggactgtgttgcctttactaaatggtctgagacagctatggttttgaatttttagttttttttttttaacccacttcccctcctggtctcttccctctctgataattaccattcatatgtgagtgttagtgtgcctccttttagcattttcttcttctctttctgattcttcatttctgactgcctaggcaaggaaaccagataaccaaacttactagaacgttctttaaaacacaagtacaaactctgggacaggacccaagacactttcctgtgaagtgctgaaaaagacctcattgtattggcatttgatatcagtttgatgtagcttagagtgcttcctgattcttgctgagtttcaggtagttgagatagagagaagtgagtcatattcatattttcccccttagaataatattttgaaaggtttcattgcttccacttgaatgctgctcttacaaaaactggggttacaagggttactaaattagcatcagtagccagaggcaataccgttgtctggaggacaccagcaaacaacacacaacaaagcaaaacaaaccttgggaaactaaggccatttgttttgttttggtgtcccctttgaagccctgccttctggccttactcctgtacagatatttttgacctataggtgcctttatgagaattgagggtctgacatcctgccccaaggagtagctaaagtaattgctagtgttttcagggattttaacatcagactggaatgaatgaatgaaactttttgtcctttttttttctgtttttttttttctaatgtagtaaggactaaggaaaacctttggtgaagacaatcatttctctctgttgatgtggatacttttcacaccgtttatttaaatgctttctcaataggtccagagccagtgttcttgttcaacctgaaagtaatggctctgggttgggccagacagttgcactctctagtttgccctctgccacaaatttgatgtgtgacctttgggcaagtcatttatcttctctgggccttagttgcctcatctgtaaaatgagggagttggagtagattaattattccagctctgaaattctaagtgaccttggctaccttgcagcagttttggatttcttccttatctttgttctgctgtttgagggggctttttacttatttccatgttattcaaaggagactaggcttgatattttattactgttcttttatggacaaaaggttacatagtatgcccttaagacttaattttaaccaaaggcctagcaccaccttaggggctgcaataaacacttaacgcgcgtgcgcacgcgcgcgcgcacacacacacacacacacacacacacacacaggtcagagtttaaggctttcgagtcatgacattctagcttttgaattgcgtgcacacacacacgcacgcacacactctggtcagagtttattaaggctttcgagtcatgacattatagcttttgagttggtgtgtgtgacaccaccctcctaagtggtgtgtgcttgtaattttttttttcagtgaaaatggattgaaaacctgttgttaatgcttagtgatattatgctcaaaacaaggaaattcccttgaaccgtgtcaattaaactggtttatatgactcaagaaaacaataccagtagatgattattaactttattcttggctctttttaggtccattttgattaagtgacttttggctggatcattcagagctctcttctagcctacccttggatgagtacaattaatgaaattcatattttcaaggacctgggagccttccttggggctgggttgagggtggggggttggggagtcctggtagaggccagctttgtggtagctggagaggaagggatgaaaccagctgctgttgcaaaggctgcttgtcattgatagaaggactcacgggcttggattgattaagactaaacatggagttggcaaactttcttcaagtattgagttctgttcaatgcattggacatgtgatttaagggaaaagtgtgaatgcttatagatgatgaaaacctggtgggctgcagagcccagtttagaagaagtgagttgggggttggggacagatttggtggtggtatttcccaactgtttcctcccctaaattcagaggaatgcagctatgccagaagccagagaagagccactcgtagcttctgctttggggacaactggtcagttgaaagtcccaggagttcctttgtggctttctgtatacttttgcctggttaaagtctgtggctaaaaaatagtcgaacctttcttgagaactctgtaacaaagtatgtttttgattaaaagagaaagccaactaaatca

SEQ ID NO: 155326 - DNA, 1207 bp, Artificial Sequence
  derived and/or modified sequence
gtagccccgcggacagctgggccagggtgcgggcctgcgcctccctcggctcctggcgcgggcctcggggagaggggtggaagatgtctatggatgtgacattcctggggacgggtgcagcatacccatctccaacccggggtgcctctgctgtggtccttcggtgtgaaggcgagtgctggctctttgactgtggggagggaacacagacacagcttatgaaaagccaacttaaagcaggttatcctgaatacatgtctaacaattttccttgcaacgttagctgttgtttttcactgtttccaaaggatcaaaattgcttcagaaattggagacatatttgatttaaaaggaaaaacttgaacaaatggacaatatgtctattacgaatacaccaacaagtaatgatgcctgtctgagcattgtgcatagtttgatgtgccatagacaaggtggagagagtgaaacatttgcaaaaagagcaattgaaagtttggtaaagaagctgaaggagaaaaaagatgaattggattctttaataacagctataactacaaatggagctcatcctagtaaatgtgttaccatacagagaacattggatgggaggcttcaggtggctggtcggaaaggatttcctcatgtgatctatgcccgtctctggaggtggcctgatcttcacaaaaatgaactaaaacatgttaaatattgtcagtatgcgtttgacttaaaatgtgatagtgtctgtgtgaatccatatcactacgaacgagttgtatcacctggaattgatctctcaggattaacactgcagagtaatgaaaacaactggtatttctcacagctccttctagatttggacaaaggaatgatacaagagcaggcaatacatggtccataaatcaaaatactataaaaaggtatacagtgaaaagaagtgctcccacccctgcccccattcccccctacctcagctccatcaagtatgatggtgaaggatgaatatgtgcatgactttgagggacagccatcgttgtccactgaaggacattcaattcaaaccatccagcatccaccaagtaatcgtgcatcgacagagacatacagcaccccagctctgttagccccatctgagtctaatgctaccagcactgccaactttcccaacattcctgtggcttccacaagtcagcctgccagtatactg

SEQ ID NO: 155327 - DNA, 3199 bp, Artificial Sequence
  derived and/or modified sequence
caacaacacggccctggtcgtcgtcgccgctgcggtaacggagcggtttgggtggcggagcctgcgttcgcgccttcccactcccctcgccaccgcccgagcccaggttatcctgaatacatgtctaacaattttccttgcaacgttagctgttgtttttcactgtttccaaaggatcaaaattgcttcagaaattggagacatatttgatttaaaaggaaaaacttgaacaaatggacaatatgtctattacgaatacaccaacaagtaatgatgcctgtctgagcattgtgcatagtttgatgtgccatagacaaggtggagagagtgaaacatttgcaaaaagagcaattgaaagtttggtaaagaagctgaaggagaaaaaagatgaattggattctttaataacagctataactacaaatggagctcatcctagtaaatgtgttaccatacagagaacattggatgggaggcttcaggtggctggtcggaaaggatttcctcatgtgatctatgcccgtctctggaggtggcctgatcttcacaaaaatgaactaaaacatgttaaatattgtcagtatgcgtttgacttaaaatgtgatagtgtctgtgtgaatccatatcactacgaacgagttgtatcacctggaattgatctctcaggattaacactgcagagtaatgctccatcaagtatgatggtgaaggatgaatatgtgcatgactttgagggacagccatcgttgtccactgaaggacattcaattcaaaccatccagcatccaccaagtaatcgtgcatcgacagagacatacagcaccccagctctgttagccccatctgagtctaatgctaccagcactgccaactttcccaacattcctgtggcttccacaagtcagcctgccagtatactggggggcagccatagtgaaggactgttgcagatagcatcagggcctcagccaggacagcagcagaatggatttactggtcagccagctacttaccatcataacagcactaccacctggactggaagtaggactgcaccatacacacctaatttgcctcaccaccaaaacggccatcttcagcaccacccgcctatgccgccccatcccggacattactggcctgttcacaatgagcttgcattccagcctcccatttccaatcatcctgctcctgagtattggtgttccattgcttactttgaaatggatgttcaggtaggagagacatttaaggttccttcaagctgccctattgttactgttgatggatacgtggacccttctggaggagatcgcttttgtttgggtcaactctccaatgtccacaggacagaagccattgagagagcaaggttgcacataggcaaaggtgtgcagttggaatgtaaaggtgaaggtgatgtttgggtcaggtgccttagtgaccacgcggtctttgtacagagttactacttagacagagaagctgggcgtgcacctggagatgctgttcataagatctacccaagtgcatatataaaggtctttgatttgcgtcagtgtcatcgacagatgcagcagcaggcggctactgcacaagctgcagcagctgcccaggcagcagccgtggcaggaaacatccctggcccaggatcagtaggtggaatagctccagctatcagtctgtcagctgctgctggaattggtgttgatgaccttcgtcgcttatgcatactcaggatgagttttgtgaaaggctggggaccggattacccaagacagagcatcaaagaaacaccttgctggattgaaattcacttacaccgggccctccagctcctagacgaagtacttcataccatgccgattgcagacccacaacctttagactgaggtcttttaccgttggggcccttaaccttatcaggatggtggactacaaaatacaatcctgtttataatctgaagatatatttcacttttgttctgctttatcttttcataaagggttgaaaatgtgtttgctgccttgctcctagcagacagaaactggattaaaacaattttttttttcctcttcagaacttgtcaggcatggctcagagcttgaagattaggagaaacacattcttattaattcttcacctgttatgtatgaaggaatcattccagtgctagaaaatttagccctttaaaacgtcttagagccttttatctgcagaacatcgatatgtatatcattctacagaataatccagtattgctgattttaaaggcagagaagttctcaaagttaattcacctatgttattttgtgtacaagttgttattgttgaacatacttcaaaaataatgtgccatgtgggtgagttaattttaccaagagtaactttactctgtgtttaaaaagtaagttaataatgtattgtaatctttcatccaaaatattttttgcaagttatattagtgaagatggtttcaattcagattgtcttgcaacttcagttttatttttgccaaggcaaaaaactcttaatctgtgtgtatattgagaatcccttaaaattaccagacaaaaaaatttaaaattacgtttgttattcctagtggatgactgttgatgaagtatacttttcccctgttaaacagtagttgtattcttctgtatttctaggcacaaggttggttgctaagaagcctataagaggaatttcttttccttcattcatagggaaaggttttgtattttttaaaacactaaaagcagcgtcactctacctaatgtctcactgttctgcaaaggtggcaatgcttaaactaaataatgaataaactgaatattttggaaactgctaaattctatgttaaatactgtgcagaataatggaaacattacagttcataataggtagtttggatatttttgtacttgatttgatgtgactttttttggtataatgtttaaatcatgtatgttatgatattgtttaaaattcagtttttgtatcttggggcaagactgcaaacttttttatatcttttggttattctaagccctttgccatcaatgatcatatcaattggcagtgactttgtatagagaatttaagtagaaaagttgcagatgtattgactgtaccacagacacaatatgtatgctttttacctagctggtagcataaataaaactgaatctcaac

SEQ ID NO: 155328 - DNA, 1659 bp, Artificial Sequence
  derived and/or modified sequence
atggacaacatgagcatcaccaacacccccaccagcaacgacgcctgcctgagcatcgtgcacagcctgatgtgccacagacagggcggcgagagcgagaccttcgccaagagagccatcgagagcctggtgaagaagctgaaggagaagaaggacgagctggacagcctgatcaccgccatcaccaccaacggcgcccaccccagcaagtgcgtgaccatccagagaaccctggacggcagactgcaggtggccggcagaaagggcttcccccacgtgatctacgccagactgtggagatggcccgacctgcacaagaacgagctgaagcacgtgaagtactgccagtacgccttcgacctgaagtgcgacagcgtgtgcgtgaacccctaccactacgagagagtggtgagccccggcatcgacctgagcggcctgaccctgcagagcaacgcccccagcagcatgatggtgaaggacgagtacgtgcacgacttcgagggccagcccagcctgagcaccgagggccacagcatccagaccatccagcacccccccagcaacagagccagcaccgagacctacagcacccccgccctgctggcccccagcgagagcaacgccaccagcaccgccaacttccccaacatccccgtggccagcaccagccagcccgccagcatcctgggcggcagccacagcgagggcctgctgcagatcgccagcggcccccagcccggccagcagcagaacggcttcaccggccagcccgccacctaccaccacaacagcaccaccacctggaccggcagcagaaccgccccctacacccccaacctgccccaccaccagaacggccacctgcagcaccacccccccatgcccccccaccccggccactactggcccgtgcacaacgagctggccttccagccccccatcagcaaccaccccgcccccgagtactggtgcagcatcgcctacttcgagatggacgtgcaggtgggcgagaccttcaaggtgcccagcagctgccccatcgtgaccgtggacggctacgtggaccccagcggcggcgacagattctgcctgggccagctgagcaacgtgcacagaaccgaggccatcgagagagccagactgcacatcggcaagggcgtgcagctggagtgcaagggcgagggcgacgtgtgggtgagatgcctgagcgaccacgccgtgttcgtgcagagctactacctggacagagaggccggcagagcccccggcgacgccgtgcacaagatctaccccagcgcctacatcaaggtgttcgacctgagacagtgccacagacagatgcagcagcaggccgccaccgcccaggccgccgccgccgcccaggccgccgccgtggccggcaacatccccggccccggcagcgtgggcggcatcgcccccgccatcagcctgagcgccgccgccggcatcggcgtggacgacctgagaagactgtgcatcctgagaatgagcttcgtgaagggctggggccccgactaccccagacagagcatcaaggagaccccctgctggatcgagatccacctgcacagagccctgcagctgctggacgaggtgctgcacaccatgcccatcgccgacccccagcccctggactag

SEQ ID NO: 155329 - DNA, 534 bp, Artificial Sequence
  derived and/or modified sequence
atggacaacatgagcatcaccaacacccccaccagcaacgacgcctgcctgagcatcgtgcacagcctgatgtgccacagacagggcggcgagagcgagaccttcgccaagagagccatcgagagcctggtgaagaagctgaaggagaagaaggacgagctggacagcctgatcaccgccatcaccaccaacggcgcccaccccagcaagtgcgtgaccatccagagaaccctggacggcagactgcaggtggccggcagaaagggcttcccccacgtgatctacgccagactgtggagatggcccgacctgcacaagaacgagctgaagcacgtgaagtactgccagtacgccttcgacctgaagtgcgacagcgtgtgcgtgaacccctaccactacgagagagtggtgagccccggcatcgacctgagcggcctgaccctgcagagcaacgagaacaactggtacttcagccagctgctgctggacctggacaagggcatgatccaggagcaggccatccacggcccctag

SEQ ID NO: 155330 - DNA, 1311 bp, Artificial Sequence
  derived and/or modified sequence
atggacaacatgagcatcaccaacacccccaccagcaacgacgcctgcctgagcatcgtgcacagcctgatgtgccacagacagggcggcgagagcgagaccttcgccaagagagccatcgagagcctggtgaagaagctgaaggagaagaaggacgagctggacagcctgatcaccgccatcaccaccaacggcgcccaccccagcaagtgcgtgaccatccagagaaccctggacggcagactgcaggtggccggcagaaagggcttcccccacgtgatctacgccagactgtggagatggcccgacctgcacaagaacgagctgaagcacgtgaagtactgccagtacgccttcgacctgaagtgcgacagcgtgtgcgtgaacccctaccactacgagagagtggtgagccccggcatcgacctgagcggcctgaccctgcagagcaacgcccccagcagcatgatggtgaaggacgagtacgtgcacgacttcgagggccagcccagcctgagcaccgagggccacagcatccagaccatccagcacccccccagcaacagagccagcaccgagacctacagcacccccgccctgctggcccccagcgagagcaacgccaccagcaccgccaacttccccaacatccccgtggccagcaccagccagcccgccagcatcctgggcggcagccacagcgagggcctgctgcagatcgccagcggcccccagcccggccagcagcagaacggcttcaccggccagcccgccacctaccaccacaacagcaccaccacctggaccggcagcagaaccgccccctacacccccaacctgccccaccaccagaacggccacctgcagcaccacccccccatgcccccccaccccggccactactggcccgtgcacaacgagctggccttccagccccccatcagcaaccaccccgcccccgagtactggtgcagcatcgcctacttcgagatggacgtgcaggtgggcgagaccttcaaggtgcccagcagctgccccatcgtgaccgtggacggctacgtggaccccagcggcggcgacagattctgcctgggccagctgagcaacgtgcacagaaccgaggccatcgagagagccagactgcacatcggcaagggcgtgcagctggagtgcaagggcgagggcgacgtgtgggtgagatgcctgagcgaccacgccgtgttcgtgcagagctactacctggacagagaggccggcagagcccccggcgacgccgtgcacaagatctaccccagcgcctacatcaagtag

SEQ ID NO: 155331 - protein, 403 aa, Artificial Sequence
  derived and/or modified sequence
MASELAMSNSDLPTSPLAMEYVNDFDLMKFEVKKEPVETDRIISQCGRLIAGGSLSSTPMSTPCSSVPPSPSFSAPSPGSGSEQKAHLEDYYWMTGYPQQLNPEALGFSPEDAVEALISNSHQLQGGFDGYARGAQQLAAAAGAGAGASLGGSGEEMGPAAAVVSAVIAAAAAQSGAGPHYHHHHHHAAGHHHHPTAGAPGAAGSAAASAGGAGGAGGGGPASAGGGGGGGGGGGGGGAAGAGGALHPHHAAGGLHFDDRFSDEQLVTMSVRELNRQLRGVSKEEVIRLKQKRRTLKNRGYAQSCRFKRVQQRHVLESEKNQLLQQVDHLKQEISRLVRERDAYKEKYEKLVSSGFRENGSSSDNPSSPEFFITEPTRKLEPSVGYATFWKPQHRVLTSVFTK

SEQ ID NO: 155332 - DNA, 2656 bp, Artificial Sequence
  derived and/or modified sequence
gaggctttaaaatcttttttcatcttctagctgtagctcgggctgcttgtcggcttggcctccccctcccccctttgctctctgcctcgtctttccccaggacttcgctattttgcttttttaaaaaaaggcaagaaagaactaaactcccccctccctctcctccagtcgggctgcacctctgccttgcactttgcacagaggtagagagcgcgcgagggagagagaggaaagaaaaaaaataataaagagagccaagcagaagaggaggcgagaagcatgaagtgttaactcccccgtgccaaggcccgcgccgcccggacagacgcccgccgcgcctccagccccgagcggacgccgcgcgcgccctgcctgcagcccgggccggcgaggcgagcccttccttatgcaaagcgcgcagcggagcggcgagcgggggacgccgcgcaccgggccgggctcctccagcttcgccgccgcagccaccaccgccgccaccgcagctcgcggaggatcttcccgagcctgaagccgccggctcggcgcgcaaggaggcgagcgagcaaggaggggccggggcgagcgagggagcacattggcgtgagcaggggggagggagggcgggcgcggggggcgcgggcagggcgggggggtgtgtgtgtgagcgcgctcggaggtttcgggccagccaccgccgcgcaagctagaagcgccccagcccggcaagctggctcacccgctggccacccagcacagcccgctggcccctctcctgcagcccatctggcggagcggcggcggcggcggcggcggcggcaggagaatggcatcagaactggcaatgagcaactccgacctgcccaccagtcccctggccatggaatatgttaatgacttcgatctgatgaagtttgaagtgaaaaaggaaccggtggagaccgaccgcatcatcagccagtgcggccgtctcatcgccgggggctcgctgtcctccacccccatgagcacgccgtgcagctcggtgcccccttcccccagcttctcggcgcccagcccgggctcgggcagcgagcagaaggcgcacctggaagactactactggatgaccggctacccgcagcagctgaaccccgaggcgctgggcttcagccccgaggacgcggtcgaggcgctcatcagcaacagccaccagctccagggcggcttcgatggctacgcgcgcggggcgcagcagctggccgcggcggccggggccggtgccggcgcctccttgggcggcagcggcgaggagatgggccccgccgccgccgtggtgtccgccgtgatcgccgcggccgccgcgcagagcggcgcgggcccgcactaccaccaccaccaccaccacgccgccggccaccaccaccacccgacggccggcgcgcccggcgccgcgggcagcgcggccgcctcggccggtggcgctgggggcgcgggcggcggtggcccggccagcgctgggggcggcggcggcggcggcggcggcggaggcggcgggggcgcggcgggggcggggggcgccctgcacccgcaccacgccgccggcggcctgcacttcgacgaccgcttctccgacgagcagctggtgaccatgtctgtgcgcgagctgaaccggcagctgcgcggggtcagcaaggaggaggtgatccggctgaagcagaagaggcggaccctgaaaaaccgcggctatgcccagtcctgccgcttcaagagggtgcagcagagacacgtcctggagtcggagaagaaccagctgctgcagcaagtcgaccacctcaagcaggagatctccaggctggtgcgcgagagggacgcgtacaaggagaaatacgagaagttggtgagcagcggcttccgagaaaacggctcgagcagcgacaacccgtcctctcccgagtttttcataactgagcccactcgcaagttggagccatcagtgggatacgccacattttggaagccccagcatcgtgtacttaccagtgtgttcacaaaatgaaatttgtgtgagagctgtacattaaaaaaaatcatcattattattattatttgcagtcatggagaaccacctacccctgacttctgtttagtctcctttttaaataaaaattactgtgttagagaagaaggctattaaatgtagtagttaactatgcctcttgtctgggggtttcatagagaccggtaggaaagcgcactcctgcttttcgatttatggtgtgtgcaagtaaacaggtgcattgctttcaacctgccatactagttttaaaaattcactgaaattacaaagatacatatatatgcatatatataatggaaagtttcccggaatgcaacaattagcattttaaaatcatatataggcatgcacattctaaatagtactttttcatgcttcattgtttctctggcagataattttactaagaagaaaaatagatattcgactccccttccctaaacaaatccacgggcagaggctccagcggagccgagccccctggttttctcgtaggccctagacggtgttgcatttatcagtgatgtcaaacgtgctcatttgtcagacatagctgtaaatgaaaacaatgtgtggcaaaatacaaagttaaaaaaaaaa

SEQ ID NO: 155333 - DNA, 1212 bp, Artificial Sequence
  derived and/or modified sequence
atggccagcgagctggccatgagcaacagcgacctgcccaccagccccctggccatggagtacgtgaacgacttcgacctgatgaagttcgaggtgaagaaggagcccgtggagaccgacagaatcatcagccagtgcggcagactgatcgccggcggcagcctgagcagcacccccatgagcaccccctgcagcagcgtgccccccagccccagcttcagcgcccccagccccggcagcggcagcgagcagaaggcccacctggaggactactactggatgaccggctacccccagcagctgaaccccgaggccctgggcttcagccccgaggacgccgtggaggccctgatcagcaacagccaccagctgcagggcggcttcgacggctacgccagaggcgcccagcagctggccgccgccgccggcgccggcgccggcgccagcctgggcggcagcggcgaggagatgggccccgccgccgccgtggtgagcgccgtgatcgccgccgccgccgcccagagcggcgccggcccccactaccaccaccaccaccaccacgccgccggccaccaccaccaccccaccgccggcgcccccggcgccgccggcagcgccgccgccagcgccggcggcgccggcggcgccggcggcggcggccccgccagcgccggcggcggcggcggcggcggcggcggcggcggcggcggcggcgccgccggcgccggcggcgccctgcacccccaccacgccgccggcggcctgcacttcgacgacagattcagcgacgagcagctggtgaccatgagcgtgagagagctgaacagacagctgagaggcgtgagcaaggaggaggtgatcagactgaagcagaagagaagaaccctgaagaacagaggctacgcccagagctgcagattcaagagagtgcagcagagacacgtgctggagagcgagaagaaccagctgctgcagcaggtggaccacctgaagcaggagatcagcagactggtgagagagagagacgcctacaaggagaagtacgagaagctggtgagcagcggcttcagagagaacggcagcagcagcgacaaccccagcagccccgagttcttcatcaccgagcccaccagaaagctggagcccagcgtgggctacgccaccttctggaagccccagcacagagtgctgaccagcgtgttcaccaagtag

SEQ ID NO: 155334 - DNA, 1212 bp, Artificial Sequence
  derived and/or modified sequence
atggcatcggaactggctatgagtaattctgatcttcccactagcccactcgccatggagtacgttaacgacttcgatctgatgaaatttgaagtcaaaaaagaaccggtggagaccgataggatcatcagccaatgtggaaggctgatcgctggaggttccctatcctccacgccaatgagcacgccctgtagcagtgtgcctccgtctccttctttctcagccccgtcgccagggtcaggctccgagcagaaagcacatcttgaggactactattggatgactggctatccacagcagttaaatccagaagccttagggttctctccagaggatgcggttgaggctctgatttccaattctcaccagctgcagggcgggttcgacggctatgccagaggagcacaacagctggctgctgccgcgggagctggtgctggggctagtctgggcggaagcggcgaggaaatggggcctgcagcagcggtcgtaagcgcggtcatagctgccgcagccgcgcagtcaggggccggaccgcattaccatcaccatcatcaccatgctgccggacaccaccaccaccctactgccggggcccctggggccgctggcagcgctgccgccagcgcaggcggcgccggtggggctgggggtggcggccccgcatctgcgggtggagggggcgggggaggcggcggggggggtggtggtggtgccgcaggcgccggtggtgctcttcatccacaccatgccgcgggcggactgcactttgacgatagattcagcgatgagcagctagtgaccatgtccgtgagggaattgaataggcaactgaggggggtgagcaaagaagaagttattagactgaaacagaagcgccgtactcttaagaaccgaggctacgcacaaagttgcaggttcaagcgagttcagcagcgccacgtcctggaatcagagaagaatcagctgttgcagcaagtggatcatctgaaacaggagatttctagactagtacgcgagagagacgcctataaagaaaagtacgagaagctggtgtcttccggattcagggagaacggcagttcatccgacaacccgagctcgccagagtttttcatcactgagccaacaagaaaactcgagccatctgtgggatacgcaacattctggaagccgcagcaccgagtgctaacttccgtcttcaccaagtag

SEQ ID NO: 155335 - DNA, 1212 bp, Artificial Sequence
  derived and/or modified sequence
atggccagcgagctggccatgagcaacagcgacctgcccaccagccccctggccatggagtatgtgaatgactttgacctgatgaagtttgaggtgaagaaggagcctgtggagacagaccgcatcatcagccagtgtggccgcctgattgctgggggcagcctgagcagcacccccatgagcaccccctgcagctctgtgccccccagccccagcttcagcgcccccagccctggcagcggcagcgagcagaaggcccacctggaggactactactggatgacaggctacccccagcagctgaaccctgaggccctgggcttctccccagaagatgctgtggaggccctgatcagcaacagccaccagctgcagggcggctttgatggctacgcccggggggcccagcagctggccgctgctgctggggccggggccggggccagcctgggcggcagcggggaggagatgggccctgctgctgctgtggtgtctgctgtgattgctgctgctgctgcccagagcggggccggcccccactaccaccaccaccaccaccacgccgccggccaccaccaccaccccacagctggggcccctggagctgctggcagcgctgctgccagcgctgggggcgccggcggggccggcggcggcggccctgccagcgctgggggcggcggcggcggcggcggcggcggcggcggcggcggggccgccggggccggcggggccctgcacccccaccacgccgccggcggcctgcactttgatgaccgcttcagtgatgagcagctggtgaccatgtctgtgcgggagctgaaccggcagctgcggggcgtgtccaaggaggaggtgatccggctgaagcagaagaggaggaccctgaagaacagaggctacgcccagagctgccgcttcaagagggtgcagcagagacatgtgctggagagcgagaagaaccagctgctgcagcaggtggaccacctgaagcaggagatcagccggctggtgcgggagagagatgcctacaaggagaagtatgagaagctggtgagcagcggcttccgggagaatggcagcagcagtgacaaccccagcagccctgagttcttcatcacagagcccaccaggaagctggagcccagcgtgggctacgccaccttctggaagccccagcaccgggtgctgacctctgtgttcaccaagtag

SEQ ID NO: 155336 - DNA, 1212 bp, Artificial Sequence
  derived and/or modified sequence
atggccagcgagctggccatgagcaacagcgacctgcccaccagccctctggccatggaatacgtgaacgatttcgacctcatgaagtttgaagtgaagaaggaacctgtcgagaccgataggataatttcccagtgtggcagactcattgccggaggatcactgagcagcaccccaatgtcgactccgtgttcgagcgtccctccaagccctagcttctccgcccccagtccagggagtggttcggagcaaaaagcgcatctggaggattattactggatgaccggatacccccaacaactcaatccagaggcattaggattttctccagaagatgcagtggaagcgttaattagcaattcacaccagctgcaaggcggctttgacggctacgctagaggcgcccagcaactggccgcagctgctggtgccggcgccggtgctagtctgggcggctcaggggaggagatgggcccggctgctgccgttgtaagtgcggtaatcgccgcggccgcggctcagtctggtgccggaccacattaccaccaccatcaccaccatgctgcgggacaccatcatcacccaaccgcaggcgcccccggagctgccggatcagcggccgcctccgcagggggtgcaggtggagccggtggcggaggaccagcgagtgcaggcggcggcggcggcgggggcggaggaggaggtgggggcggagccgcaggggcaggaggagctctacatccgcaccacgccgcaggagggctgcactttgatgatcgtttctcggatgaacaattggttaccatgtcagtccgagaactaaatagacaactgagaggtgttagtaaggaggaagtcatccgattgaaacagaaacggcggacgctaaaaaaccgaggctatgcccagagctgtcgatttaagcgagttcaacagcgtcacgttttggagtcggagaagaaccagcttctccagcaggtagaccacctaaaacaagagatctccaggctagtgcgcgagcgggatgcctataaagagaagtatgaaaagttggtcagctccggatttcgtgagaacggcagcagttctgataatcccagctctccagagtttttcatcacagagccaacaagaaaactcgaaccttcggtggggtatgccaccttttggaaaccgcagcacagagttcttacttcagtctttacgaaatag

SEQ ID NO: 155337 - DNA, 1212 bp, Artificial Sequence
  derived and/or modified sequence
atggcctcagagttggccatgtccaattccgaccttcccacgagcccactcgccatggagtacgtcaatgatttcgatctgatgaaatttgaggtgaagaaagagccagtggaaacagataggatcatttcccagtgcgggaggctgattgccggaggctccttgtctagcacaccaatgagtactccatgtagctcagtgccaccctcaccttccttctcagctccctcaccaggttccggaagtgaacagaaagctcacctggaagattactattggatgactgggtacccacagcagctgaatcccgaggctctcggctttagtcctgaggatgcagtcgaggcactgatcagtaactcacaccagctccagggtggattcgacggatacgcccgtggagctcagcagctggctgcagcagctggtgctggagcaggagcttccctaggaggaagcggcgaggagatgggacccgctgctgccgtcgtctccgccgtgatcgcggcagccgcagcccagagtggtgccggaccgcattatcatcatcatcaccatcatgccgcaggacatcatcaccaccctaccgccggtgctccaggtgccgctggctcagctgcggcatccgctggaggtgcaggcggagctggaggtggtggacctgcctctgcaggcggaggagggggtggcggtggcggaggtggaggcggaggggctgctggtgctgggggagcgctccatcctcatcatgctgccggtggactccacttcgatgatcgcttcagtgacgaacagcttgtgactatgtcggtgagggagttgaacaggcagctgaggggcgtaagcaaagaggaagtgatcaggctcaaacagaaacggaggacactgaaaaaccggggatacgctcagagctgtcgcttcaagagagtgcaacaaaggcacgttttggagagcgaaaagaatcagctcctgcagcaagtggatcatctgaaacaggaaattagccgtctcgtgagggaaagagacgcctacaaggaaaaatacgaaaagctggtctccagcggtttccgggaaaacggctcctcctctgataatcctagtagtccggaattcttcatcacggagcccactagaaaactggagccttcagttggctacgccaccttctggaagccccaacacagggttctgacatctgtgttcacaaagtag

SEQ ID NO: 155338 - DNA, 2646 bp, Artificial Sequence
  derived and/or modified sequence
atcttttttcatcttctagctgtagctcgggctgcttgtcggcttggcctccccctcccccctttgctctctgcctcgtctttccccaggacttcgctattttgcttttttaaaaaaaggcaagaaagaactaaactcccccctccctctcctccagtcgggctgcacctctgccttgcactttgcacagaggtagagagcgcgcgagggagagagaggaaagaaaaaaaataataaagagagccaagcagaagaggaggcgagaagcatgaagtgttaactcccccgtgccaaggcccgcgccgcccggacagacgcccgccgcgcctccagccccgagcggacgccgcgcgcgccctgcctgcagcccgggccggcgaggcgagcccttccttatgcaaagcgcgcagcggagcggcgagcgggggacgccgcgcaccgggccgggctcctccagcttcgccgccgcagccaccaccgccgccaccgcagctcgcggaggatcttcccgagcctgaagccgccggctcggcgcgcaaggaggcgagcgagcaaggaggggccggggcgagcgagggagcacattggcgtgagcaggggggagggagggcgggcgcggggggcgcgggcagggcgggggggtgtgtgtgtgagcgcgctcggaggtttcgggccagccaccgccgcgcaagctagaagcgccccagcccggcaagctggctcacccgctggccacccagcacagcccgctggcccctctcctgcagcccatctggcggagcggcggcggcggcggcggcggcggcaggagaatggcatcagaactggcaatgagcaactccgacctgcccaccagtcccctggccatggaatatgttaatgacttcgatctgatgaagtttgaagtgaaaaaggaaccggtggagaccgaccgcatcatcagccagtgcggccgtctcatcgccgggggctcgctgtcctccacccccatgagcacgccgtgcagctcggtgcccccttcccccagcttctcggcgcccagcccgggctcgggcagcgagcagaaggcgcacctggaagactactactggatgaccggctacccgcagcagctgaaccccgaggcgctgggcttcagccccgaggacgcggtcgaggcgctcatcagcaacagccaccagctccagggcggcttcgatggctacgcgcgcggggcgcagcagctggccgcggcggccggggccggtgccggcgcctccttgggcggcagcggcgaggagatgggccccgccgccgccgtggtgtccgccgtgatcgccgcggccgccgcgcagagcggcgcgggcccgcactaccaccaccaccaccaccacgccgccggccaccaccaccacccgacggccggcgcgcccggcgccgcgggcagcgcggccgcctcggccggtggcgctgggggcgcgggcggcggtggcccggccagcgctgggggcggcggcggcggcggcggcggcggaggcggcgggggcgcggcgggggcggggggcgccctgcacccgcaccacgccgccggcggcctgcacttcgacgaccgcttctccgacgagcagctggtgaccatgtctgtgcgcgagctgaaccggcagctgcgcggggtcagcaaggaggaggtgatccggctgaagcagaagaggcggaccctgaaaaaccgcggctatgcccagtcctgccgcttcaagagggtgcagcagagacacgtcctggagtcggagaagaaccagctgctgcagcaagtcgaccacctcaagcaggagatctccaggctggtgcgcgagagggacgcgtacaaggagaaatacgagaagttggtgagcagcggcttccgagaaaacggctcgagcagcgacaacccgtcctctcccgagtttttcataactgagcccactcgcaagttggagccatcagtgggatacgccacattttggaagccccagcatcgtgtacttaccagtgtgttcacaaaatgaaatttgtgtgagagctgtacattaaaaaaaatcatcattattattattatttgcagtcatggagaaccacctacccctgacttctgtttagtctcctttttaaataaaaattactgtgttagagaagaaggctattaaatgtagtagttaactatgcctcttgtctgggggtttcatagagaccggtaggaaagcgcactcctgcttttcgatttatggtgtgtgcaagtaaacaggtgcattgctttcaacctgccatactagttttaaaaattcactgaaattacaaagatacatatatatgcatatatataatggaaagtttcccggaatgcaacaattagcattttaaaatcatatataggcatgcacattctaaatagtactttttcatgcttcattgtttctctggcagataattttactaagaagaaaaatagatattcgactccccttccctaaacaaatccacgggcagaggctccagcggagccgagccccctggttttctcgtaggccctagacggtgttgcatttatcagtgatgtcaaacgtgctcatttgtcagacatagctgtaaatgaaaacaatgtgtggcaaaatacaaagttagttaaataca

SEQ ID NO: 155339 - protein, 314 aa, Artificial Sequence
  derived and/or modified sequence
MPLEQRSQHCKPEEGLEARGEALGLVGAQAPATEEQEAASSSSTLVEVTLGEVPAAESPDPPQSPQGASSLPTTMNYPLWSQSYEDSSNQEEEGPSTFPDLESEFQAALSRKVAELVHFLLLKYRAREPVTKAEMLGSVVGNWQYFFPVIFSKASSSLQLVFGIELMEVDPIGHLYIFATCLGLSYDGLLGDNQIMPKAGLLIIVLAIIAREGDCAPEEKIWEELSVLEVFEGREDSILGDPKKLLTQHFVQENYLEYRQVPGSDPACYEFLWGPRALVETSYVKVLHHMVKISGGPHISYPPLHEWVLREGEE

SEQ ID NO: 155340 - protein, 198 aa, Artificial Sequence
  derived and/or modified sequence
MPLEQRSQHCKPEEGLEARGEALGLVGAQAPATEEQEAASSSSTLVEVTLGEVPAAESPDPPQSPQGASSLPTTMNYPLWSQSYEDSSNQEEEGPSTFPDLESEFQAALSRKVAELVHFLLLKYRAREPVTKAEMLGSVVGNWQYFFPVIFSKASSSLQLVFGIELMEVDPIGHLYIFATCLGLSYDGLLGDNQIMPK

SEQ ID NO: 155341 - DNA, 945 bp, Artificial Sequence
  derived and/or modified sequence
atgcctttagaacagcgctcccaacattgtaaaccagaagaaggcttggaggctcgcggggaagcgctgggtcttgtgggcgcccaggcccccgctaccgaggagcaggaggccgcaagctctagctccacgcttgtagaggtgacattgggagaggtgccggcagcggagtccccagatccacctcagtctccccaaggagctagctcgctcccaacaaccatgaactatccactgtggagccagtcatacgaggacagcagcaatcaggaggaagaaggtcccagcacctttcctgatctcgaatcggaatttcaggccgccctgagcagaaaagtggctgagctcgtgcacttcctccttctgaaatacagggcgcgggaaccagtgacaaaggccgaaatgctcggttccgtggtcgggaattggcaatacttctttcccgtgattttctccaaggctagttcttctcttcagctggtcttcggtattgagttgatggaggttgatcctatcggacacttatacatattcgccacatgcctcggcctcagttacgatgggctactgggggacaatcagattatgccaaaggccggactgctgatcattgttctggcaatcattgcaagggagggcgattgtgcaccagaggagaagatctgggaagagctctcagttctggaagtctttgagggccgagaggacagcatcctgggagaccctaagaagctgctcacccagcactttgtccaggaaaactacctagaatatcgccaggttcccgggtcagatcctgcttgctacgaatttctctgggggcctcgggctctggtcgaaacatcttatgtcaaggtgctgcaccatatggtgaagatttctgggggaccacatattagctatccacccctacacgagtgggtgctaagagagggcgaggaatag

SEQ ID NO: 155342 - DNA, 945 bp, Artificial Sequence
  derived and/or modified sequence
atgcccttagaacagaggagccaacactgcaagccagaagagggactggaggccagaggggaagctctgggtttagtgggtgcccaggcaccagccaccgaagagcaggaagccgccagttcttcaagcacactggtggaagtcactctaggtgaagttcccgccgctgaatcgccagacccaccacagagccctcaaggcgcctcttctctcccaaccaccatgaattaccccctgtggagccaatcatacgaagatagctctaatcaggaggaagaaggtccctcaacatttcccgatctggagtccgagttccaggcagcactctctcggaaggtagccgagttggtgcactttctgctgctcaagtatcgggcacgcgagcctgtaactaaggccgaaatgctgggaagcgtcgtgggaaattggcagtatttctttcccgtgatattctctaaggcatcctcttcgcttcagctggtctttggaatcgaactaatggaggttgatcctatagggcatctttacatcttcgcgacctgcctcggcttgagctatgatggactgttgggtgacaatcagatcatgccaaaggccgggctgctgataattgtgcttgctatcatcgccagagagggtgattgcgcacctgaagagaaaatttgggaggagctttccgtattagaggtctttgagggcagagaggactcaatcctgggggatcccaaaaaactgctgacgcagcattttgtacaggagaactatttggagtacaggcaggtgcccggctctgaccccgcgtgttacgaatttctctggggccctcgcgcattagtagaaacaagctacgtgaaggtgctccatcatatggtgaagatcagtggaggcccccacatctcatatccgccattacatgagtgggtcctgcgggaaggggaggaatag

SEQ ID NO: 155343 - DNA, 597 bp, Artificial Sequence
  derived and/or modified sequence
atgcctctagagcagagaagccagcattgcaaacccgaagaggggctcgaggcccgcggcgaagccctggggctggttggtgctcaggcacctgctactgaggagcaagaagctgcttcatcctcttcaacgttggtggaagtgaccctgggggaagtccctgcagccgagagcccggacccacctcagtctccgcagggcgcatccagcttgcctacaaccatgaactacccgctgtggagccagagttacgaggacagcagtaatcaggaggaagagggaccaagtacttttccagatttggaatccgaatttcaggcagcgcttagccgaaaggtggcagagctggtgcactttctgctcctgaaataccgggctagagagccagtgacaaaggcagagatgctgggttccgtcgtcgggaactggcaatacttctttccagtgattttctccaaggcaagcagcagtttacagttagtgttcggaattgaacttatggaggttgacccaatcgggcatctctatatctttgctacttgtttgggattgagctacgatggtttgctaggcgacaaccagattatgccaaaatag

SEQ ID NO: 155344 - DNA, 945 bp, Artificial Sequence
  derived and/or modified sequence
atgcccctggagcagaggagccagcactgcaagccagaggagggcctggaggcccggggggaggccctgggcctggtgggcgcccaggccccagccacagaggagcaggaggccgccagcagcagcagcaccctggtggaggtgaccctgggggaggtgcctgctgctgagagcccagaccccccccagagcccccagggcgccagcagcctgcccaccaccatgaactaccccctgtggagccagagctatgaggacagcagcaaccaggaggaggagggccccagcaccttcccagacctggagagcgagttccaggccgccctgagcaggaaggtggccgagctggtgcacttcctgctgctgaagtaccgggcccgggagcctgtgaccaaggccgagatgctgggctctgtggtgggcaactggcagtacttcttccctgtgatcttcagcaaggccagcagcagcctgcagctggtgtttggcatcgagctgatggaggtggaccccatcggccacctgtacatctttgccacctgcctgggcctgtcctatgatggcctgctgggggacaaccagatcatgcccaaggccggcctgctgatcatcgtgctggccatcatcgcccgggagggggactgtgcccctgaggagaagatctgggaggagctgtctgtgctggaggtgtttgagggcagagaagattccatcctgggggaccccaagaagctgctgacccagcactttgtgcaggagaactacctggagtaccggcaggtgcccggcagtgaccctgcctgctatgagttcctgtggggcccccgggccctggtggagaccagctatgtgaaggtgctgcaccacatggtgaagatcagcggcggcccccacatctcctacccacccctgcacgagtgggtgctgcgggagggggaggagtag

SEQ ID NO: 155345 - DNA, 597 bp, Artificial Sequence
  derived and/or modified sequence
atgcccctggagcagaggagccagcactgcaagccagaggagggcctggaggcccggggggaggccctgggcctggtgggcgcccaggccccagccacagaggagcaggaggccgccagcagcagcagcaccctggtggaggtgaccctgggggaggtgcctgctgctgagagcccagaccccccccagagcccccagggcgccagcagcctgcccaccaccatgaactaccccctgtggagccagagctatgaggacagcagcaaccaggaggaggagggccccagcaccttcccagacctggagagcgagttccaggccgccctgagcaggaaggtggccgagctggtgcacttcctgctgctgaagtaccgggcccgggagcctgtgaccaaggccgagatgctgggctctgtggtgggcaactggcagtacttcttccctgtgatcttcagcaaggccagcagcagcctgcagctggtgtttggcatcgagctgatggaggtggaccccatcggccacctgtacatctttgccacctgcctgggcctgtcctatgatggcctgctgggggacaaccagatcatgcccaagtag

SEQ ID NO: 155346 - DNA, 1724 bp, Artificial Sequence
  derived and/or modified sequence
gagattctcgccctgagcaacgagcgacggcctgacgtcggcggagggaagccggcccaggctcggtgaggaggcaaggttctgaggggacaggctgacctggaggaccagaggcccccggaggagcactgaaggagaagatctgccagtgggtctccattgcccagctcctgcccacactcccgcctgttgccctgaccagagtcatcatgcctcttgagcagaggagtcagcactgcaagcctgaagaaggccttgaggcccgaggagaggccctgggcctggtgggtgcgcaggctcctgctactgaggagcaggaggctgcctcctcctcttctactctagttgaagtcaccctgggggaggtgcctgctgccgagtcaccagatcctccccagagtcctcagggagcctccagcctccccactaccatgaactaccctctctggagccaatcctatgaggactccagcaaccaagaagaggaggggccaagcaccttccctgacctggagtccgagttccaagcagcactcagtaggaaggtggccgagttggttcattttctgctcctcaagtatcgagccagggagccggtcacaaaggcagaaatgctggggagtgtcgtcggaaattggcagtatttctttcctgtgatcttcagcaaagcttccagttccttgcagctggtctttggcatcgagctgatggaagtggaccccatcggccacttgtacatctttgccacctgcctgggcctctcctacgatggcctgctgggtgacaatcagatcatgcccaaggcaggcctcctgataatcgtcctggccataatcgcaagagagggcgactgtgcccctgaggagaaaatctgggaggagctgagtgtgttagaggtgtttgaggggagggaagacagtatcttgggggatcccaagaagctgctcacccaacatttcgtgcaggaaaactacctggagtaccggcaggtccccggcagtgatcctgcatgttatgaattcctgtggggtccaagggccctcgttgaaaccagctatgtgaaagtcctgcaccatatggtaaagatcagtggaggacctcacatttcctacccacccctgcatgagtgggttttgagagagggggaagagtgagtctgagcacgagttgcagccagggccagtgggagggggtctgggccagtgcaccttccggggccgcatcccttagtttccactgcctcctgtgacgtgaggcccattcttcactctttgaagcgagcagtcagcattcttagtagtgggtttctgttctgttggatgactttgagattattctttgtttcctgttggagttgttcaaatgttccttttaacggatggttgaatgagcgtcagcatccaggtttatgaatgacagtagtcacacatagtgctgtttatatagtttaggagtaagagtcttgttttttactcaaattgggaaatccattccattttgtgaattgtgacataataatagcagtggtaaaagtatttgcttaaaattgtgagcgaattagcaataacatacatgagataactcaagaaatcaaaagatagttgattcttgccttgtacctcaatctattctgtaaaattaaacaaatatgcaaaccaggatttccttgacttctttgagaatgcaagcgaaattaaatctgaataaataattcttcctcttca

SEQ ID NO: 155347 - DNA, 2082 bp, Artificial Sequence
  derived and/or modified sequence
ggaggcaaggtaagacgctgagggaggactgaggcgggcctcacctcagacagagggcctcaaataatccagtgctgcctctgctgccgggcctgggccaccccgcaggggaagacttccaggctgggtcgccactacctcaccccgccgacccccgccgctttagccacggggaactctggggacagagcttaatgtggccagggcagggctggttagaagaggtcagggcccacgctgtggcaggaatcaaggtcaggaccccgagagggaactgagggcagcctaaccaccaccctcaccaccattcccgtcccccaacaccaaccccacccccatcccccattcccatccccacccccacccctatcctggcagaatccgggctttgcccctggtatcaagtcacggaagctccgggaatggcggccaggcacgttctgaggggacaggctgacctggaggaccagaggcccccggaggagcactgaaggagaagatctgccagtgggtctccattgcccagctcctgcccacactcccgcctgttgccctgaccagagtcatcatgcctcttgagcagaggagtcagcactgcaagcctgaagaaggccttgaggcccgaggagaggccctgggcctggtgggtgcgcaggctcctgctactgaggagcaggaggctgcctcctcctcttctactctagttgaagtcaccctgggggaggtgcctgctgccgagtcaccagatcctccccagagtcctcagggagcctccagcctccccactaccatgaactaccctctctggagccaatcctatgaggactccagcaaccaagaagaggaggggccaagcaccttccctgacctggagtccgagttccaagcagcactcagtaggaaggtggccgagttggttcattttctgctcctcaagtatcgagccagggagccggtcacaaaggcagaaatgctggggagtgtcgtcggaaattggcagtatttctttcctgtgatcttcagcaaagcttccagttccttgcagctggtctttggcatcgagctgatggaagtggaccccatcggccacttgtacatctttgccacctgcctgggcctctcctacgatggcctgctgggtgacaatcagatcatgcccaaggcaggcctcctgataatcgtcctggccataatcgcaagagagggcgactgtgcccctgaggagaaaatctgggaggagctgagtgtgttagaggtgtttgaggggagggaagacagtatcttgggggatcccaagaagctgctcacccaacatttcgtgcaggaaaactacctggagtaccggcaggtccccggcagtgatcctgcatgttatgaattcctgtggggtccaagggccctcgttgaaaccagctatgtgaaagtcctgcaccatatggtaaagatcagtggaggacctcacatttcctacccacccctgcatgagtgggttttgagagagggggaagagtgagtctgagcacgagttgcagccagggccagtgggagggggtctgggccagtgcaccttccggggccgcatcccttagtttccactgcctcctgtgacgtgaggcccattcttcactctttgaagcgagcagtcagcattcttagtagtgggtttctgttctgttggatgactttgagattattctttgtttcctgttggagttgttcaaatgttccttttaacggatggttgaatgagcgtcagcatccaggtttatgaatgacagtagtcacacatagtgctgtttatatagtttaggagtaagagtcttgttttttactcaaattgggaaatccattccattttgtgaattgtgacataataatagcagtggtaaaagtatttgcttaaaattgtgagcgaattagcaataacatacatgagataactcaagaaatcaaaagatagttgattcttgccttgtacctcaatctattctgtaaaattaaacaaatatgcaaaccaggatttccttgacttctttgagaatgcaagcgaaattaaatctgaataaataattcttcctcttc

SEQ ID NO: 155348 - DNA, 853 bp, Artificial Sequence
  derived and/or modified sequence
agcaacgagcgacggcctgacgtcggcggagggaagccggcccaggctcggtgaggaggcaagtcctgcagcctcagcatgcgctggccggatgtaccctgaggtgccctctcacttcctccttcaggttctgaggggacaggctgacctggaggaccagaggcccccggaggagcactgaaggagaagatctgccagtgggtctccattgcccagctcctgcccacactcccgcctgttgccctgaccagagtcatcatgcctcttgagcagaggagtcagcactgcaagcctgaagaaggccttgaggcccgaggagaggccctgggcctggtgggtgcgcaggctcctgctactgaggagcaggaggctgcctcctcctcttctactctagttgaagtcaccctgggggaggtgcctgctgccgagtcaccagatcctccccagagtcctcagggagcctccagcctccccactaccatgaactaccctctctggagccaatcctatgaggactccagcaaccaagaagaggaggggccaagcaccttccctgacctggagtccgagttccaagcagcactcagtaggaaggtggccgagttggttcattttctgctcctcaagtatcgagccagggagccggtcacaaaggcagaaatgctggggagtgtcgtcggaaattggcagtatttctttcctgtgatcttcagcaaagcttccagttccttgcagctggtctttggcatcgagctgatggaagtggaccccatcggccacttgtacatctttgccacctgcctgggcctctcctacgatggcctgctgggtgacaatcagatcatgcccaagg

SEQ ID NO: 155349 - DNA, 945 bp, Artificial Sequence
  derived and/or modified sequence
atgcccctggagcagcggagccagcactgcaagcccgaggagggcctggaagcccgcggtgaggctttaggtctagtgggagcccaagccccagcaaccgaggaacaagaagccgcatccagctccagtacactcgttgaagtgaccctgggagaggttcctgccgccgagtcacccgaccctccccagagtccccagggggctagttcgctccctactaccatgaactacccactctggtcccagagttacgaagattctagcaaccaggaggaggaggggcctagtacgtttccagatcttgaatcagagtttcaggctgccttgtctagaaaggtggcagaactcgttcactttctgttattaaaatatagagctcgagagcccgtcacgaaggccgaaatgttgggatccgtcgtcgggaattggcaatatttcttccccgtcattttcagcaaggcttcttccagcctgcagctggtgttcggaattgaacttatggaagttgaccccattgggcatctttatatctttgctacgtgcctcggtttgagttatgacggactcttaggggataatcagataatgccaaaagcgggcctgcttatcatcgtacttgctattattgcacgtgagggtgactgcgctcccgaggagaaaatctgggaggagctgtcagtgctcgaggtattcgaggggcgcgaggatagcatcctcggggatcccaaaaagttgctgactcaacattttgtccaagagaattacctggaatatcgccaggtgccgggatcggacccggcgtgctacgagttcctatggggcccacgcgccctagttgagactagctatgtgaaggtcttgcaccatatggtgaagatttctggagggccccacatttcctaccccccattgcatgaatgggttcttcgggaaggggaagagtag

SEQ ID NO: 155350 - DNA, 945 bp, Artificial Sequence
  derived and/or modified sequence
atgcccctggagcagcggagccagcactgcaagcccgaggagggcctggaagccagaggagaggcactggggctggttggcgcacaggcccccgcaaccgaggagcaggaagccgcctcgtcttcaagcactttagtagaagtgactctcggggaggtccccgctgccgagtcacctgatccacctcagtcaccccagggggcttcatctctgccaactactatgaactaccccttgtggagtcagtcttacgaggactcgtctaaccaagaagaggaaggacccagtaccttccctgacctggagtcggagttccaggcagccttaagcaggaaggtggccgagctggtgcattttctcttactgaaatatcgagctagagagcccgtgaccaaagccgaaatgttagggtccgtcgtaggcaattggcagtatttcttcccggtgattttcagcaaggcctccagctccctgcaactggtcttcggtattgagctgatggaggtggacccaatcgggcacctgtatatcttcgctacttgcttaggattatcttatgacggcttgctgggagacaaccagatcatgcctaaagctggcttgcttatcatcgttctagccataatcgcgagagagggggattgcgcccccgaggagaagatctgggaggaactgtccgtcttagaggtgtttgaaggcagagaagacagcatactgggcgaccccaaaaagcttctcacacagcactttgtgcaagagaactaccttgaatatagacaagtgccaggctccgaccctgcctgctatgaattcctctggggaccacgggcactggtagagacttcttacgtaaaggtgttgcaccatatggtcaaaattagcggcggcccgcacatctcttatccaccactgcacgaatgggtcctccgggagggtgaagagtag

SEQ ID NO: 155351 - DNA, 597 bp, Artificial Sequence
  derived and/or modified sequence
atgcccctggagcagcggagccagcactgcaagcccgaggagggcctggaagcccggggcgaagccctcggtctggtcggagctcaggcaccggccactgaagaacaagaggccgcctcctcaagttctacgctggtggaagtgaccttgggagaagtgccagccgccgaatcccccgatcctccacagtccccccaaggggcttcgagcctgcctaccactatgaattaccctctgtggtcccagtcttatgaagattcatcgaatcaggaagaagaagggcctagtacctttcctgacctggagtctgaatttcaggctgctttgagtaggaaagtggccgaactggtgcactttctgctgttgaaatatagagctagggaaccagttacgaaggccgaaatgctaggcagtgtggtcggcaactggcaatacttctttccagtaatattttccaaggcgagttccagtttgcagcttgtgttcgggatcgaattgatggaagttgacccaataggccatttgtatatttttgccacgtgcctgggactctcctacgacgggttgcttggcgataatcagataatgcccaagtag

SEQ ID NO: 155352 - DNA, 945 bp, Artificial Sequence
  derived and/or modified sequence
atgccactcgaacagcggtctcagcattgcaagcccgaagaaggcttggaagcacgcggagaagcgttaggcttggtcggggctcaagctccagcgaccgaagaacaggaggccgcttcatcctcctccacattggtcgaggtgacgttaggcgaagtgcctgctgccgaatcccccgacccacctcagtccccccaaggagcgagctcattgcccaccactatgaactaccccctgtggtcccaatcgtacgaagactcctcaaatcaggaagaagagggtcctagtacattcccagacttagaaagcgagttccaggctgcactcagtcggaaagttgccgagctcgtgcactttctgctgctgaaatacagggcaagggagccggtcactaaggccgaaatgttggggtcagtggtcggcaattggcagtacttctttccagttatcttcagcaaggccagctcctctttgcaactggtgtttgggatagagctgatggaagtcgatccgattgggcacctgtacatttttgctacatgtttaggactttcttacgatgggttactgggggacaaccagatcatgccgaaggcaggtctcctgattatcgtgcttgcaattattgccagagaaggagactgtgcccctgaggagaaaatctgggaagaactgagtgtgttagaggtgtttgaaggacgggaggatagtatcctaggtgatcctaaaaagttactaacccaacactttgttcaagagaactacctggaatacagacaagttcccggttcggacccagcctgctacgaattcctttggggacccagggcactggtcgagacatcatatgtcaaagtgctccaccacatggtcaagatctcaggtggtccacatataagctacccccctctgcatgaatgggtcctgcgggagggagaggagtag

SEQ ID NO: 155353 - DNA, 945 bp, Artificial Sequence
  derived and/or modified sequence
atgcccctcgaacagcggagccagcattgtaaacctgaggagggcctcgaagcccgaggcgaagcgttaggtctggtgggagcccaagctcccgcaaccgaggaacaagaggcggcatcttcttctagcaccctggtagaagtaactctgggcgaagtgcccgctgcagagtctcctgaccctccacagtccccccagggagcatcaagcctgcctaccacaatgaattatccactttggtcacaaagctatgaggattcctcaaatcaggaggaggagggaccttccactttccccgatctggagtccgaattccaggcagccttgtcaagaaaggtggccgagctagtgcatttcctcctgctcaagtacagggcgagggagcctgtgaccaaagcggagatgctcgggagtgtcgtcggaaactggcagtacttcttccctgtgatcttctcaaaggcatcttccagcctgcagctggtgtttggcattgagctgatggaggtggatccaattggccacctgtatatctttgcaacctgtctgggcctcagctatgatggtctcctgggcgataatcagatcatgcccaaagctggcctgctcattattgtcctcgcgatcattgccagggagggtgactgtgcaccagaagaaaagatctgggaagaattaagcgtcctggaagtctttgaggggagagaggattcaattctgggagaccctaagaagttgctgactcagcatttcgtgcaggaaaattacctcgagtaccgccaggtgccaggatcggacccagcgtgctatgagtttctttgggggcctcgggcactcgtggagaccagctacgtgaaagtgctgcaccacatggttaagattagtgggggtcctcatatttcttacccccctctgcatgagtgggtgctcagggaaggagaagagtag

SEQ ID NO: 155354 - DNA, 597 bp, Artificial Sequence
  derived and/or modified sequence
atgccgctggaacaaaggtctcagcactgcaagcctgaggaaggcctagaggctcggggtgaggccctcggactcgtcggagcccaggctccagcgacggaagagcaggaggccgcttcatcgagtagcaccctagtcgaagttacgcttggcgaggtgcccgctgcagaatccccggaccccccacagagcccgcaaggtgcatcaagtttgccaactaccatgaactacccactgtggtcccagagctatgaagatagctcaaaccaggaggaagagggcccaagcacctttccagatctggagagtgagttccaggctgcactcagccggaaagtcgccgagctggttcacttcctcctgctgaaatatcgcgcacgggagccggtaactaaagctgaaatgctcggatctgtggtgggaaattggcagtacttttttccggtcattttttcgaaagcctcctcctcactacagctcgtatttggcatagaactcatggaagtggacccaatcggccacctatacatctttgccacttgtttaggactgtcttacgacggcctactgggcgataaccagatcatgcctaaatag

SEQ ID NO: 155355 - DNA, 945 bp, Artificial Sequence
  derived and/or modified sequence
atgcccctggagcagagaagccagcactgcaagcccgaggagggcctggaggccagaggcgaggccctgggcctggtgggcgcccaggcccccgccaccgaggagcaggaggccgccagcagcagcagcaccctggtggaggtgaccctgggcgaggtgcccgccgccgagagccccgaccccccccagagcccccagggcgccagcagcctgcccaccaccatgaactaccccctgtggagccagagctacgaggacagcagcaaccaggaggaggagggccccagcaccttccccgacctggagagcgagttccaggccgccctgagcagaaaggtggccgagctggtgcacttcctgctgctgaagtacagagccagagagcccgtgaccaaggccgagatgctgggcagcgtggtgggcaactggcagtacttcttccccgtgatcttcagcaaggccagcagcagcctgcagctggtgttcggcatcgagctgatggaggtggaccccatcggccacctgtacatcttcgccacctgcctgggcctgagctacgacggcctgctgggcgacaaccagatcatgcccaaggccggcctgctgatcatcgtgctggccatcatcgccagagagggcgactgcgcccccgaggagaagatctgggaggagctgagcgtgctggaggtgttcgagggcagagaggacagcatcctgggcgaccccaagaagctgctgacccagcacttcgtgcaggagaactacctggagtacagacaggtgcccggcagcgaccccgcctgctacgagttcctgtggggccccagagccctggtggagaccagctacgtgaaggtgctgcaccacatggtgaagatcagcggcggcccccacatcagctacccccccctgcacgagtgggtgctgagagagggcgaggagtag

SEQ ID NO: 155356 - DNA, 597 bp, Artificial Sequence
  derived and/or modified sequence
atgcccctggagcagagaagccagcactgcaagcccgaggagggcctggaggccagaggcgaggccctgggcctggtgggcgcccaggcccccgccaccgaggagcaggaggccgccagcagcagcagcaccctggtggaggtgaccctgggcgaggtgcccgccgccgagagccccgaccccccccagagcccccagggcgccagcagcctgcccaccaccatgaactaccccctgtggagccagagctacgaggacagcagcaaccaggaggaggagggccccagcaccttccccgacctggagagcgagttccaggccgccctgagcagaaaggtggccgagctggtgcacttcctgctgctgaagtacagagccagagagcccgtgaccaaggccgagatgctgggcagcgtggtgggcaactggcagtacttcttccccgtgatcttcagcaaggccagcagcagcctgcagctggtgttcggcatcgagctgatggaggtggaccccatcggccacctgtacatcttcgccacctgcctgggcctgagctacgacggcctgctgggcgacaaccagatcatgcccaagtag

SEQ ID NO: 155357 - protein, 33 aa, Artificial Sequence
  derived and/or modified sequence
MPLEQRSQHCKPEEGLEARGEALGLVGAQAPAT

SEQ ID NO: 155358 - protein, 314 aa, Artificial Sequence
  derived and/or modified sequence
MPLEQRSQHCKPEEGLEARGEALGLVGAQAPATEEQEAASSSSTLVEVTLGEVPAAESPDPPQSPQGASSLPTTMNYPLWSQSYEDSSNQEEEGPSTFPDLESEFQAALSRKVAKLVHFLLLKYRAREPVTKAEMLGSVVGNWQYFFPVIFSKASDSLQLVFGIELMEVDPIGHVYIFATCLGLSYDGLLGDNQIMPKTGFLIIILAIIAKEGDCAPEEKIWEELSVLEVFEGREDSIFGDPKKLLTQYFVQENYLEYRQVPGSDPACYEFLWGPRALIETSYVKVLHHMVKISGGPRISYPLLHEWALREGEE

SEQ ID NO: 155359 - protein, 201 aa, Artificial Sequence
  derived and/or modified sequence
MPLEQRSQHCKPEEGLEARGEALGLVGAQAPATEEQEAASSSSTLVEVTLGEVPAAESPDPPQSPQGASSLPTTMNYPLWSQSYEDSSNQEEEGPSTFPDLESEFQAALSRKVAKLVHFLLLKYRAREPVTKAEMLGSVVGNWQYFFPVIFSKASDSLQLVFGIELMEVDPIGHVYIFATCLGLSYDGLLGDNQIMPKTGF

SEQ ID NO: 155360 - protein, 235 aa, Artificial Sequence
  derived and/or modified sequence
MPLEQRSQHCKPEEGLEARGEALGLVGAQAPATEEQEAASSSSTLVEVTLGEVPAAESPDPPQSPQGASSLPTTMNYPLWSQSYEDSSNQEEEGPSTFPDLESEFQAALSRKVAKLVHFLLLKYRAREPVTKAEMLGSVVGNWQYFFPVIFSKASDSLQLVFGIELMEVDPIGHVYIFATCLGLSYDGLLGDNQIMPKTGFLIIILAIIAKEGDCAPEEKIWEELSVLEVFEGRE

SEQ ID NO: 155361 - DNA, 945 bp, Artificial Sequence
  derived and/or modified sequence
atgccccttgagcagcgatcacagcattgcaagcccgaggaggggctggaggctcgtggggaagctttgggtctcgtgggtgcacaggctcctgccaccgaggagcaggaggctgcaagtagcagcagtacgctggtcgaggtcacacttggcgaggtgcctgccgctgaatctccagaccccccgcagtcaccacaaggtgccagcagtctgcccaccacgatgaactacccactttggtcccagagctatgaggatagtagcaatcaggaggaggaggggccgtctacttttcccgacctggagtccgagttccaggccgcccttagccggaaagtggccaagttagtgcactttctactcctgaaatatcgagcacgcgagcctgtgaccaaggctgaaatgcttgggagtgtagtaggaaattggcaatatttcttcccggtgattttttctaaggcatctgactcccttcaactagtctttggtatagagttaatggaggtggatcccatcggacatgtgtacatttttgctacttgtctgggcctctcatacgatggccttctcggtgataaccagatcatgcctaaaaccggatttctcatcatcatcctggccatcatcgccaaagagggtgactgtgcacccgaagagaagatttgggaagaactgtccgtcctggaggttttcgaagggcgagaggacagtatttttggcgatcccaaaaagctcctgacgcagtatttcgtgcaggaaaattacctcgagtaccggcaggttccaggatccgatcccgcctgttacgaatttctgtggggcccccgggcgctgatcgagacatcttatgtgaaggtgttgcatcacatggtgaagatcagtggtggtccgagaatttcttatcctctactgcatgaatgggccctccgtgagggagaggaatag

SEQ ID NO: 155362 - DNA, 606 bp, Artificial Sequence
  derived and/or modified sequence
atgcctctggagcagagaagtcagcactgcaagccagaggaggggcttgaggcccgaggtgaagcgctcggtttggtgggcgcacaggccccagctacagaagagcaagaagcagcttccagcagtagcactctggttgaggtgactcttggtgaagtgcccgctgcagagtctcccgacccccctcagtcccctcagggagcatcgtcccttccgacaactatgaattaccccctctggtcccaatcttacgaagattcttcaaatcaggaggaggaagggccatccacgttccctgatttggaaagtgagttccaggctgcactgtccaggaaggtggccaagttggtacactttctgctgctcaagtaccgcgcaagagagccagttactaaagccgaaatgctgggatcagttgtcggcaactggcagtacttttttccggtgattttctcaaaggcgtccgattctctccagctggttttcggcatcgagttgatggaggtggatcccatcggccatgtgtacattttcgcaacatgcctaggcctcagctacgacgggctgctgggggataaccaaattatgcctaagaccgggttctag

SEQ ID NO: 155363 - DNA, 708 bp, Artificial Sequence
  derived and/or modified sequence
atgcccttggagcagaggtcccaacattgtaagccggaagaggggctcgaggcgcgtggggaagcactgggcctggtcggagcccaggccccagccaccgaggaacaagaggccgcttccagcagtagcaccttggtggaggtaactctcggggaggtccccgcagcagaatctcctgaccccccacaatccccccaaggcgcatcttctctgcctacgaccatgaactatccgttgtggtcacagagctacgaggatagcagcaatcaagaagaggaaggaccgtcaacttttcctgacttggaaagtgaattccaggccgctctgagcaggaaggtggctaagttagtgcacttcctgctgctgaagtacagggcgcgagaaccagtgactaaagccgagatgctgggatcagtggtgggaaactggcaatattttttcccagttatttttagcaaggcctcggacagcctgcaactggtgttcggtatcgaattaatggaagtggaccctattggacatgtttacatttttgccacttgtctcggcctgagctacgatggactgctgggcgataatcaaataatgcctaagaccggtttcctgataattatactggcgataatagccaaggagggcgactgcgcccctgaagaaaagatctgggaggaattgagtgtccttgaagtcttcgaagggagggaatag

SEQ ID NO: 155364 - DNA, 945 bp, Artificial Sequence
  derived and/or modified sequence
atgcccctggagcagaggagccagcactgcaagccagaggagggcctggaggcccggggggaggccctgggcctggtgggcgcccaggccccagccacagaggagcaggaggccgccagcagcagcagcaccctggtggaggtgaccctgggggaggtgcctgctgctgagagcccagaccccccccagagcccccagggcgccagcagcctgcccaccaccatgaactaccccctgtggagccagagctatgaggacagcagcaaccaggaggaggagggccccagcaccttcccagacctggagagcgagttccaggccgccctgagcaggaaggtggccaagctggtgcacttcctgctgctgaagtaccgggcccgggagcctgtgaccaaggccgagatgctgggctctgtggtgggcaactggcagtacttcttccctgtgatcttcagcaaggccagtgacagcctgcagctggtgtttggcatcgagctgatggaggtggaccccatcggccacgtgtacatctttgccacctgcctgggcctgtcctatgatggcctgctgggggacaaccagatcatgcccaagacaggcttcctgatcatcatcctggccatcatcgccaaggagggggactgtgcccctgaggagaagatctgggaggagctgtctgtgctggaggtgtttgagggcagagaagattccatctttggagaccccaagaagctgctgacccagtactttgtgcaggagaactacctggagtaccggcaggtgcccggcagtgaccctgcctgctatgagttcctgtggggcccccgggccctgattgagaccagctatgtgaaggtgctgcaccacatggtgaagatcagcggcggcccccgcatctcctaccccctgctgcacgagtgggccctgcgggagggggaggagtag

SEQ ID NO: 155365 - DNA, 606 bp, Artificial Sequence
  derived and/or modified sequence
atgcccctggagcagaggagccagcactgcaagccagaggagggcctggaggcccggggggaggccctgggcctggtgggcgcccaggccccagccacagaggagcaggaggccgccagcagcagcagcaccctggtggaggtgaccctgggggaggtgcctgctgctgagagcccagaccccccccagagcccccagggcgccagcagcctgcccaccaccatgaactaccccctgtggagccagagctatgaggacagcagcaaccaggaggaggagggccccagcaccttcccagacctggagagcgagttccaggccgccctgagcaggaaggtggccaagctggtgcacttcctgctgctgaagtaccgggcccgggagcctgtgaccaaggccgagatgctgggctctgtggtgggcaactggcagtacttcttccctgtgatcttcagcaaggccagtgacagcctgcagctggtgtttggcatcgagctgatggaggtggaccccatcggccacgtgtacatctttgccacctgcctgggcctgtcctatgatggcctgctgggggacaaccagatcatgcccaagacaggcttctag

SEQ ID NO: 155366 - DNA, 708 bp, Artificial Sequence
  derived and/or modified sequence
atgcccctggagcagaggagccagcactgcaagccagaggagggcctggaggcccggggggaggccctgggcctggtgggcgcccaggccccagccacagaggagcaggaggccgccagcagcagcagcaccctggtggaggtgaccctgggggaggtgcctgctgctgagagcccagaccccccccagagcccccagggcgccagcagcctgcccaccaccatgaactaccccctgtggagccagagctatgaggacagcagcaaccaggaggaggagggccccagcaccttcccagacctggagagcgagttccaggccgccctgagcaggaaggtggccaagctggtgcacttcctgctgctgaagtaccgggcccgggagcctgtgaccaaggccgagatgctgggctctgtggtgggcaactggcagtacttcttccctgtgatcttcagcaaggccagtgacagcctgcagctggtgtttggcatcgagctgatggaggtggaccccatcggccacgtgtacatctttgccacctgcctgggcctgtcctatgatggcctgctgggggacaaccagatcatgcccaagacaggcttcctgatcatcatcctggccatcatcgccaaggagggggactgtgcccctgaggagaagatctgggaggagctgtctgtgctggaggtgtttgagggccgggagtag

SEQ ID NO: 155367 - DNA, 1740 bp, Artificial Sequence
  derived and/or modified sequence
gaggtcagaagaccgcgagattctcgccctgagcaacgagcgacggcctgacgtcggcggagggaagccggcccaggctcggtgaggaggcaaggttctgaggggacaggctgacctggaggaccagaggcccccggaggagcactgaaggagaagatctgccagtgggtctccattgcccagctcctgcccacactcccgcctgttgccctgaccagagtcatcatgcctcttgagcagaggagtcagcactgcaagcctgaagaaggccttgaggcccgaggagaggccctgggcctggtgggtgcgcaggctcctgctactgaggagcaggaggctgcctcctcctcttctactctagttgaagtcaccctgggggaggtgcctgctgccgagtcaccagatcctccccagagtcctcagggagcctccagcctccccactaccatgaactaccctctctggagccaatcctatgaggactccagcaaccaagaagaggaggggccaagcaccttccctgacctggagtctgagttccaagcagcactcagtaggaaggtggccaagttggttcattttctgctcctcaagtatcgagccagggagccggtcacaaaggcagaaatgctggggagtgtcgtcggaaattggcagtacttctttcctgtgatcttcagcaaagcttccgattccttgcagctggtctttggcatcgagctgatggaagtggaccccatcggccacgtgtacatctttgccacctgcctgggcctctcctacgatggcctgctgggtgacaatcagatcatgcccaagacaggcttcctgataatcatcctggccataatcgcaaaagagggcgactgtgcccctgaggagaaaatctgggaggagctgagtgtgttagaggtgtttgaggggagggaagacagtatcttcggggatcccaagaagctgctcacccaatatttcgtgcaggaaaactacctggagtaccggcaggtccccggcagtgatcctgcatgctatgagttcctgtggggtccaagggccctcattgaaaccagctatgtgaaagtcctgcaccatatggtaaagatcagtggaggacctcgcatttcctacccactcctgcatgagtgggctttgagagagggggaagagtgagtctgagcacgagttgcagccagggccagtgggagggggtttgggccagtgcaccttccggggccccatcccttagtttccactgcctcctgtgacgtgaggcccattcttcactctttgaagcgagcagtcagcattcttagtagtgggtttctgttctgttggatgactttgagattattctttgtttcctgttggagttgttcaaatgttccttttaacggatggttgaatgagcgtcagcatccaggtttatgaatgacagtagtcacacatagtgctgtttatatagtttaggagtaagagtcttgttttttattcagattgggaaatccattccattttgtgaattgtgacataataatagcagtggaaaaagtatttgcttaaaattgtgagcgaattagcaataacatacatgagataactcaagaaatcaaaagatagttgattcttgccttgtacctcaatctattctgtaaaattaaacaaatatgcaaaccaggatttccttgacttctttgagaatgcaagcgaaattaaatctgaataaataattcttcctcttca

SEQ ID NO: 155368 - DNA, 862 bp, Artificial Sequence
  derived and/or modified sequence
agcaacgagcgacggcctgacgtcggcggagggaagccggcccaggctcggtgaggaggcaagtcctgcagcctcagcatgcgctggccggatgtaccctgaggtgccctctcacttcctccttcaggttctgaggggacaggctgacctggaggaccagaggcccccggaggagcactgaaggagaagatctgccagtgggtctccattgcccagctcctgcccacactcccgcctgttgccctgaccagagtcatcatgcctcttgagcagaggagtcagcactgcaagcctgaagaaggccttgaggcccgaggagaggccctgggcctggtgggtgcgcaggctcctgctactgaggagcaggaggctgcctcctcctcttctactctagttgaagtcaccctgggggaggtgcctgctgccgagtcaccagatcctccccagagtcctcagggagcctccagcctccccactaccatgaactaccctctctggagccaatcctatgaggactccagcaaccaagaagaggaggggccaagcaccttccctgacctggagtctgagttccaagcagcactcagtaggaaggtggccaagttggttcattttctgctcctcaagtatcgagccagggagccggtcacaaaggcagaaatgctggggagtgtcgtcggaaattggcagtacttctttcctgtgatcttcagcaaagcttccgattccttgcagctggtctttggcatcgagctgatggaagtggaccccatcggccacgtgtacatctttgccacctgcctgggcctctcctacgatggcctgctgggtgacaatcagatcatgcccaagacaggcttcc

SEQ ID NO: 155369 - DNA, 921 bp, Artificial Sequence
  derived and/or modified sequence
gcccaggctcggtgaggaggcaagaatccgggctttgcccctggtatcaagtcacggaagctccgggaatggcggccaggcacgttctgaggggacaggctgacctggaggaccagaggcccccggaggagcactgaaggagaagatctgccagtgggtctccattgcccagctcctgcccacactcccgcctgttgccctgaccagagtcatcatgcctcttgagcagaggagtcagcactgcaagcctgaagaaggccttgaggcccgaggagaggccctgggcctggtgggtgcgcaggctcctgctactgaggagcaggaggctgcctcctcctcttctactctagttgaagtcaccctgggggaggtgcctgctgccgagtcaccagatcctccccagagtcctcagggagcctccagcctccccactaccatgaactaccctctctggagccaatcctatgaggactccagcaaccaagaagaggaggggccaagcaccttccctgacctggagtctgagttccaagcagcactcagtaggaaggtggccaagttggttcattttctgctcctcaagtatcgagccagggagccggtcacaaaggcagaaatgctggggagtgtcgtcggaaattggcagtacttctttcctgtgatcttcagcaaagcttccgattccttgcagctggtctttggcatcgagctgatggaagtggaccccatcggccacgtgtacatctttgccacctgcctgggcctctcctacgatggcctgctgggtgacaatcagatcatgcccaagacaggcttcctgataatcatcctggccataatcgcaaaagagggcgactgtgcccctgaggagaaaatctgggaggagctgagtgtgttagaggtgtttgaggggagggaaga

SEQ ID NO: 155370 - DNA, 945 bp, Artificial Sequence
  derived and/or modified sequence
atgcccctggagcagcggagccagcactgcaagcccgaggagggccttgaagccaggggcgaagcgctcgggctcgtcggcgcccaggcacccgccacggaagagcaagaggccgcatcaagttctagtactctggtggaggtgaccctgggtgaagtgcctgctgccgagtccccggatccaccacagtccccccagggagcctctagccttcccaccactatgaattaccctttatggtctcagtcctatgaagactcatctaatcaagaggaggaaggccccagtacgttcccagacctggagtccgagttccaggctgctctgagccgcaaggtagctaaattggttcattttctgctgctgaaataccgggcacgtgagcctgtgacgaaagccgaaatgctcggatctgtagtgggcaactggcaatacttctttcctgtaatcttttctaaagcgtctgacagcttacaactggtgtttgggattgagctaatggaggtggatccaatcggccacgtgtacatatttgctacttgtcttggactctcctacgacggcttgctaggtgataaccaaatcatgcccaagacaggctttcttataatcatattagctattattgcaaaagagggtgactgcgcccctgaggagaaaatctgggaagagctctctgtactcgaggtctttgaaggacgagaggattctatttttggggatccaaaaaagctgctcactcagtacttcgtgcaggagaattatctcgagtaccggcaggtgccaggcagcgatccagcatgctacgaattcctctggggaccgagagctctcattgaaaccagttacgtgaaggtactccatcatatggtgaagatcagtgggggaccacggataagttacccattactgcatgaatgggctctgagagagggtgaagagtag

SEQ ID NO: 155371 - DNA, 606 bp, Artificial Sequence
  derived and/or modified sequence
atgcccctggagcagcggagccagcactgcaagcccgaggagggcctcgaggcaaggggtgaagcacttgggctcgtgggcgcacaagcaccagctacggaggaacaggaggctgcctccagctcctcgaccctggttgaggtcaccctcggagaggtgcccgctgcagaatcacccgatcctccacaatctccccagggagcttcctccctcccaactaccatgaactacccattgtggagccagtcctatgaggacagtagcaatcaagaggaagaaggccctagtacatttcccgatctggaatctgaatttcaggctgctctgtccagaaaagttgcaaaactcgttcatttcttgctgctcaagtacagagctagagaaccggttaccaaggccgagatgctaggctcggtcgtgggtaactggcagtattttttccccgtgatcttctcgaaggcgtctgacagcctgcagcttgtgttcggaatcgaactcatggaagtggatcccatcggacatgtttacatttttgcgacctgtctcggattaagttatgatggcctattgggggataatcaaataatgcccaagacagggttctag

SEQ ID NO: 155372 - DNA, 708 bp, Artificial Sequence
  derived and/or modified sequence
atgcccctggagcagcggagccagcactgcaagcccgaggagggcctcgaggcgcgcggggaggcgctggggcttgtcggagcccaggcgccagcaaccgaagaacaggaggcggcgtcctcttcttctactttggttgaggttaccctcggcgaggtccctgcggcggagtccccagatcctcctcagtccccccaaggcgcgtcctccctgcccaccacaatgaactaccccctgtggtcccagagttacgaagatagctccaaccaggaagaagaagggccctcgacatttccagacctggaatcggagttccaggcagcactaagtcgaaaagtggccaagctggtgcatttcttgctgctgaaatatcgggcacgggagcctgtgactaaggccgaaatgctagggagcgtagtgggcaattggcagtattttttcccagtgatctttagcaaggcatcagattctctccaactggtgtttggcatcgaactgatggaggtggatccgattggacatgtgtatatattcgccacttgtttggggctgtcttacgatggcctgcttggcgacaatcagataatgcccaaaacaggattcttgataataattctggcaatcatcgccaaggagggtgattgcgcacctgaagaaaaaatctgggaagaactgagcgtcctggaggtgtttgaaggtagggagtag

SEQ ID NO: 155373 - DNA, 945 bp, Artificial Sequence
  derived and/or modified sequence
atgcctctggagcagcgatctcagcactgcaagccggaggaggggctcgaagcacgcggtgaagctctgggactcgttggagcccaggccccagctaccgaggagcaggaggctgcctccagctcttccacgctggttgaagtcacactcggcgaagtgccagctgctgaatcgccagacccccctcagtctccacagggggcaagctctctgccgaccacaatgaactaccctctgtggagccagtcgtacgaagacagttccaatcaggaggaagaggggccaagtacctttcccgatctggaaagcgaatttcaggccgcactaagcaggaaggtggctaaattggtgcatttcttacttctgaagtacagagcaagagaacctgtcaccaaagccgagatgcttgggtctgtggtggggaattggcagtacttttttcccgtgatcttcagtaaggcctctgatagcctgcaattggtgttcggcattgaactcatggaagttgaccccatcggtcatgtctacatcttcgctacatgcctggggttgagttacgacggactgcttggggacaaccagatcatgcctaagacaggattcctcatcattatcctagctataattgctaaagagggtgactgcgcccctgaagaaaaaatctgggaagaattgtctgtgctagaggtgttcgagggcagagaggattctatctttggtgatccgaagaagttactaacccagtacttcgtacaggagaactatctcgagtatagacaggtcccaggttccgacccggcatgttatgagttcctctggggccctcgcgctttgatagagacctcgtacgtgaaagtcctacaccatatggtgaagatcagtggaggacccaggataagttatcccctgttacacgaatgggcactcagagagggtgaggagtag

SEQ ID NO: 155374 - DNA, 606 bp, Artificial Sequence
  derived and/or modified sequence
atgccgttggaacagaggagtcagcactgcaagcctgaggagggcctggaggccagaggagaggcactgggcctcgtgggcgctcaggcacccgcaacagaagagcaggaggctgcctcatcttcttctacgttggttgaggtcaccttgggggaggtccccgcagcggagagtcccgatcctccacaaagtccccaaggggcttcctctcttcctaccacgatgaactatcccctctggtctcagagctacgaagactcttccaatcaagaagaagaaggccctagcacattcccagatttagagagtgaattccaggctgcactgagtagaaaggtggccaagctcgtgcattttttacttttaaaatatcgggcaagggaacccgtcacaaaagctgagatgttgggcagcgtggtagggaactggcagtacttttttcccgtcatcttttctaaagcctctgatagcctccagctggtgtttggaatcgagctgatggaggtggaccctatagggcacgtgtacattttcgccacatgtctgggactgagctacgacggcctgctgggcgacaatcaaattatgccgaagactggcttctag

SEQ ID NO: 155375 - DNA, 708 bp, Artificial Sequence
  derived and/or modified sequence
atgcccctagagcagaggagccagcattgtaagcctgaagaaggccttgaggctaggggcgaggcattaggcctggtcggcgcacaggccccagcgacagaagagcaagaggcagcctcttctagctcaacattagtagaagtgaccctcggcgaggtccctgctgcagagagtcccgatcctccccaatccccgcagggcgcatcctcactacctactaccatgaattatcctctctggtcccagtcctatgaggatagctctaaccaggaggaggaaggaccatctactttccccgatctcgagagcgaattccaggcggctctgtcccgcaaggtagctaaactggttcatttcctgctcctgaagtaccgcgcacgggagccagtcacaaaagcagagatgctcggctcagtggtgggtaactggcaatactttttccctgtcattttctcaaaggcatctgatagcctccagctggttttcggaatcgaactaatggaggtggatccaatcggtcatgtgtacattttcgcaacttgcttgggcctgtcttacgatggcctgctcggagacaatcagatcatgcctaagaccgggttcctgattatcatcctggcaattattgcgaaagagggcgattgtgctccggaggagaagatttgggaggagctttcggtgctggaggtgttcgagggaagggagtag

SEQ ID NO: 155376 - DNA, 945 bp, Artificial Sequence
  derived and/or modified sequence
atgcccctggagcagagaagccagcactgcaagcccgaggagggcctggaggccagaggcgaggccctgggcctggtgggcgcccaggcccccgccaccgaggagcaggaggccgccagcagcagcagcaccctggtggaggtgaccctgggcgaggtgcccgccgccgagagccccgaccccccccagagcccccagggcgccagcagcctgcccaccaccatgaactaccccctgtggagccagagctacgaggacagcagcaaccaggaggaggagggccccagcaccttccccgacctggagagcgagttccaggccgccctgagcagaaaggtggccaagctggtgcacttcctgctgctgaagtacagagccagagagcccgtgaccaaggccgagatgctgggcagcgtggtgggcaactggcagtacttcttccccgtgatcttcagcaaggccagcgacagcctgcagctggtgttcggcatcgagctgatggaggtggaccccatcggccacgtgtacatcttcgccacctgcctgggcctgagctacgacggcctgctgggcgacaaccagatcatgcccaagaccggcttcctgatcatcatcctggccatcatcgccaaggagggcgactgcgcccccgaggagaagatctgggaggagctgagcgtgctggaggtgttcgagggcagagaggacagcatcttcggcgaccccaagaagctgctgacccagtacttcgtgcaggagaactacctggagtacagacaggtgcccggcagcgaccccgcctgctacgagttcctgtggggccccagagccctgatcgagaccagctacgtgaaggtgctgcaccacatggtgaagatcagcggcggccccagaatcagctaccccctgctgcacgagtgggccctgagagagggcgaggagtag

SEQ ID NO: 155377 - DNA, 606 bp, Artificial Sequence
  derived and/or modified sequence
atgcccctggagcagagaagccagcactgcaagcccgaggagggcctggaggccagaggcgaggccctgggcctggtgggcgcccaggcccccgccaccgaggagcaggaggccgccagcagcagcagcaccctggtggaggtgaccctgggcgaggtgcccgccgccgagagccccgaccccccccagagcccccagggcgccagcagcctgcccaccaccatgaactaccccctgtggagccagagctacgaggacagcagcaaccaggaggaggagggccccagcaccttccccgacctggagagcgagttccaggccgccctgagcagaaaggtggccaagctggtgcacttcctgctgctgaagtacagagccagagagcccgtgaccaaggccgagatgctgggcagcgtggtgggcaactggcagtacttcttccccgtgatcttcagcaaggccagcgacagcctgcagctggtgttcggcatcgagctgatggaggtggaccccatcggccacgtgtacatcttcgccacctgcctgggcctgagctacgacggcctgctgggcgacaaccagatcatgcccaagaccggcttctag

SEQ ID NO: 155378 - DNA, 708 bp, Artificial Sequence
  derived and/or modified sequence
atgcccctggagcagagaagccagcactgcaagcccgaggagggcctggaggccagaggcgaggccctgggcctggtgggcgcccaggcccccgccaccgaggagcaggaggccgccagcagcagcagcaccctggtggaggtgaccctgggcgaggtgcccgccgccgagagccccgaccccccccagagcccccagggcgccagcagcctgcccaccaccatgaactaccccctgtggagccagagctacgaggacagcagcaaccaggaggaggagggccccagcaccttccccgacctggagagcgagttccaggccgccctgagcagaaaggtggccaagctggtgcacttcctgctgctgaagtacagagccagagagcccgtgaccaaggccgagatgctgggcagcgtggtgggcaactggcagtacttcttccccgtgatcttcagcaaggccagcgacagcctgcagctggtgttcggcatcgagctgatggaggtggaccccatcggccacgtgtacatcttcgccacctgcctgggcctgagctacgacggcctgctgggcgacaaccagatcatgcccaagaccggcttcctgatcatcatcctggccatcatcgccaaggagggcgactgcgcccccgaggagaagatctgggaggagctgagcgtgctggaggtgttcgagggcagagagtag

SEQ ID NO: 155379 - protein, 315 aa, Artificial Sequence
  derived and/or modified sequence
MSLEQRSPHCKPDEDLEAQGEDLGLMGAQEPTGEEEETTSSSDSKEEEVSAAGSSSPPQSPQGGASSSISVYYTLWSQFDEGSSSQEEEEPSSSVDPAQLEFMFQEALKLKVAELVHFLLHKYRVKEPVTKAEMLESVIKNYKRYFPVIFGKASEFMQVIFGTDVKEVDPAGHSYILVTALGLSCDSMLGDGHSMPKAALLIIVLGVILTKDNCAPEEVIWEALSVMGVYVGKEHMFYGEPRKLLTQDWVQENYLEYRQVPGSDPAHYEFLWGSKAHAETSYEKVINYLVMLNAREPICYPSLYEEVLGEEQEGV

SEQ ID NO: 155380 - protein, 114 aa, Artificial Sequence
  derived and/or modified sequence
MSLEQRSPHCKPDEDLEAQGEDLGLMGAQEPTGEEEETTSSSDSKEEEVSAAGSSSPPQSPQGGASSSISVYYTLWSQFDEGSSSQEEEEPSSSVDPAQLEFMFQEALKLKVAE

SEQ ID NO: 155381 - protein, 309 aa, Artificial Sequence
  derived and/or modified sequence
MSLEQRSPHCKPDEDLEAQGEDLGLMGAQEPTGEEEETTSSSDSKEEEVSAAGSSSPPQSPQGGASSSISVYYTLWSQFDEGSSSQEEEEPSSSVDPAQLEFMFQEALKLKVAELVHFLLHKYRVKEPVTKAEMLESVIKNYKRYFPVIFGKASEFMQVIFGTDVKEVDPAGHSYILVTALGLSCDSMLGDGHSMPKAALLIIVLGVILTKDNCAPEEVIWEALSVMGVYVGKEHMFYGEPRKLLTQDWVQENYLEYRQVPGSDPAHYEFLWGSKAHAETSYEKVINYLVMLNAREPICYPSLYEEVLG

SEQ ID NO: 155382 - protein, 196 aa, Artificial Sequence
  derived and/or modified sequence
MSLEQRSPHCKPDEDLEAQGEDLGLMGAQEPTGEEEETTSSSDSKEEEVSAAGSSSPPQSPQGGASSSISVYYTLWSQFDEGSSSQEEEEPSSSVDPAQLEFMFQEALKLKVAELVHFLLHKYRVKEPVTKAEMLESVIKNYKRYFPVIFGKASEFMQVIFGTDVKEVDPAGHSYILVTALGLSCDSMLGDGHSMP

SEQ ID NO: 155383 - protein, 97 aa, Artificial Sequence
  derived and/or modified sequence
MSLEQRSPHCKPDEDLEAQGEDLGLMGAQEPTGEEEETTSSSDSKEEEVSAAGSSSPPQSPQGGASSSISVYYTLWSQFDEGSSSQEEEEPSSSVDP

SEQ ID NO: 155384 - DNA, 948 bp, Artificial Sequence
  derived and/or modified sequence
atgagtttagagcagcgctctcctcattgtaagcctgatgaagaccttgaggcccagggtgaagatctcgggctaatgggcgcacaggagcctacaggagaggaagaggagactacatcctctagcgattctaaggaggaagaagttagcgcggctggatcctctagtccgcctcagagtccacaaggaggggcgagcagcagcatctctgtctactacaccctttggtcccagtttgatgaagggagtagtagccaggaggaagaagaaccatcttcgtcagtcgatcctgcccagctcgagtttatgttccaggaggctctgaagctcaaggtggcagaattagttcacttcctgctgcataaatacagagttaaagaacctgtaaccaaggccgagatgctcgagtctgttataaaaaattacaaacggtactttcccgtgattttcggcaaagcaagtgagtttatgcaagtgattttcgggactgacgtgaaggaagtcgatccagccgggcactcttacattctggttactgccctgggattatcttgcgatagcatgctgggcgatggtcattctatgcccaaagcagcattactgatcatcgtgttgggtgtgatactcacaaaggataattgcgccccagaagaagtcatttgggaagcacttagcgtgatgggcgtgtatgtcggcaaagaacacatgttctacggagagccgcgcaaactgctgacccaagattgggtacaggagaactacctggaatatcgacaggtgccaggaagcgatccggcacactatgaattcttgtggggcagcaaagcccacgccgaaacttcatatgaaaaagttatcaattatctggtgatgctcaacgccagggaacccatctgctacccatctctttatgaggaagtgcttggggaagaacaggaaggagtgtag

SEQ ID NO: 155385 - DNA, 345 bp, Artificial Sequence
  derived and/or modified sequence
atgtcactagagcaacgctcaccccattgcaagccagacgaggatctggaggctcaaggcgaagacctcgggcttatgggggcacaggagccaactggtgaggaggaagagactacctcctcatccgattccaaagaagaggaggtctctgccgctgggagctcctctccccctcaaagtcctcagggcggtgcgtcatcctcaattagcgtgtactacactctgtggtcccaatttgacgagggatccagttctcaagaggaggaggaacccagctccagcgtggatcctgcccagcttgaattcatgttccaggaggctctgaagctaaaggtcgccgagtag

SEQ ID NO: 155386 - DNA, 930 bp, Artificial Sequence
  derived and/or modified sequence
atgtctctcgagcagaggtcgccccattgcaagccagacgaggatctagaggcccagggcgaggacctcgggctgatgggcgcacaggaaccaactggggaagaagaagagacgacaagctcaagcgattctaaggaagaggaagttagcgcagctggttcctcttctccacctcagtccccccaggggggtgcgagcagctcgatatctgtgtactatacactgtggtctcaattcgatgagggaagcagcagccaggaggaagaggagccctcttcttctgtggacccggcacagctggagtttatgttccaggaggccctgaaactgaaggtagctgagctcgtgcacttcctcctccacaagtacagagtgaaagaacctgtgactaaggccgagatgctggagtctgttataaagaattacaagcgatatttccccgtgattttcggaaaagcgtcagaatttatgcaggtgatctttgggaccgatgttaaggaggtggatcccgcaggtcactcctatatactggtgaccgcccttgggctatcatgtgatagcatgctaggagatggtcattccatgccaaaagccgcactcttaatcatcgtgctgggcgtcatcctgactaaagataattgtgcacccgaagaggtgatctgggaggccctcagcgtgatgggcgtgtacgttggcaaagaacatatgttctacggagagcccagaaaactcctcacacaagactgggtgcaggagaattatctggaatatagacaggttcctggatcagacccggctcattacgagtttctctggggatccaaagcgcacgcagagactagttacgagaaggtgatcaattatctcgtgatgttaaacgccagggaacccatctgctacccatcactgtatgaggaggtcctcggatag

SEQ ID NO: 155387 - DNA, 591 bp, Artificial Sequence
  derived and/or modified sequence
atgtccctggaacaacgttctccacactgcaaacccgatgaagacttagaagctcaaggggaagacctggggctgatgggggcccaggaaccaactggcgaagaagaagaaactacatcatccagcgatagcaaggaggaagaagtgtctgctgccgggtcatcttcaccaccgcagtccccacaagggggggcgagttcctccataagtgtctattatacgttatggagccaatttgacgaagggtcctcttcccaggaagaggaagagccctcctcttcagtggacccagctcagttagagtttatgtttcaagaggccctgaagttgaaggtggccgagctggtgcatttcctgttgcataaatatcgggtgaaagaacctgtgaccaaggccgagatgttggaatcagtcataaagaactacaaacgttactttcccgtgatattcggtaaagcaagcgagttcatgcaagttattttcggaacggatgtcaaggaagtggatcctgcaggccatagttacatcctggtgacggcgctcgggttgagctgtgacagcatgttaggcgacggacatagtatgccctag

SEQ ID NO: 155388 - DNA, 294 bp, Artificial Sequence
  derived and/or modified sequence
atgtctctggaacaacgcagccctcactgtaaaccagacgaagatctggaagctcagggagaagacttaggtctgatgggagcgcaggagcccaccggtgaggaagaggagacaacaagtagctctgacagcaaagaagaagaagtatcagcagccggatcctcatccccaccacagagcccccagggtggtgcttcctccagcattagtgtgtattacaccctgtggtcccagtttgacgaggggagctcatcacaggaagaagaagagccatccagctccgttgacccctag

SEQ ID NO: 155389 - DNA, 948 bp, Artificial Sequence
  derived and/or modified sequence
atgagtctggagcaaaggagcccacactgcaagcctgatgaggacctggaagcccagggagaggatctgggcctcatgggggcccaagaacccacgggggaggaggaggagacaacgtcctccagtgattccaaggaggaggaggtgtccgctgccggttcctcgtcacccccccaatccccccagggcggcgcttcttcaagtattagcgtgtactacacgctttggtcacagttcgacgagggttcatcatcccaggaagaggaggaacccagcagctccgtggaccccgcgcagcttgagttcatgttccaggaagcactcaagttaaaggtggccgagctggtgcatttcctgcttcacaagtaccgagtcaaggagcctgtaaccaaggcggaaatgctggagagcgtgatcaagaactacaaaaggtacttccccgtgatctttgggaaggcttcagagtttatgcaggtgatcttcggtacagatgtgaaggaggttgaccccgcagggcactcttatattctggtcaccgcgctcgggctgtcatgcgattcgatgctgggggacggccacagtatgcctaaagctgctctgctgattattgtacttggagttattctgactaaggataactgcgcccctgaggaagttatctgggaagctctcagcgttatgggggtttatgtggggaaggagcacatgttctacggcgagccgaggaaacttttgacacaggattgggtacaggagaattatctcgagtacagacaggtacccgggagcgatccagcccattacgagtttctatggggaagcaaggcccacgcagagacttcttacgagaaggtgatcaactatctggtgatgctgaatgctcgagaaccaatatgctatcctagcctttacgaggaagtgctgggcgaggaacaggaaggggtttag

SEQ ID NO: 155390 - DNA, 948 bp, Artificial Sequence
  derived and/or modified sequence
atgagcctggagcagaggagcccccactgcaagccagatgaggacctggaggcccagggcgaggacctgggcctgatgggcgcccaggagcccaccggggaggaggaggagaccaccagcagcagtgacagcaaggaggaggaggtgtctgctgctggcagcagcagccccccccagagcccccagggcggggccagcagcagcatctctgtgtactacaccctgtggagccagtttgatgagggcagcagcagccaggaggaggaggagcccagcagctctgtggaccctgcccagctggagttcatgttccaggaggccctgaagctgaaggtggccgagctggtgcacttcctgctgcacaagtacagagtgaaggagcctgtgaccaaggccgagatgctggagagcgtcatcaagaactacaagcgctacttccctgtgatctttgggaaggccagcgagttcatgcaggtgatctttggaacagatgtgaaggaggtggaccctgctggccacagctacatcctggtgacagccctgggcctgagctgtgacagcatgctgggagatggccacagcatgcccaaggccgccctgctgatcatcgtgctgggcgtcatcctgaccaaggacaactgtgcccctgaggaggtgatctgggaggccctgtctgtgatgggcgtgtatgtgggcaaggagcacatgttctacggggagcccaggaagctgctgacccaggactgggtgcaggagaactacctggagtaccggcaggtgcccggcagtgaccctgcccactatgagttcctgtggggcagcaaggcccacgccgagaccagctatgagaaggtgatcaactacctggtgatgctgaatgcccgggagcccatctgctaccccagcctgtatgaggaggtgctgggggaggagcaggagggcgtgtag

SEQ ID NO: 155391 - DNA, 345 bp, Artificial Sequence
  derived and/or modified sequence
atgagcctggagcagaggagcccccactgcaagccagatgaggacctggaggcccagggcgaggacctgggcctgatgggcgcccaggagcccaccggggaggaggaggagaccaccagcagcagtgacagcaaggaggaggaggtgtctgctgctggcagcagcagccccccccagagcccccagggcggggccagcagcagcatctctgtgtactacaccctgtggagccagtttgatgagggcagcagcagccaggaggaggaggagcccagcagctctgtggaccctgcccagctggagttcatgttccaggaggccctgaagctgaaggtggccgagtag

SEQ ID NO: 155392 - DNA, 930 bp, Artificial Sequence
  derived and/or modified sequence
atgagcctggagcagaggagcccccactgcaagccagatgaggacctggaggcccagggcgaggacctgggcctgatgggcgcccaggagcccaccggggaggaggaggagaccaccagcagcagtgacagcaaggaggaggaggtgtctgctgctggcagcagcagccccccccagagcccccagggcggggccagcagcagcatctctgtgtactacaccctgtggagccagtttgatgagggcagcagcagccaggaggaggaggagcccagcagctctgtggaccctgcccagctggagttcatgttccaggaggccctgaagctgaaggtggccgagctggtgcacttcctgctgcacaagtacagagtgaaggagcctgtgaccaaggccgagatgctggagagcgtcatcaagaactacaagcgctacttccctgtgatctttgggaaggccagcgagttcatgcaggtgatctttggaacagatgtgaaggaggtggaccctgctggccacagctacatcctggtgacagccctgggcctgagctgtgacagcatgctgggagatggccacagcatgcccaaggccgccctgctgatcatcgtgctgggcgtcatcctgaccaaggacaactgtgcccctgaggaggtgatctgggaggccctgtctgtgatgggcgtgtatgtgggcaaggagcacatgttctacggggagcccaggaagctgctgacccaggactgggtgcaggagaactacctggagtaccggcaggtgcccggcagtgaccctgcccactatgagttcctgtggggcagcaaggcccacgccgagaccagctatgagaaggtgatcaactacctggtgatgctgaatgcccgggagcccatctgctaccccagcctgtatgaggaggtgctgggctag

SEQ ID NO: 155393 - DNA, 591 bp, Artificial Sequence
  derived and/or modified sequence
atgagcctggagcagaggagcccccactgcaagccagatgaggacctggaggcccagggcgaggacctgggcctgatgggcgcccaggagcccaccggggaggaggaggagaccaccagcagcagtgacagcaaggaggaggaggtgtctgctgctggcagcagcagccccccccagagcccccagggcggggccagcagcagcatctctgtgtactacaccctgtggagccagtttgatgagggcagcagcagccaggaggaggaggagcccagcagctctgtggaccctgcccagctggagttcatgttccaggaggccctgaagctgaaggtggccgagctggtgcacttcctgctgcacaagtacagagtgaaggagcctgtgaccaaggccgagatgctggagagcgtcatcaagaactacaagcgctacttccctgtgatctttgggaaggccagcgagttcatgcaggtgatctttggaacagatgtgaaggaggtggaccctgctggccacagctacatcctggtgacagccctgggcctgagctgtgacagcatgctgggagatggccacagcatgccctag

SEQ ID NO: 155394 - DNA, 294 bp, Artificial Sequence
  derived and/or modified sequence
atgagcctggagcagaggagcccccactgcaagccagatgaggacctggaggcccagggcgaggacctgggcctgatgggcgcccaggagcccaccggggaggaggaggagaccaccagcagcagtgacagcaaggaggaggaggtgtctgctgctggcagcagcagccccccccagagcccccagggcggggccagcagcagcatctctgtgtactacaccctgtggagccagtttgatgagggcagcagcagccaggaggaggaggagcccagcagctctgtggacccctag

SEQ ID NO: 155395 - DNA, 1805 bp, Artificial Sequence
  derived and/or modified sequence
ctgggggtcagagagaagggagaggcctccttctgaggggcggcttgataccggtggaggagctccaggaagcaggcaggccttggtctgagacagtgtcctcaggtcgcagagcagaggagacccaggcagtgtcagcagtgaaggttctcgggacaggctaaccaggaggacaggagccccaagaggccccagagcagcactgacgaagacctgcctgtgggtctccatcgcccagctcctgcccacgctcctgactgctgccctgaccagagtcatcatgtctctcgagcagaggagtccgcactgcaagcctgatgaagaccttgaagcccaaggagaggacttgggcctgatgggtgcacaggaacccacaggcgaggaggaggagactacctcctcctctgacagcaaggaggaggaggtgtctgctgctgggtcatcaagtcctccccagagtcctcagggaggcgcttcctcctccatttccgtctactacactttatggagccaattcgatgagggctccagcagtcaagaagaggaagagccaagctcctcggtcgacccagctcagctggagttcatgttccaagaagcactgaaattgaaggtggctgagttggttcatttcctgctccacaaatatcgagtcaaggagccggtcacaaaggcagaaatgctggagagcgtcatcaaaaattacaagcgctactttcctgtgatcttcggcaaagcctccgagttcatgcaggtgatctttggcactgatgtgaaggaggtggaccccgccggccactcctacatccttgtcactgctcttggcctctcgtgcgatagcatgctgggtgatggtcatagcatgcccaaggccgccctcctgatcattgtcctgggtgtgatcctaaccaaagacaactgcgcccctgaagaggttatctgggaagcgttgagtgtgatgggggtgtatgttgggaaggagcacatgttctacggggagcccaggaagctgctcacccaagattgggtgcaggaaaactacctggagtaccggcaggtgcccggcagtgatcctgcgcactacgagttcctgtggggttccaaggcccacgctgaaaccagctatgagaaggtcataaattatttggtcatgctcaatgcaagagagcccatctgctacccatccctttatgaagaggttttgggagaggagcaagagggagtctgagcaccagccgcagccggggccaaagtttgtggggtcagggccccatccagcagctgccctgccccatgtgacatgaggcccattcttcgctctgtgtttgaagagagcaatcagtgttctcagtggcagtgggtggaagtgagcacactgtatgtcatctctgggttccttgtctattgggtgatttggagatttatccttgctcccttttggaattgttcaaatgttcttttaatggtcagtttaatgaacttcaccatcgaagttaatgaatgacagtagtcacacatattgctgtttatgttatttaggagtaagattcttgcttttgagtcacatggggaaatccctgttattttgtgaattgggacaagataacatagcagaggaattaataatttttttgaaacttgaacttagcagcaaaatagagctcataaagaaatagtgaaatgaaaatgtagttaattcttgccttatacctctttctctctcctgtaaaattaaaacatatacatgtatacctggatttgcttggcttctttgagcatgtaagagaaataaaaattgaaagaat

SEQ ID NO: 155396 - DNA, 551 bp, Artificial Sequence
  derived and/or modified sequence
gtcactgacgtgcgcactgggggtcagagagaagggagaggcctccttctgaggggcggcttgataccggtggaggttctcgggacaggctaaccaggaggacaggagccccaagaggccccagagcagcactgacgaagacctgcctgtgggtctccatcgcccagctcctgcccacgctcctgactgctgccctgaccagagtcatcatgtctctcgagcagaggagtccgcactgcaagcctgatgaagaccttgaagcccaaggagaggacttgggcctgatgggtgcacaggaacccacaggcgaggaggaggagactacctcctcctctgacagcaaggaggaggaggtgtctgctgctgggtcatcaagtcctccccagagtcctcagggaggcgcttcctcctccatttccgtctactacactttatggagccaattcgatgagggctccagcagtcaagaagaggaagagccaagctcctcggtcgacccagctcagctggagttcatgttccaagaagcactgaaattgaaggtggctgag

SEQ ID NO: 155397 - DNA, 1139 bp, Artificial Sequence
  derived and/or modified sequence
gagaagggagaggcctccttctgaggggcggcttgataccggtggaggtaagctggccgaggctctgtgaggagtcaaggttctcgggacaggctaaccaggaggacaggagccccaagaggccccagagcagcactgacgaagacctgcctgtgggtctccatcgcccagctcctgcccacgctcctgactgctgccctgaccagagtcatcatgtctctcgagcagaggagtccgcactgcaagcctgatgaagaccttgaagcccaaggagaggacttgggcctgatgggtgcacaggaacccacaggcgaggaggaggagactacctcctcctctgacagcaaggaggaggaggtgtctgctgctgggtcatcaagtcctccccagagtcctcagggaggcgcttcctcctccatttccgtctactacactttatggagccaattcgatgagggctccagcagtcaagaagaggaagagccaagctcctcggtcgacccagctcagctggagttcatgttccaagaagcactgaaattgaaggtggctgagttggttcatttcctgctccacaaatatcgagtcaaggagccggtcacaaaggcagaaatgctggagagcgtcatcaaaaattacaagcgctactttcctgtgatcttcggcaaagcctccgagttcatgcaggtgatctttggcactgatgtgaaggaggtggaccccgccggccactcctacatccttgtcactgctcttggcctctcgtgcgatagcatgctgggtgatggtcatagcatgcccaaggccgccctcctgatcattgtcctgggtgtgatcctaaccaaagacaactgcgcccctgaagaggttatctgggaagcgttgagtgtgatgggggtgtatgttgggaaggagcacatgttctacggggagcccaggaagctgctcacccaagattgggtgcaggaaaactacctggagtaccggcaggtgcccggcagtgatcctgcgcactacgagttcctgtggggttccaaggcccacgctgaaaccagctatgagaaggtcataaattatttggtcatgctcaatgcaagagagcccatctgctacccatccctttatgaagaggttttggg

SEQ ID NO: 155398 - DNA, 887 bp, Artificial Sequence
  derived and/or modified sequence
gagaagggagaggcctccttctgaggggcggcttgataccggtggaggtaagctggccgaggctctgtgaggagtcaaggagctccaggaagcaggcaggccttggtctgagacagtgtcctcaggtcgcagagcagaggagacccaggcagtgtcagcagtgaaggttctcgggacaggctaaccaggaggacaggagccccaagaggccccagagcagcactgacgaagacctgcctgtgggtctccatcgcccagctcctgcccacgctcctgactgctgccctgaccagagtcatcatgtctctcgagcagaggagtccgcactgcaagcctgatgaagaccttgaagcccaaggagaggacttgggcctgatgggtgcacaggaacccacaggcgaggaggaggagactacctcctcctctgacagcaaggaggaggaggtgtctgctgctgggtcatcaagtcctccccagagtcctcagggaggcgcttcctcctccatttccgtctactacactttatggagccaattcgatgagggctccagcagtcaagaagaggaagagccaagctcctcggtcgacccagctcagctggagttcatgttccaagaagcactgaaattgaaggtggctgagttggttcatttcctgctccacaaatatcgagtcaaggagccggtcacaaaggcagaaatgctggagagcgtcatcaaaaattacaagcgctactttcctgtgatcttcggcaaagcctccgagttcatgcaggtgatctttggcactgatgtgaaggaggtggaccccgccggccactcctacatccttgtcactgctcttggcctctcgtgcgatagcatgctgggtgatggtcatagcatgcc

SEQ ID NO: 155399 - DNA, 594 bp, Artificial Sequence
  derived and/or modified sequence
agagagtagcgggggcctcgctgtgaggggcgggtcgatatcggtggagggaagcgggcccaggctctgtgaggaggcaaggagctccaggaagcaggcaggccttggtctgagacagtgtcctcaggtcgcagagcagaggagacccaggcagtgtcagcagtgaaggttctcgggacaggctaaccaggaggacaggagccccaagaggccccagagcagcactgacgaagacctgcctgtgggtctccatcgcccagctcctgcccacgctcctgactgctgccctgaccagagtcatcatgtctctcgagcagaggagtccgcactgcaagcctgatgaagaccttgaagcccaaggagaggacttgggcctgatgggtgcacaggaacccacaggcgaggaggaggagactacctcctcctctgacagcaaggaggaggaggtgtctgctgctgggtcatcaagtcctccccagagtcctcagggaggcgcttcctcctccatttccgtctactacactttatggagccaattcgatgagggctccagcagtcaagaagaggaagagccaagctcctcggtcgacccag

SEQ ID NO: 155400 - DNA, 1814 bp, Artificial Sequence
  derived and/or modified sequence
gtgcgcactgggggtcagagagaagggagaggcctccttctgaggggcggcttgataccggtggaggagctccaggaagcaggcaggccttggtctgagacagtgtcctcaggtcgcagagcagaggagacccaggcagtgtcagcagtgaaggttctcgggacaggctaaccaggaggacaggagccccaagaggccccagagcagcactgacgaagacctgcctgtgggtctccatcgcccagctcctgcccacgctcctgactgctgccctgaccagagtcatcatgtctctcgagcagaggagtccgcactgcaagcctgatgaagaccttgaagcccaaggagaggacttgggcctgatgggtgcacaggaacccacaggcgaggaggaggagactacctcctcctctgacagcaaggaggaggaggtgtctgctgctgggtcatcaagtcctccccagagtcctcagggaggcgcttcctcctccatttccgtctactacactttatggagccaattcgatgagggctccagcagtcaagaagaggaagagccaagctcctcggtcgacccagctcagctggagttcatgttccaagaagcactgaaattgaaggtggctgagttggttcatttcctgctccacaaatatcgagtcaaggagccggtcacaaaggcagaaatgctggagagcgtcatcaaaaattacaagcgctactttcctgtgatcttcggcaaagcctccgagttcatgcaggtgatctttggcactgatgtgaaggaggtggaccccgccggccactcctacatccttgtcactgctcttggcctctcgtgcgatagcatgctgggtgatggtcatagcatgcccaaggccgccctcctgatcattgtcctgggtgtgatcctaaccaaagacaactgcgcccctgaagaggttatctgggaagcgttgagtgtgatgggggtgtatgttgggaaggagcacatgttctacggggagcccaggaagctgctcacccaagattgggtgcaggaaaactacctggagtaccggcaggtgcccggcagtgatcctgcgcactacgagttcctgtggggttccaaggcccacgctgaaaccagctatgagaaggtcataaattatttggtcatgctcaatgcaagagagcccatctgctacccatccctttatgaagaggttttgggagaggagcaagagggagtctgagcaccagccgcagccggggccaaagtttgtggggtcagggccccatccagcagctgccctgccccatgtgacatgaggcccattcttcgctctgtgtttgaagagagcaatcagtgttctcagtggcagtgggtggaagtgagcacactgtatgtcatctctgggttccttgtctattgggtgatttggagatttatccttgctcccttttggaattgttcaaatgttcttttaatggtcagtttaatgaacttcaccatcgaagttaatgaatgacagtagtcacacatattgctgtttatgttatttaggagtaagattcttgcttttgagtcacatggggaaatccctgttattttgtgaattgggacaagataacatagcagaggaattaataatttttttgaaacttgaacttagcagcaaaatagagctcataaagaaatagtgaaatgaaaatgtagttaattcttgccttatacctctttctctctcctgtaaaattaaaacatatacatgtatacctggatttgcttggcttctttgagcatgtaagagaaataaaaattgaaagaataa

SEQ ID NO: 155401 - DNA, 948 bp, Artificial Sequence
  derived and/or modified sequence
atgagcctggagcagcggagcccccactgcaagcccgacgaggacttggaggctcagggagaagatctcggcctcatgggggcccaggaaccgacaggtgaggaagaggagaccaccagctcgtctgattcaaaagaggaggaggttagtgccgctggctcctctagtccaccccaaagcccccagggaggcgcctctagcagcatctccgtctattacacgttgtggagccagtttgatgaaggaagctccagccaggaagaggaggaacccagctcttcagtcgatcccgcccagttagaattcatgttccaggaggcgctcaaacttaaggtggccgagctggtccattttctgctacacaagtaccgggtaaaggagccagtgacgaaggcagaaatgctggagagtgtcattaaaaactataagaggtatttccccgttatcttcggaaaagctagcgagttcatgcaggtaatttttggcacagacgtgaaagaagtagatcctgctgggcattcttatattcttgtgaccgctctgggcctcagttgcgatagtatgctgggtgatgggcatagtatgcccaaagctgcattgctgattatcgtgcttggagtgatcctgaccaaggacaactgcgccccagaagaggttatttgggaggccctgagcgtcatgggagtttatgtgggaaaggagcacatgttttacggagagcctcggaagctgttgacacaggactgggtacaggagaactatcttgaatatcgccaagtccctggctctgaccctgcccactacgagtttctgtggggttcaaaggcccatgccgaaacatcttacgaaaaggtcatcaactacttagttatgctgaatgcccgagaacccatctgctacccttctctgtacgaggaagtgttaggcgaggagcaagaaggcgtctag

SEQ ID NO: 155402 - DNA, 345 bp, Artificial Sequence
  derived and/or modified sequence
atgagcctggagcagcggagcccccactgcaagcccgacgaggacttagaggctcagggcgaggacttggggctgatgggggctcaggagcccactggggaggaagaagagaccacctctagcagtgacagtaaggaggaggaagtctccgctgctggatcctcctcccccccgcagtctccgcaaggtggtgcctcaagcagtataagtgtttactacacgctttggagtcagtttgatgaggggtcctcatctcaggaggaagaggagccgagctcatccgtggacccggcccaactggaatttatgtttcaagaggcgctcaagcttaaggttgcggaatag

SEQ ID NO: 155403 - DNA, 930 bp, Artificial Sequence
  derived and/or modified sequence
atgagcctggagcagcggagcccccactgcaagcccgacgaggaccttgaagcccaaggcgaggacctggggttaatgggggcccaggaacctaccggcgaagaggaggagacgactagttctagcgatagcaaagaggaagaggtctctgctgctggctcttcatctccacctcagtctccacagggcggtgcaagcagttcaatctcagtgtattatacattatggtctcagtttgacgagggctcctcttctcaggaggaggaagagccttctagcagcgtggatccggcccagcttgaattcatgttccaagaggccctgaaactgaaggtggccgagctggtccattttctactgcataaatacagagttaaggaacccgtcactaaggccgaaatgctggagtcagtgatcaagaactacaagcggtactttcccgttatcttcggaaaggcatcagagttcatgcaggtcatctttggtactgatgtcaaggaggtggatccagcaggtcattcatacatcttagtgactgcactgggattatcctgcgactccatgctcggtgacggtcacagtatgcccaaagctgccctgctgatcatagtgctaggcgttattctgacaaaggacaattgcgcccctgaagaagtgatctgggaggccctctcagtcatgggagtgtatgtgggcaaggagcatatgttctatggggagccgagaaagttactgacgcaggactgggtccaggagaattacttggagtaccggcaggtgccaggctccgaccccgctcattacgagtttctgtggggcagtaaggcacacgctgagacatcctacgaaaaagtgattaactacctggttatgctgaacgcacgcgaaccaatttgctatccaagcctttatgaagaggttctggggtag

SEQ ID NO: 155404 - DNA, 591 bp, Artificial Sequence
  derived and/or modified sequence
atgagcctggagcagcggagcccccactgcaagcccgacgaggacctggaggcacagggcgaggatctcgggctgatgggagctcaagagccgacaggcgaggaggaagagacaacttcctctagcgactccaaggaagaggaggtctccgcagcagggtcatcttccccacctcagagtccccaggggggggcaagctcctcaatctctgtgtattacactctttggagccagttcgacgagggcagtagctcccaagaggaagaagagccctctagctctgttgacccggctcagctggagttcatgttccaagaagctctgaagctgaaagtggctgagttggtacattttttactccataaatatcgggtaaaggagccagtgaccaaagctgagatgctcgaatcagtgattaagaactacaagcggtacttcccagtgatctttggcaaggccagtgaatttatgcaagtgatctttgggactgacgtgaaagaagtcgaccctgcaggccatagctacatcctggttacagctcttggcctgtcctgtgactctatgttgggagatgggcactcaatgccctag

SEQ ID NO: 155405 - DNA, 294 bp, Artificial Sequence
  derived and/or modified sequence
atgagcctggagcagcggagcccccactgcaagcccgacgaggacctggaggcacagggggaggatctggggcttatgggtgctcaggaaccaactggcgaggaggaggagacaacatccagtagcgactccaaggaagaagaggtgagcgccgccggttcctcttcgcctccacagtcaccgcagggtggggcctcatcctctatcagcgtttattataccctgtggtcgcagttcgacgaggggtctagttctcaggaagaggaggaacctagctcctcagttgatccgtag

SEQ ID NO: 155406 - DNA, 948 bp, Artificial Sequence
  derived and/or modified sequence
atgagcctggagcagcggagcccccactgcaagcccgacgaggacttggaggcccaaggcgaagacttgggcttgatgggagcacaggagcctaccggagaggaagaagagacgacgtcatctagtgactctaaagaagaggaggtgagcgctgccgggagttctagtcccccccagtcacctcagggtggcgcgtcaagcagcatcagcgtctactacaccctgtggagccagtttgatgaggggtcaagctctcaagaggaggaggaacctagttcgtctgtggatcctgctcaactcgagttcatgttccaggaggccctgaaactgaaagtggccgaactggttcacttcctgctgcacaaatatcgggttaaggagcctgtgacaaaggcagagatgctagaaagtgtgataaagaactataagcgctatttcccagtaatcttcggtaaagcttctgagttcatgcaggtgatttttggcactgatgtgaaggaagtcgatccagctggccactcgtatatcttagtcacagctctcggacttagttgcgatagcatgctaggcgatggacactctatgcccaaagccgctctattaattatcgtacttggggtgatcttaactaaggataactgcgctccagaggaagttatctgggaggcactgagtgtgatgggggtgtacgttgggaaagaacatatgttctatggggagccccgcaagctgctgacccaagactgggtgcaggaaaattacttggagtatcggcaggtgcccggatccgatcccgcccactacgagtttctatggggaagcaaggcccatgccgaaacgtcttacgagaaagtcataaattacctggtcatgcttaatgctagagaaccaatctgttacccgagtctgtatgaggaggtactgggcgaggaacaagaaggggtatag

SEQ ID NO: 155407 - DNA, 948 bp, Artificial Sequence
  derived and/or modified sequence
atgtccctcgaacagagatccccacattgcaagcccgatgaagaccttgaagcccaaggtgaggaccttgggttaatgggcgcacaggagcccaccggcgaggaggaagaaacaactagctccagtgactccaaggaagaagaggtttccgcagccggttctagcagccctcctcagtcaccacaggggggtgcatcatcatcaataagtgtgtactacaccctctggtcccagtttgatgaaggttccagctctcaagaggaagaagaaccaagcagcagcgtggaccctgcgcagctggagttcatgtttcaggaggctcttaaactaaaagtcgctgagttggtacactttctactgcataaataccgggtgaaagagccagtgacaaaggccgagatgcttgagtcagttatcaaaaactataaacgctatttcccggtgatttttgggaaagccagcgagtttatgcaagtgattttcggtacggacgttaaagaggtagatcctgccggacacagctacattctggtgaccgctcttggcttgagctgtgacagtatgcttggcgacggtcactcaatgccgaaagcagcccttctgattatagtcctgggcgtcatcctgactaaggataactgtgccccagaggaagtcatctgggaggctctgtctgttatgggggtgtacgttgggaaagaacacatgttctatggtgagcctaggaaattgctgacacaggattgggtgcaggagaattacctggagtaccgccaggttccagggtctgatccagcacattacgagttcctgtggggatcaaaggctcatgccgagacatcctacgagaaagtcattaactacctcgtaatgctcaacgcaagagaaccaatatgctacccatcactgtacgaggaggttctgggtgaggaacaggagggggtgtag

SEQ ID NO: 155408 - DNA, 345 bp, Artificial Sequence
  derived and/or modified sequence
atgagcctagagcaacgctctccgcattgtaagcctgacgaggacctcgaggctcaaggggaggacctggggctcatgggagcgcaggagccaacgggggaggaggaagaaacaacatcaagttcggactcaaaggaagaagaagtctctgcagctggatcaagttcaccaccccagtcccctcagggaggggcatcctctagtataagcgtatactacacactctggtcgcagttcgacgagggatcatctagccaagaggaagaagaaccgagttcatccgtcgaccctgctcaactcgaatttatgtttcaggaggctctcaaactgaaggtagccgaatag

SEQ ID NO: 155409 - DNA, 930 bp, Artificial Sequence
  derived and/or modified sequence
atgagtctcgaacaaaggtccccacactgtaaaccggacgaagatcttgaagcacagggagaggatctgggactcatgggcgctcaggaaccaactggtgaggaggaggaaacaacctcaagctctgacagcaaagaggaggaagtgtcagctgcaggttcaagcagtcccccacagtctccacaaggaggggcttcatcctcaattagcgtctattatactctgtggtcccagtttgatgaggggtcttcatctcaggaagaggaggaacccagcagcagcgtggatccagcccagctggaattcatgttccaggaggccctgaagctgaaagttgccgagctcgttcactttctgctgcataagtatcgagtaaaggagcctgtgacgaaagccgaaatgcttgaaagcgtaattaagaactacaagcgctatttcccagtcatatttggaaaagctagcgagtttatgcaggttatcttcgggacagatgtcaaggaggtggacccagctggccattcatacattttagtgactgccctgggtttgtcatgtgactccatgttgggcgacgggcactccatgccgaaggccgctctgttgatcatcgtgctcggtgtcatcctgacaaaggacaactgcgctccagaagaggtgatatgggaggctctctccgtcatgggcgtgtacgtgggcaaagagcacatgttttacggtgagcctcggaaactcttaactcaagactgggtccaggagaactatctcgagtacagacaggtacctgggtccgatccagcccactatgagtttctctggggaagcaaggcccacgctgagacgtcctatgaaaaagttatcaactaccttgttatgcttaacgcaagggaacccatttgttatccgtctctctatgaagaagtcctcggatag

SEQ ID NO: 155410 - DNA, 591 bp, Artificial Sequence
  derived and/or modified sequence
atgtccttggagcagagaagtccacactgtaagcccgatgaggacctggaagctcagggagaggacctgggtttaatgggagcacaagaacctacaggtgaggaagaagagacgacctcgtcctcggacagtaaggaggaggaagtctctgcagccggatccagcagccctccccagtccccacagggtggcgcaagctcatccatatctgtgtattatacactctggtcacagtttgacgaaggcagctcgagccaggaggaggaggaacccagtagttcagtggatcccgctcaactcgagttcatgtttcaggaggccttaaaattaaaagtggctgagctcgttcacttcctcctacacaaatatagggtcaaggaacctgtcacaaaggccgagatgctggagtcagtgattaaaaactataagcgatattttcctgtgatcttcggcaaagccagcgaatttatgcaagtgattttcgggaccgacgtgaaagaggttgaccctgcagggcactcctatatcctagtcacggcactagggctgagctgcgatagcatgctgggcgacggtcattcaatgccttag

SEQ ID NO: 155411 - DNA, 294 bp, Artificial Sequence
  derived and/or modified sequence
atgagcctcgagcaacggtctccccactgcaagccggatgaggacctcgaagctcaaggagaggacctgggactgatgggcgctcaagagcctaccggggaggaagaggagacaacgtcttcttcggatagcaaggaagaagaggtaagcgccgctggaagctcctctccccctcagtccccacagggcggagcttcttcgtccatatccgtctactacacactgtggtcgcaatttgatgagggatccagcagtcaggaggaagaggagccctcgagctccgtcgacccgtag

SEQ ID NO: 155412 - DNA, 948 bp, Artificial Sequence
  derived and/or modified sequence
atgagccttgagcagagatctcctcactgtaagcccgacgaagacttagaggctcagggcgaggacttgggactcatgggcgcacaagagcctaccggggaggaagaggaaaccacttcctcgagtgacagtaaagaagaagaggttagtgccgcaggcagttctagtccccctcagtcgccacaggggggagccagctcctccatttcagtgtattatactctgtggagccagtttgacgagggttcaagtagccaggaagaggaagagccatctagcagtgtggaccctgcccagctcgagttcatgtttcaggaggccctcaaactcaaggtggcagaactggtgcactttttgctacacaagtaccgtgtcaaagagccagtgacaaaggctgaaatgctggaatcagtaataaagaactataagaggtattttccagtcatttttggcaaggcctccgagttcatgcaagttatcttcggcacagacgtgaaagaggttgaccccgcagggcatagctatatactcgtgacagccttgggactgagctgcgatagcatgctgggagacggacatagcatgcccaaggcagctctgctgattatcgtcctgggcgtcattctgactaaagacaactgtgcaccagaggaggtgatttgggaagcattgagtgttatgggcgtgtatgtaggcaaggagcatatgttctatggagagcctcgcaagctcctaacacaggattgggtgcaggagaactacctcgagtaccgtcaagtcccaggcagcgacccagcccactatgagttcctgtgggggtccaaggcacacgcagagactagttatgagaaagttatcaattatttggtgatgcttaacgccagggagccaatttgctaccccagtttgtacgaggaggttcttggggaggaacaagagggtgtctag

SEQ ID NO: 155413 - DNA, 948 bp, Artificial Sequence
  derived and/or modified sequence
atgagcctggagcagagaagcccccactgcaagcccgacgaggacctggaggcccagggcgaggacctgggcctgatgggcgcccaggagcccaccggcgaggaggaggagaccaccagcagcagcgacagcaaggaggaggaggtgagcgccgccggcagcagcagccccccccagagcccccagggcggcgccagcagcagcatcagcgtgtactacaccctgtggagccagttcgacgagggcagcagcagccaggaggaggaggagcccagcagcagcgtggaccccgcccagctggagttcatgttccaggaggccctgaagctgaaggtggccgagctggtgcacttcctgctgcacaagtacagagtgaaggagcccgtgaccaaggccgagatgctggagagcgtgatcaagaactacaagagatacttccccgtgatcttcggcaaggccagcgagttcatgcaggtgatcttcggcaccgacgtgaaggaggtggaccccgccggccacagctacatcctggtgaccgccctgggcctgagctgcgacagcatgctgggcgacggccacagcatgcccaaggccgccctgctgatcatcgtgctgggcgtgatcctgaccaaggacaactgcgcccccgaggaggtgatctgggaggccctgagcgtgatgggcgtgtacgtgggcaaggagcacatgttctacggcgagcccagaaagctgctgacccaggactgggtgcaggagaactacctggagtacagacaggtgcccggcagcgaccccgcccactacgagttcctgtggggcagcaaggcccacgccgagaccagctacgagaaggtgatcaactacctggtgatgctgaacgccagagagcccatctgctaccccagcctgtacgaggaggtgctgggcgaggagcaggagggcgtgtag

SEQ ID NO: 155414 - DNA, 345 bp, Artificial Sequence
  derived and/or modified sequence
atgagcctggagcagagaagcccccactgcaagcccgacgaggacctggaggcccagggcgaggacctgggcctgatgggcgcccaggagcccaccggcgaggaggaggagaccaccagcagcagcgacagcaaggaggaggaggtgagcgccgccggcagcagcagccccccccagagcccccagggcggcgccagcagcagcatcagcgtgtactacaccctgtggagccagttcgacgagggcagcagcagccaggaggaggaggagcccagcagcagcgtggaccccgcccagctggagttcatgttccaggaggccctgaagctgaaggtggccgagtag

SEQ ID NO: 155415 - DNA, 930 bp, Artificial Sequence
  derived and/or modified sequence
atgagcctggagcagagaagcccccactgcaagcccgacgaggacctggaggcccagggcgaggacctgggcctgatgggcgcccaggagcccaccggcgaggaggaggagaccaccagcagcagcgacagcaaggaggaggaggtgagcgccgccggcagcagcagccccccccagagcccccagggcggcgccagcagcagcatcagcgtgtactacaccctgtggagccagttcgacgagggcagcagcagccaggaggaggaggagcccagcagcagcgtggaccccgcccagctggagttcatgttccaggaggccctgaagctgaaggtggccgagctggtgcacttcctgctgcacaagtacagagtgaaggagcccgtgaccaaggccgagatgctggagagcgtgatcaagaactacaagagatacttccccgtgatcttcggcaaggccagcgagttcatgcaggtgatcttcggcaccgacgtgaaggaggtggaccccgccggccacagctacatcctggtgaccgccctgggcctgagctgcgacagcatgctgggcgacggccacagcatgcccaaggccgccctgctgatcatcgtgctgggcgtgatcctgaccaaggacaactgcgcccccgaggaggtgatctgggaggccctgagcgtgatgggcgtgtacgtgggcaaggagcacatgttctacggcgagcccagaaagctgctgacccaggactgggtgcaggagaactacctggagtacagacaggtgcccggcagcgaccccgcccactacgagttcctgtggggcagcaaggcccacgccgagaccagctacgagaaggtgatcaactacctggtgatgctgaacgccagagagcccatctgctaccccagcctgtacgaggaggtgctgggctag

SEQ ID NO: 155416 - DNA, 591 bp, Artificial Sequence
  derived and/or modified sequence
atgagcctggagcagagaagcccccactgcaagcccgacgaggacctggaggcccagggcgaggacctgggcctgatgggcgcccaggagcccaccggcgaggaggaggagaccaccagcagcagcgacagcaaggaggaggaggtgagcgccgccggcagcagcagccccccccagagcccccagggcggcgccagcagcagcatcagcgtgtactacaccctgtggagccagttcgacgagggcagcagcagccaggaggaggaggagcccagcagcagcgtggaccccgcccagctggagttcatgttccaggaggccctgaagctgaaggtggccgagctggtgcacttcctgctgcacaagtacagagtgaaggagcccgtgaccaaggccgagatgctggagagcgtgatcaagaactacaagagatacttccccgtgatcttcggcaaggccagcgagttcatgcaggtgatcttcggcaccgacgtgaaggaggtggaccccgccggccacagctacatcctggtgaccgccctgggcctgagctgcgacagcatgctgggcgacggccacagcatgccctag

SEQ ID NO: 155417 - DNA, 294 bp, Artificial Sequence
  derived and/or modified sequence
atgagcctggagcagagaagcccccactgcaagcccgacgaggacctggaggcccagggcgaggacctgggcctgatgggcgcccaggagcccaccggcgaggaggaggagaccaccagcagcagcgacagcaaggaggaggaggtgagcgccgccggcagcagcagccccccccagagcccccagggcggcgccagcagcagcatcagcgtgtactacaccctgtggagccagttcgacgagggcagcagcagccaggaggaggaggagcccagcagcagcgtggacccctag

SEQ ID NO: 155418 - protein, 429 aa, Artificial Sequence
  derived and/or modified sequence
METQFRRGGLGCSPASIKRKKKREDSGDFGLQVSTMFSEDDFQSTERAPYGPQLQWSQDLPRVQVFREQANLEDRSPRRTQRITGGEQVLWGPITQIFPTVRPADLTRVIMPLEQRSQHCKPEEGLQAQEEDLGLVGAQALQAEEQEAAFFSSTLNVGTLEELPAAESPSPPQSPQEESFSPTAMDAIFGSLSDEGSGSQEKEGPSTSPDLIDPESFSQDILHDKIIDLVHLLLRKYRVKGLITKAEMLGSVIKNYEDYFPEIFREASVCMQLLFGIDVKEVDPTSHSYVLVTSLNLSYDGIQCNEQSMPKSGLLIIVLGVIFMEGNCIPEEVMWEVLSIMGVYAGREHFLFGEPKRLLTQNWVQEKYLVYRQVPGTDPACYEFLWGPRAHAETSKMKVLEYIANANGRDPTSYPSLYEDALREEGEGV

SEQ ID NO: 155419 - DNA, 1290 bp, Artificial Sequence
  derived and/or modified sequence
atggaaactcaatttaggagagggggccttgggtgctcccccgcctcgatcaagaggaagaagaaaagagaggatagcggcgatttcggcctgcaagtgtcaaccatgttttccgaagacgatttccagagcacggagagggcaccttacggccctcaactacagtggagccaggatcttcctagggtacaggtgtttcgggagcaagccaatttagaagaccgctctcctaggcgcacccagcgcatcacagggggcgaacaggtgctgtgggggcctataactcagatatttcccaccgtgagacccgctgacctgacgcgggtgatcatgcctctggagcagaggtcccagcattgtaaaccagaagaggggctgcaggctcaagaagaggacctggggctggtgggggcccaggctttgcaggcggaagagcaagaagctgctttctttagctctaccctgaacgtagggactcttgaggaactccctgcagccgaatctccatcccccccacagagcccacaggaggagtccttcagtcccaccgctatggatgctatattcggcagtctctctgacgaaggctccggtagtcaagaaaaggaaggcccatccacctccccggacttaatcgaccccgaatctttcagccaggacatcctgcatgataagatcattgatttggtgcacttgctgcttcgcaaatatagagttaaaggcctgatcactaaggccgagatgctcgggtctgtgatcaagaactacgaggattactttcccgagattttcagggaagcctccgtttgtatgcagttgctcttcggaatcgacgtgaaggaggtggaccctactagtcacagttatgttctcgtcacatcactgaacctgtcatatgatggaatccagtgtaacgagcaatcaatgccgaaatctggcctcctgatcatagtactgggagtaatcttcatggaggggaactgcataccagaggaggtgatgtgggaagtgctgtctatcatgggcgtatatgccgggcgggaacatttcctatttggggaaccaaaaagactgctgactcaaaactgggtgcaggagaagtatttagtataccgccaggtccccggcactgatccagcctgctatgagtttctctggggaccgcgggcccacgccgagactagtaaaatgaaggtgctggaatacatcgccaacgcaaatgggcgtgaccccaccagctaccccagtctctacgaggatgcactcagggaggaaggtgaaggcgtttag

SEQ ID NO: 155420 - DNA, 1290 bp, Artificial Sequence
  derived and/or modified sequence
atggagacccagttccggcggggcggcctgggctgcagccctgccagcatcaagaggaagaagaagcgggaggacagcggggactttggcctgcaggtgtccaccatgttttctgaagatgacttccagagcacagagcgggccccctacggcccccagctgcagtggagccaggacctgccccgggtgcaggtgttccgggagcaggccaacctggaggacaggagccccaggaggacccagaggatcaccggcggggagcaggtgctgtggggccccatcacccagatcttccccaccgtgcggcctgctgacctgaccagggtcatcatgcccctggagcagaggagccagcactgcaagccagaggagggcctgcaggcccaggaggaggacctgggcctggtgggcgcccaggccctgcaggccgaggagcaggaggccgccttcttcagcagcaccctgaatgtgggcaccctggaggagctgcctgctgctgagagccccagccccccccagagcccccaggaggagagcttcagccccacagccatggatgccatcttcggcagcctgagtgatgagggcagcggcagccaggagaaggagggccccagcaccagcccagacctgattgatcctgagagcttcagccaggacatcctgcatgacaagatcatcgacctggtgcacctgctgctgaggaagtacagagtgaagggcctcatcaccaaggccgagatgctgggcagcgtcatcaagaactatgaggactacttccctgagatcttccgggaggcctctgtgtgcatgcagctgctgtttggaattgatgtgaaggaggtggaccccaccagccacagctatgtgctggtgaccagcctgaacctgtcctatgatggcatccagtgcaatgagcagagcatgcccaagagcggcctgctgatcatcgtgctgggcgtcatcttcatggagggcaactgcatccctgaggaggtgatgtgggaggtgctgagcatcatgggcgtgtatgccggccgggagcacttcctgtttggagagcccaagaggctgctgacccagaactgggtgcaggagaagtacctggtgtaccggcaggtgcctggaacagatcctgcctgctatgagttcctgtggggcccccgggcccacgccgagaccagcaagatgaaggtgctggagtacatcgccaatgccaacggccgggaccccaccagctaccccagcctgtatgaagatgccctgcgggaggagggggagggcgtgtag

SEQ ID NO: 155421 - DNA, 1864 bp, Artificial Sequence
  derived and/or modified sequence
gatctgagagaagcgaaagcgtctttctgaggggtgtcttgagagtggcagagggcagcgggtccaggctccatgaggaggcaagccttgggaatctgagggatggagactcagttccgcagagggggtctggggtgcagccctgccagcatcaagaggaagaagaagagggaggactcaggagactttggactccaggtgagcactatgttctcagaggacgacttccagtcaacagaaagagccccatatggtccacaactacagtggtcccaggatctgccaagagtccaggtttttagagaacaggccaacctggaggacaggagtcccaggagaacccagaggatcactggaggagaacaagtgctgtggggccccatcacccagatatttcccacagttcggcctgctgacctaaccagagtcatcatgcctcttgagcaaagaagtcagcactgcaagcctgaggaaggccttcaggcccaagaagaagacctgggcctggtgggtgcacaggctctccaagctgaggagcaggaggctgccttcttctcctctactctgaatgtgggcactctagaggagttgcctgctgctgagtcaccaagtcctccccagagtcctcaggaagagtccttctctcccactgccatggatgccatctttgggagcctatctgatgagggctctggcagccaagaaaaggaggggccaagtacctcgcctgacctgatagaccctgagtccttttcccaagatatactacatgacaagataattgatttggttcatttattgctccgcaagtatcgagtcaaggggctgatcacaaaggcagaaatgctggggagtgtcatcaaaaattatgaggactactttcctgagatatttagggaagcctctgtatgcatgcaactgctctttggcattgatgtgaaggaagtggaccccactagccactcctatgtccttgtcacctccctcaacctctcttatgatggcatacagtgtaatgagcagagcatgcccaagtctggcctcctgataatagtcctgggtgtaatcttcatggaggggaactgcatccctgaagaggttatgtgggaagtcctgagcattatgggggtgtatgctggaagggagcacttcctctttggggagcccaagaggctccttacccaaaattgggtgcaggaaaagtacctggtgtaccggcaggtgcccggcactgatcctgcatgctatgagttcctgtggggtccaagggcccacgctgagaccagcaagatgaaagttcttgagtacatagccaatgccaatgggagggatcccacttcttacccatccctgtatgaagatgctttgagagaggagggagagggagtctgagcatgagatgcaaccagggccagcgggcagggaaatgggccaatgcatgcttcagggccacacccagcagtttccctgtcctgtgtgaaatcaggcccattcttccctctgtgtttgatgagagaagtcagtgttctcagtagtagaaggcacagtgaatggaagggaacacattgtatactgcctttaggtttctcttccatcgggtgacttggagatttctttttgtttccctttggtaattttcaaatattgttcctgtaataaaagttttagttagcttcaacatctaagtgtatggatgatactgaccacacatgttgttttgcttatccatttcaagtgcaagtgtttgccattttgtaaaacattttgggaaatcttccatcttgctgtgatttgcaataggtattttcttggagaatgtaagaacttaacaataaagctgaactggtgttgtgaaacagagaaa

SEQ ID NO: 155422 - DNA, 1290 bp, Artificial Sequence
  derived and/or modified sequence
atggagacccagttccggcggggcggcctgggctgcagccccgcctcaatcaagcggaagaagaaacgtgaggatagcggggactttggactccaggtgagcacgatgttttcagaggacgacttccagtccactgagagagccccttacggaccacagctacagtggtcccaggaccttccacgggtccaggtgtttcgggaacaggctaaccttgaagataggagcccaaggcgaacacagcgaataaccggaggagagcaagtcttgtgggggcctattacccagatcttcccaaccgtccggcctgcggacctgacacgcgtcatcatgccccttgagcagcgttcccagcactgcaagccagaggaagggttacaagcccaggaggaggacctgggcctagtcggcgcccaggccctacaagccgaagaacaggaggcagcctttttttcctcaaccctaaatgtcggcacgctcgaggaattgcccgccgccgaatcaccatcccccccacagtcaccacaggaagaaagcttctctcctacggccatggatgccatcttcgggagcctttctgatgaaggaagcggcagccaagaaaaggagggtccatcaacaagcccagatctgatcgacccagagagctttagccaggatatcctccacgataagattatcgatctcgttcacctcctgctacgtaaatacagggtgaaaggcctgattaccaaggcagaaatgctgggttccgtgattaagaactacgaggactactttcccgagatattccgggaggcctccgtctgcatgcaactgttatttgggattgatgtgaaggaggtggacccaaccagtcatagttacgtgctcgtgacatcactgaatttaagctatgacggtatccaatgcaatgagcagtcaatgcctaaatccggcctgctgattattgtgctcggcgtgatctttatggaggggaattgtatcccagaggaggtcatgtgggaagtgcttagcattatgggtgtatacgcaggtcgcgaacacttcctgttcggcgaacctaagagactgttgacacagaattgggtccaggaaaagtatttagtttatagacaggttcccggcaccgaccccgcttgttacgaatttctgtggggcccccgcgcccacgctgagacatctaagatgaaagtactggagtacatcgctaacgctaatggacgcgacccaacaagctacccctctctgtacgaagatgcactccgagaagagggagagggcgtatag

SEQ ID NO: 155423 - DNA, 1290 bp, Artificial Sequence
  derived and/or modified sequence
atggaaacccagttcaggcggggaggattaggctgttcaccggcatccatcaaacgtaaaaagaagcgcgaggacagtggggattttggactgcaggtttcaacaatgttctccgaagatgattttcagtccactgaacgggctccttacgggccacagcttcagtggagccaggacctgccacgggtgcaggttttcagagaacaggccaatctggaagatcgctcccctaggcgtacacagaggataactggtggagagcaggtcctttggggcccaattacccaaatctttcctactgtccgccctgctgatctgacacgcgtaatcatgcccctcgaacaacgaagccagcactgcaagccggaagaaggcttgcaagcacaggaggaggatctgggactcgtgggcgctcaggcattgcaggcagaggagcaggaagcagcttttttcagttccactctgaatgtcggcacactcgaggaacttcccgcagccgaatccccttcaccccctcagtcccctcaagaagagtcattctcccctaccgcgatggacgctatattcgggtccctctctgacgaaggttccggatcacaagaaaaggaaggtccaagtacctctccagacttgatcgatcctgagagtttttcccaagatattcttcatgacaagatcatcgacttagtccatctgcttctgcggaaataccgggtgaagggcctgattaccaaggcggagatgctgggctctgtgatcaaaaattacgaggattacttcccggagatattccgtgaggcatccgtgtgcatgcagctactgtttggaattgacgtgaaggaggttgatcctacttcccatagttatgtgctggtgacctccctaaatctaagctatgacggcattcaatgtaacgagcagagtatgccaaagagtggcctgctgatcatagtgctgggtgtcattttcatggaagggaattgcattcctgaagaggttatgtgggaggtcctcagcattatgggggtgtacgcaggcagggaacattttctatttggcgagccaaaaagactcttgacccaaaattgggtgcaggagaagtatttggtatacagacaggtgccaggtacagacccagcttgctacgagtttctgtggggaccgagggctcatgccgaaaccagtaagatgaaagtgcttgaatacatagctaacgcaaatggcagggatccaacctcatacccgtccctctacgaggatgcacttagggaagaaggagaaggagtgtag

SEQ ID NO: 155424 - DNA, 1290 bp, Artificial Sequence
  derived and/or modified sequence
atggagacccagttcagaagaggcggcctgggctgcagccccgccagcatcaagagaaagaagaagagagaggacagcggcgacttcggcctgcaggtgagcaccatgttcagcgaggacgacttccagagcaccgagagagccccctacggcccccagctgcagtggagccaggacctgcccagagtgcaggtgttcagagagcaggccaacctggaggacagaagccccagaagaacccagagaatcaccggcggcgagcaggtgctgtggggccccatcacccagatcttccccaccgtgagacccgccgacctgaccagagtgatcatgcccctggagcagagaagccagcactgcaagcccgaggagggcctgcaggcccaggaggaggacctgggcctggtgggcgcccaggccctgcaggccgaggagcaggaggccgccttcttcagcagcaccctgaacgtgggcaccctggaggagctgcccgccgccgagagccccagccccccccagagcccccaggaggagagcttcagccccaccgccatggacgccatcttcggcagcctgagcgacgagggcagcggcagccaggagaaggagggccccagcaccagccccgacctgatcgaccccgagagcttcagccaggacatcctgcacgacaagatcatcgacctggtgcacctgctgctgagaaagtacagagtgaagggcctgatcaccaaggccgagatgctgggcagcgtgatcaagaactacgaggactacttccccgagatcttcagagaggccagcgtgtgcatgcagctgctgttcggcatcgacgtgaaggaggtggaccccaccagccacagctacgtgctggtgaccagcctgaacctgagctacgacggcatccagtgcaacgagcagagcatgcccaagagcggcctgctgatcatcgtgctgggcgtgatcttcatggagggcaactgcatccccgaggaggtgatgtgggaggtgctgagcatcatgggcgtgtacgccggcagagagcacttcctgttcggcgagcccaagagactgctgacccagaactgggtgcaggagaagtacctggtgtacagacaggtgcccggcaccgaccccgcctgctacgagttcctgtggggccccagagcccacgccgagaccagcaagatgaaggtgctggagtacatcgccaacgccaacggcagagaccccaccagctaccccagcctgtacgaggacgccctgagagaggagggcgagggcgtgtag

SEQ ID NO: 155425 - protein, 925 aa, Artificial Sequence
  derived and/or modified sequence
MAEANPRRGKMRFRRNAASFPGNLHLVLVLRPTSFLQRTFTDIGFWFSQEDFMLKLPVVMLSSVSDLLTYIDDKQLTPELGGTLQYCHSEWIIFRNAIENFALTVKEMAQMLQSFGTELAETELPDDIPSIEEILAIRAERYHLLKNDITAVTKEGKILLTNLEVPDTEGAVSSRLECHRQISGDWQTINKLLTQVHDMETAFDGFWEKHQLKMEQYLQLWKFEQDFQQLVTEVEFLLNQQAELADVTGTIAQVKQKIKKLENLDENSQELLSKAQFVILHGHKLAANHHYALDLICQRCNELRYLSDILVNEIKAKRIQLSRTFKMHKLLQQARQCCDEGECLLANQEIDKFQSKEDAQKALQDIENFLEMALPFINYEPETLQYEFDVILSPELKVQMKTIQLKLENIRSIFENQQAGFRNLADKHVRPIQFVVPTPENLVTSGTPFFSSKQGKKTWRQNQSNLKIEVVPDCQEKRSSGPSSSLDNGNSLDVLKNHVLNELIQTERVYVRELYTVLLGYRAEMDNPEMFDLMPPLLRNKKDILFGNMAEIYEFHNDIFLSSLENCAHAPERVGPCFLERKDDFQMYAKYCQNKPRSETIWRKYSECAFFQECQRKLKHRLRLDSYLLKPVQRITKYQLLLKELLKYSKDCEGSALLKKALDAMLDLLKSVNDSMHQIAINGYIGNLNELGKMIMQGGFSVWIGHKKGATKMKDLARFKPMQRHLFLYEKAIVFCKRRVESGEGSDRYPSYSFKHCWKMDEVGITEYVKGDNRKFEIWYGEKEEVYIVQASNVDVKMTWLKEIRNILLKQQELLTVKKRKQQDQLTERDKFQISLQQNDEKQQGAFISTEETELEHTSTVVEVCEAIASVQAEANTVWTEASQSAEISEEPAEWSSNYFYPTYDENEEENRPLMRPVSEMALLY

SEQ ID NO: 155426 - protein, 528 aa, Artificial Sequence
  derived and/or modified sequence
VQMKTIQLKLENIRSIFENQQAGFRNLADKHVRPIQFVVPTPENLVTSGTPFFSSKQGKKTWRQNQSNLKIEVVPDCQEKRSSGPSSSLDNGNSLDVLKNHVLNELIQTERVYVRELYTVLLGYRAEMDNPEMFDLMPPLLRNKKDILFGNMAEIYEFHNDIFLSSLENCAHAPERVGPCFLERKDDFQMYAKYCQNKPRSETIWRKYSECAFFQECQRKLKHRLRLDSYLLKPVQRITKYQLLLKELLKYSKDCEGSALLKKALDAMLDLLKSVNDSMHQIAINGYIGNLNELGKMIMQGGFSVWIGHKKGATKMKDLARFKPMQRHLFLYEKAIVFCKRRVESGEGSDRYPSYSFKHCWKMDEVGITEYVKGDNRKFEIWYGEKEEVYIVQASNVDVKMTWLKEIRNILLKQQELLTVKKRKQQDQLTERDKFQISLQQNDEKQQGAFISTEETELEHTSTVVEVCEAIASVQAEANTVWTEASQSAEISEEPAEWSSNYFYPTYDENEEENRPLMRPVSEMALLY

SEQ ID NO: 155427 - DNA, 2778 bp, Artificial Sequence
  derived and/or modified sequence
atggccgaagctaatccccgccggggcaagatgcgcttcagacggaacgctgcctcttttccgggcaatcttcacctggtcctggtcctgcggcctacctcgttcctgcaacgaaccttcaccgacattggattttggttctcccaggaggacttcatgctcaaactgccagtggtcatgctcagcagtgtgagtgacttgctgacatacatcgatgacaaacaactgacgcctgagcttggtgggaccttgcaatactgccattctgaatggatcattttcagaaatgcaatagagaactttgcgttaaccgtgaaagaaatggctcagatgttgcagtccttcgggacagagttagccgagactgagcttcccgatgacataccttccatcgaagagattctggcaatccgggctgagcggtaccatttattgaaaaatgacattacggccgtgactaaggagggaaagattctgctgaccaatctggaggtgccagacacagagggcgcagtgagcagccggctggaatgtcacaggcagatttctggtgactggcagactattaacaagctgctgactcaagttcacgacatggagactgctttcgacggcttctgggaaaagcatcagcttaagatggaacagtacctgcagctttggaaattcgaacaggacttccagcagttggtgacagaggtcgagttcctgctgaatcagcaggcggaactcgccgacgtgaccggaacaatcgctcaagtgaagcagaagataaagaaattagagaacctggacgagaattcccaagagctgctgtcaaaggcccaattcgtaatccttcacgggcacaaacttgccgcgaaccaccattatgctctagaccttatctgccagcgctgtaacgagctcaggtatcttagcgatatcctggtgaacgagatcaaggccaagagaattcagctatcacgaacattcaaaatgcacaagctactacagcaggccaggcagtgctgtgatgagggcgagtgcctgctggcaaaccaggagatcgataaattccagagcaaggaggatgctcagaaggctcttcaggatatcgaaaacttcctggagatggcgctacccttcatcaactatgagcccgagaccctgcaatatgagttcgacgtcattctcagccccgaactcaaagtccagatgaagaccatccagctgaagcttgaaaatattcgatccatctttgagaaccagcaagccggctttaggaatctggcggataagcatgtaagacctatacaatttgtggttcctaccccggagaacctcgttacaagtggaacccctttcttctcaagtaaacaaggcaagaagacttggagacagaatcagtctaacctcaaaattgaagtagtgccagattgtcaggaaaaaaggtcctctggaccaagctcatctctcgataacggaaatagtctggatgtgctcaagaaccacgtactcaatgagctcatccagacagaaagggtctacgtgagggagctctatactgtgttgttgggttacagggctgaaatggataatccagaaatgtttgacctgatgccccccctgctgcgtaataaaaaagatatcttgtttggcaacatggcagagatctatgagttccacaacgacatatttctatcaagcctggaaaattgtgctcacgccccagagagggtcggaccctgttttttagagcggaaagacgacttccagatgtacgcaaagtattgtcagaacaagccgcgaagcgaaacaatctggcgaaaatacagcgagtgcgcattcttccaggagtgtcagcgaaagctgaaacatagactccgactggatagctacctcctcaaacccgtgcagaggatcactaaatatcaacttctgttaaaggaactgctgaaatacagtaaggactgcgaaggctcagcattgctgaagaaggctctggatgccatgctggatctgctgaagtccgtgaatgactccatgcatcaaattgcaataaatgggtacatagggaacctgaatgaactggggaagatgataatgcagggtggctttagcgtctggatcggacacaagaaaggtgccaccaagatgaaagatttggccagatttaaacctatgcagcgccacctcttcctttacgagaaagcgatagtgttctgcaagaggcgtgttgagagtggggagggatctgaccggtatccgtcctactccttcaaacactgttggaaaatggatgaagtgggcattaccgagtatgtcaagggcgacaaccgtaagtttgaaatctggtacggcgagaaagaggaagtctacattgtgcaggcctccaacgtggatgttaaaatgacctggctgaaagaaatccgtaacatcctcttaaagcagcaagagttactgacagtcaagaagcgcaaacagcaagatcaactgaccgaaagggataaatttcagatcagcctccagcagaatgatgaaaagcagcagggcgctttcattagtaccgaggaaacagaactcgaacatacctccaccgtggtggaggtatgcgaggccattgcttccgtccaggccgaagctaacacagtttggacagaagcatcacaaagcgcggagatctcagaggagccggccgaatggagttcgaactatttctacccgacctacgacgagaatgaagaagagaatcgtccgctgatgaggccagtgtcggaaatggccctgttatattag

SEQ ID NO: 155428 - DNA, 2778 bp, Artificial Sequence
  derived and/or modified sequence
atggccgaggccaacccccggcggggcaagatgaggttcagaagaaatgctgccagcttccctggcaacctgcacctggtgctggtgctgcggcccaccagcttcctgcagaggaccttcacagacatcggcttctggttcagccaggaggacttcatgctgaagctgcctgtggtgatgctgagctctgtgtctgacctgctgacctacattgatgacaagcagctgaccccagagctgggcggcaccctgcagtactgccacagcgagtggatcatcttcagaaatgccattgaaaattttgccctgactgtgaaggagatggcccagatgctgcagagctttggaacagagctggccgagacagagctgcctgatgacatccccagcattgaggagatcctggccatccgggcagagcgctaccacctgctgaagaatgacatcacagctgtgaccaaggagggcaagatcctgctgaccaacctggaggtgcctgacacagagggcgctgtgagcagccggctggagtgccaccggcagatcagcggggactggcagaccatcaacaagctgctgacccaggtgcatgacatggagacagcctttgatggcttctgggagaagcaccagctgaagatggagcagtacctgcagctgtggaagtttgagcaggacttccagcagctggtgacagaggtggagttcctgctgaaccagcaggccgagctggctgatgtgacaggcaccatcgcccaggtgaagcagaagatcaagaagctggagaacctggatgagaacagccaggagctgctgagcaaggcccagtttgtgatcctgcacggccacaagctggccgccaaccaccactacgccctggacctgatctgccagcgctgcaatgagctgcgctacctgagtgacatcctggtgaatgagatcaaggccaagaggatccagctgagcaggaccttcaagatgcacaagctgctgcagcaggcccggcagtgctgtgatgaaggagagtgcctgctggccaaccaggagattgacaagttccagagcaaagaagatgcccagaaggccctgcaggacatcgagaacttcctggagatggccctgcccttcatcaactatgagcctgagaccctgcagtatgaatttgatgtgatcctgagccctgagctgaaggtgcagatgaagaccatccagctgaagctggagaacatccgcagcatctttgagaaccagcaggccggcttcaggaacctggccgacaagcacgtgcggcccatccagtttgtggtgcccaccccagagaacctggtgaccagcggcacccccttcttcagcagcaagcagggcaagaagacctggaggcagaaccagagcaacctgaagattgaggtggtgcctgactgccaggagaagaggagcagcggccccagcagcagcctggacaatggaaacagcctggatgtgctgaagaaccacgtgctgaatgaactcatccagacagagcgggtgtatgtgcgggagctgtacacagtgctgctgggctacagagctgagatggacaaccctgagatgtttgacctgatgccacccctgctgaggaacaagaaggacatcctgtttggaaacatggccgagatctatgagttccacaatgacatcttcctgagcagcctggagaactgtgcccacgcccctgagcgggtgggcccctgcttcctggagaggaaggatgacttccagatgtatgccaagtactgccagaacaagcccaggtctgagaccatctggaggaagtacagtgaatgtgccttcttccaggagtgccagaggaagctgaagcaccggctgcggctggacagctacctgctgaagcctgtgcagaggatcaccaagtaccagctgctgctgaaggagctgctgaagtacagcaaggactgtgagggcagcgccctgctgaagaaggccctggatgccatgctggacctgctgaagtctgtgaatgacagcatgcaccagatcgccatcaatggctacatcggcaacctgaatgagctgggcaagatgatcatgcagggcggcttctctgtgtggattggccacaagaagggggccaccaagatgaaggacctggcccgcttcaagcccatgcagaggcacctgttcctgtatgagaaggccatcgtgttctgcaagagaagagtggagagcggggagggcagtgaccgctaccccagctacagcttcaagcactgctggaagatggatgaggtgggcatcacagaatatgtgaagggggacaacaggaagtttgagatctggtacggggagaaggaggaggtgtacatcgtgcaggccagcaatgtggatgtgaagatgacctggctgaaggagatccggaacatcctgctgaagcagcaggagctgctgactgtgaagaagaggaagcagcaggaccagctgacagagcgggacaagttccagatcagcctgcagcagaatgatgagaagcagcagggcgccttcatcagcacagaggagacagagctggagcacaccagcacagtggtggaggtgtgtgaggccatcgcctctgtgcaggccgaggccaacacagtgtggacagaggccagccagagcgctgagatcagcgaggagcctgctgagtggagcagcaactacttctaccccacctatgatgaaaatgaggaggagaaccggcccctgatgaggcctgtgtctgagatggccctgctgtactag

SEQ ID NO: 155429 - DNA, 3688 bp, Artificial Sequence
  derived and/or modified sequence
gatctgtcagctgactaatcagggatagtggtttttttttttttttcctccccagcattgctgccactgtgctaatggaagcagccacggcagctttgtttgatagagatttttggctgccgtttttaaatactacccaagaagcagctcgtatttcatcaacgttgcgttgacaattggaaaagaaaagtgtaattgcgtacaggcgaaatggcagaagcaaatccccggagaggcaagatgaggttcagaaggaatgcggcttccttccctgggaacttgcacttggttttggttttacgtcctaccagctttcttcaacgaacgttcacagacattggattttggtttagtcaggaggattttatgcttaaattaccagttgttatgctgagctcagttagtgatttgctgacatacattgatgacaagcaattaacccctgagttaggcggcaccttgcagtactgccacagtgaatggatcatcttcagaaatgctatagaaaattttgccctcacagtgaaagaaatggctcagatgttacagtcctttggaactgaactggctgagacagaactaccagatgatattccctcaatagaagaaattctggcaattcgtgctgaaaggtatcatctgttgaagaatgatattacagctgtaaccaaagaaggaaaaattctgctaacaaatctggaagtgcctgacactgaaggagctgtcagttcaagactagaatgtcatcggcaaataagtggtgactggcaaactattaataagttgctgactcaagtacatgatatggaaacagcttttgatggattttgggaaaaacatcaattaaaaatggagcagtatctgcaactatggaagtttgagcaggattttcaacagcttgtgactgaagttgaatttctattaaaccaacaagcagaactggctgatgtaacagggactatagctcaagtaaaacaaaaaataaaaaaattggaaaacttagatgaaaattctcaggagctattatcaaaggcccagtttgtgatattacatggacacaagcttgcagcaaatcaccattatgcacttgatttaatctgccagaggtgcaatgagctacgttacctttctgatattttggttaatgagataaaagcaaaacggatacaactcagcaggaccttcaaaatgcataaactcctacagcaggctcgtcaatgctgtgatgaaggggaatgtcttctagctaatcaggaaatagataagtttcagtctaaagaagatgctcagaaagctctccaagacattgaaaattttcttgaaatggctctaccctttataaattatgaacctgaaacactgcagtatgaatttgatgtaatattatctcctgagcttaaggttcaaatgaagactatacaactcaagcttgaaaacattcgaagtatatttgagaaccagcaggctggtttcaggaacctggcagataagcatgtgaggccaatccaatttgtggtacccacacctgaaaatttggtcacatctgggacaccatttttttcatctaaacaagggaagaagacttggagacaaaatcagagcaacttaaaaattgaagtggtgcctgattgtcaggagaagagaagttctggtccatcctccagtttggacaatggcaatagcttggatgttttaaagaaccacgtactaaatgaactgatacagactgagagagtttatgttcgagaactgtatactgttttgttgggttatagagcggagatggataatccagagatgtttgatcttatgccacctctcctgagaaataaaaaggacattctctttggaaacatggcagaaatatatgaattccataacgacattttcttgagcagcctggaaaattgtgctcatgctccagaaagagtgggaccttgtttcctggaaaggaaggatgattttcagatgtatgcaaaatattgtcagaataagcccagatcagaaacaatttggaggaagtattcagaatgcgcatttttccaggaatgtcaaagaaagttaaaacacagacttagactggattcctatttactcaaaccagtgcaacgaatcactaaatatcagttattgttgaaggagctattaaaatatagcaaagactgtgaaggatctgctctgttgaagaaggcactcgatgcaatgctggatttactgaagtcagttaatgattctatgcatcagattgcaataaatggctatattggaaacttaaatgaactgggcaagatgataatgcaaggtggattcagcgtttggatagggcacaagaaaggtgctacaaaaatgaaggatttggctagattcaaaccaatgcagcgacaccttttcttgtatgaaaaagccattgttttttgcaaaaggcgtgttgaaagtggagaaggctctgacagatacccgtcatacagttttaaacactgttggaaaatggatgaagttggaatcactgaatatgtaaaaggtgataaccgcaagtttgaaatctggtatggtgaaaaggaagaagtttatattgtccaggcttctaatgtagatgtgaagatgacgtggctaaaagaaataagaaatattttgttgaagcagcaggaacttttgacagttaaaaaaagaaagcaacaggatcaattaacagaacgggataagtttcagatttctcttcagcagaatgatgaaaagcaacagggagcttttataagtactgaggaaactgaattggaacacaccagcactgtggtggaggtctgtgaggcaattgcgtcagttcaggcagaagcaaatacagtttggactgaggcatcacaatctgcagaaatctctgaagaacctgcggaatggtcaagcaactatttctaccctacttatgatgaaaatgaagaagaaaataggcccctcatgagacctgtgtcggagatggctctcctatattgatgaagctactatgtcaaatggcaagtagctctttcctgcctgcttctcagctcatttggaaaaatactgcgcaaaagacattgagctcaaatgatgcagatgttgttttcaggttaatggacacgcaaagaaaccacagcacatacttcttttctttcatttaataaagcttttaattatggtacgctgtctttttaaaatcatgtatttaatgtgtcagatattgtgcttgaaagattctcatctcagaatacttttggacttgaaaattatttcttctctactttgtaaccaaatgcaatcggtgtgccttggattatttagtttattaatgaattaagtcaaaattacggctgcaaaatggctaaggtcaagtaaagcacaacattatgatttaatatgcttttgttgaaaccacagcttttgtgcccattgttttaacttgtgtgaaacaatacaaagcccagaaattcttttcggggcatgagtaaattttgttcagggctactgtctgtatgtgcccagataaaattttcatgagagtagtttacaaaagccgtatttaaaagttaatattttcacactttttttctggatttctgcttataattaatgtaacttaaattagttgtgctctgctattttctgtatatttcatgttgtaattctttttttcaaataaaaattaattcttcaggtt

SEQ ID NO: 155430 - DNA, 2778 bp, Artificial Sequence
  derived and/or modified sequence
atggccgaggccaacccccggcggggcaagatgcggttccggcggaatgccgccagcttcccaggcaatttacatctggtgttagtcttgagacccacttcttttttgcagaggactttcactgacattggcttttggttctcacaggaggattttatgctgaagctaccagtcgtaatgctgtcctctgtgagcgacctgctgacatacatcgatgacaaacagctgacgccagaactgggagggaccctgcagtattgtcattcagagtggatcatatttcggaacgccatcgaaaatttcgccctgaccgtaaaagaaatggcgcagatgctccagagttttggcacagagctggccgaaaccgagctaccggacgatatcccctccattgaggaaattctggcaattagagccgaaagataccaccttttgaaaaatgacatcaccgcggtcactaaagagggaaaaatccttctgaccaacctagaggttcctgacaccgaaggagctgtgagtagtaggcttgagtgtcatcggcagatttccggtgactggcagaccattaacaaactgctcacacaggttcacgacatggagacggcgtttgacggattctgggagaaacaccaattaaaaatggaacagtatctgcagctgtggaaattcgaacaggattttcagcagttggtgacagaagtggagttcctcctgaatcagcaagcggaattggccgacgttacaggcacgatagcccaggtgaagcaaaaaattaaaaaacttgagaacctagacgaaaattcccaggagttattgtctaaggcccagttcgtcatcctgcatgggcacaagttggcagctaatcatcactatgccttagaccttatttgtcagcggtgcaatgagctgagatatctctcagacatacttgtgaatgagattaaagcgaaaagaatccagttgtccaggacgttcaaaatgcataaacttctgcagcaagctaggcagtgttgtgacgaaggcgaatgcctgctggccaaccaggagatagataagttccagagtaaggaggacgcccagaaagccctccaggacattgagaatttcctggaaatggccctgcctttcatcaactatgagccggagacgcttcagtacgagtttgatgtcatactgtccccagaattgaaggtccagatgaagacaatccaacttaaactcgaaaatatcagatctatctttgagaatcagcaagccggattccggaacctcgctgataagcacgtacggcctatccagttcgtggtgccaacacccgaaaacctagtcactagcggaacaccgttcttcagctccaaacagggcaagaaaacctggcgacagaatcagtctaatctcaagatagaagtggtccccgattgtcaggaaaagagatcctctggcccaagttcttcactagataacggtaactcacttgacgtgttgaagaaccacgttcttaacgaacttatccagactgagagagtgtacgtcagagagttgtacactgtgctcctggggtatcgggccgagatggacaatccagaaatgttcgacttgatgccacctctactccgaaataaaaaggatatcctattcgggaacatggcagaaatatatgaatttcataacgatatatttttgtcctctttggagaattgtgctcatgctcctgagagggttggaccctgttttttggagcgcaaagatgatttccagatgtatgctaaatattgtcagaataaaccccgatctgaaaccatttggcggaaatacagcgagtgcgctttcttccaggaatgccagaggaagctcaaacacaggcttcggctggatagctatctcttgaagcctgtgcagagaattacgaagtatcagctgctccttaaggagctgttaaagtacagtaaagattgcgaagggtcagccctgctaaagaaggccctggatgcaatgctcgatctgctgaaatcagtcaacgatagcatgcatcaaatcgctattaatgggtacattggtaatctcaatgaactgggaaaaatgatcatgcaaggaggattcagtgtctggatcggccataagaaaggggccacaaaaatgaaagatctagcacgctttaaaccaatgcagaggcaccttttcctctacgagaaggccatcgttttctgcaaaaggcgggtggagtccggggaagggagcgaccggtatcccagttattcatttaaacactgttggaagatggacgaggtgggaatcacagaatacgtgaagggggataacaggaaatttgaaatctggtacggcgaaaaggaggaagtgtatatagtccaggcttctaacgtcgacgtcaagatgacatggctaaaggagatcaggaatatcctgctgaagcagcaggaactgctgaccgtcaaaaaacgtaagcaacaggaccagctgacggaaagagataaatttcagatctccctgcagcagaatgacgaaaagcagcagggagcctttatcagcacagaagagaccgaacttgaacacaccagcactgtcgtcgaagtctgcgaggctatcgccagcgtccaggccgaggcaaacaccgtttggactgaggccagccagtcagctgagatctccgaagagcctgctgagtggtctagcaactatttctatccgacatacgatgaaaatgaagaggagaaccggccactcatgagacctgtgtcagaaatggctcttttgtactag

SEQ ID NO: 155431 - DNA, 2778 bp, Artificial Sequence
  derived and/or modified sequence
atggccgaagccaatccacgaagggggaaaatgagattcaggaggaacgccgcatcgtttcccggaaacttgcacttggtactggttctgaggcctacttcgttcctgcagagaaccttcacagacatcggcttttggttttcccaagaggacttcatgttgaagctaccggtggtaatgctatcgtcagtgtcggacctactgacgtatattgatgacaaacagctgacacctgagttaggaggcacactccagtattgccattccgagtggattatcttccgcaacgccatcgagaactttgcacttactgtgaaggagatggcacagatgctgcagagcttcggaacagaactggccgaaacggagctccctgacgacatcccaagcatcgaagaaattctagctatacgagcggaacgatatcatctcttaaaaaatgacataaccgcagtgaccaaggaagggaagatcctgctcaccaatctcgaagtccccgataccgagggtgccgtgtcatcacgattggaatgccacaggcaaatttccggcgactggcagaccatcaataaacttcttacgcaggttcatgatatggaaacggcctttgacggattttgggaaaaacatcagcttaagatggagcagtacctccagctgtggaagtttgaacaggacttccaacagttagtgactgaggtggagtttctattaaaccagcaggcggagctagccgacgtgactggcacaatagcccaggtgaaacagaaaattaagaagctggaaaacttagacgaaaactctcaagagctgctgagtaaggcccagttcgttattcttcacggtcataaacttgccgcaaatcaccactatgcattagaccttatttgccagcgatgcaatgaactgaggtacctgtctgacatcctggtcaacgagataaaggcaaaaaggatacagctgtccaggacttttaagatgcacaagttattacagcaagcaagacagtgctgtgacgagggcgaatgtttgcttgccaatcaagagattgacaaattccagtctaaagaagatgcccaaaaggcacttcaagacatcgaaaattttctcgaaatggctcttccttttattaactatgaacctgaaacgctgcaatacgagttcgacgtcatcctgagtcctgaactgaaagtgcaaatgaaaaccatccagcttaaactggagaacatccgctcaattttcgagaaccagcaggccggatttaggaatctagcggacaagcatgttcgtcctatccaattcgtggttcccacacccgagaacctggttacctctggcaccccatttttcagcagcaaacaaggaaagaagacctggcggcagaaccagtccaacttgaagatcgaagtggtgcccgactgccaggaaaagcggtctagcggcccatcatccagcctcgacaacggcaattcccttgacgtgcttaagaaccatgttctcaacgagctcatacaaacggaaagagtttacgtgcgggagttgtacacggttctgctaggataccgtgctgaaatggacaacccagagatgtttgacctcatgccaccactgctgcgcaacaaaaaggacattctcttcggaaacatggcggaaatctatgaattccataatgatatcttcctgagcagtctcgagaattgcgcacatgctcctgaaagagtcgggccttgctttctcgagcggaaggatgattttcaaatgtacgccaagtattgtcaaaataagcccaggtcagagacaatctggagaaaatatagcgagtgcgcattctttcaggaatgccagcgcaaattaaagcacaggttaaggttggatagctacctgctcaagcccgtgcaaaggataactaaataccagctactcctgaaagaactccttaagtacagcaaggattgcgagggctcggctctgctcaagaaggcactcgacgccatgctggacctgcttaagagtgtgaacgattctatgcaccagatcgctatcaacggatacattggcaatctgaacgaacttggcaagatgatcatgcaggggggtttttctgtatggataggccacaaaaagggggctaccaagatgaaagatcttgccaggttcaaacccatgcagaggcacttgtttctctacgagaaggccatcgtcttttgtaaaaggcgagtcgaatctggcgagggaagcgaccggtacccatcttattcctttaagcattgctggaagatggacgaggttggtattaccgaatatgtgaagggcgataatcgaaagttcgagatttggtatggcgagaaggaggaagtctatatcgttcaggccagtaacgtagacgtcaaaatgacttggctcaaagaaatcaggaacatcctcctgaagcagcaagagctcttgaccgttaaaaagcgcaagcagcaggaccaactgaccgaaagggacaaatttcagatcagcttgcagcagaatgacgaaaaacagcagggtgcattcatatctaccgaggagacagagctcgagcatacctcaactgtcgtggaagtatgcgaggcgatagcctcagtgcaggccgaggccaacaccgtgtggacagaggctagccagtccgccgaaatttcggaggaacctgctgagtggtcgagtaattacttctacccgacctatgacgagaacgaggaagaaaataggcctcttatgcgtcctgtttccgagatggctctcctctattag

SEQ ID NO: 155432 - DNA, 2778 bp, Artificial Sequence
  derived and/or modified sequence
atggccgaggccaaccccagaagaggcaagatgagattcagaagaaacgccgccagcttccccggcaacctgcacctggtgctggtgctgagacccaccagcttcctgcagagaaccttcaccgacatcggcttctggttcagccaggaggacttcatgctgaagctgcccgtggtgatgctgagcagcgtgagcgacctgctgacctacatcgacgacaagcagctgacccccgagctgggcggcaccctgcagtactgccacagcgagtggatcatcttcagaaacgccatcgagaacttcgccctgaccgtgaaggagatggcccagatgctgcagagcttcggcaccgagctggccgagaccgagctgcccgacgacatccccagcatcgaggagatcctggccatcagagccgagagataccacctgctgaagaacgacatcaccgccgtgaccaaggagggcaagatcctgctgaccaacctggaggtgcccgacaccgagggcgccgtgagcagcagactggagtgccacagacagatcagcggcgactggcagaccatcaacaagctgctgacccaggtgcacgacatggagaccgccttcgacggcttctgggagaagcaccagctgaagatggagcagtacctgcagctgtggaagttcgagcaggacttccagcagctggtgaccgaggtggagttcctgctgaaccagcaggccgagctggccgacgtgaccggcaccatcgcccaggtgaagcagaagatcaagaagctggagaacctggacgagaacagccaggagctgctgagcaaggcccagttcgtgatcctgcacggccacaagctggccgccaaccaccactacgccctggacctgatctgccagagatgcaacgagctgagatacctgagcgacatcctggtgaacgagatcaaggccaagagaatccagctgagcagaaccttcaagatgcacaagctgctgcagcaggccagacagtgctgcgacgagggcgagtgcctgctggccaaccaggagatcgacaagttccagagcaaggaggacgcccagaaggccctgcaggacatcgagaacttcctggagatggccctgcccttcatcaactacgagcccgagaccctgcagtacgagttcgacgtgatcctgagccccgagctgaaggtgcagatgaagaccatccagctgaagctggagaacatcagaagcatcttcgagaaccagcaggccggcttcagaaacctggccgacaagcacgtgagacccatccagttcgtggtgcccacccccgagaacctggtgaccagcggcacccccttcttcagcagcaagcagggcaagaagacctggagacagaaccagagcaacctgaagatcgaggtggtgcccgactgccaggagaagagaagcagcggccccagcagcagcctggacaacggcaacagcctggacgtgctgaagaaccacgtgctgaacgagctgatccagaccgagagagtgtacgtgagagagctgtacaccgtgctgctgggctacagagccgagatggacaaccccgagatgttcgacctgatgccccccctgctgagaaacaagaaggacatcctgttcggcaacatggccgagatctacgagttccacaacgacatcttcctgagcagcctggagaactgcgcccacgcccccgagagagtgggcccctgcttcctggagagaaaggacgacttccagatgtacgccaagtactgccagaacaagcccagaagcgagaccatctggagaaagtacagcgagtgcgccttcttccaggagtgccagagaaagctgaagcacagactgagactggacagctacctgctgaagcccgtgcagagaatcaccaagtaccagctgctgctgaaggagctgctgaagtacagcaaggactgcgagggcagcgccctgctgaagaaggccctggacgccatgctggacctgctgaagagcgtgaacgacagcatgcaccagatcgccatcaacggctacatcggcaacctgaacgagctgggcaagatgatcatgcagggcggcttcagcgtgtggatcggccacaagaagggcgccaccaagatgaaggacctggccagattcaagcccatgcagagacacctgttcctgtacgagaaggccatcgtgttctgcaagagaagagtggagagcggcgagggcagcgacagataccccagctacagcttcaagcactgctggaagatggacgaggtgggcatcaccgagtacgtgaagggcgacaacagaaagttcgagatctggtacggcgagaaggaggaggtgtacatcgtgcaggccagcaacgtggacgtgaagatgacctggctgaaggagatcagaaacatcctgctgaagcagcaggagctgctgaccgtgaagaagagaaagcagcaggaccagctgaccgagagagacaagttccagatcagcctgcagcagaacgacgagaagcagcagggcgccttcatcagcaccgaggagaccgagctggagcacaccagcaccgtggtggaggtgtgcgaggccatcgccagcgtgcaggccgaggccaacaccgtgtggaccgaggccagccagagcgccgagatcagcgaggagcccgccgagtggagcagcaactacttctaccccacctacgacgagaacgaggaggagaacagacccctgatgagacccgtgagcgagatggccctgctgtactag

SEQ ID NO: 155433 - protein, 207 aa, Artificial Sequence
  derived and/or modified sequence
MAKTYDYLFKLLLIGDSGVGKTCVLFRFSEDAFNSTFISTIGIDFKIRTIELDGKRIKLQIWDTAGQERFRTITTAYYRGAMGIMLVYDITNEKSFDNIRNWIRNIEEHASADVEKMILGNKCDVNDKRQVSKERGEKLALDYGIKFMETSAKANINVENAFFTLARDIKAKMDKKLEGNSPQGSNQGVKITPDQQKRSSFFRCVLL

SEQ ID NO: 155434 - DNA, 624 bp, Artificial Sequence
  derived and/or modified sequence
atggcgaagacatacgattaccttttcaaattgttgctgattggcgacagcggggtgggaaagacttgcgtgctgttccgcttttctgaagacgcctttaactctacgttcatatcaacaatcggcattgatttcaagatcaggacaatcgagcttgatggtaagcgcattaaacttcagatttgggataccgccggtcaagagagatttaggacaataacaactgcctactacaggggagcaatgggcattatgctcgtctacgatatcaccaacgaaaagtcattcgataacatcagaaactggattagaaacatagaagagcatgccagcgcagatgttgagaaaatgatactgggtaataagtgcgatgtgaatgacaagaggcaggtgagcaaagaaaggggagagaaattagcccttgactatggcattaagttcatggaaacttccgcaaaggccaatattaatgtagaaaatgccttctttaccttggcaagagacataaaggctaagatggataagaagcttgagggcaatagcccccagggaagcaatcaaggagtgaagatcacccctgatcaacagaagagaagcagctttttccgctgcgttctgctgtag

SEQ ID NO: 155435 - DNA, 624 bp, Artificial Sequence
  derived and/or modified sequence
atggccaagacctatgactacctgttcaagctgctgctgattggagacagcggcgtgggcaagacctgtgtgctcttccgcttctctgaagatgccttcaacagcaccttcatcagcaccatcggcatcgacttcaagatccgcaccatcgagctggatggcaagaggatcaagctgcagatctgggacacagctggccaggagcgcttccgcaccatcaccacagcctactacagaggagccatgggcatcatgctggtgtatgacatcaccaatgagaagagctttgacaacatccggaactggatccggaacatcgaggagcacgccagcgcagatgtggagaagatgatcctgggcaacaagtgtgatgtgaatgacaagaggcaggtgtccaaggagcggggggagaagctggccctggactatggcatcaagttcatggagaccagcgccaaggccaacatcaacgtggagaatgccttcttcaccctggcccgggacatcaaggccaagatggacaagaagctggagggcaacagcccccagggcagcaaccagggcgtgaagatcaccccagaccagcagaagaggagcagcttcttccgctgtgtgctgctgtag

SEQ ID NO: 155436 - DNA, 624 bp, Artificial Sequence
  derived and/or modified sequence
atggccaagacctacgactacctgttcaagctgctgctgatcggcgacagcggtgtgggcaagacatgtgttctgttcaggtttagtgaggatgcctttaattctaccttcatttccacaatagggatcgacttcaaaatccgcaccatcgagctcgatgggaaacgtatcaagctgcaaatttgggacaccgctggccaggagaggtttagaaccatcaccaccgcatactaccggggagctatgggcattatgttggtttacgatatcacaaacgagaagagttttgataatattagaaattggatcagaaacattgaagaacatgccagtgccgacgtggagaagatgattctggggaataaatgcgatgtgaatgataagcgtcaggtcagcaaggagagaggcgagaagttggccctggactacggaatcaagttcatggaaacctccgcaaaagctaacatcaacgttgagaacgcattctttaccctcgccagagacataaaagctaaaatggataagaaactggagggtaattcacctcagggaagcaatcagggggtgaaaataactcccgatcagcaaaaacggtcaagtttttttcggtgtgtcttgttgtag

SEQ ID NO: 155437 - DNA, 624 bp, Artificial Sequence
  derived and/or modified sequence
atggcgaaaacatacgattatctgttcaagcttctgcttattggagactccggcgtgggtaagacctgtgtcttgtttaggttctcggaggacgcatttaacagcacatttatttcaacaatcgggattgactttaaaatacgcaccatcgaactggacggcaaaagaatcaaactccagatctgggacaccgcgggtcaggagaggtttcgcacgattacaacggcttattatcgcggagcgatgggcatcatgctggtatacgatattacaaacgaaaaatcttttgacaatatccggaattggattcgtaacattgaagagcacgcctcagctgacgtggagaaaatgattctgggtaacaagtgcgacgtgaatgataaacgtcaggtgtcaaaagagagaggggagaaactggccctcgattatggcatcaagtttatggagacctctgcaaaggccaacatcaatgtggagaacgctttcttcacactggcccgtgatattaaagccaagatggataagaaactagaaggcaattccccacaaggcagcaaccagggcgtgaagatcactcctgaccaacagaaaaggtcctccttcttccgctgcgtcttgctgtag

SEQ ID NO: 155438 - DNA, 2175 bp, Artificial Sequence
  derived and/or modified sequence
gtgccggccaatgggaggtgcgctcgggctgcttccggctccgcgctccgctcgccccctcccaaggtctccccgcgactggcgggacgcaggggcgggcgtcggccgcggtgacgcgcagcgggcctggagccaataaggggcgggctcggtgctgatggacggtgctggtggccagtggagaggcgctggccgcacttcccgtcggggagagagtgtaatatggcgaagacctacgattacctgttcaagctgctgctgatcggggactcgggggtggggaagacctgtgtcctgttccgcttctccgaggacgccttcaactccacttttatctccaccataggaattgactttaaaattaggaccatagagctcgatggcaagagaattaaactgcagatatgggacacagccggtcaggaacggtttcggacgatcacaacggcctactacaggggtgcaatgggcatcatgctggtctacgacatcaccaacgagaagtccttcgacaacatccggaactggattcgcaacattgaggagcacgcctctgcagacgtcgaaaagatgatactcgggaacaagtgtgatgtgaatgacaagagacaagtttccaaggaacggggagaaaagctggccctcgactatggaatcaagttcatggagaccagcgcgaaggccaacatcaatgtggaaaatgcatttttcactctcgccagagatatcaaagcaaaaatggacaaaaaattggaaggcaacagcccccaggggagcaaccagggagtcaaaatcacaccggaccagcagaagaggagcagctttttccgatgtgttcttctgtgaggaacaccgccttactctgagcctcgctcagcccagctgactgtgcctgttctgagtgagcccctcactcagccggggccctcccacctccaacgccccgcccacgccgcggccaccgggcccacggccaccagaatgcaattgagaaatcgtttattttagtaactgtctgatctttttcaactttggagatggaataagttaaaaatttgctatttttcctgtaacatctgctgaacgggcccacccacacgttgtatattcagagagagagagggagtcaaggtgtgaccgtcgaccacagccagtgtcaggcctctgcctctgggcctttgctttgtggcctcactgcaacacaaagctccaccaggaggctggttcacgtcccctaccacggaagcgaggtcccagaaggccagcggtggttccaggagcaacagctcccaaaccctgagcaaggcaaccgatcgccaggaccaggaagcatcacccaggagatttggcgcccacttccacctcttctctcagttttggacaagtgacaaaccattttgccccctcactcttcttttttaactgttaaaccaaaggaaagcacaaatgaaggaaatcctgtgtaaagcattgagaaggaaagaagcctggagcagcctctcctgtccacagccaggggttaggtctgcaggcccgtctgcggtccccatcgagcatcaaggggacgctgtgtgtgctgcaagtgaccccgaaaacaaccacagccgtcacatggtcctcctgaagttggggcaccctcctctcagcaccaaaatggcccccactccttcgtgtcctcccgctatctccaaatcggacgttctttctagctgagatttttatttttccacatctgtagtgccatgaagcgattctgtctttgacttccaatggcaaacctgggtgatcgggaacaagcacgttgtacccttggctggacatggccaagacacaaggcattccacggcggcaagctgaccgcacagcagtctggcttgattttcagccgtcatcattgggttctgttttgacagctctgctgtcccatagggactgcgactgggaccaggtcaaccacgccaggggggtgtcaccagccttttctttttttctttctttttttttttttcctccttaagctgctgtcaatccaaaccattggcatcatcgtttcttttgaattaaaaccaacatatcagcaatagtctgctctccccgggaatctctaacatgctctgtttacatcgataaatgcacttaaggaaaacaaacaaattaaagctcatcttaaagtcc

SEQ ID NO: 155439 - DNA, 624 bp, Artificial Sequence
  derived and/or modified sequence
atggccaagacctacgactacctgttcaagctgctgctgatcggcgacagcggcgtgggcaagacctgcgtgctgttcagattcagcgaggacgccttcaacagcaccttcatcagcaccatcggcatcgacttcaagatcagaaccatcgagctggacggcaagagaatcaagctgcagatctgggacaccgccggccaggagagattcagaaccatcaccaccgcctactacagaggcgccatgggcatcatgctggtgtacgacatcaccaacgagaagagcttcgacaacatcagaaactggatcagaaacatcgaggagcacgccagcgccgacgtggagaagatgatcctgggcaacaagtgcgacgtgaacgacaagagacaggtgagcaaggagagaggcgagaagctggccctggactacggcatcaagttcatggagaccagcgccaaggccaacatcaacgtggagaacgccttcttcaccctggccagagacatcaaggccaagatggacaagaagctggagggcaacagcccccagggcagcaaccagggcgtgaagatcacccccgaccagcagaagagaagcagcttcttcagatgcgtgctgctgtag

SEQ ID NO: 155440 - protein, 276 aa, Artificial Sequence
  derived and/or modified sequence
MAAETRNVAGAEAPPPQKRYYRQRAHSNPMADHTLRYPVKPEEMDWSELYPEFFAPLTQNQSHDDPKDKKEKRAQAQVEFADIGCGYGGLLVELSPLFPDTLILGLEIRVKVSDYVQDRIRALRAAPAGGFQNIACLRSNAMKHLPNFFYKGQLTKMFFLFPDPHFKRTKHKWRIISPTLLAEYAYVLRVGGLVYTITDVLELHDWMCTHFEEHPLFERVPLEDLSEDPVVGHLGTSTEEGKKVLRNGGKNFPAIFRRIQDPVLQAVTSQTSLPGH

SEQ ID NO: 155441 - DNA, 831 bp, Artificial Sequence
  derived and/or modified sequence
atggccgcagaaaccaggaacgtggcaggagccgaggctcctccacctcagaagcgatattatagacagagggctcattccaaccctatggcagatcacaccctgcggtaccccgtcaaaccagaggagatggattggagtgaactgtatccggagttcttcgcgcccctcacccaaaatcaaagccatgatgacccaaaggataaaaaggagaaacgcgcccaggcccaggtggagttcgcagacatcgggtgcgggtacggcgggctgctcgtggagttgtccccactgttccccgacaccctgattctgggcttggaaattcgggtgaaggtgagcgattatgtgcaagacaggatcagggcactgagagccgcccctgccgggggctttcagaacattgcatgcctgaggtctaacgcgatgaaacacttgcctaactttttctacaagggacagcttaccaaaatgtttttcctattccctgatccccacttcaagcgtacaaaacataaatggcggataatcagcccaaccctcctagccgaatacgcatacgtcttacgcgtgggcggcctggtgtacaccattacagacgtcctggagttacacgactggatgtgtacccattttgaagaacatcctctgttcgagagggtccccctggaggatttgtcggaggatcccgtggtcggccatctcggtacctccactgaggagggcaaaaaagtcctgaggaacggcggaaagaactttcccgccatctttaggagaatccaggatcccgtattgcaggccgtgaccagccagacatcactgccgggacactag

SEQ ID NO: 155442 - DNA, 831 bp, Artificial Sequence
  derived and/or modified sequence
atggctgctgagaccagaaatgtggccggggctgaggcccccccaccccagaagcgctactaccggcagagggcccacagcaaccccatggctgaccacaccctgcgctaccctgtgaagccagaggagatggactggagcgagctgtacccagagttctttgcccccctgacccagaaccagagccatgatgaccccaaggacaagaaggagaagagggcccaggcccaggtggagtttgctgacatcggctgcggctatggaggcctgctggtggagctgagccccctcttcccagacaccctcatcctgggcctggagatccgggtgaaggtgtctgactatgtgcaggaccgcatccgggccctgcgggccgccccagctgggggcttccagaacatcgcctgcctgcggagcaatgccatgaagcacctgcccaacttcttctacaagggccagctgaccaagatgttcttcctgttcccagacccccacttcaagaggaccaagcacaagtggaggatcatcagccccaccctgctggccgagtatgcctacgtgctgcgggtgggcggcctggtgtacaccatcacagatgtgctggagctgcatgactggatgtgcacccactttgaggagcaccccctgtttgagcgggtgcccctggaggacctgtctgaagatcctgtggtgggccacctgggcaccagcacagaggagggcaagaaggtgctgagaaatggaggcaagaacttccctgccatcttccgccgcatccaggaccctgtgctgcaggccgtgaccagccagaccagcctgcccggccactag

SEQ ID NO: 155443 - DNA, 2066 bp, Artificial Sequence
  derived and/or modified sequence
aaagagcccgacctcccgcgggaacaccgattccgactcagattcgggatctgggccggggtccgccatccggcccgccaagggagtgcctgggcaccgcggccggcgctcagatcccggatccggagcggggtagaggctgggggccgcgagccgtcgtggtgtccctgtggaacgagccccgcctccctgagtttgccctccttcctccagttcgatttcctggaggtggaatgaggagctgcccctcccgccccggccccgagcgcacactcgacgaaacccacacgggaccacaagagtcagaccgggcggactggtccgagaccaggagtaaggggacaggagcgaggactgatgccactgtagaaggcgaggtctctagacccctctcacctgtggggtgcacaggtgcctgcaaccaggatggtaacccagaccaggcagaagcaagctaagagaaaacgttgggtccctgggcctggcctcgccctcccagttggaggctaacggtgcggaggttccctccagcactcgctccttacagccctccccacctagcccagcccagcccagcccagcccagctgaatttgctcttgggtctttaaggggcgggaactgccaccaacgcgcatggctgcgtcattaacttgcgcctctggcctgcgcctccacgtggatttggtagagaaaccccggactgggatcatggcagccgagactcggaacgtggccggagcagaggccccaccgccccagaagcgctactaccggcaacgtgctcactccaaccccatggcggaccacacgctgcgctaccctgtgaagccagaggagatggactggtctgagctatacccagagttcttcgctccactcactcaaaatcagagccacgatgacccaaaggataagaaagaaaagagagctcaggcccaagtggagtttgcagacataggctgtggctatggtggcctgttagtggaactgtcaccgctgttcccagacacacttattctgggtctggagatccgggtgaaggtctcagactatgtacaagaccggattcgggccctacgcgcagctcctgcaggtggcttccagaacatcgcctgtctccgtagcaatgccatgaagcaccttcctaacttcttctacaagggccagctgacaaagatgttcttcctcttccccgacccacatttcaagcggacaaagcacaagtggcgaatcatcagtcccaccctgctagcagaatatgcctacgtgctaagagttggggggctggtgtataccataaccgatgtgctggagctacacgactggatgtgcactcatttcgaagagcacccactgtttgagcgtgtgcctctggaggacctgagtgaagaccccgttgtgggacatctaggcacctcaactgaggaggggaagaaagttctacgtaatggagggaagaatttcccagccatcttccgaagaatacaagatcccgtcctccaggcagtgacctcccaaaccagcctgcctggtcactgactgcttactctaccttagctggacctcgtctcccagggattagagaaaagagcaggagtcctgggtcttcccagttgagactgctggagctgagacacagtactctcttaaagaaggtggggagctgcccagggcagaacccactggtgttcatgactacccctggctcctctcaccttgtccctccactgccaacagaaaacaaagcagctgactgagatggtcaaaggactttggaccataggggatctttggaaggctgtggggtcttgctcttccttagcactcctttctccttgtgagatctctcctcagctggaatgaggaatgtagtccatctaaactgcttgctaggctcaattaccacttctgtttgctttgtggatcctgggataacatgtatatgtgtacacatgcctattctgccatttctcaggaaagggtggagtatgtatcatatgccttctaccatcctcctgtcctctccctgcgtaagacttgacctggggaatctgtgttccctaa

SEQ ID NO: 155444 - DNA, 831 bp, Artificial Sequence
  derived and/or modified sequence
atggccgccgagacccggaacgtggccggcgccgaggccccccccccccagaagaggtactaccggcagagagcacattccaacccgatggctgaccacacactccgctaccctgtgaaaccggaagaaatggattggtccgagctgtaccctgagttttttgcccctctgacgcagaatcagagccatgatgaccctaaagacaagaaagagaaaagagcacaggcccaagtagaattcgctgatatcggttgcggatacggaggccttcttgtggagctttcacccttgttcccagatacattgatcctcggactagagataagagtgaaagtgagcgattatgtgcaggacagaatacgtgcactgcgtgcagctcccgcaggaggattccaaaacatcgcttgtctgaggtctaacgctatgaaacacctgcctaacttcttttacaagggacagctgacaaagatgttctttctatttcctgacccccacttcaagaggacaaagcataaatggcgcatcatctctccaacactgctggctgaatacgcttacgtcttaagggtgggcggccttgtttacacaatcaccgacgtgctggagcttcacgactggatgtgtactcatttcgaggaacaccctctgtttgagagggtccctctggaggatctgagtgaagatccggtcgttgggcacctggggacctctaccgaggagggaaagaaagtactgcggaatggcggcaaaaacttccctgcgattttccgccgtattcaggaccccgtgctccaagctgtaacgagccagaccagcctgcctgggcactag

SEQ ID NO: 155445 - DNA, 831 bp, Artificial Sequence
  derived and/or modified sequence
atggctgcagagaccagaaacgttgctggagcagaggcacctccacctcaaaaacggtactacaggcagagagcccatagcaaccctatggctgaccacacactgaggtatcctgtgaagcccgaggaaatggattggagcgaactgtacccagaattttttgcccctctcacccagaatcagtctcacgatgatcctaaagacaaaaaggagaagcgagcacaggcccaggtggaattcgccgacatcggctgtgggtatggaggcctcctggtggaactcagcccgctgttccccgacactctgatcctgggccttgaaatccgggttaaggtcagcgactatgtccaagaccgtattagggcactgcgcgctgcccctgccggaggttttcagaatattgcgtgcttgcgttctaatgcaatgaagcacttaccaaactttttctacaagggccagctgaccaagatgtttttcctgtttcccgacccccattttaagcgcacaaagcacaagtggaggattattagtcccacgctgctggctgagtatgcttatgtgttgcgggtgggaggcctggtgtatacaatcactgacgtcctggagctgcatgattggatgtgtacccacttcgaggaacaccctctctttgagcgagtcccacttgaagatctctctgaggacccagtcgtggggcacctcggtactagcacagaggaggggaagaaggtgttgcgtaatggaggcaaaaacttccccgctatttttcggaggatccaagaccctgtgctgcaggctgtgacaagccagaccagcttgccgggtcattag

SEQ ID NO: 155446 - DNA, 831 bp, Artificial Sequence
  derived and/or modified sequence
atggccgccgagaccagaaacgtggccggcgccgaggccccccccccccagaagagatactacagacagagagcccacagcaaccccatggccgaccacaccctgagataccccgtgaagcccgaggagatggactggagcgagctgtaccccgagttcttcgcccccctgacccagaaccagagccacgacgaccccaaggacaagaaggagaagagagcccaggcccaggtggagttcgccgacatcggctgcggctacggcggcctgctggtggagctgagccccctgttccccgacaccctgatcctgggcctggagatcagagtgaaggtgagcgactacgtgcaggacagaatcagagccctgagagccgcccccgccggcggcttccagaacatcgcctgcctgagaagcaacgccatgaagcacctgcccaacttcttctacaagggccagctgaccaagatgttcttcctgttccccgacccccacttcaagagaaccaagcacaagtggagaatcatcagccccaccctgctggccgagtacgcctacgtgctgagagtgggcggcctggtgtacaccatcaccgacgtgctggagctgcacgactggatgtgcacccacttcgaggagcaccccctgttcgagagagtgcccctggaggacctgagcgaggaccccgtggtgggccacctgggcaccagcaccgaggagggcaagaaggtgctgagaaacggcggcaagaacttccccgccatcttcagaagaatccaggaccccgtgctgcaggccgtgaccagccagaccagcctgcccggccactag

SEQ ID NO: 155447 - protein, 346 aa, Artificial Sequence
  derived and/or modified sequence
MPSPLALRPYLRSEFSPSVDARPCSSPSELPAKLLLGATLPRAPRLPRRLAWCSIDWEQVCLLQRLGAGGFGSVYKATYRGVPVAIKQVNKCTKNRLASRRSFWAELNVARLRHDNIVRVVAASTRTPAGSNSLGTIIMEFGGNVTLHQVIYGAAGHPEGDAGEPHCRTGGQLSLGKCLKYSLDVVNGLLFLHSQSIVHLDLKPANILISEQDVCKISDFGCSEKLEDLLCFQTPSYPLGGTYTHRAPELLKGEGVTPKADIYSFAITLWQMTTKQAPYSGERQHILYAVVAYDLRPSLSAAVFEDSLPGQRLGDVIQRCWRPSAAQRPSARLLLVDLTSLKAELG

SEQ ID NO: 155448 - DNA, 1041 bp, Artificial Sequence
  derived and/or modified sequence
atgcccagccccctggccctgagaccctacctgagaagcgagttcagccccagcgtggacgccagaccctgcagcagccccagcgagctgcccgccaagctgctgctgggcgccaccctgcccagagcccccagactgcccagaagactggcctggtgcagcatcgactgggagcaggtgtgcctgctgcagagactgggcgccggcggcttcggcagcgtgtacaaggccacctacagaggcgtgcccgtggccatcaagcaggtgaacaagtgcaccaagaacagactggccagcagaagaagcttctgggccgagctgaacgtggccagactgagacacgacaacatcgtgagagtggtggccgccagcaccagaacccccgccggcagcaacagcctgggcaccatcatcatggagttcggcggcaacgtgaccctgcaccaggtgatctacggcgccgccggccaccccgagggcgacgccggcgagccccactgcagaaccggcggccagctgagcctgggcaagtgcctgaagtacagcctggacgtggtgaacggcctgctgttcctgcacagccagagcatcgtgcacctggacctgaagcccgccaacatcctgatcagcgagcaggacgtgtgcaagatcagcgacttcggctgcagcgagaagctggaggacctgctgtgcttccagacccccagctaccccctgggcggcacctacacccacagagcccccgagctgctgaagggcgagggcgtgacccccaaggccgacatctacagcttcgccatcaccctgtggcagatgaccaccaagcaggccccctacagcggcgagagacagcacatcctgtacgccgtggtggcctacgacctgagacccagcctgagcgccgccgtgttcgaggacagcctgcccggccagagactgggcgacgtgatccagagatgctggagacccagcgccgcccagagacccagcgccagactgctgctggtggacctgaccagcctgaaggccgagctgggctag

SEQ ID NO: 155449 - DNA, 1041 bp, Artificial Sequence
  derived and/or modified sequence
atgccctctccacttgccctccgaccttacctccgcagcgagtttagccccagtgttgatgcgcggccttgctcttccccatctgaactaccggccaaacttttactcggcgctactctgccaagagcccctcgtctccctcgcaggctcgcatggtgcagcatcgattgggagcaggtttgtctcctccagcggttgggggccggtggattcggctcggtgtacaaggcaacataccgcggtgtccccgtggctatcaaacaagtaaataaatgcaccaagaaccggctggccagcagaaggagcttttgggctgagcttaacgttgccagattgaggcatgacaatattgtaagggtggtcgccgcgtccacacggactcccgcaggaagcaactccctcggcacaattataatggagtttggaggaaatgttacacttcatcaagtgatttacggtgccgctggccatccggagggcgatgcaggggaaccccattgcagaactggaggccagctgtcattagggaagtgtctgaaatattccttagacgtcgtcaatggcctgctgtttctccactcgcaaagcatcgttcatctggacttaaagcctgcaaacattttaatcagtgagcaggatgtatgcaaaatctctgactttgggtgcagtgagaagctggaagacctgctgtgttttcaaactccgagttacccactcgggggcacatatacacacagggcacccgaactgctgaaaggagagggggtgacacccaaggccgacatctatagtttcgctattactttatggcaaatgactaccaaacaggcgccttactccggcgaacgacagcatatcctgtacgctgtagttgcctatgatttacggcccagtctctctgccgcagtgttcgaagatagtcttcccggacagaggctaggggatgtgattcaaaggtgttggcgcccatctgcagcacagagaccttccgctcggctgctgttggtagacctcacgtcccttaaagcagaacttggttag

SEQ ID NO: 155450 - DNA, 1041 bp, Artificial Sequence
  derived and/or modified sequence
atgcccagccccctggccctgcggccctacctgcggtctgagttcagccccagcgtggatgcccggccctgcagcagccccagcgagctgcctgccaagctgctgctgggcgccaccctgccccgggccccccggctgccccggcggctggcctggtgcagcattgactgggagcaggtgtgcctgctgcagaggctgggcgctgggggctttggatctgtgtacaaggccacctacagaggagtgcctgtggccatcaagcaggtgaacaagtgcaccaagaaccggctggccagccgccgctccttctgggccgagctgaatgtggcccggctgcggcatgacaacatcgtgcgggtggtggccgccagcaccaggaccccagctggcagcaacagcctgggcaccatcatcatggagtttggaggaaatgtgaccctgcaccaggtgatctacggggctgctggccacccagaaggagatgctggggagccccactgcaggactggaggccagctgagcctgggcaagtgcctgaagtacagcctggatgtggtgaatggcctgctcttcctgcacagccagagcatcgtgcacctggacctgaagccagccaacatcctgatcagcgagcaggatgtgtgcaagatcagtgactttggctgcagcgagaagctggaggacctgctgtgcttccagacccccagctaccccctgggcggcacctacacccaccgggcccctgagctgctgaagggggagggcgtgacccccaaggctgacatctacagctttgccatcaccctgtggcagatgaccaccaagcaggccccctacagcggggagcggcagcacatcctgtatgctgtggtggcctatgacctgcggcccagcctgtctgctgctgtgtttgaggacagcctgcccggccagaggctgggagatgtgatccagcgctgctggaggcccagcgctgcccagaggcccagcgcccggctgctgctggtggacctgaccagcctgaaggccgagctgggctag

SEQ ID NO: 155451 - DNA, 1041 bp, Artificial Sequence
  derived and/or modified sequence
atgcccagccccctggccctgcggccctacctgcggagcgagttcagcccctccgtggacgctaggccatgttcctctccttcagagctgccagcaaagttactcctgggtgcaactctaccgagagcccccagactgcctcgccgattggcctggtgcagtattgactgggaacaagtttgtttgctgcagcggcttggcgccggaggattcggaagtgtttacaaagctacctacaggggagttccagtagcaataaaacaagtcaataagtgtacgaagaacaggcttgcaagtcggcggtctttttgggccgaactgaacgtggcaagactccgacatgacaacatcgtgagggtggtcgctgcctcaacccgtactcctgccgggagtaattctctgggtaccataatcatggagttcggcgggaacgtgacgttgcaccaagttatatatggcgccgctggacaccccgaaggggacgccggcgagccgcactgtagaactggaggacaactgtccctcggaaagtgtctgaagtacagtctggacgtggtgaatggccttctgtttcttcactctcagtcgattgttcatttagatctaaaacccgccaacatactgatctctgagcaagatgtctgcaagatcagtgactttggatgtagcgagaaactcgaagacttgctctgtttccaaacaccaagttatcccctaggaggcacatacacacaccgtgctcccgagctcttgaagggtgaaggagtgactccaaaggccgatatttattcttttgctataacgctctggcagatgactacgaagcaagctccttatagcggcgagcggcagcatatattatacgccgtggttgcctacgatttgcgtccttccttaagcgcagccgtcttcgaggactctttacctggacagaggttaggggatgtgatacagagatgttggcgaccatccgccgcccagagaccttctgctaggttgttgttggtggacctcacgtcacttaaggccgaactcggttag

SEQ ID NO: 155452 - DNA, 1041 bp, Artificial Sequence
  derived and/or modified sequence
atgccctctccgctagcgctaagaccatatctgcggtccgaatttagccctagcgtggacgctcgcccttgctcctctcctagtgagctcccagcgaaattgttactgggcgctactttaccgcgagccccacgcctgcctcgtagacttgcttggtgctctattgattgggaacaagtgtgcctcttacagcggctgggagctgggggatttggaagcgtctataaagcgacctacagaggtgtgccagtggccataaaacaggtcaataagtgcaccaagaatagactggcttctcgcaggagtttctgggccgaacttaacgtggcaagattaagacatgacaacatcgtaagggtggttgccgcttcaacacgaactccggctgggtcaaacagcctgggcaccattattatggaattcggcggaaatgttaccctccaccaggttatttacggggctgccggtcacccagagggtgacgccggagaacctcactgtagaactggcggacaactctccctgggaaagtgcctgaagtactccctggacgtcgtgaacggtctgctgttcctacatagccagtccatcgttcatttggacctcaagcctgccaacattctcatttccgagcaagacgtgtgcaaaataagtgactttggctgctcggagaagctggaagatctactgtgctttcaaactcccagttaccccctgggagggacgtacacacacagagctccagaactgcttaagggcgaaggagtcacacctaaggctgatatctactcttttgccatcactctgtggcagatgacaacaaagcaagctccatactcaggtgagagacagcatattctgtacgcagtggtggcctacgatctgcgcccaagcctcagcgccgcagtttttgaggatagtctgccaggtcagagactgggtgatgtgatacagcggtgctggcgtccctctgcagcacaaagaccatccgccagactgctgttagtggacctgacaagtctgaaagctgaacttggttag

SEQ ID NO: 155453 - DNA, 1041 bp, Artificial Sequence
  derived and/or modified sequence
atgccctcgcccctggccctacgcccctacctccggagcgagttttccccatcggtggacgcgcggccctgcagcagtccctcagagctacctgcgaagctgcttctgggggccactcttcctcgggccccgcggctgccgcgccggctggcctggtgctccattgactgggagcaggtgtgcttgctgcagaggctgggagctggagggtttggctcggtgtacaaggcgacttaccgcggtgttcctgtggccataaagcaagtgaacaagtgcaccaagaaccgactagcatctcggcggagtttctgggctgagctcaacgtagcaaggctgcgccacgataacatcgtgcgcgtggtggctgccagcacgcgcacgcccgcagggtccaatagcctagggaccatcatcatggagttcggtggcaacgtcactttacaccaagtcatctatggcgccgccggccaccctgagggggacgcaggggagcctcactgccgcactggaggacagttaagtttgggaaagtgtctcaagtactcactagatgttgtgaacggcctgctcttcctccactcgcaaagcattgtgcacttggacctgaagcccgcgaacatcttgatcagtgagcaggatgtctgtaaaattagtgacttcggttgctctgagaagttggaagatctgctgtgcttccagacaccctcttaccctctaggaggcacatacacccaccgcgccccggagctcctgaaaggagagggcgtgacgcctaaagccgacatttattcctttgccatcactctctggcaaatgactaccaagcaggcgccgtattcgggggagcggcagcacatactgtacgcggtggtggcctacgacctgcgcccgtccctctccgctgccgtcttcgaggactcgctccccgggcagcgccttggggacgtcatccagcgctgctggagacccagcgcggcgcagaggccgagcgcgcggctgcttttggtggatctcacctctttgaaagctgaactcggctga

SEQ ID NO: 155454 - protein, 552 aa, Artificial Sequence
  derived and/or modified sequence
MPVAATNSETAMQQVLDNLGSLPSATGAAELDLIFLRGIMESPIVRSLAKAHERLEETKLEAVRDNNLELVQEILRDLAHVAEQSSTAAELAHILQEPHFQSLLETHDSVASKTYETPPPSPGLDPTFSNQPVPPDAVRMVGIRKTAGEHLGVTFRVEGGELVIARILHGGMVAQQGLLHVGDIIKEVNGQPVGSDPRALQELLRNASGSVILKILPSYQEPHLPRQVFVKCHFDYDPARDSLIPCKEAGLRFNAGDLLQIVNQDDANWWQACHVEGGSAGLIPSQLLEEKRKAFVKRDLELTPNSGTLCGSLSGKKKKRMMYLTTKNAEFDRHELLIYEEVARMPPFRRKTLVLIGAQGVGRRSLKNKLIMWDPDRYGTTVPYTSRRPKDSEREGQGYSFVSRGEMEADVRAGRYLEHGEYEGNLYGTRIDSIRGVVAAGKVCVLDVNPQAVKVLRTAEFVPYVVFIEAPDFETLRAMNRAALESGISTKQLTEADLRRTVEESSRIQRGYGHYFDLCLVNSNLERTFRELQTAMEKLRTEPQWVPVSWVY

SEQ ID NO: 155455 - protein, 73 aa, Artificial Sequence
  derived and/or modified sequence
MPVAATNSETAMQQVLDNLGSLPSATGAAELDLIFLRGIMESPIVRSLAKAHERLEETKLEAVRDNNLELVQE

SEQ ID NO: 155456 - DNA, 1659 bp, Artificial Sequence
  derived and/or modified sequence
atgcccgtggcagcaactaactctgaaacagccatgcagcaagtgttggataatctcggatccctgccgagcgctacaggcgccgccgagctcgatctcatcttcttgcgggggatcatggaatcaccaattgtgaggtccctggcaaaagcccacgagcgcctagaagaaactaagctagaggccgtcagagataataatcttgaactggtccaggaaattctacgcgatctcgctcacgtagctgagcagtcgagcaccgccgccgaattagcacacatcctgcaggagcctcacttccagagcttgctggaaacgcacgacagcgtggcatctaagacttacgaaacaccacccccttcgccaggtctcgaccccactttctccaatcagccggtgccaccagacgcagttcggatggtcggaattagaaagaccgctggagagcatctcggcgttacctttcgtgtcgaaggaggcgaactggtgatcgcccggattctccacggggggatggtcgcccagcaagggctgctgcatgtgggcgacattattaaagaagtgaatgggcagcctgtggggtcagatccgcgtgcgctgcaggagctgctgaggaatgcgagcggctcagtgattctgaaaatacttccgagttaccaagaaccccatctgcctcgtcaggttttcgtgaagtgccattttgactatgaccctgctagagacagcctgattccttgcaaggaagcaggactgcgcttcaatgctggggatctgttgcagatcgtgaaccaagacgacgcaaactggtggcaggcttgccacgtggaggggggcagtgccggtcttatcccctcgcagttgttggaggagaagaggaaggctttcgtaaaacgggacctggaattgacccctaattcgggcactctgtgcgggagcctgagtggcaaaaaaaagaaacgtatgatgtatttaacaaccaagaacgcagagttcgataggcacgagctgctgatttatgaggaagtggccaggatgcccccattccggcggaaaacgctggtactcattggcgcgcaaggtgttggtaggcgttctcttaaaaataagttaattatgtgggatcccgaccggtacggcactaccgtgccttatacttcgaggcgccctaaggattctgagagagagggacagggctattcctttgtgagcagaggtgagatggaggcagacgtaagggccggccgatacctggagcatggtgagtatgagggcaatctctacgggactaggatagacagtatcagaggcgtggtggccgcgggcaaggtatgcgtgctcgacgttaacccccaggcggttaaggtactgaggacagcagaattcgtgccatatgtggtgttcattgaagccccggatttcgaaacactccgtgcgatgaaccgggccgctctcgagtcaggaatctccaccaaacagttaactgaagctgacctcagacgcactgttgaggagagttcccgaattcagagggggtatggccactacttcgatctctgcttggtcaactccaatctcgagaggaccttccgcgagctgcagactgccatggagaaactgcgcactgaacctcagtgggtcccagtgagctgggtgtattag

SEQ ID NO: 155457 - DNA, 1626 bp, Artificial Sequence
  derived and/or modified sequence
atgcagcaggtattggacaaccttggaagcctcccatctgccacaggagccgccgagctggatctgatcttcctgagggggattatggagtccccaatcgtgcgatctctggcgaaagctcacgagcgattggaagaaacaaagctggaagcagtcagagataacaatctggaactggttcaggagattctccgcgatctcgcccatgtcgcagaacaatccagcaccgccgcggagctggcccatatcctgcaggaacctcacttccaaagcttgctggagacccatgactctgttgcctcgaaaacttacgaaacccccccaccttctcccggactggatcccacattctctaaccagcccgtgcctccggacgccgtgcggatggtaggtatcaggaagaccgccggtgaacatttgggcgtcacctttcgcgtggaggggggggagctcgtgatagctcgcatcctgcacggcggcatggtggcccagcaggggcttctgcacgtgggggacatcattaaagaggtaaatggacagccagttggaagtgatcctcgagccctccaagagctgcttcggaatgcgtctggctctgtcatattaaagattctgcccagctaccaggaaccgcatttacctagacaggtattcgttaaatgccactttgactacgatcccgctagagacagtctcatcccgtgtaaggaggctggcttacgctttaatgcaggtgatcttttgcagatcgtcaaccaggacgacgccaactggtggcaggcttgccatgtggagggaggctccgcaggtctgatcccatcacagctattagaagaaaagagaaaggccttcgttaagcgcgatctcgaacttacgcccaacagcggtaccctctgtgggagcctctctggaaagaagaaaaagaggatgatgtatcttaccaccaagaacgccgaatttgacaggcatgaacttctcatctacgaggaggtggctcgcatgcccccattccggcgtaagaccctggtcctgattggagcccagggagtgggacggcggagcctgaagaacaagttaatcatgtgggatcccgatcgctacggaactaccgtcccctacacaagcagacggccgaaagatagtgaacgcgaaggccaggggtacagctttgtgtccaggggggagatggaggccgacgtgcgtgccggccggtatctcgagcatggagagtacgaaggcaatctgtacgggacgcgcatagactccatccggggcgtggtcgcagctggtaaggtgtgcgtgcttgacgtgaaccctcaggccgtaaaggtcctacggacagctgagttcgtgccatatgtagtcttcattgaggcgcctgatttcgagaccttgagggcaatgaatcgtgcagctcttgaaagtggaatttcaaccaagcagttgactgaggccgatctgagaaggaccgtcgaggaatcaagtcggattcagagaggctatggccactactttgacctctgcctcgtaaacagcaacctggagcggaccttccgcgaactgcagacagccatggagaagctgcggactgagccacagtgggtgcctgtgagctgggtgtactag

SEQ ID NO: 155458 - DNA, 1659 bp, Artificial Sequence
  derived and/or modified sequence
atgcctgtggccgccaccaacagcgagacagccatgcagcaggtgctggacaacctgggcagcctgcccagcgccaccggggctgctgagctggacctgatcttcctgcggggcatcatggagagccccatcgtgcgcagcctggccaaggcccacgagcggctggaggagaccaagctggaggccgtgcgggacaacaacctggagctggtgcaggagatcctgcgggacctggcccacgtggccgagcagagcagcacagctgctgagctggcccacatcctgcaggagccccacttccagagcctgctggagacccatgattctgtggccagcaagacctatgagaccccaccacccagccctggcctggaccccaccttcagcaaccagcctgtgcccccagatgctgtgaggatggtgggcatcaggaagacagctggggagcacctgggcgtgaccttccgggtggagggcggggagctggtgattgcccgcatcctgcatggaggcatggtggcccagcagggcctgctgcacgtgggggacatcatcaaggaggtgaatggccagcctgtgggcagtgacccccgggccctgcaggagctgctgagaaatgccagcggcagcgtcatcctgaagatcctgcccagctaccaggagccccacctgccccggcaggtgtttgtgaagtgccactttgattatgaccctgcccgggacagcctcatcccctgcaaggaggccggcctgcgcttcaatgctggggacctgctgcagatcgtgaaccaggatgatgccaactggtggcaggcctgccacgtggagggcggcagcgctggcctcatccccagccagctgctggaggagaagaggaaggcctttgtgaagagggacctggagctgacccccaacagcggcaccctgtgtggcagcctgagcggcaagaagaagaagaggatgatgtacctgaccaccaagaatgctgagtttgacagacatgagctgctgatctatgaggaggtggccaggatgccacccttccggaggaagaccctggtgctgattggagcccagggcgtgggcagaagaagcctgaagaacaagctgatcatgtgggaccctgacagatatggcaccaccgtgccctacaccagcagaagacccaaggacagcgagcgggagggccagggctacagctttgtgtccagaggagagatggaggctgatgtgcgggccggccgctacctggagcacggggagtatgagggcaacctgtatggcaccagaattgacagcatccggggcgtggtggccgccggcaaggtgtgtgtgctggatgtgaacccccaggccgtgaaggtgctgaggacagctgagtttgtgccctacgtggtgttcatcgaggccccagactttgagaccctgcgggccatgaacagagctgccctggagagcggcatcagcaccaagcagctgacagaggccgacctgcggaggacagtggaggagagcagccgcatccagaggggctacggccactactttgacctgtgcctggtgaacagcaacctggagaggaccttccgggagctgcagacagccatggagaagctgaggacagagccccagtgggtgcctgtgtcctgggtgtactag

SEQ ID NO: 155459 - DNA, 1626 bp, Artificial Sequence
  derived and/or modified sequence
atgcagcaggtgctggacaacctgggcagcctgcccagcgccactggagctgctgagctggacctgatcttcctgcggggcatcatggagagccccatcgtgcgcagcctggccaaggcccacgagcggctggaggagaccaagctggaggccgtgcgggacaacaacctggagctggtgcaggagatcctgcgggacctggcccacgtggccgagcagagcagcacagctgctgagctggcccacatcctgcaggagccccacttccagagcctgctggagacccatgacagcgtggccagcaagacctatgagaccccaccacccagccctggcctggaccccaccttcagcaaccagcctgtgcccccagatgctgtgaggatggtgggcatcaggaagacagctggggagcacctgggcgtgaccttccgggtggagggcggggagctggtgattgcccgcatcctgcacggcggcatggtggcccagcagggcctgctgcacgtgggggacatcatcaaggaggtgaatggccagcctgtgggcagtgacccccgggccctgcaggagctgctgagaaatgccagcggcagcgtcatcctgaagatcctgcccagctaccaggagccccacctgccccggcaggtgtttgtgaagtgccactttgattatgaccctgcccgggacagcctcatcccctgcaaggaggccggcctgcgcttcaatgctggggacctgctgcagatcgtgaaccaggatgatgccaactggtggcaggcctgccacgtggagggcggcagcgctggcctcatccccagccagctgctggaggagaagaggaaggcctttgtgaagagggacctggagctgacccccaacagcggcaccctgtgtggcagcctgagcggcaagaagaagaagaggatgatgtacctgaccaccaagaatgctgagtttgacagacatgagctgctgatctatgaggaggtggccaggatgccacccttccggaggaagaccctggtgctgattggagcccagggcgtgggccgccgcagcctgaagaacaagctgatcatgtgggaccctgacagatatggcaccaccgtgccctacaccagccggcggcccaaggacagcgagcgggagggccagggctacagctttgtgtccagaggagagatggaggctgatgtgcgggccggccgctacctggagcacggggagtatgagggcaacctgtatggcaccagaattgacagcatccggggcgtggtggccgccggcaaggtgtgtgtgctggatgtgaacccccaggccgtgaaggtgctgaggacagctgagtttgtgccctacgtggtgttcatcgaggccccagactttgagaccctgcgggccatgaacagagctgccctggagagcggcatcagcaccaagcagctgacagaagctgacctgcggaggacagtggaggagagcagccgcatccagaggggctacggccactactttgacctgtgcctggtgaacagcaacctggagaggaccttccgggagctgcagacagccatggagaagctgaggacagagccccagtgggtgcctgtgtcctgggtgtactag

SEQ ID NO: 155460 - DNA, 1659 bp, Artificial Sequence
  derived and/or modified sequence
atgcccgtggccgccaccaacagcgagaccgccatgcagcaggtgcttgacaacctgggaagcctcccgagcgcaactggtgcggccgagctcgacctgattttccttagaggcattatggagagcccaatagtaagatcactggctaaagcccacgaaaggcttgaagaaactaaactggaggcagtccgggacaataatctggaacttgtgcaagaaattttgagagacctggcccatgtcgctgaacagtcaagcacagccgctgaactagctcacattctgcaggaacctcacttccaatccctgttggagacccacgatagcgtagcttcaaaaacgtatgaaacccctcccccatcacctgggctcgatcccacgttctccaatcagccagtgcccccggacgccgtaagaatggtcggtataagaaaaaccgcgggcgagcaccttggtgtgacatttcgcgttgaaggaggtgagctcgtaattgcccgcatcctgcacggcgggatggtggctcaacaaggcctcctgcatgttggtgatatcattaaggaagtgaacggccagccagtaggatcggacccaagagctctgcaggaactgttacggaatgcttccggcagcgtgatcctgaagatacttccaagctatcaagaaccacacctgcccaggcaggtgtttgtcaagtgtcacttcgactacgacccagctagggatagcttgattccttgcaaggaggccggcctgcgtttcaacgccggagacttgttacagatcgtgaatcaagacgacgccaactggtggcaggcttgccatgtggagggcgggtccgcagggctgataccctctcaactcctcgaagagaaacgcaaagctttcgttaagcgcgatctggagctcactcccaattctggaacactctgtggatctctatccgggaaaaaaaagaagcgtatgatgtacctgactactaaaaacgcggaatttgatcgacacgaactgttgatctacgaggaggtcgctaggatgccgccatttagaagaaagaccctggtgctgatcggtgcacagggagttggcaggaggtcgctgaagaacaaactcattatgtgggacccggatcgctacggtactacagtgccatatacctcacgcaggcccaaggattccgagagggagggtcaagggtactctttcgttagtcggggggagatggaggctgatgtacgggctggcaggtatctggaacacggtgaatatgagggtaatctgtacgggacccgcattgactctatacgaggcgtggtggccgcaggaaaagtatgcgtgctggacgtgaacccccaggctgtcaaggttcttaggacggctgaatttgttccatacgtggtctttatagaggctcccgatttcgagacactgcgggctatgaatcgggctgccttagaaagcggtattagtacaaagcagctgaccgaagctgacctgaggcggaccgtggaggaaagttctagaatacagcgaggctatggccattattttgacctctgtttggtgaacagtaaccttgagaggacgttccgagagctgcagacagctatggagaaactgagaactgagcctcaatgggtgccagtaagttgggtgtattag

SEQ ID NO: 155461 - DNA, 1626 bp, Artificial Sequence
  derived and/or modified sequence
atgcagcaggtgctggacaacctgggcagcctgcccagcgccaccggggcagccgaactggacttaatcttcctgcgcggaatcatggaatccccgatcgtgagaagtttggccaaggctcatgaacggctggaagagactaagctggaggcagtccgagacaacaacttggagctggtgcaggagattctgagagacttagctcacgtcgccgaacagtcatctaccgcagcagagctcgcccacattttacaggagccgcatttccagtctctgttagagacacatgattcagttgcctctaaaacctacgagactcctccacccagtcccggcctagacccgacattcagcaaccagcctgttccacccgacgcagtaagaatggtgggcatacgaaaaactgccggagaacacctgggcgtcacattccgcgtggaaggaggcgaactcgtgatcgctcgcattttgcatggcggcatggtcgcccagcagggactgctgcacgtcggcgatatcataaaggaggtgaatggccagcctgtaggatctgaccctagagctctgcaggagttgctacgaaacgcttccggtagcgttattttaaaaatcctaccttcgtaccaggaaccacacctgcctaggcaggtgtttgtcaagtgtcactttgactacgatccagcaagggatagtttgattccttgcaaggaggcgggtttgcgttttaatgccggcgatctgcttcagatcgtgaatcaagatgacgcgaactggtggcaagcgtgccatgttgagggcggatccgcggggcttattccttcccagctccttgaggaaaaacggaaggcatttgtcaagcgcgacttggagctcacccctaacagtggcaccctgtgcgggagtctgtcagggaagaaaaagaagagaatgatgtacctgacgaccaaaaacgccgagttcgaccggcacgaactcctgatttatgaggaggtagccagaatgcccccctttcggagaaaaacgttagtcctgattggcgcccagggagtgggcagaaggtctctgaaaaacaaattgattatgtgggaccccgaccgctatggtactacagttccttacactagccggcgaccgaaggatagcgaaagggaagggcaggggtatagcttcgtgtcaaggggcgagatggaggccgacgttagggcaggtagatatctggagcacggtgaatatgaggggaatctctacggcacccgaatagactccataagaggagttgtggccgcaggaaaggtgtgtgttctagatgtgaatccacaggctgtcaaggtgttacgtacagcggagttcgtgccatacgtcgtctttattgaagctccagatttcgaaacacttcgagcgatgaaccgggccgctctcgaatccggcatcagtacaaaacagcttaccgaggccgatctgcgccgcacagtcgaagagtcctcaagaatccagcggggctacggacactacttcgacctttgcctcgttaatagcaatttagagcgcacgttccgtgagctgcagaccgccatggaaaaactccggactgaacctcaatgggtcccggtgtcctgggtctactag

SEQ ID NO: 155462 - DNA, 1659 bp, Artificial Sequence
  derived and/or modified sequence
atgcccgtagccgcaaccaacagcgagacggcaatgcagcaagtcctcgacaatctgggctcactgcctagtgcaactggggcagccgagttggatctgatctttctccgcggtattatggaaagccccattgttcgatctcttgccaaggcccatgaacgcttagaagagaccaagcttgaggccgtacgggataataatctggagttggtacaagaaatccttcgggatctcgcccacgtggctgagcaatcgagcactgcagccgagctggcacacatcctgcaggagccacattttcagtccctgctggagacacacgactcggttgcttctaagacctatgagaccccccctccatcccccggtctggaccctaccttctcaaaccaacctgtcccacctgatgcagtgagaatggtcgggattcgtaaaacagcaggtgagcacctcggagttactttcagggtcgaaggcggagagctggtgatagcacgaatcctgcacgggggtatggtagcacagcaagggctgcttcatgtgggggacataatcaaagaggttaacgggcaaccagtgggcagcgatccgcgagccttgcaagagctccttcggaacgctagtgggtccgtgatcctaaagatactgccttcatatcaggagcctcaccttcctagacaggtgtttgtcaaatgccactttgactatgaccctgcacgagactctttgattccttgcaaggaagcaggacttcgcttcaacgctggggacctcttacagatcgtcaaccaggatgacgctaactggtggcaggcgtgccacgtggaggggggtagtgctggactcatcccaagccagttgctcgaggagaagcggaaagcttttgttaaacgggacctggaactaacacccaacagtggcaccctctgtggaagcctgtccggcaagaagaagaaacgaatgatgtacctgaccaccaagaacgcagagtttgataggcacgaactgctcatttatgaggaagtcgccagaatgcctccttttaggcggaagacacttgtgcttattggggctcagggggtgggcagacgcagccttaagaataaactgataatgtgggatccagaccgatacgggacaacagttccctacacatctaggcgcccaaaagacagcgaacgcgagggccaggggtactctttcgtctctaggggagaaatggaagcagacgtgagggctggtagatacctggaacatggcgaatacgaaggaaacctgtacggaacacggatcgactcaataaggggggtggtagctgcaggaaaggtgtgcgtgctcgatgtgaatccccaggccgtcaaggtgttaagaaccgctgaatttgttccctatgtagtatttattgaggccccagactttgagacattgagagcaatgaatagggccgctttggagtccggcatctccacgaaacagctgacagaggctgacctgcgacgcaccgtcgaggaaagttctcggatccagagaggatatgggcactattttgacttatgcttggttaacagcaatctggaacgcactttcagagagctgcagaccgccatggaaaaactcagaactgagccccagtgggtgcctgtgtcgtgggtgtattag

SEQ ID NO: 155463 - DNA, 1626 bp, Artificial Sequence
  derived and/or modified sequence
atgcagcaggtgctcgacaatctcggatccctgccctccgcgactggtgccgcagaacttgaccttatcttcttgaggggtatcatggagtctcccatcgtgcgttctctggcaaaggcccacgagcggctggaagagaccaaattggaggctgtccgcgacaacaatctagagctggtccaggaaattctccgcgatttggctcacgtggcagaacagtcttcaaccgctgctgagctggcacacatccttcaggagcctcattttcaaagtctgctcgaaacccatgactccgtggcttcaaaaacctacgaaacacccccaccatcccccggactggatccgactttcagcaaccagcccgtgccgcctgacgcagtgaggatggtcggaatcaggaagacagccggagaacacttaggggtgacttttcgtgttgaggggggagagttggttatagctaggatactacatggtggtatggtggcccagcagggactgctgcatgtgggtgacattatcaaggaggtgaatggccaacctgtggggagcgaccctagagctttgcaggaactgttgcgcaacgcatccggatcagtaatcctgaaaattcttccctcttatcaagaaccccatctgccccgtcaggtgtttgtgaaatgtcacttcgactacgatccagctagagacagcctgatcccgtgcaaggaggcaggcctcaggttcaacgctggagatctgttgcaaattgtgaaccaggacgatgcaaactggtggcaagcctgccacgtggagggagggagcgcagggctgatccccagccagttgctcgaggagaagcggaaggcattcgtcaaaagggatttggaactcacccctaatagcggcaccctgtgtggcagtctctctggcaagaagaagaagaggatgatgtatttgaccaccaaaaatgctgaattcgatcggcatgagttgcttatttatgaagaggtggccaggatgcctccctttcgccgtaaaactttggtgctgattggtgcccaaggcgtaggtcggcgaagcctcaaaaacaaactgataatgtgggaccccgacagatatggaaccaccgtaccctacaccagcagaaggcccaaagattcagagcgagaaggccaagggtactccttcgtgtctaggggtgagatggaggccgatgtccgggctggccgatacctggaacatggggaatacgagggcaacctgtatgggacgagaatagatagcattagaggcgtcgtcgctgcagggaaggtctgtgtcctcgacgtgaacccccaggccgtgaaggtgttacggaccgctgaattcgttccatatgtcgtattcatagaggcccctgatttcgagacactgagggcgatgaatcgggctgctttagagagtggcatctccacaaagcagttaacggaagccgatcttcgtcgcaccgtcgaggaatcatcccggatacagaggggatatggacattattttgatctctgccttgtgaattcgaatctcgaacgaacctttagagaactgcagactgcaatggagaagctacgtacagaacctcagtgggttcccgtctcctgggtgtattag

SEQ ID NO: 155464 - DNA, 1659 bp, Artificial Sequence
  derived and/or modified sequence
atgcccgtggccgccaccaacagcgagaccgccatgcagcaggtgctggacaacctgggcagcctgcccagcgccaccggcgccgccgagctggacctgatcttcctgagaggcatcatggagagccccatcgtgagaagcctggccaaggcccacgagagactggaggagaccaagctggaggccgtgagagacaacaacctggagctggtgcaggagatcctgagagacctggcccacgtggccgagcagagcagcaccgccgccgagctggcccacatcctgcaggagccccacttccagagcctgctggagacccacgacagcgtggccagcaagacctacgagacccccccccccagccccggcctggaccccaccttcagcaaccagcccgtgccccccgacgccgtgagaatggtgggcatcagaaagaccgccggcgagcacctgggcgtgaccttcagagtggagggcggcgagctggtgatcgccagaatcctgcacggcggcatggtggcccagcagggcctgctgcacgtgggcgacatcatcaaggaggtgaacggccagcccgtgggcagcgaccccagagccctgcaggagctgctgagaaacgccagcggcagcgtgatcctgaagatcctgcccagctaccaggagccccacctgcccagacaggtgttcgtgaagtgccacttcgactacgaccccgccagagacagcctgatcccctgcaaggaggccggcctgagattcaacgccggcgacctgctgcagatcgtgaaccaggacgacgccaactggtggcaggcctgccacgtggagggcggcagcgccggcctgatccccagccagctgctggaggagaagagaaaggccttcgtgaagagagacctggagctgacccccaacagcggcaccctgtgcggcagcctgagcggcaagaagaagaagagaatgatgtacctgaccaccaagaacgccgagttcgacagacacgagctgctgatctacgaggaggtggccagaatgccccccttcagaagaaagaccctggtgctgatcggcgcccagggcgtgggcagaagaagcctgaagaacaagctgatcatgtgggaccccgacagatacggcaccaccgtgccctacaccagcagaagacccaaggacagcgagagagagggccagggctacagcttcgtgagcagaggcgagatggaggccgacgtgagagccggcagatacctggagcacggcgagtacgagggcaacctgtacggcaccagaatcgacagcatcagaggcgtggtggccgccggcaaggtgtgcgtgctggacgtgaacccccaggccgtgaaggtgctgagaaccgccgagttcgtgccctacgtggtgttcatcgaggcccccgacttcgagaccctgagagccatgaacagagccgccctggagagcggcatcagcaccaagcagctgaccgaggccgacctgagaagaaccgtggaggagagcagcagaatccagagaggctacggccactacttcgacctgtgcctggtgaacagcaacctggagagaaccttcagagagctgcagaccgccatggagaagctgagaaccgagccccagtgggtgcccgtgagctgggtgtactag

SEQ ID NO: 155465 - DNA, 1626 bp, Artificial Sequence
  derived and/or modified sequence
atgcagcaggtgctggacaacctgggcagcctgcccagcgccaccggcgccgccgagctggacctgatcttcctgagaggcatcatggagagccccatcgtgagaagcctggccaaggcccacgagagactggaggagaccaagctggaggccgtgagagacaacaacctggagctggtgcaggagatcctgagagacctggcccacgtggccgagcagagcagcaccgccgccgagctggcccacatcctgcaggagccccacttccagagcctgctggagacccacgacagcgtggccagcaagacctacgagacccccccccccagccccggcctggaccccaccttcagcaaccagcccgtgccccccgacgccgtgagaatggtgggcatcagaaagaccgccggcgagcacctgggcgtgaccttcagagtggagggcggcgagctggtgatcgccagaatcctgcacggcggcatggtggcccagcagggcctgctgcacgtgggcgacatcatcaaggaggtgaacggccagcccgtgggcagcgaccccagagccctgcaggagctgctgagaaacgccagcggcagcgtgatcctgaagatcctgcccagctaccaggagccccacctgcccagacaggtgttcgtgaagtgccacttcgactacgaccccgccagagacagcctgatcccctgcaaggaggccggcctgagattcaacgccggcgacctgctgcagatcgtgaaccaggacgacgccaactggtggcaggcctgccacgtggagggcggcagcgccggcctgatccccagccagctgctggaggagaagagaaaggccttcgtgaagagagacctggagctgacccccaacagcggcaccctgtgcggcagcctgagcggcaagaagaagaagagaatgatgtacctgaccaccaagaacgccgagttcgacagacacgagctgctgatctacgaggaggtggccagaatgccccccttcagaagaaagaccctggtgctgatcggcgcccagggcgtgggcagaagaagcctgaagaacaagctgatcatgtgggaccccgacagatacggcaccaccgtgccctacaccagcagaagacccaaggacagcgagagagagggccagggctacagcttcgtgagcagaggcgagatggaggccgacgtgagagccggcagatacctggagcacggcgagtacgagggcaacctgtacggcaccagaatcgacagcatcagaggcgtggtggccgccggcaaggtgtgcgtgctggacgtgaacccccaggccgtgaaggtgctgagaaccgccgagttcgtgccctacgtggtgttcatcgaggcccccgacttcgagaccctgagagccatgaacagagccgccctggagagcggcatcagcaccaagcagctgaccgaggccgacctgagaagaaccgtggaggagagcagcagaatccagagaggctacggccactacttcgacctgtgcctggtgaacagcaacctggagagaaccttcagagagctgcagaccgccatggagaagctgagaaccgagccccagtgggtgcccgtgagctgggtgtactag

SEQ ID NO: 155466 - protein, 612 aa, Artificial Sequence
  derived and/or modified sequence
MARRPRHSIYSSDEDDEDFEMCDHDYDGLLPKSGKRHLGKTRWTREEDEKLKKLVEQNGTDDWKVIANYLPNRTDVQCQHRWQKVLNPELIKGPWTKEEDQRVIELVQKYGPKRWSVIAKHLKGRIGKQCRERWHNHLNPEVKKTSWTEEEDRIIYQAHKRLGNRWAEIAKLLPGRTDNAIKNHWNSTMRRKVEQEGYLQESSKASQPAVATSFQKNSHLMGFAQAPPTAQLPATGQPTVNNDYSYYHISEAQNVSSHVPYPVALHVNIVNVPQPAAAAIQRHYNDEDPEKEKRIKELELLLMSTENELKGQQVLPTQNHTCSYPGWHSTTIADHTRPHGDSAPVSCLGEHHSTPSLPADPGSLPEESASPARCMIVHQGTILDNVKNLLEFAETLQFIDSFLNTSSNHENSDLEMPSLTSTPLIGHKLTVTTPFHRDQTVKTQKENTVFRTPAIKRSILESSPRTPTPFKHALAAQEIKYGPLKMLPQTPSHLVEDLQDVIKQESDESGIVAEFQENGPPLLKKIKQEVESPTDKSGNFFCSHHWEGDSLNTQLFTQTSPVADAPNILTSSVLMAPASEDEDNVLKAFTVPKNRSLASPLQATKAQRLFQF

SEQ ID NO: 155467 - protein, 726 aa, Artificial Sequence [sequence omitted]

SEQ ID NO: 155468 - protein, 640 aa, Artificial Sequence
  derived and/or modified sequence
MARRPRHSIYSSDEDDEDFEMCDHDYDGLLPKSGKRHLGKTRWTREEDEKLKKLVEQNGTDDWKVIANYLPNRTDVQCQHRWQKVLNPELIKGPWTKEEDQRVIELVQKYGPKRWSVIAKHLKGRIGKQCRERWHNHLNPEVKKTSWTEEEDRIIYQAHKRLGNRWAEIAKLLPGRTDNAIKNHWNSTMRRKVEQEGYLQESSKASQPAVATSFQKNSHLMGFAQAPPTAQLPATGQPTVNNDYSYYHISEAQNVSSHVPYPVALHVNIVNVPQPAAAAIQRHYNDEDPEKEKRIKELELLLMSTENELKGQQVLPTQNHTCSYPGWHSTTIADHTRPHGDSAPVSCLGEHHSTPSLPADPGSLPEESASPARCMIVHQGTILDNVKNLLEFAETLQFIDSFLNTSSNHENSDLEMPSLTSTPLIGHKLTVTTPFHRDQTVKTQKENTVFRTPAIKRSILESSPRTPTPFKHALAAQEIKYGPLKMLPQTPSHLVEDLQDVIKQESDESGIVAEFQENGPPLLKKIKQEVESPTDKSGNFFCSHHWEGDSLNTQLFTQTSPVADAPNILTSSVLMAPASEDEDNVLKAFTVPKNRSLASPLQPCSSTWEPASCGKMEEQMTSSSQARKYVNAFSARTLVM

SEQ ID NO: 155469 - DNA, 3342 bp, Artificial Sequence
  derived and/or modified sequence
aatatcaacctgtttcctcctcctccttctcctcctcctccgtgacctcctcctcctctttctcctgagaaacttcgccccagcggtgcggagcgccgctgcgcagccggggagggacgcaggcaggcggcgggcagcgggaggcggcagcccggtgcggtccccgcggctctcggcggagccccgcgcccgccgcgccatggcccgaagaccccggcacagcatatatagcagtgacgaggatgatgaggactttgagatgtgtgaccatgactatgatgggctgcttcccaagtctggaaagcgtcacttggggaaaacaaggtggacccgggaagaggatgaaaaactgaagaagctggtggaacagaatggaacagatgactggaaagttattgccaattatctcccgaatcgaacagatgtgcagtgccagcaccgatggcagaaagtactaaaccctgagctcatcaagggtccttggaccaaagaagaagatcagagagtgatagagcttgtacagaaatacggtccgaaacgttggtctgttattgccaagcacttaaaggggagaattggaaaacaatgtagggagaggtggcataaccacttgaatccagaagttaagaaaacctcctggacagaagaggaagacagaattatttaccaggcacacaagagactggggaacagatgggcagaaatcgcaaagctactgcctggacgaactgataatgctatcaagaaccactggaattctacaatgcgtcggaaggtcgaacaggaaggttatctgcaggagtcttcaaaagccagccagccagcagtggccacaagcttccagaagaacagtcatttgatgggttttgctcaggctccgcctacagctcaactccctgccactggccagcccactgttaacaacgactattcctattaccacatttctgaagcacaaaatgtctccagtcatgttccataccctgtagcgttacatgtaaatatagtcaatgtccctcagccagctgccgcagccattcagagacactataatgatgaagaccctgagaaggaaaagcgaataaaggaattagaattgctcctaatgtcaaccgagaatgagctaaaaggacagcaggtgctaccaacacagaaccacacatgcagctaccccgggtggcacagcaccaccattgccgaccacaccagacctcatggagacagtgcacctgtttcctgtttgggagaacaccactccactccatctctgccagcggatcctggctccctacctgaagaaagcgcctcgccagcaaggtgcatgatcgtccaccagggcaccattctggataatgttaagaacctcttagaatttgcagaaacactccaatttatagattctttcttaaacacttccagtaaccatgaaaactcagacttggaaatgccttctttaacttccacccccctcattggtcacaaattgactgttacaacaccatttcatagagaccagactgtgaaaactcaaaaggaaaatactgtttttagaaccccagctatcaaaaggtcaatcttagaaagctctccaagaactcctacaccattcaaacatgcacttgcagctcaagaaattaaatacggtcccctgaagatgctacctcagacaccctctcatctagtagaagatctgcaggatgtgatcaaacaggaatctgatgaatctggaattgttgctgagtttcaagaaaatggaccacccttactgaagaaaatcaaacaagaggtggaatctccaactgataaatcaggaaacttcttctgctcacaccactgggaaggggacagtctgaatacccaactgttcacgcagacctcgcctgtggcagatgcaccgaatattcttacaagctccgttttaatggcaccagcatcagaagatgaagacaatgttctcaaagcatttacagtacctaaaaacaggtccctggcgagccccttgcagccttgtagcagtacctgggaacctgcatcctgtggaaagatggaggagcagatgacatcttccagtcaagctcgtaaatacgtgaatgcattctcagcccggacgctggtcatgtgagacatttccagaaaagcattatggttttcagaacacttcaagttgacttgggatatatcattcctcaacatgaaacttttcatgaatgggagaagaacctatttttgttgtggtacaacagttgagagcagcaccaagtgcatttagttgaatgaagtcttcttggatttcacccaactaaaaggatttttaaaaataaataacagtcttacctaaattattaggtaatgaattgtagccagttgttaatatcttaatgcagatttttttaaaaaaaacataaaatgatttatctgtattttaaaggatccaacagatcagtattttttcctgtgatgggttttttgaaatttgacacattaaaaggtactccagtatttcacttttctcgatcactaaacatatgcatatatttttaaaaatcagtaaaagcattactctaagtgtagacttaataccatgtgacatttaatccagattgtaaatgctcatttatggttaatgacattgaaggtacatttattgtaccaaaccattttatgagttttctgttagcttgctttaaaaattattactgtaagaaatagttttataaaaaattatatttttattcagtaatttaattttgtaaatgccaaatgaaaaacgttttttgctgctatggtcttagcctgtagacatgctgctagtatcagaggggcagtagagcttggacagaaagaaaagaaacttggtgttaggtaattgactatgcactagtatttcagactttttaattttatatatatatacattttttttccttctgcaatacatttgaaaacttgtttgggagactctgcattttttattgtggtttttttgttattgttggtttatacaagcatgcgttgcacttcttttttgggagatgtgtgttgttgatgttctatgttttgttttgagtgtagcctgactgttttataatttgggagttctgcatttgatccgcatcccctgtggtttctaagtgtatggtctcagaactgttgcatggatcctgtgtttgcaactggggagacagaaactgtggttgatagccagtcactgccttaagaacatttgatgcaagatggccagcactgaacttttgagatatgacggtgtacttactgccttgtagcaaaataaagatgtgcccttattttacctaaaaaaaaaaaaaaaaaaaaaaaaaaaaa

SEQ ID NO: 155470 - DNA, 1839 bp, Artificial Sequence
  derived and/or modified sequence
atggccagaagacccagacacagcatctacagcagcgacgaggacgacgaggacttcgagatgtgcgaccacgactacgacggcctgctgcccaagagcggcaagagacacctgggcaagaccagatggaccagagaggaggacgagaagctgaagaagctggtggagcagaacggcaccgacgactggaaggtgatcgccaactacctgcccaacagaaccgacgtgcagtgccagcacagatggcagaaggtgctgaaccccgagctgatcaagggcccctggaccaaggaggaggaccagagagtgatcgagctggtgcagaagtacggccccaagagatggagcgtgatcgccaagcacctgaagggcagaatcggcaagcagtgcagagagagatggcacaaccacctgaaccccgaggtgaagaagaccagctggaccgaggaggaggacagaatcatctaccaggcccacaagagactgggcaacagatgggccgagatcgccaagctgctgcccggcagaaccgacaacgccatcaagaaccactggaacagcaccatgagaagaaaggtggagcaggagggctacctgcaggagagcagcaaggccagccagcccgccgtggccaccagcttccagaagaacagccacctgatgggcttcgcccaggccccccccaccgcccagctgcccgccaccggccagcccaccgtgaacaacgactacagctactaccacatcagcgaggcccagaacgtgagcagccacgtgccctaccccgtggccctgcacgtgaacatcgtgaacgtgccccagcccgccgccgccgccatccagagacactacaacgacgaggaccccgagaaggagaagagaatcaaggagctggagctgctgctgatgagcaccgagaacgagctgaagggccagcaggtgctgcccacccagaaccacacctgcagctaccccggctggcacagcaccaccatcgccgaccacaccagaccccacggcgacagcgcccccgtgagctgcctgggcgagcaccacagcacccccagcctgcccgccgaccccggcagcctgcccgaggagagcgccagccccgccagatgcatgatcgtgcaccagggcaccatcctggacaacgtgaagaacctgctggagttcgccgagaccctgcagttcatcgacagcttcctgaacaccagcagcaaccacgagaacagcgacctggagatgcccagcctgaccagcacccccctgatcggccacaagctgaccgtgaccacccccttccacagagaccagaccgtgaagacccagaaggagaacaccgtgttcagaacccccgccatcaagagaagcatcctggagagcagccccagaacccccacccccttcaagcacgccctggccgcccaggagatcaagtacggccccctgaagatgctgccccagacccccagccacctggtggaggacctgcaggacgtgatcaagcaggagagcgacgagagcggcatcgtggccgagttccaggagaacggcccccccctgctgaagaagatcaagcaggaggtggagagccccaccgacaagagcggcaacttcttctgcagccaccactgggagggcgacagcctgaacacccagctgttcacccagaccagccccgtggccgacgcccccaacatcctgaccagcagcgtgctgatggcccccgccagcgaggacgaggacaacgtgctgaaggccttcaccgtgcccaagaacagaagcctggccagccccctgcaggccaccaaggcccagagactgttccagttctag

SEQ ID NO: 155471 - DNA, 2181 bp, Artificial Sequence
  derived and/or modified sequence
atggccagaagacccagacacagcatctacagcagcgacgaggacgacgaggacttcgagatgtgcgaccacgactacgacggcctgctgcccaagagcggcaagagacacctgggcaagaccagatggaccagagaggaggacgagaagctgaagaagctggtggagcagaacggcaccgacgactggaaggtgatcgccaactacctgcccaacagaaccgacgtgcagtgccagcacagatggcagaaggtgctgaaccccgagctgatcaagggcccctggaccaaggaggaggaccagagagtgatcgagctggtgcagaagtacggccccaagagatggagcgtgatcgccaagcacctgaagggcagaatcggcaagcagtgcagagagagatggcacaaccacctgaaccccgaggtgaagaagaccagctggaccgaggaggaggacagaatcatctaccaggcccacaagagactgggcaacagatgggccgagatcgccaagctgctgcccggcagaaccgacaacgccatcaagaaccactggaacagcaccatgagaagaaaggtggagcaggagggctacctgcaggagagcagcaaggccagccagcccgccgtggccaccagcttccagaagaacagccacctgatgggcttcgcccaggccccccccaccgcccagctgcccgccaccggccagcccaccgtgaacaacgactacagctactaccacatcagcgaggcccagaacgtgagcagccacgtgccctaccccgtggccctgcacgtgaacatcgtgaacgtgccccagcccgccgccgccgccatccagagacactacaacgacgaggaccccgagaaggagaagagaatcaaggagctggagctgctgctgatgagcaccgagaacgagctgaagggccagcaggtgctgcccacccagaaccacacctgcagctaccccggctggcacagcaccaccatcgccgaccacaccagaccccacggcgacagcgcccccgtgagctgcctgggcgagcaccacagcacccccagcctgcccgccgaccccggcagcctgcccgaggagagcgccagccccgccagatgcatgatcgtgcaccagggcaccatcctggacaacgtgaagaacctgctggagttcgccgagaccctgcagttcatcgacagcttcctgaacaccagcagcaaccacgagaacagcgacctggagatgcccagcctgaccagcacccccctgatcggccacaagctgaccgtgaccacccccttccacagagaccagaccgtgaagacccagaaggagaacaccgtgttcagaacccccgccatcaagagaagcatcctggagagcagccccagaacccccacccccttcaagcacgccctggccgcccaggagatcaagtacggccccctgaagatgctgccccagacccccagccacctggtggaggacctgcaggacgtgatcaagcaggagagcgacgagagcggcatcgtggccgagttccaggagaacggcccccccctgctgaagaagatcaagcaggaggtggagagccccaccgacaagagcggcaacttcttctgcagccaccactgggagggcgacagcctgaacacccagctgttcacccagaccagccccgtggccgacgcccccaccggcgtgcagtggcacgacttcggcagcctgcagcccctgccccccggcttcaagagattcagctgcctgagcctgcccagaagctgggactacagacaccccccccccagacccgccaacttcgagttcctggtggagaccggcttcctgcacgtgggccaggccggcctggagctgctgaccagcggcgacctgcccgccagcgccagccagagcgccagaatcaccggcgtgagccacagagccagacccgacaacatcctgaccagcagcgtgctgatggcccccgccagcgaggacgaggacaacgtgctgaaggccttcaccgtgcccaagaacagaagcctggccagccccctgcagccctgcagcagcacctgggagcccgccagctgcggcaagatggaggagcagatgaccagcagcagccaggccagaaagtacgtgaacgccttcagcgccagaaccctggtgatgtag

SEQ ID NO: 155472 - DNA, 1923 bp, Artificial Sequence
  derived and/or modified sequence
atggccagaagacccagacacagcatctacagcagcgacgaggacgacgaggacttcgagatgtgcgaccacgactacgacggcctgctgcccaagagcggcaagagacacctgggcaagaccagatggaccagagaggaggacgagaagctgaagaagctggtggagcagaacggcaccgacgactggaaggtgatcgccaactacctgcccaacagaaccgacgtgcagtgccagcacagatggcagaaggtgctgaaccccgagctgatcaagggcccctggaccaaggaggaggaccagagagtgatcgagctggtgcagaagtacggccccaagagatggagcgtgatcgccaagcacctgaagggcagaatcggcaagcagtgcagagagagatggcacaaccacctgaaccccgaggtgaagaagaccagctggaccgaggaggaggacagaatcatctaccaggcccacaagagactgggcaacagatgggccgagatcgccaagctgctgcccggcagaaccgacaacgccatcaagaaccactggaacagcaccatgagaagaaaggtggagcaggagggctacctgcaggagagcagcaaggccagccagcccgccgtggccaccagcttccagaagaacagccacctgatgggcttcgcccaggccccccccaccgcccagctgcccgccaccggccagcccaccgtgaacaacgactacagctactaccacatcagcgaggcccagaacgtgagcagccacgtgccctaccccgtggccctgcacgtgaacatcgtgaacgtgccccagcccgccgccgccgccatccagagacactacaacgacgaggaccccgagaaggagaagagaatcaaggagctggagctgctgctgatgagcaccgagaacgagctgaagggccagcaggtgctgcccacccagaaccacacctgcagctaccccggctggcacagcaccaccatcgccgaccacaccagaccccacggcgacagcgcccccgtgagctgcctgggcgagcaccacagcacccccagcctgcccgccgaccccggcagcctgcccgaggagagcgccagccccgccagatgcatgatcgtgcaccagggcaccatcctggacaacgtgaagaacctgctggagttcgccgagaccctgcagttcatcgacagcttcctgaacaccagcagcaaccacgagaacagcgacctggagatgcccagcctgaccagcacccccctgatcggccacaagctgaccgtgaccacccccttccacagagaccagaccgtgaagacccagaaggagaacaccgtgttcagaacccccgccatcaagagaagcatcctggagagcagccccagaacccccacccccttcaagcacgccctggccgcccaggagatcaagtacggccccctgaagatgctgccccagacccccagccacctggtggaggacctgcaggacgtgatcaagcaggagagcgacgagagcggcatcgtggccgagttccaggagaacggcccccccctgctgaagaagatcaagcaggaggtggagagccccaccgacaagagcggcaacttcttctgcagccaccactgggagggcgacagcctgaacacccagctgttcacccagaccagccccgtggccgacgcccccaacatcctgaccagcagcgtgctgatggcccccgccagcgaggacgaggacaacgtgctgaaggccttcaccgtgcccaagaacagaagcctggccagccccctgcagccctgcagcagcacctgggagcccgccagctgcggcaagatggaggagcagatgaccagcagcagccaggccagaaagtacgtgaacgccttcagcgccagaaccctggtgatgtag

SEQ ID NO: 155473 - DNA, 1839 bp, Artificial Sequence
  derived and/or modified sequence
atggcgcggcggccccgacattctatctatagttctgatgaggacgacgaggattttgagatgtgcgaccatgattacgacgggctgctccctaagtccggaaaacggcacctgggcaaaactcgctggaccagggaagaagacgaaaagttgaagaagcttgtggagcagaatggcacggacgattggaaggtgatcgccaactacctgccaaatagaacagacgtacagtgccagcaccgttggcaaaaggtcctcaaccctgaactgattaaagggccatggactaaagaagaggatcagcgagtgatcgagcttgtccaaaagtatggtccaaaacgctggtccgttatcgccaagcatttaaagggccgcatcggcaagcagtgcagggagaggtggcacaatcacctgaaccccgaggttaagaaaacgtcttggaccgaggaagaggaccgcataatttatcaggcacataagcgcctcggtaacagatgggcagagatcgctaagttgctgccaggcagaactgacaatgccatcaagaaccactggaactccactatgcgcagaaaagtggagcaggaaggatatctgcaagaaagttccaaggcttctcagcccgccgttgccacttcctttcaaaagaactcacatttaatgggcttcgcccaggctcccccgacggcacaattaccagctaccgggcagcctacggttaacaatgattattcctactaccacataagcgaggctcaaaatgtgtcctcacatgtgccctacccagtagctctgcacgtgaacatagtcaatgtcccacagccagccgccgctgccatccagcggcactataatgacgaagacccagagaaagagaaacggatcaaagagctggagctgctactcatgagcacagagaacgagctgaagggccaacaggtcctccccacccagaaccatacttgtagttaccctgggtggcactccactacaatagccgaccatacgcgacctcatggcgatagcgcccctgtgtcatgtcttggcgagcaccacagcactccctcacttccagctgaccccggatcactgccagaagaaagtgcgagccctgcccggtgtatgattgtccaccaggggacaatcttggacaacgtgaagaacctgctcgagttcgcagagactttgcagttcatcgactcttttctgaatacatcctctaaccacgagaacagtgaccttgaaatgccttcgctaacctccacacctctcatagggcataagctgactgtgaccactccattccacagggatcagaccgtgaagactcaaaaagaaaacactgtgttccggacccctgctatcaaacgtagcattctggagtcctctccgcggactccaacccctttcaaacacgcactcgcagctcaggagataaagtatgggccgctgaaaatgctgcctcagactccttcccatctggtggaggatctgcaggatgtcatcaaacaggagagcgacgagagcggaatcgtcgctgagtttcaggagaatggtcctcctctgttgaaaaaaataaagcaggaagttgaatcccccacagataagtcgggcaatttcttttgttctcatcactgggagggggatagccttaatacacagctttttacccaaacctcccctgtcgccgacgcccccaatatattgacttcctctgtgctgatggcccctgcatcagaagatgaagataacgtgcttaaggcgttcacagttccaaagaatcggtccctcgcatctcctctgcaggctaccaaagcacaaaggctgtttcagttttag

SEQ ID NO: 155474 - DNA, 2181 bp, Artificial Sequence
  derived and/or modified sequence
atggccagacgccccaggcattctatctactcttccgatgaggacgacgaggacttcgagatgtgtgaccatgattatgacggcttgttgccaaaaagtggaaagcggcacttggggaagaccaggtggaccagggaggaggatgaaaaacttaagaagctcgtcgaacagaacgggactgatgattggaaggtgatcgctaattatctgccaaacagaaccgacgttcaatgtcagcacagatggcagaaggtactcaaccccgaactcattaagggcccctggacaaaagaagaagatcaacgcgttattgagctcgttcaaaaatacgggccaaagagatggagtgtgattgcaaaacacctgaaaggtcgcatcggcaagcaatgccgcgagcgatggcataatcatctcaaccctgaggtgaagaaaaccagctggactgaagaagaagaccgaataatttatcaggcccataagaggctaggcaatagatgggccgaaatcgcaaaactgctgccagggcggactgataatgccattaagaatcattggaactctacaatgcggcgcaaagtggagcaggagggttacttacaggaatctagtaaagcaagccaacccgcagtcgcgaccagtttccaaaagaatagccatttaatgggcttcgcccaagctccccccacagcgcaactccctgctactggccagccaactgtaaataacgattatagttattaccacatctcagaggcccagaatgtcagctcacacgtgccctacccagtggctctacatgttaatatcgtcaatgtgcctcagccagccgcagcagccatccagcgccactataacgacgaagatcctgaaaaagagaaaaggatcaaggagctggaactcctcctcatgtccaccgagaatgagctgaagggccagcaggtgctaccaacacagaaccatacgtgctcctacccaggttggcactccacaactattgcagatcacacccggccacacggggacagcgcccccgtgagctgtctgggagagcaccacagtacacccagtcttccggcagaccccggcagtctgcccgaggaatccgcatccccggcccggtgtatgatagtgcatcaggggaccatcttggataatgtgaagaaccttcttgagttcgccgagacattgcagttcatagacagcttcctgaacactagtagcaaccatgagaattccgacctggagatgcccagcctgaccagcacaccgctgatcggacataagctgaccgttactacccccttccatcgggatcagacagtcaagacccagaaagagaatactgtatttcggactccagctattaagcgaagcattcttgaatcctcccccaggacacccaccccctttaaacatgcgctcgctgcgcaagaaattaaatatggcccccttaagatgctacctcaaaccccctctcacctggtggaggacctgcaggatgtcatcaagcaggagagcgatgagtccggaattgtggctgagttccaggagaatggaccacccttactgaaaaagatcaagcaggaggtggagagtccgacagataagtccggaaactttttctgctcacaccattgggagggtgactccctcaacacccaactttttacgcagacatcccccgtggctgatgccccgaccggcgtgcagtggcatgactttgggagcttgcaaccgctgcccccggggttcaagcgcttctcctgcctgtccctcccgcggtcctgggattacaggcaccctccaccgcggcctgctaatttcgaattcctcgttgagacagggttcctccatgttggtcaggccggcctggagctgctgacttccggcgacctgccggcgtccgcctcccaatctgcgagaatcactggtgtaagccatagggcgagacccgataacattctaaccagctccgtgcttatggctccagcgtccgaggatgaggacaatgtcctaaaggccttcaccgtccctaagaacagaagcctcgcaagccccctgcagccctgctctagcacctgggagccagcgtcctgcgggaagatggaggagcagatgactagttcttcccaggcacggaagtatgttaacgcctttagcgcacggactctcgttatgtag

SEQ ID NO: 155475 - DNA, 1923 bp, Artificial Sequence
  derived and/or modified sequence
atggcacgaaggccaaggcactccatctatagttccgatgaggacgacgaggacttcgagatgtgcgaccatgattacgatggcttgcttcccaagtccggtaagcggcatttaggaaaaaccaggtggactcgggaagaggacgagaagttgaaaaaacttgtggagcagaatgggactgacgactggaaggtgatcgcgaactatcttcctaacagaacagatgtacaatgccagcatagatggcagaaggttttgaacccagagctcattaaggggccttggaccaaggaggaggatcaacgggttatcgaactcgtccagaagtatggtccaaagaggtggagcgtcattgctaagcatctgaaaggccgcattggaaagcagtgccgggagcggtggcataatcatctgaatccagaggtgaagaagacatcctggactgaggaggaagaccgtataatctaccaggcacacaaacggcttgggaaccgctgggctgaaattgccaaactccttcctggaaggaccgataatgctatcaagaaccattggaactcaaccatgcgcagaaaggtggagcaggagggctacttgcaggaaagtagcaaggcttcgcagcccgccgtagctacaagttttcagaagaattcacacctgatggggtttgcacaggccccaccaactgcccaactccctgcgaccgggcagccaactgtaaataacgactactcatattatcacatcagtgaggctcaaaacgtgagctcccacgtgccctatccagtcgccctgcacgtaaatatcgtgaacgtgccccaacctgcagcagctgccatccaacgacattataatgacgaagatcctgaaaaggagaagcggatcaaggaactggagctactgcttatgagcaccgagaatgagttaaagggtcagcaggttttgccaactcaaaatcacacatgctcgtaccccggctggcactccacgacaatcgcagatcacacccgcccacacggggatagtgctcctgtgagctgcctgggagaacaccacagtaccccctccctccccgccgatcctggctcattacctgaagagagcgcaagtcccgctcgctgtatgatagtgcaccagggaacgattcttgataatgtgaagaacctcctggagttcgctgagacacttcagttcattgattcgtttctgaatacctcatccaatcacgagaactccgatctggaaatgccaagcctaacttccacacccctgatcggccacaaactcaccgttacaactccatttcaccgcgaccagactgtcaaaacccagaaggagaacaccgttttcagaaccccagcaattaaacgttctattctagagtctagcccgcgcaccccgactccattcaagcatgccctcgccgcccaagaaataaaatacgggcccctgaagatgctgcctcaaacgcccagtcatcttgttgaagacctgcaagacgttatcaaacaagagtctgatgaaagcggcatcgttgcggagttccaagaaaacggaccacctctgctgaagaaaatcaaacaagaagtggagtcgccaaccgataaatcaggaaactttttctgcagccatcattgggagggtgattctcttaacacccagctattcacccagactagcccggtggctgacgcaccaaacatcctgacttcgtccgtgcttatggcgcctgcctcagaggacgaggacaatgtacttaaggctttcaccgtacccaagaaccggtctctggcatctcccttacaaccgtgttcgtctacatgggagcctgcctcgtgtgggaagatggaagagcagatgacctcctcaagccaggcccgcaagtatgtaaatgcatttagcgctaggacccttgtgatgtag

SEQ ID NO: 155476 - DNA, 1839 bp, Artificial Sequence
  derived and/or modified sequence
atggcccggcggcccaggcacagcatctacagcagtgatgaagatgatgaagattttgagatgtgtgaccatgactatgatggcctgctgcccaagagcggcaagaggcacctgggcaagacccgctggacccgggaggaggatgagaagctgaagaagctggtggagcagaatggaacagatgactggaaggtgattgccaactacctgcccaacagaacagatgtgcagtgccagcaccgctggcagaaggtgctgaaccctgagctgatcaagggcccctggaccaaggaggaggaccagagggtcatcgagctggtgcagaagtatggccccaagcgctggagcgtcatcgccaagcacctgaagggccgcatcggcaagcagtgccgggagcgctggcacaaccacctgaaccctgaggtgaagaagacctcctggacagaggaggaggaccgcatcatctaccaggcccacaagaggctgggcaaccgctgggccgagatcgccaagctgctgcccggccgcacagacaatgccatcaagaaccactggaacagcaccatgaggaggaaggtggagcaggagggctacctgcaggagagcagcaaggccagccagcctgctgtggccaccagcttccagaagaacagccacctgatgggctttgcccaggccccacccacagcccagctgcctgccaccggccagcccaccgtgaacaatgactacagctactaccacatcagcgaggcccagaatgtgagcagccacgtgccctaccctgtggccctgcacgtgaacatcgtgaatgtgccccagcctgctgctgctgccatccagaggcactacaatgatgaagatcctgagaaggagaagaggatcaaggagctggagctgctgctgatgagcacagaaaatgagctgaagggccagcaggtgctgcccacccagaaccacacctgcagctacccaggctggcacagcaccaccatcgctgaccacacccggccccatggagacagcgcccctgtgtcctgcctgggggagcaccacagcacccccagcctgcctgctgaccccggcagcctgcctgaggagagcgccagccctgcccgctgcatgattgtgcaccagggcaccatcctggacaacgtgaagaacctgctggagtttgctgagaccctgcagttcatcgacagcttcctgaacaccagcagcaaccacgagaacagcgacctggagatgcccagcctgaccagcacccccctgattggccacaagctgactgtgaccacccccttccaccgggaccagacagtgaagacccagaaggagaacacagtgttccgcaccccagccatcaagaggagcatcctggagagcagccccaggacccccacccccttcaagcacgccctggccgcccaggagatcaagtatggccccctgaagatgctgccccagacccccagccacctggtggaggacctgcaggacgtcatcaagcaggagagtgatgaaagtggcatcgtggccgagttccaggagaatggcccccccctgctgaagaagatcaagcaggaggtggagagccccacagacaagagcggcaacttcttctgcagccaccactgggagggggacagcctgaacacccagctgttcacccagaccagccctgtggctgatgcccccaacatcctgaccagctctgtgctgatggccccagcctctgaagatgaggacaacgtgctgaaggccttcaccgtgcccaagaacagaagcctggccagccccctgcaggccaccaaggcccagaggctcttccagttctag

SEQ ID NO: 155477 - DNA, 2181 bp, Artificial Sequence
  derived and/or modified sequence
atggcccggcggcccaggcacagcatctacagcagtgatgaagatgatgaagattttgagatgtgtgaccatgactatgatggcctgctgcccaagagcggcaagaggcacctgggcaagacccgctggacccgggaggaggatgagaagctgaagaagctggtggagcagaatggaacagatgactggaaggtgattgccaactacctgcccaacagaacagatgtgcagtgccagcaccgctggcagaaggtgctgaaccctgagctgatcaagggcccctggaccaaggaggaggaccagagggtcatcgagctggtgcagaagtatggccccaagcgctggagcgtcatcgccaagcacctgaagggccgcatcggcaagcagtgccgggagcgctggcacaaccacctgaaccctgaggtgaagaagacctcctggacagaggaggaggaccgcatcatctaccaggcccacaagaggctgggcaaccgctgggccgagatcgccaagctgctgcccggccgcacagacaatgccatcaagaaccactggaacagcaccatgaggaggaaggtggagcaggagggctacctgcaggagagcagcaaggccagccagcctgctgtggccaccagcttccagaagaacagccacctgatgggctttgcccaggccccacccacagcccagctgcctgccaccggccagcccaccgtgaacaatgactacagctactaccacatcagcgaggcccagaatgtgagcagccacgtgccctaccctgtggccctgcacgtgaacatcgtgaatgtgccccagcctgctgctgctgccatccagaggcactacaatgatgaagatcctgagaaggagaagaggatcaaggagctggagctgctgctgatgagcacagaaaatgagctgaagggccagcaggtgctgcccacccagaaccacacctgcagctacccaggctggcacagcaccaccatcgctgaccacacccggccccatggagacagcgcccctgtgtcctgcctgggggagcaccacagcacccccagcctgcctgctgaccccggcagcctgcctgaggagagcgccagccctgcccgctgcatgattgtgcaccagggcaccatcctggacaacgtgaagaacctgctggagtttgctgagaccctgcagttcatcgacagcttcctgaacaccagcagcaaccacgagaacagcgacctggagatgcccagcctgaccagcacccccctgattggccacaagctgactgtgaccacccccttccaccgggaccagacagtgaagacccagaaggagaacacagtgttccgcaccccagccatcaagaggagcatcctggagagcagccccaggacccccacccccttcaagcacgccctggccgcccaggagatcaagtatggccccctgaagatgctgccccagacccccagccacctggtggaggacctgcaggacgtcatcaagcaggagagtgatgaaagtggcatcgtggccgagttccaggagaatggcccccccctgctgaagaagatcaagcaggaggtggagagccccacagacaagagcggcaacttcttctgcagccaccactgggagggggacagcctgaacacccagctgttcacccagaccagccctgtggctgatgcccccactggagtgcagtggcatgactttggcagcctgcagcccctgcccccaggcttcaagcgcttcagctgcctgagcctgcccaggtcctgggactaccgccaccccccacccaggcctgccaactttgagttcctggtggagaccggcttcctgcacgtgggccaggccggcctggagctgctgaccagcggggacctgcctgccagcgccagccagagcgcccgcatcactggagtgagccaccgggcccggccagacaacatcctgaccagctctgtgctgatggccccagcctctgaagatgaggacaacgtgctgaaggccttcaccgtgcccaagaacagaagcctggccagccccctgcagccctgcagcagcacctgggagcccgccagctgtgggaagatggaggagcagatgaccagcagcagccaggccaggaaatatgtgaatgccttcagcgcccggaccctggtgatgtag

SEQ ID NO: 155478 - DNA, 1923 bp, Artificial Sequence
  derived and/or modified sequence
atggcccggcggcccaggcacagcatctacagcagtgatgaagatgatgaagattttgagatgtgtgaccatgactatgatggcctgctgcccaagagcggcaagaggcacctgggcaagacccgctggacccgggaggaggatgagaagctgaagaagctggtggagcagaatggaacagatgactggaaggtgattgccaactacctgcccaacagaacagatgtgcagtgccagcaccgctggcagaaggtgctgaaccctgagctgatcaagggcccctggaccaaggaggaggaccagagggtcatcgagctggtgcagaagtatggccccaagcgctggagcgtcatcgccaagcacctgaagggccgcatcggcaagcagtgccgggagcgctggcacaaccacctgaaccctgaggtgaagaagacctcctggacagaggaggaggaccgcatcatctaccaggcccacaagaggctgggcaaccgctgggccgagatcgccaagctgctgcccggccgcacagacaatgccatcaagaaccactggaacagcaccatgaggaggaaggtggagcaggagggctacctgcaggagagcagcaaggccagccagcctgctgtggccaccagcttccagaagaacagccacctgatgggctttgcccaggccccacccacagcccagctgcctgccaccggccagcccaccgtgaacaatgactacagctactaccacatcagcgaggcccagaatgtgagcagccacgtgccctaccctgtggccctgcacgtgaacatcgtgaatgtgccccagcctgctgctgctgccatccagaggcactacaatgatgaagatcctgagaaggagaagaggatcaaggagctggagctgctgctgatgagcacagaaaatgagctgaagggccagcaggtgctgcccacccagaaccacacctgcagctacccaggctggcacagcaccaccatcgctgaccacacccggccccatggagacagcgcccctgtgtcctgcctgggggagcaccacagcacccccagcctgcctgctgaccccggcagcctgcctgaggagagcgccagccctgcccgctgcatgattgtgcaccagggcaccatcctggacaacgtgaagaacctgctggagtttgctgagaccctgcagttcatcgacagcttcctgaacaccagcagcaaccacgagaacagcgacctggagatgcccagcctgaccagcacccccctgattggccacaagctgactgtgaccacccccttccaccgggaccagacagtgaagacccagaaggagaacacagtgttccgcaccccagccatcaagaggagcatcctggagagcagccccaggacccccacccccttcaagcacgccctggccgcccaggagatcaagtatggccccctgaagatgctgccccagacccccagccacctggtggaggacctgcaggacgtcatcaagcaggagagtgatgaaagtggcatcgtggccgagttccaggagaatggcccccccctgctgaagaagatcaagcaggaggtggagagccccacagacaagagcggcaacttcttctgcagccaccactgggagggggacagcctgaacacccagctgttcacccagaccagccctgtggctgatgcccccaacatcctgaccagctctgtgctgatggccccagcctctgaagatgaggacaacgtgctgaaggccttcaccgtgcccaagaacagaagcctggccagccccctgcagccctgcagcagcacctgggagcccgccagctgtgggaagatggaggagcagatgaccagcagcagccaggccaggaaatatgtgaatgccttcagcgcccggaccctggtgatgtag

SEQ ID NO: 155479 - DNA, 1839 bp, Artificial Sequence
  derived and/or modified sequence
atggcccggcggccccggcacagcatctacagcagcgacgaggacgatgaagatttcgaaatgtgtgaccacgactatgacggacttctccctaaaagtgggaaaagacacttggggaaaacacgatggacccgcgaggaagatgaaaagttaaagaagctcgtcgagcagaacggcacggatgattggaaggtcatcgctaactacctgcccaacagaacggacgtacagtgccaacaccggtggcagaaagtcctgaatcctgagctgatcaaggggccatggacgaaggaagaggatcaaagggtgatagaactcgttcagaagtatggtccaaagcgttggtcagtcattgcgaagcacttgaaaggccgtataggcaagcagtgtagggagcgttggcataatcacctcaacccagaggtgaagaagacatcttggaccgaggaagaggatcggattatataccaggcacacaaaaggcttggcaaccggtgggctgaaattgccaaactactcccaggccgcaccgacaatgccatcaagaaccattggaattccacgatgcggaggaaggtcgagcaggaaggctatcttcaggaatcttcgaaggccagccaacctgctgtggcaacgtccttccagaaaaatagccatctcatgggcttcgcccaggccccccccacggcccagctgcctgccaccggacaaccaacagtaaataacgactatagctactatcatatcagcgaggcgcagaatgtgagctcccatgtgccttatcctgtcgccctgcacgtgaatattgttaacgtaccccaacccgccgccgcagcgattcaaagacattacaacgacgaagaccctgagaaggagaagcgtatcaaagagttggaattgcttctgatgtccaccgagaatgagcttaaaggacagcaggtcttgcccacccagaatcacacgtgcagctatcccgggtggcacagcacaacaattgccgaccacaccagaccccacggcgactcagctcctgtgagctgcttaggagagcaccactctacaccaagcctgcctgccgatcccggttccctgcccgaagagtcagccagtcccgcacggtgcatgatcgtgcatcagggcacaatccttgataacgtgaagaacctcctggaattcgcggagacactgcagttcatagattctttcctcaacacatcaagtaatcatgagaattctgatctcgaaatgcctagtctcacaagcacccctctgatcggccataagctgactgtgacaacccctttccaccgtgaccaaacagtgaaaactcagaaggaaaacactgtatttcgcaccccggcaataaagaggtctattttggagtccagccctcggacccccactcctttcaagcatgcactggcagcccaagagattaagtacggtcctttgaagatgttgccccagaccccgagccacctcgtggaggacctccaggatgtgattaaacaggagagcgatgagtctggcatcgtggctgaattccaggaaaatggtcccccgcttctcaagaagataaaacaggaagtcgagtcgccgaccgataagtccgggaactttttttgcagtcaccattgggaaggagacagtctcaacacacagctgtttactcagaccagccccgtggcagacgcccccaatatccttacaagctctgtactcatggccccggctagtgaggatgaagataacgttttgaaggcctttaccgtacctaaaaacaggagtctggcttcacctttacaggctactaaggcacagcggttattccagttctag

SEQ ID NO: 155480 - DNA, 2181 bp, Artificial Sequence
  derived and/or modified sequence
atggcccggcggccccggcacagcatctacagcagcgacgaggacgacgaagattttgagatgtgtgaccacgactacgacggcctgctgcctaagagcggaaaacgccatctggggaagacaaggtggacgcgggaggaggacgaaaaactgaaaaaactggtcgaacagaatggcactgacgattggaaggtcatcgctaactatctaccaaatcgcactgatgtgcagtgccagcaccggtggcagaaagttctgaaccctgagttgatcaagggaccatggacaaaagaagaggatcagcgcgtcatcgagctggttcagaaatacggacctaaacgatggagcgtgattgctaaacacctaaagggtcgcatcggcaagcagtgtcgggagcggtggcacaatcatctgaatcccgaagtgaaaaaaacctcatggacggaagaggaggataggatcatttaccaggcccataagcgccttggaaacagatgggccgagatcgccaagctgctccctgggcggacagataacgcaatcaaaaatcattggaatagcacaatgcgccgaaaagtagaacaggaggggtatctccaggaaagctccaaggcttcacagcccgccgtcgccacctccttccagaaaaactcccaccttatgggatttgctcaggctccacctacggcccagctgcccgccaccggccagccaactgttaacaatgattactcatactaccatattagcgaggcccagaacgtgagctcgcacgtcccttacccggtggcccttcatgtaaatattgtgaatgtgccccagcctgctgctgcagcaattcagcggcattataacgacgaggaccctgagaaagagaaacggataaaggagctggaactcttgctgatgtccacagagaacgagctcaagggccagcaagtgctgcctacacagaaccacacatgtagttatcctgggtggcatagtactactatagccgaccataccagacctcatggagattcagcacccgtgagttgcctgggcgagcatcattccacacctagcctgccggctgacccaggcagcctgcctgaagaatctgcgtctccggcccggtgtatgattgtgcaccagggtaccatccttgacaatgttaagaacctgttggaattcgctgaaacattacagtttatcgacagtttcctcaacacctccagtaatcacgagaacagcgatctagagatgcccagtctgacttcgacgcctctgatcggtcacaaactgacggtgacaaccccattccatcgagaccagaccgtcaagacccagaaggaaaacacggtgtttcggacacctgctatcaagaggtctattctggagagttctccgagaactcccaccccctttaaacatgcactcgccgcacaagagatcaagtacgggccactcaagatgctccctcagaccccatcccacctcgtagaggatctccaggatgtcatcaaacaagagtctgatgagtctggcatcgttgcagagtttcaagaaaatgggcccccccttcttaaaaaaatcaagcaggaggtagagagtcccacggataagtccggcaactttttctgtagtcatcattgggagggagactcattgaacacacaactctttacccagacctccccagtggcagacgctcccaccggagtacagtggcatgacttcggatcccttcagcccctcccaccaggctttaaacggttctcatgtctttctcttcctaggagctgggattaccgccacccaccgccacgccctgcaaacttcgaatttttggttgagacggggttcctgcacgtaggtcaagccggccttgagctactcacttcgggcgatctgcccgcatccgcttcgcaaagcgctcgaatcactggagtgagtcatagagctagacccgataatatcctgacctcttctgttctaatggcgccagcttcagaagatgaggacaatgttttaaaggccttcaccgttcctaaaaatcggagcctcgcctctcccctgcagccatgttccagtacctgggaaccagcgtcttgcggcaaaatggaagagcaaatgaccagctcctcccaggcccgcaagtatgtcaatgctttctccgcgagaactttagtaatgtag

SEQ ID NO: 155481 - DNA, 1923 bp, Artificial Sequence
  derived and/or modified sequence
atggcccggcggccccggcacagcatctacagcagcgacgaggacgacgaggattttgaaatgtgtgaccatgactatgacggcttgctgcccaagtctggcaagagacatctgggtaagacgcgctggacccgggaggaggacgagaagctgaaaaagctagtcgagcaaaatggcacggatgactggaaggtaatcgccaattacctgccaaatcgcaccgacgtccagtgccaacaccgctggcagaaagtgttaaacccggagttaatcaaggggccatggactaaagaggaagaccaacgggtcatcgaactcgtgcaaaagtacggtcctaagcgctggagcgtgatcgccaagcacctaaagggccgcatcggaaaacaatgtagagagcgttggcacaaccatctcaaccccgaggtgaagaagaccagctggacagaagaagaggataggatcatctaccaggctcacaaacggctgggtaaccggtgggctgagatcgctaaactgttacccggtcgtaccgacaatgccattaagaatcattggaactccactatgaggcggaaggtcgaacaagaaggctatctgcaggagtcgagtaaagcttctcagccggcagtcgcgacctctttccaaaaaaatagccacctgatgggattcgctcaggcgccccccaccgctcagctccctgcgacagggcaaccaaccgtcaacaatgactattcctactaccatatctctgaagctcagaacgttagctcccacgtgccttaccctgtcgcactgcacgtcaacatcgtgaatgttccgcagcccgcggccgccgcaatccaacgtcactataatgacgaggatcctgagaaggagaagaggataaaagagttggaactcctactgatgagtaccgaaaacgaactgaaaggacagcaagttttaccgacccaaaatcacacctgcagttacccaggctggcattcaacaacaattgctgaccatacaaggccacatggggattcagcccctgtctcatgcctgggggagcaccattccacaccttctcttcccgcagacccaggctcacttcctgaggagagcgcttctcccgcgaggtgtatgatagtccatcagggcacgatccttgacaatgttaaaaacctgctggagtttgcggaaacattgcagtttatcgatagctttttaaatacctccagcaaccatgaaaactccgacctggagatgccctccctgacaagcacgcccctaataggacataagctgacagtcacaacccctttccaccgggaccagaccgtcaagacacagaaggagaatactgtattccggactcctgctatcaagagatccatcctcgaatcgagccctagaaccccaaccccgttcaagcacgcactggcagcacaggagatcaaatacggtccactgaaaatgctgcctcaaactccaagtcatctggtcgaagatctgcaagacgtgatcaagcaagagtccgacgaatcaggcatcgtggcggagtttcaggaaaacggcccacctctgttaaaaaaaattaaacaggaagtggagtcacctactgataagagcggcaacttcttttgtagccatcattgggaaggcgacagtttaaatacccaattgttcacacaaactagtcctgtagcagatgcacccaatatccttacgagttcggttctgatggccccagcttccgaggatgaggataacgtactcaaggctttcactgtgcccaaaaaccgatcactcgcatcacctcttcagccctgctcttctacatgggagccagcctcatgcggcaaaatggaagaacagatgaccagttcctcccaagcacgcaagtacgtgaatgcattcagtgcgcgcaccctcgtaatgtag

SEQ ID NO: 155482 - DNA, 1839 bp, Artificial Sequence
  derived and/or modified sequence
atggcgcgtcgaccgcgtcacagtatctacagttcagatgaagatgacgaagacttcgagatgtgcgaccacgactacgacggactgcttcccaagtccggcaaaagacacctcggcaaaacccgctggacccgagaagaagacgagaaactgaaaaaattggtcgagcagaacggcactgatgactggaaggtcattgccaattaccttccaaatcgtactgacgtgcagtgccagcatagatggcagaaggtccttaatccggagctcataaaaggtccgtggactaaggaagaagaccagcgagtaattgagctggtgcagaaatacggccctaaacgctggtccgtgattgcaaagcacttgaaaggcaggattgggaaacagtgtcgggagagatggcacaatcacttgaatcctgaagtaaaaaagacctcttggaccgaggaggaagatagaatcatatatcaggcccataagcggttgggtaatcgttgggccgaaattgcaaaactgctgccgggtcgtacggataatgccattaagaatcactggaactctactatgcgcagaaaagtggagcaggaagggtatctgcaggagtcgtcaaaagctagccagcctgccgtggccacctccttccagaagaactctcaccttatgggttttgcccaggcccctcccacagctcaacttcccgctacagggcagcccactgtcaacaatgattacagctattatcacatatcagaggcccaaaatgtgtcctcccacgtgccttacccagtggccctgcatgttaatattgtcaacgtgcctcagccagcggctgccgctatccagaggcactacaacgatgaggaccccgagaaagagaaacgaatcaaggagctcgagttactgctgatgagcacggagaatgagctgaaggggcaacaggtgctgcctactcagaatcatacatgctcttatccaggttggcattccacaaccatagcggaccatacccgcccacatggggattccgccccagtgtcctgtctcggcgagcaccattccactcctagcctcccagccgacccaggttccttacctgaggagtccgcttcaccagcacggtgcatgatagtgcaccaaggcactatcttggacaacgtcaaaaacctgctcgagtttgccgaaaccctgcagtttatcgacagctttctgaataccagcagtaaccacgaaaattcagacctggaaatgccttcattaaccagtacacctctgataggccacaaattgacagtgaccaccccatttcatagggatcaaaccgtgaaaacacagaaggagaatacagtgttccggacgcccgcaatcaaacgatctatactcgaatcctctcctcgcacccccaccccgtttaaacacgctctggccgctcaggaaatcaaatatggcccactcaaaatgctcccacagacgccctcccacctcgtggaggacctgcaggacgttattaagcaggaaagtgacgagtcagggattgtcgcagagttccaggaaaatggccctcctctgctcaaaaagatcaaacaggaagtcgaaagcccaacagacaaatcggggaactttttttgctcacatcattgggaaggggacagtctgaatacacagctgtttactcagacctcccctgtggctgatgctcctaatatattgacttcgtccgtactgatggctcccgcttccgaggacgaggataacgtgctgaaggccttcacagtgcctaagaatcggtccctcgcttcccccctgcaggcaaccaaggcccaaaggctatttcaattttag

SEQ ID NO: 155483 - DNA, 2181 bp, Artificial Sequence
  derived and/or modified sequence
atggccagacgcccaaggcactcaatttactcatccgacgaagatgacgaagattttgaaatgtgtgatcacgactatgacggcctgctcccgaagagtggaaagagacatctgggcaagacaaggtggacaagagaagaggacgagaaactgaaaaaactggtggaacagaacgggaccgatgactggaaggtcattgccaactacttacctaatcgtactgacgtccagtgccagcaccggtggcagaaggtgctgaacccggagctaattaaaggtccatggaccaaggaagaggatcagcgcgttatcgagcttgtgcaaaaatacggtccgaagagatggagcgtcattgcaaaacatcttaagggccgtattgggaaacagtgcagagaacgatggcacaaccatttaaacccagaggtcaaaaaaacatcctggacggaagaagaggatcgcataatctaccaggctcataaacgtctgggtaataggtgggcagagatcgctaagctgcttccaggacggaccgataatgctatcaaaaaccactggaacagtacaatgaggcggaaagtggaacaggagggttatttacaggaatcgagcaaggccagtcagcccgctgtggctactagcttccagaagaatagtcacctgatgggctttgcccaggccccacccacggcccagctccccgctaccggccagccaaccgtgaataatgattactcctactaccacatctccgaggcacaaaatgtttcatcacacgtaccctatccagtagctttgcacgttaacatcgtgaacgttccacagcccgctgccgctgccatccagcggcactataatgatgaagacccagaaaaagagaagaggatcaaggagttagagctccttctcatgtctacagagaacgagctaaaaggccagcaggtactgccaacacaaaatcatacttgcagctaccccggttggcattctactactattgcagatcacacccgtcctcatggcgactccgctccggtgtcctgcctgggggagcaccatagtacgccctctctgcccgctgacccaggctctctgccagaggagtccgccagcccagcgagatgcatgattgtgcatcagggtaccattctggataacgttaagaacctgctcgagtttgccgaaaccctgcagtttattgattcatttttgaacaccagctcgaaccacgaaaatagcgatctcgaaatgcccagtctgacctccacccccttgatcggacataaactgacagtcaccaccccattccaccgcgaccagaccgtgaaaacccagaaagagaataccgtcttcaggacccccgctattaaaaggtcaatcctagaaagctcccctcgcacaccgacccctttcaagcacgcccttgccgctcaggaaatcaagtacggcccactgaagatgttgccgcagactccctcgcatttagttgaagacctacaggatgtgattaaacaggaatcagacgagtccggtatagtagccgaatttcaggaaaacggtcctcctctactgaagaaaattaagcaagaagttgaatcccctaccgataaaagcggaaactttttctgtagccatcattgggagggagattcccttaacacacaactgtttactcagacttcccccgtcgccgacgcgcctacaggagtccaatggcacgactttggctcccttcagccactgccaccaggttttaagaggttttcatgtttatcactgccaagaagctgggattacaggcacccacccccaaggccagcaaatttcgagttcctggtggagactgggttcctgcatgtcggccaggcgggactggagctgctcacaagcggtgacctcccagcgtcagccagccagtccgctaggatcacaggagtgtcacatcgcgcacgtcccgataatatccttacctcctcagtcctgatggcgcctgcatccgaagatgaggacaatgtcctcaaagcctttactgtgcctaaaaataggtcgcttgcttccccattgcagccgtgtagctccacctgggaaccggctagctgcggaaagatggaggaacagatgacctcctcctcccaagcaagaaagtacgtcaacgcattctccgcgagaacattggttatgtag

SEQ ID NO: 155484 - DNA, 1923 bp, Artificial Sequence
  derived and/or modified sequence
atggcccgaagacccagacactcgatatacagttctgatgaagacgatgaggacttcgagatgtgtgaccacgattacgacggtctcctgccgaagtccggaaagaggcaccttggcaaaacacggtggaccagagaggaggatgagaagttgaaaaaattggtagagcagaacggtaccgatgactggaaagttattgccaactatctaccaaacaggaccgacgtacagtgtcaacaccggtggcagaaggtcctcaacccggagctgatcaagggcccttggacaaaggaggaggaccagcgcgtgattgaactcgtccaaaaatatgggcctaaaaggtggtctgtgattgcgaagcacctcaaaggtcgtatagggaagcagtgtagggagcgatggcacaatcacttaaacccagaggttaagaaaacttcatggacggaggaggaggaccggatcatctatcaggcacacaaacggcttgggaacagatgggcagaaatcgcaaagttgctccccggaagaactgacaatgccataaaaaaccactggaatagcaccatgaggagaaaggtggaacaggagggatacctgcaggagagcagtaaggcgtctcaaccagccgtggctacatcgttccagaagaatagccacttgatgggatttgcccaagcgccacctaccgctcagctccctgctactggccaaccaacagtgaacaacgactattcctattatcatatcagcgaggcgcagaatgtttcatctcacgtgccttatcctgttgcactgcacgtgaacattgtgaacgtgccacagcctgctgccgctgccatccagcgtcactacaatgatgaggacccagagaaagagaaacgcattaaagagttagagctgctgttgatgtcgaccgagaacgagctgaagggtcagcaggtactgcctacccagaatcacacttgttcctatcctgggtggcattccaccactattgccgatcacacccgaccacacggggatagtgctcccgtttcatgcctcggggagcaccattctacacccagcctgcccgctgatccaggctctctccctgaagagagcgcttccccagcgaggtgtatgattgtgcatcagggtactattctcgacaatgtcaaaaatctgcttgagttcgcagagaccctacagttcattgactctttcctgaacactagtagtaaccatgagaacagcgatttggagatgccctccctcaccagcacccctctcatagggcacaagttaacagttaccactccatttcacagagatcaaacagttaaaacccagaaagaaaatactgtgtttcgaacgcccgctattaagaggagcattttggagagcagtccacgcacacctacacctttcaagcacgctttggcagcgcaggagattaagtatgggccacttaaaatgctaccgcagactccgtcccatcttgtagaagacttacaggacgtgattaagcaagaaagcgatgaaagtggaattgtagcagagttccaggagaatggccctcccctcctcaagaagattaagcaggaagtggaatcccctacagataaaagtggcaactttttctgctcccaccattgggagggggactcactgaatacacagctctttacccagacatcaccagtggcagatgccccaaacattcttacaagcagtgtcctgatggcccctgcctctgaggatgaagataacgttttgaaggcctttacagttcccaaaaaccggtccctggcaagtccgctccagccctgcagctcaacttgggagccagcttcgtgcggtaagatggaagagcagatgactagctcttcccaggccagaaaatatgtaaacgccttctccgcccgaactctggttatgtag

SEQ ID NO: 155485 - DNA, 3545 bp, Artificial Sequence
  derived and/or modified sequence
aatatcaacctgtttcctcctcctccttctcctcctcctccgtgacctcctcctcctctttctcctgagaaacttcgccccagcggtgcggagcgccgctgcgcagccggggagggacgcaggcaggcggcgggcagcgggaggcggcagcccggtgcggtccccgcggctctcggcggagccccgcgcccgccgcgccatggcccgaagaccccggcacagcatatatagcagtgacgaggatgatgaggactttgagatgtgtgaccatgactatgatgggctgcttcccaagtctggaaagcgtcacttggggaaaacaaggtggacccgggaagaggatgaaaaactgaagaagctggtggaacagaatggaacagatgactggaaagttattgccaattatctcccgaatcgaacagatgtgcagtgccagcaccgatggcagaaagtactaaaccctgagctcatcaagggtccttggaccaaagaagaagatcagagagtgatagagcttgtacagaaatacggtccgaaacgttggtctgttattgccaagcacttaaaggggagaattggaaaacaatgtagggagaggtggcataaccacttgaatccagaagttaagaaaacctcctggacagaagaggaagacagaattatttaccaggcacacaagagactggggaacagatgggcagaaatcgcaaagctactgcctggacgaactgataatgctatcaagaaccactggaattctacaatgcgtcggaaggtcgaacaggaaggttatctgcaggagtcttcaaaagccagccagccagcagtggccacaagcttccagaagaacagtcatttgatgggttttgctcaggctccgcctacagctcaactccctgccactggccagcccactgttaacaacgactattcctattaccacatttctgaagcacaaaatgtctccagtcatgttccataccctgtagcgttacatgtaaatatagtcaatgtccctcagccagctgccgcagccattcagagacactataatgatgaagaccctgagaaggaaaagcgaataaaggaattagaattgctcctaatgtcaaccgagaatgagctaaaaggacagcaggtgctaccaacacagaaccacacatgcagctaccccgggtggcacagcaccaccattgccgaccacaccagacctcatggagacagtgcacctgtttcctgtttgggagaacaccactccactccatctctgccagcggatcctggctccctacctgaagaaagcgcctcgccagcaaggtgcatgatcgtccaccagggcaccattctggataatgttaagaacctcttagaatttgcagaaacactccaatttatagattctttcttaaacacttccagtaaccatgaaaactcagacttggaaatgccttctttaacttccacccccctcattggtcacaaattgactgttacaacaccatttcatagagaccagactgtgaaaactcaaaaggaaaatactgtttttagaaccccagctatcaaaaggtcaatcttagaaagctctccaagaactcctacaccattcaaacatgcacttgcagctcaagaaattaaatacggtcccctgaagatgctacctcagacaccctctcatctagtagaagatctgcaggatgtgatcaaacaggaatctgatgaatctggaattgttgctgagtttcaagaaaatggaccacccttactgaagaaaatcaaacaagaggtggaatctccaactgataaatcaggaaacttcttctgctcacaccactgggaaggggacagtctgaatacccaactgttcacgcagacctcgcctgtggcagatgcaccgaatattcttacaagctccgttttaatggcaccagcatcagaagatgaagacaatgttctcaaagcatttacagtacctaaaaacaggtccctggcgagccccttgcaggcaaccaaagctcagagactgttccaattttaaatgaagtctgaaattagtcagacagaaaataattgcaatgtatttgactgtcagaataagaaagtcaactgtcaatgttgtgaggccgatctgaagttgaccatctgctgtcaggttttaatatcaaaagagatttcccttgtaaccctaaagtgggtgtgtgttgatgaaatataaccaattccaaattaatcctgagccagccttgtagcagtacctgggaacctgcatcctgtggaaagatggaggagcagatgacatcttccagtcaagctcgtaaatacgtgaatgcattctcagcccggacgctggtcatgtgagacatttccagaaaagcattatggttttcagaacacttcaagttgacttgggatatatcattcctcaacatgaaacttttcatgaatgggagaagaacctatttttgttgtggtacaacagttgagagcagcaccaagtgcatttagttgaatgaagtcttcttggatttcacccaactaaaaggatttttaaaaataaataacagtcttacctaaattattaggtaatgaattgtagccagttgttaatatcttaatgcagatttttttaaaaaaaacataaaatgatttatctgtattttaaaggatccaacagatcagtattttttcctgtgatgggttttttgaaatttgacacattaaaaggtactccagtatttcacttttctcgatcactaaacatatgcatatatttttaaaaatcagtaaaagcattactctaagtgtagacttaataccatgtgacatttaatccagattgtaaatgctcatttatggttaatgacattgaaggtacatttattgtaccaaaccattttatgagttttctgttagcttgctttaaaaattattactgtaagaaatagttttataaaaaattatatttttattcagtaatttaattttgtaaatgccaaatgaaaaacgttttttgctgctatggtcttagcctgtagacatgctgctagtatcagaggggcagtagagcttggacagaaagaaaagaaacttggtgttaggtaattgactatgcactagtatttcagactttttaattttatatatatatacattttttttccttctgcaatacatttgaaaacttgtttgggagactctgcattttttattgtggtttttttgttattgttggtttatacaagcatgcgttgcacttcttttttgggagatgtgtgttgttgatgttctatgttttgttttgagtgtagcctgactgttttataatttgggagttctgcatttgatccgcatcccctgtggtttctaagtgtatggtctcagaactgttgcatggatcctgtgtttgcaactggggagacagaaactgtggttgatagccagtcactgccttaagaacatttgatgcaagatggccagcactgaacttttgagatatgacggtgtacttactgccttgtagcaaaataaagatgtgcccttatttt

SEQ ID NO: 155486 - DNA, 3571 bp, Artificial Sequence
  derived and/or modified sequence
aatatcaacctgtttcctcctcctccttctcctcctcctccgtgacctcctcctcctctttctcctgagaaacttcgccccagcggtgcggagcgccgctgcgcagccggggagggacgcaggcaggcggcgggcagcgggaggcggcagcccggtgcggtccccgcggctctcggcggagccccgcgcccgccgcgccatggcccgaagaccccggcacagcatatatagcagtgacgaggatgatgaggactttgagatgtgtgaccatgactatgatgggctgcttcccaagtctggaaagcgtcacttggggaaaacaaggtggacccgggaagaggatgaaaaactgaagaagctggtggaacagaatggaacagatgactggaaagttattgccaattatctcccgaatcgaacagatgtgcagtgccagcaccgatggcagaaagtactaaaccctgagctcatcaagggtccttggaccaaagaagaagatcagagagtgatagagcttgtacagaaatacggtccgaaacgttggtctgttattgccaagcacttaaaggggagaattggaaaacaatgtagggagaggtggcataaccacttgaatccagaagttaagaaaacctcctggacagaagaggaagacagaattatttaccaggcacacaagagactggggaacagatgggcagaaatcgcaaagctactgcctggacgaactgataatgctatcaagaaccactggaattctacaatgcgtcggaaggtcgaacaggaaggttatctgcaggagtcttcaaaagccagccagccagcagtggccacaagcttccagaagaacagtcatttgatgggttttgctcaggctccgcctacagctcaactccctgccactggccagcccactgttaacaacgactattcctattaccacatttctgaagcacaaaatgtctccagtcatgttccataccctgtagcgttacatgtaaatatagtcaatgtccctcagccagctgccgcagccattcagagacactataatgatgaagaccctgagaaggaaaagcgaataaaggaattagaattgctcctaatgtcaaccgagaatgagctaaaaggacagcaggtgctaccaacacagaaccacacatgcagctaccccgggtggcacagcaccaccattgccgaccacaccagacctcatggagacagtgcacctgtttcctgtttgggagaacaccactccactccatctctgccagcggatcctggctccctacctgaagaaagcgcctcgccagcaaggtgcatgatcgtccaccagggcaccattctggataatgttaagaacctcttagaatttgcagaaacactccaatttatagattctttcttaaacacttccagtaaccatgaaaactcagacttggaaatgccttctttaacttccacccccctcattggtcacaaattgactgttacaacaccatttcatagagaccagactgtgaaaactcaaaaggaaaatactgtttttagaaccccagctatcaaaaggtcaatcttagaaagctctccaagaactcctacaccattcaaacatgcacttgcagctcaagaaattaaatacggtcccctgaagatgctacctcagacaccctctcatctagtagaagatctgcaggatgtgatcaaacaggaatctgatgaatctggaattgttgctgagtttcaagaaaatggaccacccttactgaagaaaatcaaacaagaggtggaatctccaactgataaatcaggaaacttcttctgctcacaccactgggaaggggacagtctgaatacccaactgttcacgcagacctcgcctgtggcagatgcaccgactggagtgcaatggcacgatttcggctcactgcaacctctgcctcccgggttcaagcgattctcctgcctcagtctcccgagaagctgggattacaggcacccgccaccacgcccagctaattttgaatttttagtagagacggggtttctccatgttggtcaggctggtcttgaactcctgacctcaggtgatctacccgcctcggcctcccaaagtgctaggattacaggcgtgagccaccgcgcccggccagataatattcttacaagctccgttttaatggcaccagcatcagaagatgaagacaatgttctcaaagcatttacagtacctaaaaacaggtccctggcgagccccttgcagccttgtagcagtacctgggaacctgcatcctgtggaaagatggaggagcagatgacatcttccagtcaagctcgtaaatacgtgaatgcattctcagcccggacgctggtcatgtgagacatttccagaaaagcattatggttttcagaacacttcaagttgacttgggatatatcattcctcaacatgaaacttttcatgaatgggagaagaacctatttttgttgtggtacaacagttgagagcagcaccaagtgcatttagttgaatgaagtcttcttggatttcacccaactaaaaggatttttaaaaataaataacagtcttacctaaattattaggtaatgaattgtagccagttgttaatatcttaatgcagatttttttaaaaaaaacataaaatgatttatctgtattttaaaggatccaacagatcagtattttttcctgtgatgggttttttgaaatttgacacattaaaaggtactccagtatttcacttttctcgatcactaaacatatgcatatatttttaaaaatcagtaaaagcattactctaagtgtagacttaataccatgtgacatttaatccagattgtaaatgctcatttatggttaatgacattgaaggtacatttattgtaccaaaccattttatgagttttctgttagcttgctttaaaaattattactgtaagaaatagttttataaaaaattatatttttattcagtaatttaattttgtaaatgccaaatgaaaaacgttttttgctgctatggtcttagcctgtagacatgctgctagtatcagaggggcagtagagcttggacagaaagaaaagaaacttggtgttaggtaattgactatgcactagtatttcagactttttaattttatatatatatacattttttttccttctgcaatacatttgaaaacttgtttgggagactctgcattttttattgtggtttttttgttattgttggtttatacaagcatgcgttgcacttcttttttgggagatgtgtgttgttgatgttctatgttttgttttgagtgtagcctgactgttttataatttgggagttctgcatttgatccgcatcccctgtggtttctaagtgtatggtctcagaactgttgcatggatcctgtgtttgcaactggggagacagaaactgtggttgatagccagtcactgccttaagaacatttgatgcaagatggccagcactgaacttttgagatatgacggtgtacttactgccttgtagcaaaataaagatgtgcccttattttacct

SEQ ID NO: 155487 - DNA, 3302 bp, Artificial Sequence
  derived and/or modified sequence
ttcctcctcctccttctcctcctcctccgtgacctcctcctcctctttctcctgagaaacttcgccccagcggtgcggagcgccgctgcgcagccggggagggacgcaggcaggcggcgggcagcgggaggcggcagcccggtgcggtccccgcggctctcggcggagccccgcgcccgccgcgccatggcccgaagaccccggcacagcatatatagcagtgacgaggatgatgaggactttgagatgtgtgaccatgactatgatgggctgcttcccaagtctggaaagcgtcacttggggaaaacaaggtggacccgggaagaggatgaaaaactgaagaagctggtggaacagaatggaacagatgactggaaagttattgccaattatctcccgaatcgaacagatgtgcagtgccagcaccgatggcagaaagtactaaaccctgagctcatcaagggtccttggaccaaagaagaagatcagagagtgatagagcttgtacagaaatacggtccgaaacgttggtctgttattgccaagcacttaaaggggagaattggaaaacaatgtagggagaggtggcataaccacttgaatccagaagttaagaaaacctcctggacagaagaggaagacagaattatttaccaggcacacaagagactggggaacagatgggcagaaatcgcaaagctactgcctggacgaactgataatgctatcaagaaccactggaattctacaatgcgtcggaaggtcgaacaggaaggttatctgcaggagtcttcaaaagccagccagccagcagtggccacaagcttccagaagaacagtcatttgatgggttttgctcaggctccgcctacagctcaactccctgccactggccagcccactgttaacaacgactattcctattaccacatttctgaagcacaaaatgtctccagtcatgttccataccctgtagcgttacatgtaaatatagtcaatgtccctcagccagctgccgcagccattcagagacactataatgatgaagaccctgagaaggaaaagcgaataaaggaattagaattgctcctaatgtcaaccgagaatgagctaaaaggacagcaggtgctaccaacacagaaccacacatgcagctaccccgggtggcacagcaccaccattgccgaccacaccagacctcatggagacagtgcacctgtttcctgtttgggagaacaccactccactccatctctgccagcggatcctggctccctacctgaagaaagcgcctcgccagcaaggtgcatgatcgtccaccagggcaccattctggataatgttaagaacctcttagaatttgcagaaacactccaatttatagattctttcttaaacacttccagtaaccatgaaaactcagacttggaaatgccttctttaacttccacccccctcattggtcacaaattgactgttacaacaccatttcatagagaccagactgtgaaaactcaaaaggaaaatactgtttttagaaccccagctatcaaaaggtcaatcttagaaagctctccaagaactcctacaccattcaaacatgcacttgcagctcaagaaattaaatacggtcccctgaagatgctacctcagacaccctctcatctagtagaagatctgcaggatgtgatcaaacaggaatctgatgaatctggaattgttgctgagtttcaagaaaatggaccacccttactgaagaaaatcaaacaagaggtggaatctccaactgataaatcaggaaacttcttctgctcacaccactgggaaggggacagtctgaatacccaactgttcacgcagacctcgcctgtggcagatgcaccgaatattcttacaagctccgttttaatggcaccagcatcagaagatgaagacaatgttctcaaagcatttacagtacctaaaaacaggtccctggcgagccccttgcagccttgtagcagtacctgggaacctgcatcctgtggaaagatggaggagcagatgacatcttccagtcaagctcgtaaatacgtgaatgcattctcagcccggacgctggtcatgtgagacatttccagaaaagcattatggttttcagaacacttcaagttgacttgggatatatcattcctcaacatgaaacttttcatgaatgggagaagaacctatttttgttgtggtacaacagttgagagcagcaccaagtgcatttagttgaatgaagtcttcttggatttcacccaactaaaaggatttttaaaaataaataacagtcttacctaaattattaggtaatgaattgtagccagttgttaatatcttaatgcagatttttttaaaaaaaacataaaatgatttatctgtattttaaaggatccaacagatcagtattttttcctgtgatgggttttttgaaatttgacacattaaaaggtactccagtatttcacttttctcgatcactaaacatatgcatatatttttaaaaatcagtaaaagcattactctaagtgtagacttaataccatgtgacatttaatccagattgtaaatgctcatttatggttaatgacattgaaggtacatttattgtaccaaaccattttatgagttttctgttagcttgctttaaaaattattactgtaagaaatagttttataaaaaattatatttttattcagtaatttaattttgtaaatgccaaatgaaaaacgttttttgctgctatggtcttagcctgtagacatgctgctagtatcagaggggcagtagagcttggacagaaagaaaagaaacttggtgttaggtaattgactatgcactagtatttcagactttttaattttatatatatatacattttttttccttctgcaatacatttgaaaacttgtttgggagactctgcattttttattgtggtttttttgttattgttggtttatacaagcatgcgttgcacttcttttttgggagatgtgtgttgttgatgttctatgttttgttttgagtgtagcctgactgttttataatttgggagttctgcatttgatccgcatcccctgtggtttctaagtgtatggtctcagaactgttgcatggatcctgtgtttgcaactggggagacagaaactgtggttgatagccagtcactgccttaagaacatttgatgcaagatggccagcactgaacttttgagatatgacggtgtacttactgccttgtagcaaaataaagatgtgcccttattttacctac

SEQ ID NO: 155488 - DNA, 1630 bp, Artificial Sequence
  derived and/or modified sequence
atggcccgaagaccccggcacagcatatatagcagtgacgaggatgatgaggactttgagatgtgtgaccatgactatgatgggctgcttcccaagtctggaaagcgtcacttggggaaaacaaggtggacccgggaagagaatcgaacagatgtgcagtgccagcaccgatggcagaaagtactaaaccctgagctcatcaagggtccttggaccaaagaagaagatcagagaaactgataatgctatcaagaaccactggaattctacaatgcgtcggaaggtcgaacaggaaggttatctgcaggagtcttcaaaagccagccagccagcagtggccacaagcttccagaagaacagtcatttgatgggttttgctcaggctccgcctacagctcaactccctgccactggccagcccactgttaacaacgactattcctattaccacatttctgaagcacaaaatgtctccagtcatgttccataccctgtagcgttacatgtaaatatagtcaatgtccctcagccagctgccgcagccattcagagacactataatgatgaagaccctgagaaggaaaagcgaataaaggaattagaattgctcctaatgtcaaccgagaatgagctaaaaggacagcaggtgctaccaacacagaaccacacatgcagctaccccgggtggcacagcaccaccattgccgaccacaccagacctcatggagacagtgcacctgtttcctgtttgggagaacaccactccactccatctctgccagcggatcctggctccctacctgaagaaagcgcctcgccagcaaggtgcatgatcgtccaccagggcaccattctggataatgttaagaacctcttagaatttgcagaaacactccaatttatagattctttcttaaacacttccagtaaccatgaaaactcagacttggaaatgccttctttaacttccacccccctcattggtcacaaattgactgttacaacaccatttcatagagaccagactgtgaaaactcaaaaggaaaatactgtttttagaaccccagctatcaaaaggtcaatcttagaaagctctccaagaactcctacaccattcaaacatgcacttgcagctcaagaaattaaatacggtcccctgaagatgctacctcagacaccctctcatctagtagaagatctgcaggatgtgatcaaacaggaatctgatgaatctggaattgttgctgagtttcaagaaaatggaccacccttactgaagaaaatcaaacaagaggtggaatctccaactgataaatcaggaaacttcttctgctcacaccactgggaaggggacagtctgaatacccaactgttcacgcagacctcgcctgtggcagatgcaccgaatattcttacaagctccgttttaatggcaccagcatcagaagatgaagacaatgttctcaaagcatttacagtacctaaaaacaggtccctggcgagccccttgcagccttgtagcagtacctgggaacctgcatcctgtggaaagatggaggagcagatgacatcttccagtcaagctcgtaaatacgtgaatgcattctcagcccggacgctggtcatgtga

SEQ ID NO: 155489 - DNA, 1824 bp, Artificial Sequence
  derived and/or modified sequence
atggcccgaagaccccggcacagcatatatagcagtgacgaggatgatgaggactttgagatgtgtgaccatgactatgatgggctgcttcccaagtctggaaagcgtcacttggggaaaacaaggtggacccgggaagaggatgaaaaactgaagaagctggtggaacagaatggaacagatgactggaaagttattgccaattatctcccgaatcgaacagatgtgcagtgccagcaccgatggcagaaagtactaaaccctgagctcatcaagggtccttggaccaaagaagaagatcagagaaactgataatgctatcaagaaccactggaattctacaatgcgtcggaaggtcgaacaggaaggttatctgcaggagtcttcaaaagccagccagccagcagtggccacaagcttccagaagaacagtcatttgatgggttttgctcaggctccgcctacagctcaactccctgccactggccagcccactgttaacaacgactattcctattaccacatttctgaagcacaaaatgtctccagtcatgttccataccctgtagcgttacatgtaaatatagtcaatgtccctcagccagctgccgcagccattcagagacactataatgatgaagaccctgagaaggaaaagcgaataaaggaattagaattgctcctaatgtcaaccgagaatgagctaaaaggacagcaggtgctaccattatgtgggccattactgaattctgacatctttagcgactgggcagccaactgggatggctccttgtgctttgcaacatacatagttaaccaacaaagacaataaaagagaagtgatgcccaacacagaaccacacatgcagctaccccgggtggcacagcaccaccattgccgaccacaccagacctcatggagacagtgcacctgtttcctgtttgggagaacaccactccactccatctctgccagcggatcctggctccctacctgaagaaagcgcctcgccagcaaggtgcatgatcgtccaccagggcaccattctggataatgttaagaacctcttagaatttgcagaaacactccaatttatagattctttcttaaacacttccagtaaccatgaaaactcagacttggaaatgccttctttaacttccacccccctcattggtcacaaattgactgttacaacaccatttcatagagaccagactgtgaaaactcaaaaggaaaatactgtttttagaaccccagctatcaaaaggtcaatcttagaaagctctccaagaactcctacaccattcaaacatgcacttgcagctcaagaaattaaatacggtcccctgaagatgctacctcagacaccctctcatctagtagaagatctgcaggatgtgatcaaacaggaatctgatgaatctggaattgttgctgagtttcaagaaaatggaccacccttactgaagaaaatcaaacaagaggtggaatctccaactgataaatcaggaaacttcttctgctcacaccactgggaaggggacagtctgaatacccaactgttcacgcagacctcgcctgtggcagatgcaccgaatattcttacaagctccgttttaatggcaccagcatcagaagatgaagacaatgttctcaaagcatttacagtacctaaaaacaggtccctggcgagccccttgcagccttgtagcagtacctgggaacctgcatcctgtggaaagatggaggagcagatgacatcttccagtcaagctcgtaaatacgtgaatgcattctcagcccggacgctggtcatgtga

SEQ ID NO: 155490 - protein, 464 aa, Artificial Sequence
  derived and/or modified sequence
MPSCSTSTMPGMICKNPDLEFDSLQPCFYPDEDDFYFGGPDSTPPGEDIWKKFELLPTPPLSPSRGFAEHSSEPPSWVTEMLLENELWGSPAEEDAFGLGGLGGLTPNPVILQDCMWSGFSAREKLERAVSEKLQHGRGPPTAGSTAQSPGAGAASPAGRGHGGAAGAGRAGAALPAELAHPAAECVDPAVVFPFPVNKREPAPVPAAPASAPAAGPAVASGAGIAAPAGAPGVAPPRPGGRQTSGGDHKALSTSGEDTLSDSDDEDDEEEDEEEEIDVVTVEKRRSSSNTKAVTTFTITVRPKNAALGPGRAQSSELILKRCLPIHQQHNYAAPSPYVESEDAPPQKKIKSEASPRPLKSVIPPKAKSLSPRNSDSEDSERRRNHNILERQRRNDLRSSFLTLRDHVPELVKNEKAAKVVILKKATEYVHSLQAEEHQLLLEKEKLQARQQQLLKKIEHARTC

SEQ ID NO: 155491 - protein, 382 aa, Artificial Sequence
  derived and/or modified sequence
MPSCSTSTMPGMICKNPDLEFDSLQPCFYPDEDDFYFGGPDSTPPGEDIWKKFELLPTPPLSPSRGFAEHSSEPPSWVTEMLLENELWGSPAEEDAFGLGGLGGLTPNPVILQDCMWSGFSAREKLERAVSEKLQHGRGPPTAGSTAQSPGVAPPRPGGRQTSGGDHKALSTSGEDTLSDSDDEDDEEEDEEEEIDVVTVEKRRSSSNTKAVTTFTITVRPKNAALGPGRAQSSELILKRCLPIHQQHNYAAPSPYVESEDAPPQKKIKSEASPRPLKSVIPPKAKSLSPRNSDSEDSERRRNHNILERQRRNDLRSSFLTLRDHVPELVKNEKAAKVVILKKATEYVHSLQAEEHQLLLEKEKLQARQQQLLKKIEHARTC

SEQ ID NO: 155492 - DNA, 2613 bp, Artificial Sequence
  derived and/or modified sequence
gtcatctgtctggacgcgctgggtggatgcggggggctcctgggaactgtgttggagccgagcaagcgctagccaggcgcaagcgcgcacagactgtagccatccgaggacacccccgcccccccggcccacccggagacacccgcgcagaatcgcctccggatcccctgcagtcggcgggagtgttggaggtcggcgccggcccccgccttccgcgccccccacgggaaggaagcacccccggtattaaaacgaacggggcggaaagaagccctcagtcgccggccgggaggcgagccgatgccgagctgctccacgtccaccatgccgggcatgatctgcaagaacccagacctcgagtttgactcgctacagccctgcttctacccggacgaagatgacttctacttcggcggccccgactcgacccccccgggggaggacatctggaagaagtttgagctgctgcccacgcccccgctgtcgcccagccgtggcttcgcggagcacagctccgagcccccgagctgggtcacggagatgctgcttgagaacgagctgtggggcagcccggccgaggaggacgcgttcggcctggggggactgggtggcctcacccccaacccggtcatcctccaggactgcatgtggagcggcttctccgcccgcgagaagctggagcgcgccgtgagcgagaagctgcagcacggccgcgggccgccaaccgccggttccaccgcccagtccccgggagccggcgccgccagccctgcgggtcgcgggcacggcggggctgcgggagccggccgcgccggggccgccctgcccgccgagctcgcccacccggccgccgagtgcgtggatcccgccgtggtcttcccctttcccgtgaacaagcgcgagccagcgcccgtgcccgcagccccggccagtgccccggcggcgggccctgcggtcgcctcgggggcgggtattgccgccccagccggggccccgggggtcgcccctccgcgcccaggcggccgccagaccagcggcggcgaccacaaggccctcagtacctccggagaggacaccctgagcgattcagatgatgaagatgatgaagaggaagatgaagaggaagaaatcgacgtggtcactgtggagaagcggcgttcctcctccaacaccaaggctgtcaccacattcaccatcactgtgcgtcccaagaacgcagccctgggtcccgggagggctcagtccagcgagctgatcctcaaacgatgccttcccatccaccagcagcacaactatgccgccccctctccctacgtggagagtgaggatgcacccccacagaagaagataaagagcgaggcgtccccacgtccgctcaagagtgtcatccccccaaaggctaagagcttgagcccccgaaactctgactcggaggacagtgagcgtcgcagaaaccacaacatcctggagcgccagcgccgcaacgaccttcggtccagctttctcacgctcagggaccacgtgccggagttggtaaagaatgagaaggccgccaaggtggtcattttgaaaaaggccactgagtatgtccactccctccaggccgaggagcaccagcttttgctggaaaaggaaaaattgcaggcaagacagcagcagttgctaaagaaaattgaacacgctcggacttgctagacgcttctcaaaactggacagtcactgccactttgcacattttgattttttttttaaacaaacattgtgttgacattaagaatgttggtttactttcaaatcggtcccctgtcgagttcggctctgggtgggcagtaggaccaccagtgtggggttctgctgggaccttggagagcctgcatcccaggatgctgggtggccctgcagcctcctccacctcacctccatgacagcgctaaacgttggtgacggttgggagcctctggggctgttgaagtcaccttgtgtgttccaagtttccaaacaacagaaagtcattccttctttttaaaatggtgcttaagttccagcagatgccacataaggggtttgccatttgatacccctggggaacatttctgtaaataccattgacacatccgccttttgtatacatcctgggtaatgagaggtggcttttgcggccagtattagactggaagttcatacctaagtactgtaataatacctcaatgtttgaggagcatgttttgtatacaaatatattgttaatctctgttatgtactgtactaattcttacactgcctgtatactttagtatgacgctgatacataactaaatttgatacttatattttcgtatgaaaatgagttgtgaaagttttgagtagatattactttatcactttttgaactaagaaacttttgtaaagaaatttactatatatatatgcctttttcctagcctgtttcttcctgttaatgtatttgttcatgtttggtgcatagaactgggtaaatgcaaagttctgtgtttaatttcttcaaaatgtatatatttagtgctgcatcttatagcactttgaaatacctcatgtttatgaaaataaatagcttaaaattaaatgaaaaaaaaa

SEQ ID NO: 155493 - DNA, 1395 bp, Artificial Sequence
  derived and/or modified sequence
atgcccagctgcagcaccagcaccatgcccggcatgatctgcaagaaccccgacctggagttcgacagcctgcagccctgcttctaccccgacgaggacgacttctacttcggcggccccgacagcaccccccccggcgaggacatctggaagaagttcgagctgctgcccaccccccccctgagccccagcagaggcttcgccgagcacagcagcgagccccccagctgggtgaccgagatgctgctggagaacgagctgtggggcagccccgccgaggaggacgccttcggcctgggcggcctgggcggcctgacccccaaccccgtgatcctgcaggactgcatgtggagcggcttcagcgccagagagaagctggagagagccgtgagcgagaagctgcagcacggcagaggcccccccaccgccggcagcaccgcccagagccccggcgccggcgccgccagccccgccggcagaggccacggcggcgccgccggcgccggcagagccggcgccgccctgcccgccgagctggcccaccccgccgccgagtgcgtggaccccgccgtggtgttccccttccccgtgaacaagagagagcccgcccccgtgcccgccgcccccgccagcgcccccgccgccggccccgccgtggccagcggcgccggcatcgccgcccccgccggcgcccccggcgtggccccccccagacccggcggcagacagaccagcggcggcgaccacaaggccctgagcaccagcggcgaggacaccctgagcgacagcgacgacgaggacgacgaggaggaggacgaggaggaggagatcgacgtggtgaccgtggagaagagaagaagcagcagcaacaccaaggccgtgaccaccttcaccatcaccgtgagacccaagaacgccgccctgggccccggcagagcccagagcagcgagctgatcctgaagagatgcctgcccatccaccagcagcacaactacgccgcccccagcccctacgtggagagcgaggacgcccccccccagaagaagatcaagagcgaggccagccccagacccctgaagagcgtgatcccccccaaggccaagagcctgagccccagaaacagcgacagcgaggacagcgagagaagaagaaaccacaacatcctggagagacagagaagaaacgacctgagaagcagcttcctgaccctgagagaccacgtgcccgagctggtgaagaacgagaaggccgccaaggtggtgatcctgaagaaggccaccgagtacgtgcacagcctgcaggccgaggagcaccagctgctgctggagaaggagaagctgcaggccagacagcagcagctgctgaagaagatcgagcacgccagaacctgctag

SEQ ID NO: 155494 - DNA, 1149 bp, Artificial Sequence
  derived and/or modified sequence
atgcccagctgcagcaccagcaccatgcccggcatgatctgcaagaaccccgacctggagttcgacagcctgcagccctgcttctaccccgacgaggacgacttctacttcggcggccccgacagcaccccccccggcgaggacatctggaagaagttcgagctgctgcccaccccccccctgagccccagcagaggcttcgccgagcacagcagcgagccccccagctgggtgaccgagatgctgctggagaacgagctgtggggcagccccgccgaggaggacgccttcggcctgggcggcctgggcggcctgacccccaaccccgtgatcctgcaggactgcatgtggagcggcttcagcgccagagagaagctggagagagccgtgagcgagaagctgcagcacggcagaggcccccccaccgccggcagcaccgcccagagccccggcgtggccccccccagacccggcggcagacagaccagcggcggcgaccacaaggccctgagcaccagcggcgaggacaccctgagcgacagcgacgacgaggacgacgaggaggaggacgaggaggaggagatcgacgtggtgaccgtggagaagagaagaagcagcagcaacaccaaggccgtgaccaccttcaccatcaccgtgagacccaagaacgccgccctgggccccggcagagcccagagcagcgagctgatcctgaagagatgcctgcccatccaccagcagcacaactacgccgcccccagcccctacgtggagagcgaggacgcccccccccagaagaagatcaagagcgaggccagccccagacccctgaagagcgtgatcccccccaaggccaagagcctgagccccagaaacagcgacagcgaggacagcgagagaagaagaaaccacaacatcctggagagacagagaagaaacgacctgagaagcagcttcctgaccctgagagaccacgtgcccgagctggtgaagaacgagaaggccgccaaggtggtgatcctgaagaaggccaccgagtacgtgcacagcctgcaggccgaggagcaccagctgctgctggagaaggagaagctgcaggccagacagcagcagctgctgaagaagatcgagcacgccagaacctgctag

SEQ ID NO: 155495 - DNA, 1395 bp, Artificial Sequence
  derived and/or modified sequence
atgccatcatgttccaccagtacgatgcctggtatgatatgcaaaaaccccgatctggaattcgactcgctacaaccctgcttttaccctgatgaagatgacttctacttcggaggtccagattctacaccccccggggaggatatctggaagaagtttgaacttctgccaaccccaccactgagtccatctagggggttcgctgagcattcctcggagcctccaagttgggtaacagagatgttgctcgagaacgagctatggggatctcccgccgaagaagatgcctttgggttgggtggtctcggtgggttgactcccaatcctgtgattctacaggattgcatgtggtcaggtttttccgccagagaaaaactggagcgagcagtctcagaaaagttgcagcacggtagggggcctcccacggctgggagtacggcacagtctcccggcgccggtgccgcttcaccggccggtaggggccatggaggagccgccggtgcaggacgcgcaggcgctgccctgcctgccgagctggcccacccagccgcagagtgtgttgaccccgccgtagtattcccatttcccgtgaacaagagagaacccgccccggtacccgcggcccctgcctctgctcccgctgcgggccctgccgtggctagcggtgcagggatagctgcaccggctggagcaccaggcgtggctcccccccgccccggcggcaggcagacctccggcggtgaccacaaggcattgagtactagcggcgaggatactctctccgattctgatgatgaggacgatgaggaggaagatgaggaagaggagatcgacgtggtgactgttgaaaagcggagatcttcgagcaacacaaaggccgtcacaacatttactattaccgtcaggccaaagaacgccgctttaggccctggccgcgcacagtctagcgagctcatcttaaaacgatgcctgccaattcaccagcaacacaattacgccgccccgagcccatacgtcgagagtgaagacgctcccccccagaagaaaataaagagcgaagccagccccaggcccctcaagagcgtcatacctccgaaggccaagagcttgagtcccaggaatagcgatagcgaggatagcgaaaggcgacggaaccataatattctcgagcggcagcgcaggaatgatttgaggtcaagttttctcaccttacgcgaccatgtgccagagttagtgaagaatgaaaaagccgcgaaggtcgtgatccttaagaaagcaacagagtatgtacactccttgcaggctgaggaacaccagctgctgctggaaaaggaaaagctgcaagctcggcagcagcagctgctaaagaaaattgaacatgcacggacatgctag

SEQ ID NO: 155496 - DNA, 1149 bp, Artificial Sequence
  derived and/or modified sequence
atgccttcatgttccactagcaccatgccgggcatgatttgtaagaaccccgacctcgagtttgattcactacagccatgtttctatcccgatgaggatgatttctatttcggtggacccgactctacacctcccggggaggacatttggaagaaattcgagcttcttccaacccctcccctgtcaccgtctcggggatttgccgagcattctagcgaacccccgtcttgggttactgaaatgcttcttgagaacgagttatggggatcccccgctgaggaggatgcgttcggcctgggaggtctcgggggtttgacaccaaatcctgtgatcctgcaagactgcatgtggtcaggtttctccgcaagagaaaagctggagagagcggtgagtgagaagctgcaacatggacgtggccctcccactgctgggtccaccgcacaaagtccgggtgtcgctccccctaggcccggtggccgacagacttccggaggcgaccataaagccctatcaacgtcaggagaggataccctgtcagatagtgatgatgaggacgatgaggaagaagatgaggaagaggagattgatgtggtgacagtggaaaagcggaggtcctcttccaacactaaggcagtaaccacctttacaatcaccgtgcgtcctaagaatgccgccctcgggcctggtagagctcaatccagcgaactcattctgaaaagatgtctacccattcaccagcagcataactatgcagccccctcgccctatgtggaaagcgaagacgcccccccacagaagaaaattaaatctgaagcctcgccgagacccctcaagagcgtgattcccccgaaagctaaaagcctgtccccacgtaatagtgatagtgaagatagtgagaggcgtcgaaatcataatatcctggaacgacagaggaggaatgacctgcggagtagttttctaaccctgagagatcacgttcccgaacttgtcaagaacgaaaaagccgccaaggtggtcattctcaagaaggccacagagtacgtccactcactgcaggccgaggaacatcagctgctattggagaaggagaagctgcaggctcgccaacagcagttgctaaaaaagatcgagcacgcgaggacgtgctag

SEQ ID NO: 155497 - DNA, 1395 bp, Artificial Sequence
  derived and/or modified sequence
atgcccagctgcagcaccagcaccatgcctggcatgatctgcaagaacccagacctggagtttgacagcctgcagccctgcttctacccagatgaagatgacttctactttggaggccctgacagcaccccacctggagaggacatctggaagaagtttgagctgctgcccaccccacccctgagccccagccggggctttgctgagcacagcagcgagccccccagctgggtgacagagatgctgctggagaatgagctgtggggcagccctgctgaggaggatgccttcggcctgggcggcctgggcggcctgacccccaaccctgtgatcctgcaggactgcatgtggagcggcttcagcgcccgggagaagctggagagagctgtgtctgagaagctgcagcacggccggggccccccaacagctggcagcacagcccagagccctggggccggggccgccagccctgctggccggggccacggcggggccgccggggccggccgggccggggccgccctgcctgctgagctggcccaccctgctgctgaatgtgtggaccctgctgtggtgttccccttccctgtgaacaagcgggagcccgcccctgtgcctgctgccccagccagcgccccagctgctggccctgctgtggccagcggggccggcattgctgccccagctggggcccctggggtggccccacccaggcctgggggccggcagaccagcggcggggaccacaaggccctgagcaccagcggggaggacaccctgagtgacagtgatgatgaagatgatgaggaggaggatgaggaggaggagattgatgtggtgacagtggagaagagaagaagcagcagcaacaccaaggctgtgaccaccttcaccatcaccgtgcggcccaagaatgctgccctgggccctggccgggcccagagcagcgagctgatcctgaagcgctgcctgcccatccaccagcagcacaactatgctgcccccagcccctacgtggagagtgaagatgccccaccccagaagaagatcaagtctgaggccagcccccggcccctgaagagcgtcatcccccccaaggccaagagcctgagccccaggaacagcgacagcgaggacagcgagaggagaagaaaccacaacatcctggagcggcagaggagaaatgacctgcggagcagcttcctgaccctgcgggaccacgtgcctgagctggtgaagaatgagaaggccgccaaggtggtgatcctgaagaaggccacagaatatgtgcacagcctgcaggccgaggagcaccagctgctgctggagaaggagaagctgcaggcccggcagcagcagctgctgaagaagattgagcacgcccggacctgctag

SEQ ID NO: 155498 - DNA, 1149 bp, Artificial Sequence
  derived and/or modified sequence
atgcccagctgcagcaccagcaccatgcctggcatgatctgcaagaacccagacctggagtttgacagcctgcagccctgcttctacccagatgaagatgacttctactttggaggccctgacagcaccccacctggagaggacatctggaagaagtttgagctgctgcccaccccacccctgagccccagccggggctttgctgagcacagcagcgagccccccagctgggtgacagagatgctgctggagaatgagctgtggggcagccctgctgaggaggatgccttcggcctgggcggcctgggcggcctgacccccaaccctgtgatcctgcaggactgcatgtggagcggcttcagcgcccgggagaagctggagagagctgtgtctgagaagctgcagcacggccggggccccccaacagctggcagcacagcccagagccctggggtggccccacccaggcctgggggccggcagaccagcggcggggaccacaaggccctgagcaccagcggggaggacaccctgagtgacagtgatgatgaagatgatgaggaggaggatgaggaggaggagattgatgtggtgacagtggagaagagaagaagcagcagcaacaccaaggctgtgaccaccttcaccatcaccgtgcggcccaagaatgctgccctgggccctggccgggcccagagcagcgagctgatcctgaagcgctgcctgcccatccaccagcagcacaactatgctgcccccagcccctacgtggagagtgaagatgccccaccccagaagaagatcaagtctgaggccagcccccggcccctgaagagcgtcatcccccccaaggccaagagcctgagccccaggaacagcgacagcgaggacagcgagaggagaagaaaccacaacatcctggagcggcagaggagaaatgacctgcggagcagcttcctgaccctgcgggaccacgtgcctgagctggtgaagaatgagaaggccgccaaggtggtgatcctgaagaaggccacagaatatgtgcacagcctgcaggccgaggagcaccagctgctgctggagaaggagaagctgcaggcccggcagcagcagctgctgaagaagattgagcacgcccggacctgctag

SEQ ID NO: 155499 - DNA, 1395 bp, Artificial Sequence
  derived and/or modified sequence
atgcccagctgcagcaccagcaccatgcccggcatgatctgcaagaacccagacctggagttcgacagcctgcaaccctgtttttacccagacgaggatgatttttactttggaggccccgattccaccccccccggtgaggatatctggaagaagtttgagctgctgcctacccctccgttatccccctctcggggcttcgctgagcactcctcggagcctccaagttgggtcacagaaatgctgttggagaatgaactgtggggtagccctgctgaagaggacgcctttggattggggggcctgggtggcctcacccccaatcccgtgatcttgcaagattgtatgtggtccggcttctcagcaagggagaagttggaacgggcagtgagcgagaaactgcaacacggccggggcccccctaccgctggatccaccgcacaatcacctggggcaggcgccgctagtcctgctgggaggggacatgggggagctgccggcgctgggcgagcaggcgcagctctgcccgcagagctcgcccaccctgcggcagaatgcgtagaccctgcagtcgtatttcccttcccagtcaataagcgcgagccagcacccgtgccggctgccccggctagcgccccagcagcaggacctgccgtcgcatctggagcaggaatcgccgctcccgctggagcccctggggtggcaccccctcgcccggggggacgccagacttctgggggcgaccacaaagcactctcaactagcggagaagacaccctgagcgacagtgacgacgaggatgatgaggaggaagacgaagaggaggagatcgatgttgtcactgtggagaagagacggtcctcaagtaataccaaggcagtgactacattcacgatcactgtgcggcctaagaatgccgccctagggcccggccgagctcagagcagcgagcttatcctgaagcgctgcctgccgatacatcaacaacacaactatgccgcccccagtccttatgtcgagtcggaagacgcccctccccagaagaagataaaaagtgaagcctcccctcgacctctcaaaagtgtcatccctcccaaagctaagagcctgtccccgaggaactccgattcggaagactcggagagaagacggaatcacaatatactggagagacagcggagaaacgaccttaggagttcgtttctgaccctgcgggaccacgtccccgagctcgttaaaaatgagaaggccgcaaaagtggttattctgaaaaaagcaacggaatacgtgcactcactgcaagccgaggaacatcagttgcttttggagaaagagaaactgcaggctagacagcaacagctgctgaaaaagatagagcatgccagaacatgttag

SEQ ID NO: 155500 - DNA, 1149 bp, Artificial Sequence
  derived and/or modified sequence
atgcccagctgcagcaccagcaccatgcccggcatgatctgcaagaatcctgacctggaattcgacagtctccagccttgtttttatcctgacgaagatgatttctatttcggtggcccagactctactcctccaggggaggacatatggaaaaaattcgagctgctgcctaccccacctttgtctccctcgcgagggttcgccgaacacagctccgaacctccctcatgggttacagagatgctgcttgaaaatgagttgtggggcagcccagcagaggaagacgcctttggcctagggggtctgggcgggctgactcccaatccggtaatactccaggattgtatgtggtccgggttctctgcaagagaaaaattagagcgggcggtgagcgagaagctacagcacgggcgtggcccccccacagccggtagcaccgctcagagccccggcgtggcacctccccggcccggaggtagacagactagcggtggtgatcataaggccctcagcacctcaggcgaggacaccctgagcgatagtgacgatgaggatgatgaagaagaagacgaggaggaggagatcgacgtggtgacagtggaaaagagaaggtcttcttccaacacaaaggccgtgactaccttcactatcacggtgcggcccaagaacgctgcactgggacccgggagggcccagtcaagcgaactcatcctgaagagatgtctgccaattcaccagcaacacaactacgcagcaccaagtccttacgtcgagagtgaagatgccccccctcagaagaaaatcaagagcgaggcgagcccacgacctttgaagtcagttattccccctaaggctaaaagcctgagccctagaaattctgactctgaggactccgagaggcgccgcaatcacaacatcctcgagcgacagcggagaaacgacctccgcagctccttcctgaccctccgcgaccacgtccccgagctcgtgaagaatgagaaagcggccaaagttgttattctcaaaaaggcaaccgagtatgtgcattcccttcaagccgaggagcaccaactcttgctggagaaggaaaaactgcaggcgcgacagcagcagctccttaagaaaatcgaacacgcccgcacatgttag

SEQ ID NO: 155501 - DNA, 1395 bp, Artificial Sequence
  derived and/or modified sequence
atgcctagctgctccacaagtacaatgccaggtatgatttgtaagaatcctgacctggaattcgactcccttcaaccatgcttctatcccgacgaggacgacttctatttcggagggccagattcgacaccaccaggggaagatatctggaaaaaatttgagctgctgccaacccccccactgtccccgtcacgtgggttcgctgaacattcaagtgagccaccatcatgggtgacggaaatgcttctggagaatgaattatggggaagcccagctgaggaagatgccttcgggctaggtggcctcggcggactgaccccaaatccggttatcctgcaggattgcatgtggtccggcttttccgctcgtgaaaagctggaaagggctgttagcgagaagcttcaacatggtagagggccacccaccgccggatccaccgctcagtctcctggggctggggctgcaagtccggctggcaggggacacggcggagccgctggcgctggccgtgccggagcagcattgccggcagaactggcccaccccgcagccgaatgcgttgacccggctgtggttttcccttttcccgtgaacaaacgggagccggctcctgtgccagcggctccagcaagcgcacccgctgccggacccgctgttgccagtggcgctggaatagccgctcccgctggagccccaggcgtcgcccctcccagacccggtgggcgtcagacgtccgggggtgatcataaggccctgagcacctctggggaggataccctgtccgactctgatgacgaggacgacgaggaagaggacgaagaagaggaaattgatgtagtgaccgtggagaaacgcaggtcaagttcaaacacaaaagcagtgaccacattcaccatcacagtgcggccaaagaatgccgctcttggcccaggaagggcccagtccagcgagctgatcttgaagcgctgccttcccattcaccaacagcacaactatgcagcaccctcaccttatgtagagtctgaggacgcgccaccgcagaaaaagatcaagtcagaagcttctcctaggccactaaagagtgtcatccccccaaaggcaaaatccctgtctcctcgcaatagcgatagtgaggactccgagcgtcgaaggaaccacaatattctggagcgccagaggcggaacgatctacggtcatccttcttgacactgcgagatcatgtgcccgagcttgtcaaaaacgagaaggccgcaaaggtggttatcctgaaaaaagcgaccgagtacgtgcacagcctccaggcagaagagcatcagttgcttctggagaaggaaaaactccaggccagacagcagcagctgctcaagaagattgaacacgcgcgtacatgctag

SEQ ID NO: 155502 - DNA, 1149 bp, Artificial Sequence
  derived and/or modified sequence
atgccttcatgttctacctccacaatgcctgggatgatttgcaagaatcccgatctcgagttcgattctctacagccgtgtttctacccagatgaggatgacttttactttggtggtcccgatagcaccccacccggtgaagacatatggaagaaatttgaactccttcctaccccacctttgtccccctcacgaggtttcgctgagcatagctctgagcccccaagttgggttaccgagatgctgttggagaatgaactttggggatcccccgctgaggaagacgcattcggcctgggcggactcggcggtttgactcctaacccagtgatcctgcaagattgtatgtggtctggcttctccgctcgtgagaagctggagcgggctgtctctgagaagctgcagcatggaagaggccctccaactgcaggctcaacggcccagtctccaggggttgcacctcccagaccaggcggtcgccagacttccgggggagaccacaaagccctgtccaccagtggcgaagacacacttagcgactcagacgatgaggacgacgaggaggaggatgaggaggaagagatcgacgtcgtcaccgtagagaagcggaggtcttcctccaatacaaaagccgtaaccacgttcacaattaccgttagacccaaaaatgctgcccttgggccagggagagctcagtccagcgagttgattctgaaacgttgcctcccgattcatcagcagcacaactacgcagccccaagcccctatgtagagagcgaggatgcaccaccacaaaaaaagatcaaatcagaggccagcccaagaccgctgaagagcgtgattcctccgaaggctaagtctttatcaccacgcaactcagacagtgaggatagcgaacgccgaagaaaccacaatattctggaaaggcagcggcgaaatgaccttcggtccagcttcctgaccctgcgggatcacgtgccagaacttgtgaaaaatgagaaagccgcaaaagtcgtcatactgaaaaaagcaactgagtacgtgcacagtctccaggcagaggagcaccagttgctcctggagaaagagaagctgcaagcaaggcagcagcagctgctcaagaagattgaacacgcacgcacatgctag

SEQ ID NO: 155503 - DNA, 2602 bp, Artificial Sequence
  derived and/or modified sequence
atctgtctggacgcgctgggtggatgcggggggctcctgggaactgtgttggagccgagcaagcgctagccaggcgcaagcgcgcacagactgtagccatccgaggacacccccgcccccccggcccacccggagacacccgcgcagaatcgcctccggatcccctgcagtcggcgggagtgttggaggtcggcgccggcccccgccttccgcgccccccacgggaaggaagcacccccggtattaaaacgaacggggcggaaagaagccctcagtcgccggccgggaggcgagccgatgccgagctgctccacgtccaccatgccgggcatgatctgcaagaacccagacctcgagtttgactcgctacagccctgcttctacccggacgaagatgacttctacttcggcggccccgactcgacccccccgggggaggacatctggaagaagtttgagctgctgcccacgcccccgctgtcgcccagccgtggcttcgcggagcacagctccgagcccccgagctgggtcacggagatgctgcttgagaacgagctgtggggcagcccggccgaggaggacgcgttcggcctggggggactgggtggcctcacccccaacccggtcatcctccaggactgcatgtggagcggcttctccgcccgcgagaagctggagcgcgccgtgagcgagaagctgcagcacggccgcgggccgccaaccgccggttccaccgcccagtccccgggagccggcgccgccagccctgcgggtcgcgggcacggcggggctgcgggagccggccgcgccggggccgccctgcccgccgagctcgcccacccggccgccgagtgcgtggatcccgccgtggtcttcccctttcccgtgaacaagcgcgagccagcgcccgtgcccgcagccccggccagtgccccggcggcgggccctgcggtcgcctcgggggcgggtattgccgccccagccggggccccgggggtcgcccctccgcgcccaggcggccgccagaccagcggcggcgaccacaaggccctcagtacctccggagaggacaccctgagcgattcagatgatgaagatgatgaagaggaagatgaagaggaagaaatcgacgtggtcactgtggagaagcggcgttcctcctccaacaccaaggctgtcaccacattcaccatcactgtgcgtcccaagaacgcagccctgggtcccgggagggctcagtccagcgagctgatcctcaaacgatgccttcccatccaccagcagcacaactatgccgccccctctccctacgtggagagtgaggatgcacccccacagaagaagataaagagcgaggcgtccccacgtccgctcaagagtgtcatccccccaaaggctaagagcttgagcccccgaaactctgactcggaggacagtgagcgtcgcagaaaccacaacatcctggagcgccagcgccgcaacgaccttcggtccagctttctcacgctcagggaccacgtgccggagttggtaaagaatgagaaggccgccaaggtggtcattttgaaaaaggccactgagtatgtccactccctccaggccgaggagcaccagcttttgctggaaaaggaaaaattgcaggcaagacagcagcagttgctaaagaaaattgaacacgctcggacttgctagacgcttctcaaaactggacagtcactgccactttgcacattttgattttttttttaaacaaacattgtgttgacattaagaatgttggtttactttcaaatcggtcccctgtcgagttcggctctgggtgggcagtaggaccaccagtgtggggttctgctgggaccttggagagcctgcatcccaggatgctgggtggccctgcagcctcctccacctcacctccatgacagcgctaaacgttggtgacggttgggagcctctggggctgttgaagtcaccttgtgtgttccaagtttccaaacaacagaaagtcattccttctttttaaaatggtgcttaagttccagcagatgccacataaggggtttgccatttgatacccctggggaacatttctgtaaataccattgacacatccgccttttgtatacatcctgggtaatgagaggtggcttttgcggccagtattagactggaagttcatacctaagtactgtaataatacctcaatgtttgaggagcatgttttgtatacaaatatattgttaatctctgttatgtactgtactaattcttacactgcctgtatactttagtatgacgctgatacataactaaatttgatacttatattttcgtatgaaaatgagttgtgaaagttttgagtagatattactttatcactttttgaactaagaaacttttgtaaagaaatttactatatatatatgcctttttcctagcctgtttcttcctgttaatgtatttgttcatgtttggtgcatagaactgggtaaatgcaaagttctgtgtttaatttcttcaaaatgtatatatttagtgctgcatcttatagcactttgaaatacctcatgtttatgaaaataaatagcttaaaattaaatga

SEQ ID NO: 155504 - DNA, 1834 bp, Artificial Sequence
  derived and/or modified sequence
atctgtctggacgcgctgggtggatgcggggggctcctgggaactgtgttggagccgagcaagcgctagccaggcgcaagcgcgcacagactgtagccatccgaggacacccccgcccccccggcccacccggagacacccgcgcagaatcgcctccggatcccctgcagtcggcgggagtgttggaggtcggcgccggcccccgccttccgcgccccccacgggaaggaagcacccccggtattaaaacgaacggggcggaaagaagccctcagtcgccggccgggaggcgagccgatgccgagctgctccacgtccaccatgccgggcatgatctgcaagaacccagacctcgagtttgactcgctacagccctgcttctacccggacgaagatgacttctacttcggcggccccgactcgacccccccgggggaggacatctggaagaagtttgagctgctgcccacgcccccgctgtcgcccagccgtggcttcgcggagcacagctccgagcccccgagctgggtcacggagatgctgcttgagaacgagctgtggggcagcccggccgaggaggacgcgttcggcctggggggactgggtggcctcacccccaacccggtcatcctccaggactgcatgtggagcggcttctccgcccgcgagaagctggagcgcgccgtgagcgagaagctgcagcacggccgcgggccgccaaccgccggttccaccgcccagtccccgggggtcgcccctccgcgcccaggcggccgccagaccagcggcggcgaccacaaggccctcagtacctccggagaggacaccctgagcgattcagatgatgaagatgatgaagaggaagatgaagaggaagaaatcgacgtggtcactgtggagaagcggcgttcctcctccaacaccaaggctgtcaccacattcaccatcactgtgcgtcccaagaacgcagccctgggtcccgggagggctcagtccagcgagctgatcctcaaacgatgccttcccatccaccagcagcacaactatgccgccccctctccctacgtggagagtgaggatgcacccccacagaagaagataaagagcgaggcgtccccacgtccgctcaagagtgtcatccccccaaaggctaagagcttgagcccccgaaactctgactcggaggacagtgagcgtcgcagaaaccacaacatcctggagcgccagcgccgcaacgaccttcggtccagctttctcacgctcagggaccacgtgccggagttggtaaagaatgagaaggccgccaaggtggtcattttgaaaaaggccactgagtatgtccactccctccaggccgaggagcaccagcttttgctggaaaaggaaaaattgcaggcaagacagcagcagttgctaaagaaaattgaacacgctcggacttgctagacgcttctcaaaactggacagtcactgccactttgcacattttgattttttttttaaacaaacattgtgttgacattaagaatgttggtttactttcaaatcggtcccctgtcgagttcggctctgggtgggcagtaggaccaccagtgtggggttctgctgggaccttggagagcctgcatcccaggatgctgggtggccctgcagcctcctccacctcacctccatgacagcgctaaacgttggtgacggttgggagcctctggggctgttgaagtcaccttgtgtgttccaagtttccaaacaacagaaagtcattccttctttttaaaatggtgcttaagttccagcagatgccacataaggggtttgccatttgatacccctg

SEQ ID NO: 155505 - protein, 1043 aa, Artificial Sequence
  derived and/or modified sequence
MPLLEGSVGVEDLVLLEPLVEESLLKNLQLRYENKEIYTYIGNVVISVNPYQQLPIYGPEFIAKYQDYTFYELKPHIYALANVAYQSLRDRDRDQCILITGESGSGKTEASKLVMSYVAAVCGKGEQVNSVKEQLLQSNPVLEAFGNAKTIRNNNSSRFGKYMDIEFDFKGSPLGGVITNYLLEKSRLVKQLKGERNFHIFYQLLAGADEQLLKALKLERDTTGYAYLNHEVSRVDGMDDASSFRAVQSAMAVIGFSEEEIRQVLEVTSMVLKLGNVLVADEFQASGIPASGIRDGRGVREIGEMVGLNSEEVERALCSRTMETAKEKVVTALNVMQAQYARDALAKNIYSRLFDWIVNRINESIKVGIGEKKKVMGVLDIYGFEILEDNSFEQFVINYCNEKLQQVFIEMTLKEEQEEYKREGIPWTKVDYFDNGIICKLIEHNQRGILAMLDEECLRPGVVSDSTFLAKLNQLFSKHGHYESKVTQNAQRQYDHTMGLSCFRICHYAGKVTYNVTSFIDKNNDLLFRDLLQAMWKAQHPLLRSLFPEGNPKQASLKRPPTAGAQFKSSVAILMKNLYSKSPNYIRCIKPNEHQQRGQFSSDLVATQARYLGLLENVRVRRAGYAHRQGYGPFLERYRLLSRSTWPHWNGGDREGVEKVLGELSMSSGELAFGKTKIFIRSPKTLFYLEEQRRLRLQQLATLIQKIYRGWRCRTHYQLMRKSQILISSWFRGNMQKKCYGKIKASVLLIQAFVRGWKARKNYRKYFRSEAALTLADFIYKSMVQKFLLGLKNNLPSTNVLDKTWPAAPYKCLSTANQELQQLFYQWKCKRFRDQLSPKQVEILREKLCASELFKGKKASYPQSVPIPFCGDYIGLQGNPKLQKLKGGEEGPVLMAEAVKKVNRGNGKTSSRILLLTKGHVILTDTKKSQAKIVIGLDNVAGVSVTSLKDGLFSLHLSEMSSVGSKGDFLLVSEHVIELLTKMYRAVLDATQRQLTVTVTEKFSVRFKENSVAVKVVQGPAGGDNSKLRYKKKGSHCLEVTVQ

SEQ ID NO: 155506 - protein, 96 aa, Artificial Sequence
  derived and/or modified sequence
MPLLEGSVGVEDLVLLEPLVEESLLKNLQLRYENKEIYTYIGNVVISVNPYQQLPIYGPEFIAKYQDYTFYELKPHIYALANVAYQSLRDRDRDQC

SEQ ID NO: 155507 - protein, 881 aa, Artificial Sequence
  derived and/or modified sequence
MDIEFDFKGSPLGGVITNYLLEKSRLVKQLKGERNFHIFYQLLAGADEQLLKALKLERDTTGYAYLNHEVSRVDGMDDASSFRAVQSAMAVIGFSEEEIRQVLEVTSMVLKLGNVLVADEFQASGIPASGIRDGRGVREIGEMVGLNSEEVERALCSRTMETAKEKVVTALNVMQAQYARDALAKNIYSRLFDWIVNRINESIKVGIGEKKKVMGVLDIYGFEILEDNSFEQFVINYCNEKLQQVFIEMTLKEEQEEYKREGIPWTKVDYFDNGIICKLIEHNQRGILAMLDEECLRPGVVSDSTFLAKLNQLFSKHGHYESKVTQNAQRQYDHTMGLSCFRICHYAGKVTYNVTSFIDKNNDLLFRDLLQAMWKAQHPLLRSLFPEGNPKQASLKRPPTAGAQFKSSVAILMKNLYSKSPNYIRCIKPNEHQQRGQFSSDLVATQARYLGLLENVRVRRAGYAHRQGYGPFLERYRLLSRSTWPHWNGGDREGVEKVLGELSMSSGELAFGKTKIFIRSPKTLFYLEEQRRLRLQQLATLIQKIYRGWRCRTHYQLMRKSQILISSWFRGNMQKKCYGKIKASVLLIQAFVRGWKARKNYRKYFRSEAALTLADFIYKSMVQKFLLGLKNNLPSTNVLDKTWPAAPYKCLSTANQELQQLFYQWKCKRFRDQLSPKQVEILREKLCASELFKGKKASYPQSVPIPFCGDYIGLQGNPKLQKLKGGEEGPVLMAEAVKKVNRGNGKTSSRILLLTKGHVILTDTKKSQAKIVIGLDNVAGVSVTSLKDGLFSLHLSEMSSVGSKGDFLLVSEHVIELLTKMYRAVLDATQRQLTVTVTEKFSVRFKENSVAVKVVQGPAGGDNSKLRYKKKGSHCLEVTVQ

SEQ ID NO: 155508 - DNA, 3132 bp, Artificial Sequence
  derived and/or modified sequence
atgccacttttggaggggtctgtgggggtcgaggatctagtgctgttggagccactggtggaagagtctctacttaagaatctgcaactccggtacgagaataaggagatttatacctatatcggaaacgtggtgatttcggtgaacccctatcaacagttgcccatctatggaccagagtttatagctaagtaccaggactacactttctacgaattgaagcctcatatctacgctctcgccaacgtagcctaccagagtcttcgggaccgggatagagaccagtgcattttaatcaccggggagagtgggagcggaaaaactgaggcctccaagctggtaatgagttacgtggcggccgtgtgcgggaaaggcgagcaggtgaattcagtcaaagaacagctgctccaatcaaaccctgtcctagaagctttcgggaatgccaaaaccatcagaaacaataattctagccgtttcgggaaatacatggatatagagtttgattttaaggggagtccgctgggaggggtgattactaattatttgctcgaaaaaagccgcttagtcaagcagctgaagggggaaaggaatttccacatattttaccagctcctcgcgggagccgatgaacaacttttaaaggccctgaaactcgaacgtgacacaacgggctatgcttacttgaatcacgaagtgtcaagggtggacggtatggatgatgcgtctagtttccgcgccgtgcaatccgcgatggctgttatcgggttttcagaggaggaaattagacaagtgttggaggtcacctcgatggttctgaaactggggaatgtgctggtcgcggatgagtttcaggcatctggtattcctgccagcggcattagggacggtaggggtgtgcgggagatcggagaaatggttggcctcaatagcgaagaggtagagcgtgccctatgctcccgaactatggagaccgccaaggagaaggtggtcacagccctgaacgtcatgcaggcacaatacgcccgtgacgcgctggccaagaatatatatagcagattgtttgactggatcgtgaacagaattaacgagtccatcaaggtgggtatcggggagaagaaaaaggtgatgggcgttctcgacatatacggatttgagatcttggaggacaatagcttcgagcagtttgtaattaattattgcaacgagaagctccagcaggtgtttatagagatgacactgaaagaggagcaggaagaatacaagcgagaagggataccatggacgaaagttgattacttcgataatggtatcatttgtaagttgatagagcacaatcagcggggcattctcgctatgctggatgaggaatgtctccgccccggcgtcgtgagcgacagcacatttctggcaaagctgaaccagttgttttccaagcatgggcactatgaatcaaaggtgactcagaacgcacagcggcaatacgaccacaccatgggtttgagctgtttccgcatatgccactatgccggaaaagtgacctataatgtcacctcgtttatagacaaaaacaatgatctgctcttccgggatctgctccaggccatgtggaaagcccagcacccactcctgaggagcctgttcccagaaggcaaccccaagcaggcttcgctgaaaagaccgcctacagccggtgcgcaattcaagtcaagcgttgcgatcctcatgaagaatctctattcgaaaagccccaattacatccggtgcatcaagcctaacgaacaccagcagcgggggcaattcagcagcgacctggtggcaactcaggcgaggtatctgggcctgctggagaacgtgagggtccggagagcaggatatgctcaccgccaagggtacggcccgtttctagaacgctatcggctactctctcgcagcacctggccccattggaatggaggcgatcgggagggtgtggagaaggtgttgggagagctttccatgtcctctggcgagctggcctttggcaagactaaaattttcattagaagccccaagaccttattttatctcgaggagcagcgacggctgaggttgcaacaattagccacactgatccaaaagatttataggggttggaggtgccggactcactaccagcttatgaggaagagccagatactaatttcgagttggttccgtgggaatatgcagaaaaaatgttacggaaagattaaagcctccgtgttgctgatccaggcctttgtcaggggatggaaagcacgcaaaaattacagaaaatactttagatctgaagccgccctcacactggctgacttcatctacaaatccatggtccaaaaattccttctggggcttaaaaacaacctgccctccactaatgtgctggacaagacgtggcctgcagctccctacaaatgcctgtccaccgctaatcaggagttacagcagttgttctatcagtggaagtgtaagagattccgagaccagttgtcccctaagcaggttgaaattttacgtgaaaagttatgtgcttctgagttgtttaaagggaagaaagcttcttacccacaatcagtgcccattccattttgcggcgactacattggcctccaaggtaaccctaagctgcagaagctcaagggtggcgaggagggccccgtgttgatggcggaagcggtaaaaaaagtcaaccgcggtaacggcaaaactagttcccgaatcctgttactcacgaaaggccacgtgatcctcactgacactaaaaaaagccaggccaagatcgtgattggactggataatgtggccggcgtgtccgtaaccagcctcaaagacggcttgtttagcctgcacttatccgaaatgagttctgtcggatctaaaggcgattttttgctcgtgtcggaacatgtgatcgagcttcttactaagatgtatagagccgtgctcgatgctacccaacggcagctgacggtcactgtaactgagaaattctcagtgcggtttaaagagaatagcgtggcggtcaaggtggtgcagggccccgccgggggggataacagcaagttacgctataagaagaagggctctcattgcttagaggtcactgtccagtag

SEQ ID NO: 155509 - DNA, 3132 bp, Artificial Sequence
  derived and/or modified sequence
atgcctttactagaggggtccgtgggcgtggaagatcttgtcttattagaacctcttgtggaggaatccctgttaaaaaatctgcaacttcggtatgagaacaaagagatatatacgtatatcggtaacgtggtgatctcagtgaatccttatcagcagctgccgatatatggccctgaattcattgctaagtaccaggactatacgttttatgaactgaagcctcacatatacgctctggccaatgtcgcataccagagcttgcgtgatagggatcgcgatcaatgcatcctaatcaccggcgaatcaggaagtggaaaaactgaggcatccaagctggtgatgtcctatgtggctgcagtgtgcgggaaaggagagcaggtaaacagtgtcaaggagcaactcctgcagagcaaccctgtactagaggcattcggaaatgctaagactatccgcaacaacaattccagccggtttggaaagtatatggacattgagtttgattttaagggatcccccctaggaggagttatcaccaactatcttctcgagaagtccagattggtgaagcagcttaagggcgagcgtaacttccatatcttctatcagttgttggccggggctgacgagcagctgctgaaggcacttaagctggagcgtgacacaacaggatatgcctatttgaaccacgaagtttcccgcgtggatgggatggacgacgccagttcattcagagctgtccaatccgcaatggccgttataggcttctctgaggaggaaattcgtcaggtgctggaagtcacctccatggtgttaaaactgggaaacgtgctggtggctgacgagttccaagcctccggcatcccagcgtcgggaatacgtgatgggaggggcgtgagggagatcggcgagatggtcgggctaaatagtgaggaggtggaaagggcgctctgttcccgcaccatggaaacagccaaggagaaagtagtgactgccctaaacgtgatgcaggcccagtatgccagagacgcattggcaaagaacatttactcaagactcttcgattggatcgttaacagaataaacgaaagcataaaagtaggcatcggcgagaaaaaaaaagtcatgggggtcctggatatatatgggtttgagattctggaggataatagtttcgaacagtttgttattaattactgtaacgaaaaactgcaacaggtgtttattgaaatgacccttaaggaggaacaagaggagtataaaagggagggcattccttggacaaaagtggactactttgacaatggaattatctgcaagctcatcgagcacaaccaaaggggaatcctggccatgctggacgaggagtgcctccggcctggtgtggtatcagactctacatttctggccaaactcaaccaactgttttctaaacatgggcactatgaatccaaggtgactcaaaacgcacagcggcagtatgatcacactatggggctaagctgcttccgcatctgccactacgcgggaaaggtgacttacaacgtcacatcatttatcgacaaaaataatgacttgcttttcagagacttgctccaggccatgtggaaggcacaacaccccctattaaggagcttatttcctgaaggtaacccgaaacaggccagtttgaagcggccacctacagccggtgcacaatttaaaagctccgtggcaattctcatgaagaatctgtacagtaagtctcctaactatattaggtgcatcaaaccaaatgaacatcagcagagaggccagttttcttccgatttggtggccacccaggcccgctatctgggcctgctagaaaatgtcagggtgaggcgcgccggctacgcacaccggcaagggtatggcccatttctagaaaggtatagactattatcccggtccacttggcctcattggaacggtggcgatcgcgaaggagtggagaaagttctgggcgaattgtcaatgtcttctggcgagctagcatttggcaagacaaagatcttcatccgctccccaaaaacactgttttacctggaggagcagcgccggcttcgattgcagcaactggccacattgatccagaagatctaccgggggtggagatgcaggacccactatcagcttatgcggaagtctcagatcctgatctcctcctggtttcgggggaatatgcaaaagaagtgctacgggaaaataaaggcatccgtcctgcttattcaggcgttcgtgagaggctggaaggccagaaagaattaccgaaagtactttcggtcggaggctgcactgacactcgccgatttcatctacaagagcatggtccaaaaatttctgcttgggcttaagaataatcttccatccacaaatgtacttgacaagacctggcccgctgctccttataaatgtctctcaacagctaaccaggaacttcaacagctcttttatcagtggaagtgcaaacgttttcgagatcaactcagtcctaagcaggtggaaatactccgggagaagctgtgcgctagtgagctgttcaagggtaaaaaggcgtcgtacccacaatctgtccctatcccattctgtggtgattacattggacttcagggaaatcctaaattgcagaaattgaagggaggcgaggaaggtcctgtcttgatggcagaagcggttaagaaagtgaatagagggaacggtaagactagtagcagaatactgcttctcaccaaggggcacgtgattctgaccgataccaaaaaaagccaagccaagatcgtcatcgggcttgataatgtggcgggtgtatccgtgacctcactgaaagacggcctattttccctccacctgtcagagatgagtagcgtaggcagcaaaggcgatttccttcttgtctcggagcatgtgatagagctactaacaaagatgtatcgcgcggtactggatgctacccagcgccagctgacagtgaccgtgactgagaaattctctgttcgttttaaagagaatagcgtggctgtgaaggtcgtgcagggacccgccggaggggataacagcaaactccgatacaagaagaaggggtcacattgtctggaggtcaccgtccagtag

SEQ ID NO: 155510 - DNA, 2646 bp, Artificial Sequence
  derived and/or modified sequence
atggatatcgagttcgatttcaaagggtcgcccctggggggagtgattaccaattacctcctggaaaagtccaggctggtcaagcagctgaaaggagagaggaatttccatattttctatcaactgctagcgggcgctgacgaacaattgctgaaggccctcaaactggagcgcgatacaacaggctacgcttacctaaaccacgaggtgtcaagggtggatggcatggacgatgccagctctttcagagccgtgcagagtgctatggcggttattggattttcagaagaagagatcagacaagtacttgaggttacatctatggttctgaagctgggcaacgttctggtggctgatgagtttcaggcctcaggcatcccagcaagtggaattcgggacggtcggggcgtgcgagaaatcggcgagatggtgggtttgaactcagaggaggtcgagagagccctgtgcagtagaacgatggagaccgcaaaagagaaagtagtcacggctctgaacgtgatgcaagctcagtacgccagggatgccctcgctaagaatatatactccaggctgtttgactggattgtcaatcggatcaacgagagtattaaagtgggcatcggagagaagaagaaggtcatgggtgtcctcgacatctatggctttgaaatcctagaagacaacagttttgaacaatttgtcataaactactgcaacgagaagctccagcaggtgttcatcgagatgacactcaaagaggagcaggaggagtacaaacgtgagggaatcccatggactaaagtggattattttgacaatggcattatatgtaaactcatcgaacacaatcagaggggaattttagctatgctcgacgaggagtgcctcaggccgggcgtggtgagcgatagtactttcctagccaagttgaaccagctgtttagcaagcacggccattatgagagcaaggtgacacagaatgcccagcgccaatacgaccacaccatggggttgagttgctttaggatctgtcactacgccggaaaggtgacttataacgtcacatccttcatcgataagaataacgatctgctttttagggacctcttgcaggcgatgtggaaagctcaacatcctcttctgagaagcttgtttccagagggcaaccctaaacaggccagtttaaaaaggcctcctaccgctggcgcgcagtttaaaagctccgtcgccatcttaatgaaaaacctgtactccaagtcaccaaactacatcaggtgcatcaaaccaaacgaacaccagcagagaggacaattctccagtgacctggtggccacccaggccaggtatctggggttgctcgagaatgtgcgggtccggcgggccggttacgcacaccgtcaggggtacggacctttcctggaaaggtacagactcctttctaggtctacgtggccccattggaatggcggcgaccgggagggagttgaaaaagttttaggggaactgtcaatgagctctggagaactggccttcggcaaaacgaagatcttcattcggtcccccaagaccctgttctacctggaagagcagcgccgacttagactgcagcagctcgctaccctaatccagaagatatatagagggtggagatgccggacccactaccaactgatgagaaaaagtcaaattctgatatccagctggttcagaggcaatatgcagaagaaatgctacggaaagatcaaggcttcagttctcctgatccaggcatttgtccgcggatggaaggcccgaaagaactacagaaagtacttcaggagcgaggcagctctcacgctagccgattttatttacaaatctatggtgcaaaagttcctgctggggctcaagaacaaccttccttccaccaatgttttggacaaaacgtggcccgctgcgccctataagtgcctctctactgcgaatcaggagctgcagcagcttttctaccagtggaagtgtaaaaggtttcgtgatcagttgtcgcctaaacaggtggagatcctgcgagagaagctgtgcgcctctgaactgttcaaagggaagaaggcaagttaccctcagtcagtacctatccccttttgcggagattacatcggtctccaagggaatcccaaattgcagaagctgaaaggcggagaagaaggtcccgtgctgatggctgaggccgtgaaaaaagtcaatagagggaatgggaagactagcagcaggatcctgctccttaccaaaggtcatgtgatcttaaccgatacaaaaaagagtcaggctaagattgtgatcggtctcgataacgtagcgggcgtgtcagtgaccagcctgaaagacggcctgttttcgcttcacctcagcgagatgtcaagtgtcggctccaaaggcgactttctgctggtatctgagcacgtcattgaacttttaaccaagatgtaccgcgctgtactggacgccacacaaaggcagctcactgttactgtaacggaaaagttttccgtccgattcaaggagaacagcgtcgcagttaaggtcgtgcaggggcccgccggtggtgataatagcaaactgcgttacaagaaaaagggaagccattgtttggaagtcacagtacaatag

SEQ ID NO: 155511 - DNA, 3132 bp, Artificial Sequence
  derived and/or modified sequence
atgcccctgctggagggctctgtgggcgtggaggacctggtgctgctggagcccctggtggaggagagcctgctgaagaacctgcagctgcgctatgagaacaaggagatctacacctacatcggaaatgtggtgatctctgtgaacccctaccagcagctgcccatctacggccctgagttcatcgccaagtaccaggactacaccttctatgagctgaagccccacatctatgccctggccaacgtggcctaccagagcctgcgggaccgggaccgggaccagtgcatcctgatcaccggggagagcggcagcggcaagacagaggccagcaagctggtgatgtcctatgtggccgctgtgtgtgggaagggggagcaggtgaacagcgtgaaggagcagctgctgcagagcaaccctgtgctggaggcctttggaaatgccaagaccatccggaacaacaacagcagcagatttgggaagtacatggacattgaatttgacttcaagggcagccccctgggcggcgtcatcaccaactacctgctggagaagagccggctggtgaagcagctgaagggggagaggaacttccacatcttctaccagctgctggccggggctgatgagcagctgctgaaggccctgaagctggagcgggacaccaccggctacgcctacctgaaccacgaggtgtcccgggtggatggcatggatgatgccagcagcttccgggctgtgcagagcgccatggccgtcatcggcttcagcgaggaggagatccggcaggtgctggaggtgacctccatggtgctgaagctgggcaatgtgctggtggctgatgagttccaggccagcggcatcccagccagcggcatcagagatggccggggcgtgcgggagatcggggagatggtgggcctgaacagcgaggaggtggagcgggccctgtgcagcaggaccatggagacagccaaggagaaggtggtgacagccctgaatgtgatgcaggcccagtatgccagagatgccctggccaagaacatctacagccggctgtttgactggatcgtgaaccgcatcaatgaaagcatcaaggtgggcattggagagaagaagaaggtgatgggcgtgctggacatctacggctttgagatcctggaggacaacagctttgagcagtttgtgatcaactactgcaatgagaagctgcagcaggtgttcatcgagatgaccctgaaggaggagcaggaggagtacaagcgggagggcatcccctggaccaaggtggactactttgacaatggcatcatctgcaagctgattgagcacaaccagaggggcatcctggccatgctggatgaggagtgcctgcggcctggggtggtgtctgacagcaccttcctggccaagctgaaccagctgttcagcaagcacggccactatgagagcaaggtgacccagaatgcccagaggcagtatgaccacaccatgggcctgagctgcttccgcatctgccactacgccggcaaggtgacctacaacgtgaccagcttcatcgacaagaacaatgacctgctcttccgggacctgctgcaggccatgtggaaggcccagcaccccctgctgcggagcctcttccctgagggcaaccccaagcaggccagcctgaagaggcctcccacagctggggcccagttcaagagctctgtggccatcctgatgaagaacctgtacagcaagagccccaactacatccgctgcatcaagcccaatgagcaccagcagaggggccagttcagcagtgacctggtggccacccaggcccgctacctgggcctgctggagaatgtgcgggtgagaagagctggctacgcccaccggcagggctacggccccttcctggagcgctaccgcctgctgagccgcagcacctggccccactggaatggaggagaccgggagggcgtggagaaggtgctgggggagctgtccatgagcagcggggagctggccttcggcaagaccaagatcttcatccgcagccccaagaccctcttctacctggaggagcagaggcggctgcggctgcagcagctggccaccctcatccagaagatctaccggggctggcgctgcaggacccactaccagctgatgaggaagagccagatcctgatcagctcctggttccggggcaacatgcagaagaagtgctacggcaagatcaaggcctctgtgctgctgatccaggcctttgtgcggggctggaaggccaggaagaactacaggaagtacttccgctctgaggccgccctgaccctggccgacttcatctacaagtccatggtgcagaagttcctgctgggcctgaagaacaacctgcccagcaccaacgtgctggacaagacctggccagctgccccctacaagtgcctgagcacagccaaccaggagctgcagcagctgttctaccagtggaagtgcaagcgcttccgggaccagctgagccccaagcaggtggagatcctgcgggagaagctgtgtgccagcgagctgttcaagggcaagaaggccagctacccccagagcgtgcccatccccttctgtggggactacatcggcctgcagggcaaccccaagctgcagaagctgaagggcggggaggagggccctgtgctgatggccgaggccgtgaagaaggtgaacagaggaaatggcaagaccagcagccgcatcctgctgctgaccaagggccacgtgatcctgacagacaccaagaagagccaggccaagatcgtgattggcctggacaacgtggccggcgtgtctgtgaccagcctgaaggatggcctcttcagcctgcacctgtctgagatgagctctgtgggcagcaagggggacttcctgctggtgtctgaacatgtgattgagctgctgaccaagatgtacagagctgtgctggatgccacccagaggcagctgactgtgacagtgacagagaagttctctgtgcgcttcaaggaaaattctgtggccgtgaaggtggtgcagggccctgctggaggagacaacagcaagctgcgctacaagaagaagggcagccactgcctggaggtgacagtgcagtag

SEQ ID NO: 155512 - DNA, 2646 bp, Artificial Sequence
  derived and/or modified sequence
atggacattgaatttgacttcaagggcagccccctgggcggcgtcatcaccaactacctgctggagaagagccggctggtgaagcagctgaagggggagaggaacttccacatcttctaccagctgctggccggggctgatgagcagctgctgaaggccctgaagctggagcgggacaccaccggctacgcctacctgaaccacgaggtgtcccgggtggatggcatggatgatgccagcagcttccgggctgtgcagagcgccatggccgtcatcggcttcagcgaggaggagatccggcaggtgctggaggtgacctccatggtgctgaagctgggcaatgtgctggtggctgatgagttccaggccagcggcatcccagccagcggcatcagagatggccggggcgtgcgggagatcggggagatggtgggcctgaacagcgaggaggtggagcgggccctgtgcagcaggaccatggagacagccaaggagaaggtggtgacagccctgaatgtgatgcaggcccagtatgccagagatgccctggccaagaacatctacagccggctgtttgactggatcgtgaaccgcatcaatgaaagcatcaaggtgggcattggagagaagaagaaggtgatgggcgtgctggacatctacggctttgagatcctggaggacaacagctttgagcagtttgtgatcaactactgcaatgagaagctgcagcaggtgttcatcgagatgaccctgaaggaggagcaggaggagtacaagcgggagggcatcccctggaccaaggtggactactttgacaatggcatcatctgcaagctgattgagcacaaccagaggggcatcctggccatgctggatgaggagtgcctgcggcctggggtggtgtctgacagcaccttcctggccaagctgaaccagctgttcagcaagcacggccactatgagagcaaggtgacccagaatgcccagaggcagtatgaccacaccatgggcctgagctgcttccgcatctgccactacgccggcaaggtgacctacaacgtgaccagcttcatcgacaagaacaatgacctgctcttccgggacctgctgcaggccatgtggaaggcccagcaccccctgctgcggagcctcttccctgagggcaaccccaagcaggccagcctgaagaggcctcccacagctggggcccagttcaagagctctgtggccatcctgatgaagaacctgtacagcaagagccccaactacatccgctgcatcaagcccaatgagcaccagcagaggggccagttcagcagtgacctggtggccacccaggcccgctacctgggcctgctggagaatgtgcgggtgagaagagctggctacgcccaccggcagggctacggccccttcctggagcgctaccgcctgctgagccgcagcacctggccccactggaatggaggagaccgggagggcgtggagaaggtgctgggggagctgtccatgagcagcggggagctggccttcggcaagaccaagatcttcatccgcagccccaagaccctcttctacctggaggagcagaggcggctgcggctgcagcagctggccaccctcatccagaagatctaccggggctggcgctgcaggacccactaccagctgatgaggaagagccagatcctgatcagctcctggttccggggcaacatgcagaagaagtgctacggcaagatcaaggcctctgtgctgctgatccaggcctttgtgcggggctggaaggccaggaagaactacaggaagtacttccgctctgaggccgccctgaccctggccgacttcatctacaagtccatggtgcagaagttcctgctgggcctgaagaacaacctgcccagcaccaacgtgctggacaagacctggccagctgccccctacaagtgcctgagcacagccaaccaggagctgcagcagctgttctaccagtggaagtgcaagcgcttccgggaccagctgagccccaagcaggtggagatcctgcgggagaagctgtgtgccagcgagctgttcaagggcaagaaggccagctacccccagagcgtgcccatccccttctgtggggactacatcggcctgcagggcaaccccaagctgcagaagctgaagggcggggaggagggccctgtgctgatggccgaggccgtgaagaaggtgaacagaggaaatggcaagaccagcagccgcatcctgctgctgaccaagggccacgtgatcctgacagacaccaagaagagccaggccaagatcgtgattggcctggacaacgtggccggcgtgtctgtgaccagcctgaaggatggcctcttcagcctgcacctgtctgagatgagctctgtgggcagcaagggggacttcctgctggtgtctgaacatgtgattgagctgctgaccaagatgtacagagctgtgctggatgccacccagaggcagctgactgtgacagtgacagagaagttctctgtgcgcttcaaggaaaattctgtggccgtgaaggtggtgcagggccctgctggaggagacaacagcaagctgcgctacaagaagaagggcagccactgcctggaggtgacagtgcagtag

SEQ ID NO: 155513 - DNA, 3621 bp, Artificial Sequence
  derived and/or modified sequence
gactggcacagggagcctgggctggaagaggcagcaaaagggaaaatcagaagagtggacactggcaagaggagggcagcctttttcccagcttccttgcaccatggacagctcccattaagccacctctccatcctggggccaggactcttatgccccattcctgtcaaattgagatttcatccaccattctccaaggacagtgaagttataccctagttccagtgttgggatcagtggcccctctggacatgcctctcctggaaggttctgtgggggtggaggatcttgtcctcctggaacccttggtggaggagtcactgctcaagaatcttcagcttcgctatgaaaacaaggagatttatacctacattgggaatgtggtgatctcagtgaatccctatcaacagcttcccatctatgggccagagttcattgccaaatatcaagactatactttctatgagctgaagccccatatctacgcattggcaaatgtggcgtaccagtcactgagggacagggaccgagaccagtgtatcctcatcacaggcgagagtggatcagggaagactgaggccagcaagctggtgatgtcttatgtggctgccgtctgtgggaaaggagagcaggtgaactctgtgaaggagcagctgctacagtctaacccagtgctggaggcttttggcaatgccaagaccattcgcaacaacaattcctcccgatttggaaaatacatggatattgaatttgacttcaagggatcccccctcggtggtgtcatcacaaactatctgcttgagaaatcccgattagtgaagcagctcaaaggagaaaggaacttccacatcttctatcagctgctggctggagcagatgaacagctgctgaaggccctgaagcttgagcgggatacaactggctatgcctatctgaatcatgaagtatccagagtggatggcatggacgacgcctccagcttcagggctgtacagagtgcaatggcagtgattgggttctcggaggaggagattcgacaagtgctagaggtgacatccatggtgctaaagctggggaacgtgttggtggctgatgagttccaggccagtgggataccagcaagtggcatccgtgatgggagaggtgttcgggagattggggagatggtgggcttgaattcagaagaagtagagagagctttgtgctcgaggaccatggaaacagccaaggaaaaggtggtcactgcactgaatgttatgcaggctcagtatgctcgggacgccctggctaagaacatctacagccgcctctttgactggatagtgaatcgaatcaatgagagcatcaaggtgggcatcggggaaaagaagaaggtaatgggagtccttgatatctacggttttgagatattagaggataatagctttgagcaatttgtgatcaactactgcaatgagaagctgcagcaggtgttcatagagatgaccctgaaagaagagcaagaggaatataagagagaaggcataccgtggacaaaggtggactactttgataatggcatcatttgtaagctcattgagcataatcagcgaggtatcctggccatgttggatgaggagtgcctgcggcctggggtggtcagtgactccactttcctagcaaagctgaaccagctcttctccaagcatggccactacgagagcaaagtcacccagaatgcccagcgtcagtatgaccacaccatgggcctcagctgcttccgcatctgccactatgcgggcaaggtgacatacaacgtgaccagctttattgacaagaataatgacctactcttccgagacctgttgcaggccatgtggaaggcccagcaccccctccttcggtccttgtttcctgagggcaatcctaagcaggcatctctcaaacgccccccgactgctggggcccagttcaagagttctgtggccatcctcatgaagaatctgtattccaagagccccaactacatcaggtgcataaagcccaatgagcatcagcagcgaggtcagttctcttcagacctggtggcaacccaggctcggtacctgggactgctggagaacgtacgggtgcgacgggcaggctatgcccaccgccagggttatgggcccttcctggaaaggtaccgattgctgagccggagcacctggcctcactggaatgggggagaccgggaaggtgttgagaaggtcctgggggagctgagcatgtcctcgggggagctggcctttggcaagacaaagatcttcattagaagccccaagactcttttctacctcgaagaacagaggcgcctgagactccagcagctggccacactcatacagaagatttaccgaggctggcgctgccgcacccactaccaactgatgcgaaagagtcagatcctcatctcctcttggtttcggggaaacatgcaaaagaaatgctatgggaagataaaggcatccgtgttattgatccaggcttttgtgagagggtggaaggcccgaaagaattatcgcaaatatttccggtcagaggctgccctcaccttggcagatttcatctacaagagcatggtacagaaattcctactggggctgaagaacaatttgccatccacaaacgtcttagacaagacatggccagccgccccctacaagtgcctcagcacagcaaatcaggagctgcagcagctcttctaccagtggaagtgcaagaggttccgggatcagctgtccccgaagcaggtagagatcctgagggaaaagctctgtgccagtgaactgttcaagggcaagaaggcttcatatccccagagtgtccccattccattctgtggtgactacattgggctgcaagggaaccccaagctgcagaagctgaaaggcggggaggaggggcctgttctgatggcagaggccgtgaagaaggtcaatcgtggcaatggcaagacttcttctcggattctcctcctgaccaagggccatgtgattctcacagacaccaagaagtcccaggccaaaattgtcattgggctagacaatgtggctggggtgtcagtcaccagcctcaaggatgggctctttagcttgcatctgagtgagatgtcatcggtgggctccaagggggacttcctgctggtcagcgagcatgtgattgaactgctgaccaaaatgtaccgggctgtgctggatgccacgcagaggcagcttacagtcaccgtgactgagaagttctcagtgaggttcaaggagaacagtgtggctgtcaaggtcgtccagggccctgcaggtggtgacaacagcaagctacgctacaaaaaaaaggggagtcattgcttggaggtgactgtgcagtgaggagggggcaccatgcagagatggcagttgcttcctcctgaaccagcactaatccccctctgccctcctgtgtgggaggatctctaacccctctgatcgtggcgcatggcttggggattaaactacccttgaagaggacccttgtcccaaacccttcttgttctctcctccaaaagtagcttcctccaacccgcagcctctctgcacactaataaaacatgtggcttggaaaggttca

SEQ ID NO: 155514 - DNA, 3658 bp, Artificial Sequence
  derived and/or modified sequence
aatgcaagggggagttcaatgaaactgggacatctatacacatgtgagggagcctgggctggaagaggcagcaaaagggaaaatcagaagagtggacactggcaagaggagggcagcctttttcccagcttccttgcaccatggacagctcccattaagccacctctccatcctggggccaggactcttatgccccattcctgtcaaattgagatttcatccaccattctccaaggacagtgaagttataccctagttccagtgttgggatcagtggcccctctggacatgcctctcctggaaggttctgtgggggtggaggatcttgtcctcctggaacccttggtggaggagtcactgctcaagaatcttcagcttcgctatgaaaacaaggagatttatacctacattgggaatgtggtgatctcagtgaatccctatcaacagcttcccatctatgggccagagttcattgccaaatatcaagactatactttctatgagctgaagccccatatctacgcattggcaaatgtggcgtaccagtcactgagggacagggaccgagaccagtgtatcctcatcacaggcgagagtggatcagggaagactgaggccagcaagctggtgatgtcttatgtggctgccgtctgtgggaaaggagagcaggtgaactctgtgaaggagcagctgctacagtctaacccagtgctggaggcttttggcaatgccaagaccattcgcaacaacaattcctcccgatttggaaaatacatggatattgaatttgacttcaagggatcccccctcggtggtgtcatcacaaactatctgcttgagaaatcccgattagtgaagcagctcaaaggagaaaggaacttccacatcttctatcagctgctggctggagcagatgaacagctgctgaaggccctgaagcttgagcgggatacaactggctatgcctatctgaatcatgaagtatccagagtggatggcatggacgacgcctccagcttcagggctgtacagagtgcaatggcagtgattgggttctcggaggaggagattcgacaagtgctagaggtgacatccatggtgctaaagctggggaacgtgttggtggctgatgagttccaggccagtgggataccagcaagtggcatccgtgatgggagaggtgttcgggagattggggagatggtgggcttgaattcagaagaagtagagagagctttgtgctcgaggaccatggaaacagccaaggaaaaggtggtcactgcactgaatgttatgcaggctcagtatgctcgggacgccctggctaagaacatctacagccgcctctttgactggatagtgaatcgaatcaatgagagcatcaaggtgggcatcggggaaaagaagaaggtaatgggagtccttgatatctacggttttgagatattagaggataatagctttgagcaatttgtgatcaactactgcaatgagaagctgcagcaggtgttcatagagatgaccctgaaagaagagcaagaggaatataagagagaaggcataccgtggacaaaggtggactactttgataatggcatcatttgtaagctcattgagcataatcagcgaggtatcctggccatgttggatgaggagtgcctgcggcctggggtggtcagtgactccactttcctagcaaagctgaaccagctcttctccaagcatggccactacgagagcaaagtcacccagaatgcccagcgtcagtatgaccacaccatgggcctcagctgcttccgcatctgccactatgcgggcaaggtgacatacaacgtgaccagctttattgacaagaataatgacctactcttccgagacctgttgcaggccatgtggaaggcccagcaccccctccttcggtccttgtttcctgagggcaatcctaagcaggcatctctcaaacgccccccgactgctggggcccagttcaagagttctgtggccatcctcatgaagaatctgtattccaagagccccaactacatcaggtgcataaagcccaatgagcatcagcagcgaggtcagttctcttcagacctggtggcaacccaggctcggtacctgggactgctggagaacgtacgggtgcgacgggcaggctatgcccaccgccagggttatgggcccttcctggaaaggtaccgattgctgagccggagcacctggcctcactggaatgggggagaccgggaaggtgttgagaaggtcctgggggagctgagcatgtcctcgggggagctggcctttggcaagacaaagatcttcattagaagccccaagactcttttctacctcgaagaacagaggcgcctgagactccagcagctggccacactcatacagaagatttaccgaggctggcgctgccgcacccactaccaactgatgcgaaagagtcagatcctcatctcctcttggtttcggggaaacatgcaaaagaaatgctatgggaagataaaggcatccgtgttattgatccaggcttttgtgagagggtggaaggcccgaaagaattatcgcaaatatttccggtcagaggctgccctcaccttggcagatttcatctacaagagcatggtacagaaattcctactggggctgaagaacaatttgccatccacaaacgtcttagacaagacatggccagccgccccctacaagtgcctcagcacagcaaatcaggagctgcagcagctcttctaccagtggaagtgcaagaggttccgggatcagctgtccccgaagcaggtagagatcctgagggaaaagctctgtgccagtgaactgttcaagggcaagaaggcttcatatccccagagtgtccccattccattctgtggtgactacattgggctgcaagggaaccccaagctgcagaagctgaaaggcggggaggaggggcctgttctgatggcagaggccgtgaagaaggtcaatcgtggcaatggcaagacttcttctcggattctcctcctgaccaagggccatgtgattctcacagacaccaagaagtcccaggccaaaattgtcattgggctagacaatgtggctggggtgtcagtcaccagcctcaaggatgggctctttagcttgcatctgagtgagatgtcatcggtgggctccaagggggacttcctgctggtcagcgagcatgtgattgaactgctgaccaaaatgtaccgggctgtgctggatgccacgcagaggcagcttacagtcaccgtgactgagaagttctcagtgaggttcaaggagaacagtgtggctgtcaaggtcgtccagggccctgcaggtggtgacaacagcaagctacgctacaaaaaaaaggggagtcattgcttggaggtgactgtgcagtgaggagggggcaccatgcagagatggcagttgcttcctcctgaaccagcactaatccccctctgccctcctgtgtgggaggatctctaacccctctgatcgtggcgcatggcttggggattaaactacccttgaagaggacccttgtcccaaacccttcttgttctctcctccaaaagtagcttcctccaacccgcagcctctctgcacactaataaaacatgtggcttggaaaggttca

SEQ ID NO: 155515 - DNA, 3101 bp, Artificial Sequence
  derived and/or modified sequence
agtctgctccaagtagagagagtggatgaacctgcgtgctggagattgagtgaaagatggtgtcttgaactggtttcacaatagtcattgcccacttcctccccacaagctacgcattggcaaatgtggcgtaccagtcactgagggacagggaccgagaccagtgtatcctcatcacaggcgagagtggatcagggaagactgaggccagcaagctggtgatgtcttatgtggctgccgtctgtgggaaaggagagcaggtgaactctgtgaaggagcagctgctacagtctaacccagtgctggaggggaaaatacatggatattgaatttgacttcaagggatcccccctcggtggtgtcatcacaaactatctgcttgagaaatcccgattagtgaagcagctcaaaggagaaaggaacttccacatcttctatcagctgctggctggagcagatgaacagctgctgaaggccctgaagcttgagcgggatacaactggctatgcctatctgaatcatgaagtatccagagtggatggcatggacgacgcctccagcttcagggctgtacagagtgcaatggcagtgattgggttctcggaggaggagattcgacaagtgctagaggtgacatccatggtgctaaagctggggaacgtgttggtggctgatgagttccaggccagtgggataccagcaagtggcatccgtgatgggagaggtgttcgggagattggggagatggtgggcttgaattcagaagaagtagagagagctttgtgctcgaggaccatggaaacagccaaggaaaaggtggtcactgcactgaatgttatgcaggctcagtatgctcgggacgccctggctaagaacatctacagccgcctctttgactggatagtgaatcgaatcaatgagagcatcaaggtgggcatcggggaaaagaagaaggtaatgggagtccttgatatctacggttttgagatattagaggataatagctttgagcaatttgtgatcaactactgcaatgagaagctgcagcaggtgttcatagagatgaccctgaaagaagagcaagaggaatataagagagaaggcataccgtggacaaaggtggactactttgataatggcatcatttgtaagctcattgagcataatcagcgaggtatcctggccatgttggatgaggagtgcctgcggcctggggtggtcagtgactccactttcctagcaaagctgaaccagctcttctccaagcatggccactacgagagcaaagtcacccagaatgcccagcgtcagtatgaccacaccatgggcctcagctgcttccgcatctgccactatgcgggcaaggtgacatacaacgtgaccagctttattgacaagaataatgacctactcttccgagacctgttgcaggccatgtggaaggcccagcaccccctccttcggtccttgtttcctgagggcaatcctaagcaggcatctctcaaacgccccccgactgctggggcccagttcaagagttctgtggccatcctcatgaagaatctgtattccaagagccccaactacatcaggtgcataaagcccaatgagcatcagcagcgaggtcagttctcttcagacctggtggcaacccaggctcggtacctgggactgctggagaacgtacgggtgcgacgggcaggctatgcccaccgccagggttatgggcccttcctggaaaggtaccgattgctgagccggagcacctggcctcactggaatgggggagaccgggaaggtgttgagaaggtcctgggggagctgagcatgtcctcgggggagctggcctttggcaagacaaagatcttcattagaagccccaagactcttttctacctcgaagaacagaggcgcctgagactccagcagctggccacactcatacagaagatttaccgaggctggcgctgccgcacccactaccaactgatgcgaaagagtcagatcctcatctcctcttggtttcggggaaacatgcaaaagaaatgctatgggaagataaaggcatccgtgttattgatccaggcttttgtgagagggtggaaggcccgaaagaattatcgcaaatatttccggtcagaggctgccctcaccttggcagatttcatctacaagagcatggtacagaaattcctactggggctgaagaacaatttgccatccacaaacgtcttagacaagacatggccagccgccccctacaagtgcctcagcacagcaaatcaggagctgcagcagctcttctaccagtggaagtgcaagaggttccgggatcagctgtccccgaagcaggtagagatcctgagggaaaagctctgtgccagtgaactgttcaagggcaagaaggcttcatatccccagagtgtccccattccattctgtggtgactacattgggctgcaagggaaccccaagctgcagaagctgaaaggcggggaggaggggcctgttctgatggcagaggccgtgaagaaggtcaatcgtggcaatggcaagacttcttctcggattctcctcctgaccaagggccatgtgattctcacagacaccaagaagtcccaggccaaaattgtcattgggctagacaatgtggctggggtgtcagtcaccagcctcaaggatgggctctttagcttgcatctgagtgagatgtcatcggtgggctccaagggggacttcctgctggtcagcgagcatgtgattgaactgctgaccaaaatgtaccgggctgtgctggatgccacgcagaggcagcttacagtcaccgtgactgagaagttctcagtgaggttcaaggagaacagtgtggctgtcaaggtcgtccagggccctgcaggtggtgacaacagcaagctacgctacaaaaaaaaggggagtcattgcttggaggtgactgtgcagtgaggagggggcaccatgcagagatggcagttgcttcctcctgaaccagcactaatccccctctgccctcctgtgtgggaggatctctaacccctctgatcgtggcgcatggcttggggattaaactacccttgaagagg

SEQ ID NO: 155516 - DNA, 3132 bp, Artificial Sequence
  derived and/or modified sequence
atgcccctgctggagggcagcgtgggcgtggaggacctggtgctgctcgagcctctggtagaagaatcgttgctaaagaacctgcagctgcgctacgagaataaggaaatttatacttacattggaaatgttgtcatctcagtgaacccctatcagcagctgccaatctatgggccagagttcattgcgaaataccaggactatacgttttatgaactcaagcctcacatctatgctctggcaaacgtggcataccagtccctccgggacagagaccgggaccaatgcatactgataaccggcgagtccggaagcggcaagaccgaggccagtaagcttgttatgtcctatgtcgctgccgtctgcggtaaaggtgagcaagtcaactccgtcaaggaacagttgttgcagtccaaccccgtgcttgaagctttcggcaacgccaaaacaatacgcaataacaattcatcaagatttggaaagtacatggacatcgagtttgactttaagggctcgccattagggggcgtcatcacgaattacctcttggagaaatcaagattagttaagcaactgaaaggcgaaaggaacttccacattttctaccagctccttgccggagccgatgaacagttgttgaaagcactgaagttagaaagagacacgactggctatgcctaccttaatcacgaggtgagccgtgtcgatggcatggacgacgcatcttcttttcgcgcggtgcaatccgccatggctgttatcggcttttccgaagaggagatacgccaggtgttggaggtgacctccatggtcctaaagttaggtaatgtgctggttgccgacgaatttcaggcaagcggcattcctgcaagcgggattagggatgggagaggggtgagggaaattggcgagatggtgggtctgaattcagaagaggtggaaagggctctgtgttctcgtacgatggagacagcaaaggagaaggtcgttaccgcattaaacgtcatgcaagcccagtatgctagggatgcccttgccaagaacatatattcccgcctctttgactggatcgttaacaggataaacgagtccattaaggttgggatcggagagaagaagaaagtcatgggtgtgctcgacatttatgggttcgagatcctggaagacaacagcttcgaacagttcgtgatcaactactgcaacgagaaactgcagcaggtgtttatcgagatgaccctgaaggaggaacaggaagagtacaagagagagggtatcccctggactaaggtggattattttgacaatgggatcatatgtaagctcatcgagcacaaccagcgaggcatactggcaatgctggatgaagagtgcttgcgcccaggagtggttagtgatagcacttttctagcaaaactgaatcagctgtttagtaaacatggccattatgaatcaaaagtgacccagaacgcgcagcgccaatacgatcacacaatgggcttaagctgttttagaatttgccactatgcaggcaaagttacctataacgtaaccagcttcattgacaagaataacgatctcctgttcagagatctcttgcaggcaatgtggaaagcccagcatcctctgttgaggtcccttttccccgaagggaacccaaagcaagcgtcactgaaacggcctcctactgccggagcacagttcaaatcatcggtggcgatactcatgaagaacctttatagcaaatctcccaattatatacgctgtatcaagcccaatgaacaccagcagcggggacagttctcctctgaccttgtggcaacccaggcacggtaccttggcctgctggagaacgtgcgcgtgagacgcgcgggctatgcccatcggcagggctacggcccctttctggagcggtatagacttctgagccgcagcacctggccccattggaacgggggagaccgtgagggagtggaaaaagtactgggggagctctctatgtccagtggcgagctcgcattcggaaaaaccaaaatctttattaggtctcctaaaacactcttttatctggaggagcaacggagacttaggttgcaacagttggcaacattgatccagaagatctatagaggctggagatgccggactcattaccagctgatgcgaaaatctcagatcttgatatccagctggtttcgcggaaacatgcaaaagaaatgttatggcaaaatcaaagcgagtgttttattaatccaagcatttgtgcgcggttggaaggcccgaaagaactatcggaaatatttccgctctgaggccgccttaaccctcgctgatttcatctacaagagcatggtgcagaaatttctgctggggctgaaaaacaacctgccttctactaacgtccttgataaaacttggcccgcagcaccttacaagtgcctctccactgcgaaccaggagctccaacagctcttttatcagtggaaatgcaagaggttccgtgaccagctgtcacctaagcaggtggagatcctacgtgagaagctttgtgccagtgaactgtttaaaggaaaaaaggccagctatccacaaagcgtgccaatccctttctgtggcgattatatcggcctgcagggcaatcccaagctgcagaaattgaaaggcggcgaagagggtcccgtgttgatggccgaagcagttaaaaaggtgaacagaggcaacggaaagacaagctcccgtatcctgttgctgaccaaagggcacgtcatcttgaccgacacaaagaaatcacaggccaagatagtgatcggcctagacaatgtcgcaggtgtgtccgttacaagcctgaaagacgggttgttcagcctgcacctatccgagatgagtagcgtcggatcgaaaggggatttcctcctggtttccgagcatgtcattgagttacttactaagatgtaccgcgcggtactggatgcaactcaaaggcagctgactgtgactgtcacagaaaaattttctgtacgctttaaagagaatagcgtcgctgtcaaagtggtgcagggtccagcaggcggcgataattcaaagcttcgctacaagaaaaaagggagccattgcctggaggtgacagttcagtag

SEQ ID NO: 155517 - DNA, 3132 bp, Artificial Sequence
  derived and/or modified sequence
atgcccctgctggagggcagcgtgggcgtggaggacctggtgctgctggaaccactggtcgaagaaagcctcttgaagaaccttcagctgaggtacgagaacaaggagatatacacttacattggaaacgtagtcatctccgtaaacccataccagcaactccctatttacggtcccgagtttatcgcgaagtaccaggattacaccttctatgaactgaaaccgcatatttacgcactcgcaaatgtcgcttatcagagtttgagagaccgcgatcgtgaccaatgcattcttattaccggcgagagcggctccggaaagaccgaggcatcgaaacttgtgatgagttatgtggcggccgtgtgtggcaagggagagcaggtgaatagtgtgaaggagcagctgctgcagtccaacccggttttggaggcctttggcaatgccaaaacaatccggaataataattctagtcgatttggtaaatatatggacattgaatttgacttcaagggcagtccactggggggtgtgatcactaattacttactggagaagtcacgattggtaaaacagctgaagggcgaacgtaactttcacattttttaccagctgctggccggcgcagatgaacagcttttgaaagctttgaagctcgagcgggacacaaccggttacgcctatctcaaccatgaggtcagcagagtagacgggatggatgacgcctctagctttcgggccgtccagagtgcgatggcggtcattggattcagcgaggaagagatacgccaggtcctggaggtcaccagcatggtgttgaagctgggcaacgtgctggtcgctgatgagtttcaggccagtgggattcctgcctccggtatccgggatggaagaggagtgcgcgagatcggagagatggtgggtttaaactcggaagaggtggagagggcgctgtgtagcaggacgatggaaaccgcaaaagagaaagttgtcacagcattaaatgtgatgcaggcgcagtacgccagggacgcacttgcgaagaatatctatagccgcctgtttgattggattgttaaccggataaacgagtccattaaagtcggcattggggaaaagaaaaaagtgatgggcgtgttggatatatatggattcgaaatattggaggacaatagcttcgaacaatttgtcattaactactgcaatgagaagttacaacaggtgttcatcgaaatgaccctgaaagaggagcaagaagagtacaagagagagggaatcccatggactaaggtggactattttgacaatggtatcatctgcaaactgatcgagcacaaccagcgcggtatactcgcgatgttggatgaagagtgtctcagaccgggtgtcgtgtctgacagcactttcctggctaaactgaatcaacttttttcaaaacacggacattacgaatcaaaagtcactcagaacgcccagcggcagtatgaccatactatggggctgtcgtgtttccgcatttgccactacgcagggaaggtgacgtacaatgtgacatcgtttatagacaaaaacaatgatcttctgttcagagatctgctgcaggcaatgtggaaggcccagcaccctctgttgcggtcactttttccagaggggaaccccaagcaggcttctctcaagaggccccccacggccggtgctcaattcaaaagtagtgtggcaatcctgatgaagaacctgtatagcaagtcaccaaactatatcaggtgcatcaaaccaaatgagcaccagcagcgaggacaattttcctcagatcttgtcgcaacccaggccagatacctcggcctcctagaaaatgtccgtgtccgacgtgccgggtatgctcaccgccaaggctacggccctttcctggaaaggtacagacttctgtctcgttcaacttggcctcactggaacgggggtgatcgcgagggcgttgagaaagtcctcggagaactcagtatgagctccggggagctcgctttcgggaagacaaaaatcttcatccggtccccgaagactctgttttatctggaggagcagcggcggctgcgcctgcaacagctagccactcttatacagaaaatttaccgagggtggcggtgtcgaacgcattaccagctgatgaggaaatcacagatactgatcagttcctggttccgcgggaacatgcagaaaaaatgctatggtaagataaaggccagcgtgctgcttatccaggccttcgttcgcggatggaaggcgcgtaaaaattaccgcaaatacttccggagcgaggctgcactcacgctggccgacttcatttataagtcaatggtccagaagtttttgctgggactcaagaacaacctcccaagtacaaacgtcctcgataaaacttggccagcagctccctacaagtgcttgtctacagcaaatcaggagctgcagcagttgttctaccagtggaaatgcaagcgtttcagggatcagctgtcccctaagcaggtggaaatcctccgggagaagttgtgcgccagtgagctctttaaagggaagaaggccagctatccccaatcagttccgattcccttctgcggtgactatattggcctgcaggggaatccaaaactccagaagctgaagggtggggaagaaggacctgtcctaatggctgaagccgtgaaaaaggttaatcggggaaatggcaaaaccagttcacgtattctgcttctaactaagggacatgtcatccttaccgataccaagaagagtcaggccaagattgttatcggtctcgacaatgtcgccggcgtcagcgttacctcgctgaaagacggactgtttagcttgcacctgtctgagatgagtagcgtcggcagcaaaggggatttcctgctggtgagtgagcacgtgatcgagctgctgacaaaaatgtaccgagccgtgctggacgcaacccagaggcaattgactgttaccgtgaccgagaagttctccgtgcgattcaaggaaaattccgtcgccgtgaaagtggtccagggtcccgccgggggagacaattccaaacttcggtacaaaaagaaggggtctcattgtctggaggtgaccgtgcagtag

SEQ ID NO: 155518 - DNA, 2646 bp, Artificial Sequence
  derived and/or modified sequence
atggacatcgagttcgacttcaagggcagccccctgggcggcgtgattaccaactacttgcttgaaaaatctcgactcgtcaagcaattgaaaggtgagagaaacttccacatattctatcaactgctggcgggggccgacgaacagctgctcaaagcccttaaacttgaaagggataccaccggatacgcgtatttaaaccacgaagtctcccgggttgatggcatggacgacgcttcttctttccgagccgtacaatcagctatggctgtgattggcttcagcgaggaggagattaggcaggtccttgaggtgacttcgatggttctgaagctgggtaacgtgctagttgcagatgaattccaggctagcggaatccccgcatccgggatcagggatggccgcggcgtgcgggagataggtgaaatggttggtttgaacagcgaggaagttgaacgcgcgttatgcagtcgcacaatggaaacagctaaggagaaggttgtcaccgctcttaacgtgatgcaggcgcagtacgctagggatgccttggccaagaacatctactcacgactcttcgattggatcgtgaatcgaatcaacgaaagtatcaaggtcggaatcggggagaagaaaaaggtgatgggggtcctagacatctatgggtttgagattctcgaggacaattcctttgagcaatttgtgattaactattgcaacgagaaactgcagcaggttttcatcgagatgactcttaaagaagagcaggaggaatacaagagagaaggtatcccctggacaaaagtagactatttcgacaatgggatcatctgtaaactgatcgaacacaatcagaggggcattctggccatgcttgacgaagaatgtcttcggcccggtgtcgtgtctgactccactttcctggctaaactgaaccagctcttctccaagcatgggcactatgaaagtaaggtgacccagaatgctcagagacagtacgaccacacaatggggctcagttgttttcgtatctgtcactacgccggaaaagtcacatacaatgtcacatcctttattgacaagaacaatgacctgttattcagagaccttctacaggccatgtggaaggcgcagcatccactgttgcggtcgctgtttcccgaagggaaccctaaacaggctagtcttaaacgacctccaacagccggcgcacagttcaaatcttccgttgcgatcctgatgaagaacctgtattcgaagagccccaattatatcaggtgcattaagccaaatgaacaccaacagcgaggacagttcagttcagatctcgtcgccactcaagcacgctacttgggcctgttagagaacgtgcgcgtgagacgcgccgggtatgcccaccgacagggttatggaccattcctcgaacgctatagactactttcgcgcagtacttggcctcattggaacgggggcgaccgcgaaggcgtggagaaggtgctgggtgaactatccatgtcttccggagagctggctttcggaaagaccaaaatcttcattcgaagccctaaaaccctgttttacttggaggagcagcggcggttacgtctgcaacagctcgcaactctgatacagaagatttatagggggtggcgttgccggacacattaccagctcatgaggaagtcccagatcttgatttctagttggtttcgcggtaacatgcagaaaaagtgttacggaaaaataaaagcaagcgtgctgttgatacaagcatttgtgagaggctggaaggccaggaagaattatcgcaagtattttagatctgaagctgcactcacactggctgatttcatatacaaatcaatggtgcagaagttcctgctcgggctcaagaataatctgccaagcactaatgtcctcgataaaacatggcccgcagccccttacaagtgtctgtctactgcgaaccaggagctgcaacagctgttttaccagtggaagtgtaagcgatttcgcgaccagctgtctcctaaacaggtagagattcttcgcgagaagctgtgtgcgagcgaactctttaaaggcaagaaagcaagctatccccaatcggtgccgattccattttgtggtgattacatcggccttcagggaaacccaaagctgcagaagctcaagggcggcgaagagggccctgtgctgatggcggaggctgtcaaaaaggtgaaccggggtaatggcaagaccagtagcagaattctactcttgacgaagggccacgttatcttaactgacactaagaagtcacaggcgaagattgtaattgggttagacaacgtggctggggtctcagtgacgtcactgaaggatggactttttagcctccatctctctgaaatgtcttctgtgggttctaaaggtgattttttgctcgttagtgagcacgtgatcgagctactgactaaaatgtatcgtgcagtcctggacgccacccaacggcagttgaccgtgacagttaccgagaagttttctgtgcgcttcaaggaaaattctgtggctgtgaaggtggtgcaggggccggctggaggagacaacagcaagttaaggtacaagaaaaagggatctcactgtctggaggtgacagtgcaatag

SEQ ID NO: 155519 - DNA, 3132 bp, Artificial Sequence
  derived and/or modified sequence
atgccgctcttggaggggtctgttggagtcgaagatctcgtgctattggagcctctggtggaagagtccctgctaaagaacctgcagttgagatacgagaataaggaaatctatacatatataggcaacgtggttatctctgtgaacccataccaacagctgcctatatacggcccagagtttatcgccaagtaccaagactataccttctatgagctgaagccacatatctacgcccttgccaatgtggcctatcagtctctgcgggatcgggatcgggatcagtgtatactcataactggggaaagcgggtcaggcaaaacggaagcaagtaagctcgttatgagttacgtggccgcagtctgtggcaaaggggagcaagtgaattctgttaaggagcaactgctgcagtctaacccagtgcttgaggcgttcggaaatgctaaaacgatacggaataacaattctagccgctttgggaagtatatggatatcgagtttgactttaaaggcagtcctctgggcggtgtgattaccaactatctgctggagaagtcacgtttagtaaaacagcttaagggggagcgaaattttcatatcttttaccagctgctggctggcgctgacgaacaacttctgaaagccctgaagctggagagggatacgactgggtatgcttatctgaatcatgaagtcagcagagtagatgggatggacgacgcgagttccttccgtgcggtgcaaagcgccatggccgtgattggatttagcgaagaggagataagacaagtgctcgaggtgacatctatggtcctgaaactcggaaacgtgctggtggctgatgagtttcaggcctccggaatccctgcttctgggattagggatggccgtggggtccgcgagatcggggaaatggtggggctgaactctgaagaagttgagagagccctctgctcccggaccatggagaccgcaaaggagaaggtcgtgaccgccctcaatgttatgcaggcccagtacgccagggacgccctcgccaagaatatatactcgcggttgtttgactggattgtcaacaggatcaatgagtcaatcaaagttggcatcggcgaaaagaaaaaggttatgggagtgctggacatctacgggttcgaaattcttgaggacaactccttcgagcagttcgttattaattattgtaatgagaagctgcagcaggttttcatcgaaatgacactaaaagaagaacaggaggagtacaaacgggaggggattccctggacaaaggtcgactacttcgacaatggtattatttgcaaactgatagaacacaatcagagaggtattctggcgatgttggacgaggagtgcctgcgccctggggtcgtgtcagactctacatttctagccaaattaaaccagctgttctccaaacatgggcactacgagagtaaggtgacgcagaatgcacagagacaatatgaccacaccatggggttaagctgcttccgcatttgtcattacgctggcaaagtaacctacaacgtcacctcgttcattgataagaataacgatttactgttccgcgaccttctgcaggcgatgtggaaggcccagcaccctttgctgcgctccctattccccgagggaaatcccaaacaggcctcactgaagcggccacccacagccggtgcgcagttcaaatcatctgttgccatcctgatgaaaaacttgtacagtaaatccccgaattacatcaggtgcattaaaccaaacgaacatcaacagaggggccagttctctagcgacctggttgctacccaggccaggtatctaggccttctggagaatgttcgggtgcgtcgggctggatacgcccaccgacaaggctacggcccattcctggagagatacaggctcttgagcagatccacatggccccactggaatggcggagaccgagagggcgtagagaaagtactgggagagctgagcatgagcagcggtgaactggcttttggcaagacgaaaattttcatccggagtcccaagactctcttttatctagaggagcaaagaagactcagactacagcaactcgccacgttaatccagaaaatatatagaggctggaggtgcagaactcactaccaactgatgcggaagagtcagatactgatcagcagttggtttcgcggaaatatgcagaagaagtgctatggaaaaatcaaggcctcagttcttctgatccaggcgttcgtacgcggatggaaagcgcgaaagaattacagaaaatactttaggtctgaagcagccctgactctggccgacttcatctacaaatctatggttcagaagtttttgcttggtctgaaaaataatctcccatccacaaatgttctcgacaaaacatggcccgctgctccatataaatgtttatcaactgcaaatcaggaactccagcagctgttctaccagtggaaatgcaaaaggttccgcgatcagctgagccccaagcaggttgagatactgcgagaaaagctttgcgctagcgagctcttcaaaggtaagaaagcctcttatccccagtccgttcccatccccttctgtggggattacattggattgcagggcaaccctaagcttcagaagcttaaagggggtgaagagggccctgtgcttatggctgaagcggtgaagaaggttaaccgcggaaatggaaagacgagctctcggattctgcttttgacaaagggacatgtgatccttacggacaccaagaaatcacaggcaaaaatcgtaattggtctggacaacgttgccggtgtgtctgtgacctccctgaaggacggtttgttttctctccatctgtctgagatgagctcagtgggcagtaagggggattttttattagtttcagagcacgtaatcgagctgctcactaagatgtacagagccgtactggacgctacccagagacagttgaccgttaccgtaaccgaaaagttctccgtaaggttcaaggaaaattccgtggctgtgaaagtggttcagggccctgctggaggggacaattccaaactgaggtacaagaagaagggaagccactgcctcgaggtgacagtgcagtag

SEQ ID NO: 155520 - DNA, 3132 bp, Artificial Sequence
  derived and/or modified sequence
atgccactccttgagggcagtgtgggagtggaagacctggtgctgctggagccccttgtcgaagagagcctcctcaaaaaccttcagctgcgctacgagaacaaagaaatttacacctacatcggcaacgtcgttatttccgtcaacccctatcagcagctgcccatttacggacccgagtttatcgctaagtaccaggattatacattctatgaactgaaaccacatatttacgccctggcaaacgtcgcctatcagtcgttaagggatagagacagagaccagtgtattctcatcacaggcgagtcgggctctgggaagaccgaggcttcaaaactggttatgtcatacgtggcagctgtgtgcggcaagggggaacaggtgaactcagtcaaggagcagctcctacagagcaaccccgtactcgaggccttcggaaacgccaaaaccataaggaacaacaatagcagcagattcggcaaatacatggacatcgagttcgatttcaagggaagccccttaggcggtgtgattaccaattacttgttagagaagtcaaggctcgtgaagcagttgaagggagaacgaaatttccacatcttttaccagttgcttgctggcgctgacgagcaactgctgaaggcactgaagttggaaagagacacaaccggctatgcttatctgaaccacgaagtttctagagtggatggtatggatgatgccagcagttttagggcagttcagtcagccatggcagtgattggattctccgaggaagagataaggcaggtactcgaagtgacgtccatggtactgaagctcggcaacgtgttggtggcagacgagtttcaggccagcggcatcccagcctccgggatcagagacggcaggggtgtgcgcgagattggcgaaatggttggtctgaacagtgaagaggtggaaagagccctttgttctcggacaatggaaacagccaaagaaaaagtagtgactgcattaaacgtgatgcaggcccaatatgctcgtgacgccctcgctaaaaacatttactcccggctgttcgactggattgtcaatagaattaatgaaagcatcaaagttggtatcggtgagaagaaaaaagtcatgggcgtgctcgacatttatgggttcgaaatcttagaggataactcgttcgagcaattcgtcatcaattattgtaacgaaaaacttcaacaggtgtttattgaaatgactctaaaagaagaacaggaagagtataagcgagaggggataccctggactaaggttgactattttgacaacggaattatttgtaagttgattgaacacaatcagcggggaattttggctatgctggacgaggaatgcctgcggccaggggtcgtgtccgattccaccttcctggctaaactcaaccaacttttttccaagcacggacattacgaaagtaaagtcacacaaaacgcccagaggcaatatgaccacacaatgggattgtcgtgttttagaatttgccactacgccggtaaggtcacatataacgtcaccagtttcatagacaagaataatgatcttctttttcgagacctactgcaggctatgtggaaggcccagcatcccctgctgcgctctcttttcccggaaggcaatcccaagcaggcgtcattaaagcgcccacctacagcaggcgcacaatttaaaagcagtgtagctatcctcatgaagaatctctactccaagagtccgaattatattcgctgcattaaaccaaatgaacatcagcaacggggacagttttcctccgatctcgtggccacacaggccaggtaccttggcttactagaaaatgtacgtgttaggcgcgctgggtatgctcaccggcagggatatggtccgtttctcgagcgctaccgactactgtcccggtcaacttggccacactggaatggaggggacagagagggagtcgaaaaggtcctgggcgagctttctatgtcttcaggggagctggcgtttggaaagacaaagattttcattcggtccccaaagactctgttctaccttgaggaacaacgaaggctgcgactgcaacagctggcgacacttatccagaagatctatcgcggatggaggtgccggacgcattaccagctgatgcggaagagccagatcctgatttcctcttggttccggggtaacatgcaaaagaagtgctacggcaagatcaaggcctccgtgttgctgatccaggcgtttgttagaggttggaaggctcgcaaaaattaccgcaaatacttcagaagtgaggccgctctgacccttgctgatttcatctacaaaagcatggtccaaaaattcctgctgggtctgaagaacaatctgccgtctacaaacgtcctcgacaagacatggcccgcagccccatacaagtgtctgtcgaccgctaatcaggagctgcagcagctgttctaccagtggaagtgcaaaaggtttcgcgatcagttaagtccgaagcaggtggagattcttagagaaaagctatgtgctagcgagctgttcaagggcaagaaagcctcatacccccagtctgtgccgattcctttctgcggggactacatcggattacagggcaatccaaagctgcagaagttgaagggcggagaagaagggccagtcctgatggccgaagcggttaagaaggtcaaccgtggcaatggcaagacgtctagtaggatcttactcctgacgaagggacatgtgatcctaacagatactaagaagagtcaggcaaaaatagtgataggtcttgacaacgtggctggggtctccgtgacctctctcaaagacggcctcttcagcctgcatctttcggaaatgtcgtcggtgggatcaaaaggtgactttttattggtgtccgaacacgtcatcgaacttttgaccaaaatgtatcgcgcagtattagatgctacacaacgccagttaactgtcacagttaccgagaaattctcggtcagatttaaagagaatagcgttgccgtgaaagtggtgcaagggccagcaggcggagataactccaagttgaggtataagaagaagggatctcactgcttggaggttaccgttcagtag

SEQ ID NO: 155521 - DNA, 2646 bp, Artificial Sequence
  derived and/or modified sequence
atggacatcgagttcgacttcaaaggcagccctctgggcggagttatcaccaattatttgctggaaaagtcaaggctagtgaaacaactgaagggggagcggaacttccacattttctatcaactcctagctggagctgatgagcagctgctgaaagcactaaaactggaacgtgatactactgggtacgcatacctcaatcacgaagtttcacgagtggatggcatggacgacgcatctagctttagggccgtacagtccgccatggccgtaataggattttcagaggaggaaatcagacaggtgcttgaagtgacgtctatggtgctcaagctcggcaatgtactggtcgctgatgagtttcaggccagtggaattccagcctcgggaatcagagatggaagaggagtacgagagattggcgagatggtcggacttaactctgaggaggtcgagagagcactttgtagccgcactatggagaccgccaaagaaaaagtggtgaccgctttaaatgtgatgcaggcccaatatgctcgggacgctctggccaagaacatctactcgcgcctgttcgattggattgtcaacaggatcaatgagtcaatcaaggtcgggatcggcgagaaaaagaaggttatgggggtgctcgatatttacggattcgaaatcttggaagacaattcatttgagcaattcgtgattaactactgtaatgaaaagctgcaacaagtattcatcgaaatgaccctgaaagaggagcaggaagaatataagagggaggggatcccatggacaaaagtggattactttgataacggcataatctgcaagctgattgagcataatcagagaggaatccttgccatgctggatgaggaatgtttgaggccaggcgttgtcagcgacagcacgtttcttgcaaaactaaaccagctgttcagtaaacatgggcattacgagtccaaggtcactcagaacgcacaacgccaatatgatcacactatgggattgtcttgctttcgaatctgtcactacgccggaaaggtgacctacaatgttacgtccttcatcgacaagaacaacgacctgctttttcgggacttgctgcaggccatgtggaaggcacagcatcctcttttgcgcagcctcttcccagagggcaaccccaagcaagccagcttaaagcgccctccaacagcaggggcacagttcaaaagttcggttgccatcctgatgaaaaatttatattcgaaatcacctaactacatccgatgtattaaacctaatgagcaccaacaaagaggtcagttcagtagtgatctggtcgccacccaggccagatacctgggcctcttggaaaacgtgcgagtgcgccgtgccggatatgcgcaccggcaggggtacggccctttccttgaaaggtatagactccttagcaggtccacatggccccactggaatgggggtgacagggagggcgtagaaaaggtcttgggagagttgtcgatgagctctggcgagctggcattcgggaagactaaaatcttcattcggtccccaaaaactctgttttatttagaagagcagcgcaggttgcgactgcaacagctcgccactctcatccagaagatttaccgcggttggaggtgtagaactcattaccagctgatgagaaaatctcaaattttaataagtagctggttccgcggaaatatgcaaaagaagtgctacggtaaaattaaagcttcggttctcctgatacaggcatttgtgcggggttggaaagctcgcaaaaattataggaaatatttccgttcagaagcggcactcacattggccgatttcatctacaaatcaatggtgcagaagtttctgcttggactgaaaaataacctgccaagtactaatgtacttgacaagacctggcccgcagcaccttataagtgcctgtccaccgcaaaccaagagctgcaacaactgttttaccagtggaagtgtaagagatttcgggaccagttgtccccaaagcaggtagaaatacttcgggagaagctgtgtgccagtgaactcttcaaaggcaagaaggcctcatatcctcaaagcgtgcccatcccattctgcggagactatatcggattacaaggaaaccctaagctgcagaaattaaagggcggagaggagggacccgtgctgatggctgaggccgtgaagaaggttaatcgtgggaacgggaagacatcttcccgaatcctgctgctcactaaagggcatgtaattctcactgacaccaagaaatctcaggccaagatcgttatcggcctggataacgtggccggtgtttctgtgacgtctctgaaggacggtctcttcagcctgcatttgtctgaaatgagctccgtgggcagtaaaggcgattttctgctggtctctgagcatgtgattgagttgctgacgaagatgtatcgagcagtgttggatgccacacagcgacagctcacagtgaccgtaacagagaaattttccgtacgcttcaaagagaactccgtggcggtgaaggttgttcaggggccagcgggtggggataatagtaaacttcggtacaagaagaagggatcccactgtctggaagtaaccgtccaatag

SEQ ID NO: 155522 - DNA, 3132 bp, Artificial Sequence
  derived and/or modified sequence
atgcccctgctggagggcagcgtgggcgtggaggacctggtgctgctggagcccctggtggaggagagcctgctgaagaacctgcagctgagatacgagaacaaggagatctacacctacatcggcaacgtggtgatcagcgtgaacccctaccagcagctgcccatctacggccccgagttcatcgccaagtaccaggactacaccttctacgagctgaagccccacatctacgccctggccaacgtggcctaccagagcctgagagacagagacagagaccagtgcatcctgatcaccggcgagagcggcagcggcaagaccgaggccagcaagctggtgatgagctacgtggccgccgtgtgcggcaagggcgagcaggtgaacagcgtgaaggagcagctgctgcagagcaaccccgtgctggaggccttcggcaacgccaagaccatcagaaacaacaacagcagcagattcggcaagtacatggacatcgagttcgacttcaagggcagccccctgggcggcgtgatcaccaactacctgctggagaagagcagactggtgaagcagctgaagggcgagagaaacttccacatcttctaccagctgctggccggcgccgacgagcagctgctgaaggccctgaagctggagagagacaccaccggctacgcctacctgaaccacgaggtgagcagagtggacggcatggacgacgccagcagcttcagagccgtgcagagcgccatggccgtgatcggcttcagcgaggaggagatcagacaggtgctggaggtgaccagcatggtgctgaagctgggcaacgtgctggtggccgacgagttccaggccagcggcatccccgccagcggcatcagagacggcagaggcgtgagagagatcggcgagatggtgggcctgaacagcgaggaggtggagagagccctgtgcagcagaaccatggagaccgccaaggagaaggtggtgaccgccctgaacgtgatgcaggcccagtacgccagagacgccctggccaagaacatctacagcagactgttcgactggatcgtgaacagaatcaacgagagcatcaaggtgggcatcggcgagaagaagaaggtgatgggcgtgctggacatctacggcttcgagatcctggaggacaacagcttcgagcagttcgtgatcaactactgcaacgagaagctgcagcaggtgttcatcgagatgaccctgaaggaggagcaggaggagtacaagagagagggcatcccctggaccaaggtggactacttcgacaacggcatcatctgcaagctgatcgagcacaaccagagaggcatcctggccatgctggacgaggagtgcctgagacccggcgtggtgagcgacagcaccttcctggccaagctgaaccagctgttcagcaagcacggccactacgagagcaaggtgacccagaacgcccagagacagtacgaccacaccatgggcctgagctgcttcagaatctgccactacgccggcaaggtgacctacaacgtgaccagcttcatcgacaagaacaacgacctgctgttcagagacctgctgcaggccatgtggaaggcccagcaccccctgctgagaagcctgttccccgagggcaaccccaagcaggccagcctgaagagaccccccaccgccggcgcccagttcaagagcagcgtggccatcctgatgaagaacctgtacagcaagagccccaactacatcagatgcatcaagcccaacgagcaccagcagagaggccagttcagcagcgacctggtggccacccaggccagatacctgggcctgctggagaacgtgagagtgagaagagccggctacgcccacagacagggctacggccccttcctggagagatacagactgctgagcagaagcacctggccccactggaacggcggcgacagagagggcgtggagaaggtgctgggcgagctgagcatgagcagcggcgagctggccttcggcaagaccaagatcttcatcagaagccccaagaccctgttctacctggaggagcagagaagactgagactgcagcagctggccaccctgatccagaagatctacagaggctggagatgcagaacccactaccagctgatgagaaagagccagatcctgatcagcagctggttcagaggcaacatgcagaagaagtgctacggcaagatcaaggccagcgtgctgctgatccaggccttcgtgagaggctggaaggccagaaagaactacagaaagtacttcagaagcgaggccgccctgaccctggccgacttcatctacaagagcatggtgcagaagttcctgctgggcctgaagaacaacctgcccagcaccaacgtgctggacaagacctggcccgccgccccctacaagtgcctgagcaccgccaaccaggagctgcagcagctgttctaccagtggaagtgcaagagattcagagaccagctgagccccaagcaggtggagatcctgagagagaagctgtgcgccagcgagctgttcaagggcaagaaggccagctacccccagagcgtgcccatccccttctgcggcgactacatcggcctgcagggcaaccccaagctgcagaagctgaagggcggcgaggagggccccgtgctgatggccgaggccgtgaagaaggtgaacagaggcaacggcaagaccagcagcagaatcctgctgctgaccaagggccacgtgatcctgaccgacaccaagaagagccaggccaagatcgtgatcggcctggacaacgtggccggcgtgagcgtgaccagcctgaaggacggcctgttcagcctgcacctgagcgagatgagcagcgtgggcagcaagggcgacttcctgctggtgagcgagcacgtgatcgagctgctgaccaagatgtacagagccgtgctggacgccacccagagacagctgaccgtgaccgtgaccgagaagttcagcgtgagattcaaggagaacagcgtggccgtgaaggtggtgcagggccccgccggcggcgacaacagcaagctgagatacaagaagaagggcagccactgcctggaggtgaccgtgcagtag

SEQ ID NO: 155523 - DNA, 2646 bp, Artificial Sequence
  derived and/or modified sequence
atggacatcgagttcgacttcaagggcagccccctgggcggcgtgatcaccaactacctgctggagaagagcagactggtgaagcagctgaagggcgagagaaacttccacatcttctaccagctgctggccggcgccgacgagcagctgctgaaggccctgaagctggagagagacaccaccggctacgcctacctgaaccacgaggtgagcagagtggacggcatggacgacgccagcagcttcagagccgtgcagagcgccatggccgtgatcggcttcagcgaggaggagatcagacaggtgctggaggtgaccagcatggtgctgaagctgggcaacgtgctggtggccgacgagttccaggccagcggcatccccgccagcggcatcagagacggcagaggcgtgagagagatcggcgagatggtgggcctgaacagcgaggaggtggagagagccctgtgcagcagaaccatggagaccgccaaggagaaggtggtgaccgccctgaacgtgatgcaggcccagtacgccagagacgccctggccaagaacatctacagcagactgttcgactggatcgtgaacagaatcaacgagagcatcaaggtgggcatcggcgagaagaagaaggtgatgggcgtgctggacatctacggcttcgagatcctggaggacaacagcttcgagcagttcgtgatcaactactgcaacgagaagctgcagcaggtgttcatcgagatgaccctgaaggaggagcaggaggagtacaagagagagggcatcccctggaccaaggtggactacttcgacaacggcatcatctgcaagctgatcgagcacaaccagagaggcatcctggccatgctggacgaggagtgcctgagacccggcgtggtgagcgacagcaccttcctggccaagctgaaccagctgttcagcaagcacggccactacgagagcaaggtgacccagaacgcccagagacagtacgaccacaccatgggcctgagctgcttcagaatctgccactacgccggcaaggtgacctacaacgtgaccagcttcatcgacaagaacaacgacctgctgttcagagacctgctgcaggccatgtggaaggcccagcaccccctgctgagaagcctgttccccgagggcaaccccaagcaggccagcctgaagagaccccccaccgccggcgcccagttcaagagcagcgtggccatcctgatgaagaacctgtacagcaagagccccaactacatcagatgcatcaagcccaacgagcaccagcagagaggccagttcagcagcgacctggtggccacccaggccagatacctgggcctgctggagaacgtgagagtgagaagagccggctacgcccacagacagggctacggccccttcctggagagatacagactgctgagcagaagcacctggccccactggaacggcggcgacagagagggcgtggagaaggtgctgggcgagctgagcatgagcagcggcgagctggccttcggcaagaccaagatcttcatcagaagccccaagaccctgttctacctggaggagcagagaagactgagactgcagcagctggccaccctgatccagaagatctacagaggctggagatgcagaacccactaccagctgatgagaaagagccagatcctgatcagcagctggttcagaggcaacatgcagaagaagtgctacggcaagatcaaggccagcgtgctgctgatccaggccttcgtgagaggctggaaggccagaaagaactacagaaagtacttcagaagcgaggccgccctgaccctggccgacttcatctacaagagcatggtgcagaagttcctgctgggcctgaagaacaacctgcccagcaccaacgtgctggacaagacctggcccgccgccccctacaagtgcctgagcaccgccaaccaggagctgcagcagctgttctaccagtggaagtgcaagagattcagagaccagctgagccccaagcaggtggagatcctgagagagaagctgtgcgccagcgagctgttcaagggcaagaaggccagctacccccagagcgtgcccatccccttctgcggcgactacatcggcctgcagggcaaccccaagctgcagaagctgaagggcggcgaggagggccccgtgctgatggccgaggccgtgaagaaggtgaacagaggcaacggcaagaccagcagcagaatcctgctgctgaccaagggccacgtgatcctgaccgacaccaagaagagccaggccaagatcgtgatcggcctggacaacgtggccggcgtgagcgtgaccagcctgaaggacggcctgttcagcctgcacctgagcgagatgagcagcgtgggcagcaagggcgacttcctgctggtgagcgagcacgtgatcgagctgctgaccaagatgtacagagccgtgctggacgccacccagagacagctgaccgtgaccgtgaccgagaagttcagcgtgagattcaaggagaacagcgtggccgtgaaggtggtgcagggccccgccggcggcgacaacagcaagctgagatacaagaagaagggcagccactgcctggaggtgaccgtgcagtag

SEQ ID NO: 155524 - protein, 710 aa, Artificial Sequence
  derived and/or modified sequence
MVKLAKAGKNQGDPKKMAPPPKEVEEDSEDEEMSEDEEDDSSGEEVVIPQKKGKKAAATSAKKVVVSPTKKVAVATPAKKAAVTPGKKAAATPAKKTVTPAKAVTTPGKKGATPGKALVATPGKKGAAIPAKGAKNGKNAKKEDSDEEEDDDSEEDEEDDEDEDEDEDEIEPAAMKAAAAAPASEDEDDEDDEDDEDDDDDEEDDSEEEAMETTPAKGKKAAKVVPVKAKNVAEDEDEEEDDEDEDDDDDEDDEDDDDEDDEEEEEEEEEEPVKEAPGKRKKEMAKQKAAPEAKKQKVEGTEPTTAFNLFVGNLNFNKSAPELKTGISDVFAKNDLAVVDVRIGMTRKFGYVDFESAEDLEKALELTGLKVFGNEIKLEKPKGKDSKKERDARTLLAKNLPYKVTQDELKEVFEDAAEIRLVSKDGKSKGIAYIEFKTEADAEKTFEEKQGTEIDGRSISLYYTGEKGQNQDYRGGKNSTWSGESKTLVLSNLSYSATEETLQEVFEKATFIKVPQNQNGKSKGYAFIEFASFEDAKEALNSCNKREIEGRAIRLELQGPRGSPNARSQPSKTLFVKGLSEDTTEETLKESFDGSVRARIVTDRETGSSKGFGFVDFNSEEDAKAAKEAMEDGEIDGNKVTLDWAKPKGEGGFGGRGGGRGGFGGRGGGRGGRGGFGGRGRGGFGGRGGFRGGRGGGGDHKPQGKKTKFE

SEQ ID NO: 155525 - protein, 482 aa, Artificial Sequence
  derived and/or modified sequence
MVKLAKAGKNQGDPKKMAPPPKEVEEDSEDEEMSEDEEDDSSGEEVVIPQKKGKKAAATSAKKVVVSPTKKVAVATPAKKAAVTPGKKAAATPAKKTVTPAKAVTTPGKKGATPGKALVATPGKKGAAIPAKGAKNGKNAKKEDSDEEEDDDSEEDEEDDEDEDEDEDEIEPAAMKAAAAAPASEDEDDEDDEDDEDGKSKGIAYIEFKTEADAEKTFEEKQGTEIDGRSISLYYTGEKGQNQDYRGGKNSTWSGESKTLVLSNLSYSATEETLQEVFEKATFIKVPQNQNGKSKGYAFIEFASFEDAKEALNSCNKREIEGRAIRLELQGPRGSPNARSQPSKTLFVKGLSEDTTEETLKESFDGSVRARIVTDRETGSSKGFGFVDFNSEEDAKAAKEAMEDGEIDGNKVTLDWAKPKGEGGFGGRGGGRGGFGGRGGGRGGRGGFGGRGRGGFGGRGGFRGGRGGGGDHKPQGKKTKFE

SEQ ID NO: 155526 - DNA, 2133 bp, Artificial Sequence
  derived and/or modified sequence
atggtgaagctggccaaggccggcaagaaccagggcgaccccaagaagatggcccccccccccaaggaggtggaggaggacagcgaggacgaggagatgagcgaggacgaggaggacgacagcagcggcgaggaggtggtgatcccccagaagaagggcaagaaggccgccgccaccagcgccaagaaggtggtggtgagccccaccaagaaggtggccgtggccacccccgccaagaaggccgccgtgacccccggcaagaaggccgccgccacccccgccaagaagaccgtgacccccgccaaggccgtgaccacccccggcaagaagggcgccacccccggcaaggccctggtggccacccccggcaagaagggcgccgccatccccgccaagggcgccaagaacggcaagaacgccaagaaggaggacagcgacgaggaggaggacgacgacagcgaggaggacgaggaggacgacgaggacgaggacgaggacgaggacgagatcgagcccgccgccatgaaggccgccgccgccgcccccgccagcgaggacgaggacgacgaggacgacgaggacgacgaggacgacgacgacgacgaggaggacgacagcgaggaggaggccatggagaccacccccgccaagggcaagaaggccgccaaggtggtgcccgtgaaggccaagaacgtggccgaggacgaggacgaggaggaggacgacgaggacgaggacgacgacgacgacgaggacgacgaggacgacgacgacgaggacgacgaggaggaggaggaggaggaggaggaggagcccgtgaaggaggcccccggcaagagaaagaaggagatggccaagcagaaggccgcccccgaggccaagaagcagaaggtggagggcaccgagcccaccaccgccttcaacctgttcgtgggcaacctgaacttcaacaagagcgcccccgagctgaagaccggcatcagcgacgtgttcgccaagaacgacctggccgtggtggacgtgagaatcggcatgaccagaaagttcggctacgtggacttcgagagcgccgaggacctggagaaggccctggagctgaccggcctgaaggtgttcggcaacgagatcaagctggagaagcccaagggcaaggacagcaagaaggagagagacgccagaaccctgctggccaagaacctgccctacaaggtgacccaggacgagctgaaggaggtgttcgaggacgccgccgagatcagactggtgagcaaggacggcaagagcaagggcatcgcctacatcgagttcaagaccgaggccgacgccgagaagaccttcgaggagaagcagggcaccgagatcgacggcagaagcatcagcctgtactacaccggcgagaagggccagaaccaggactacagaggcggcaagaacagcacctggagcggcgagagcaagaccctggtgctgagcaacctgagctacagcgccaccgaggagaccctgcaggaggtgttcgagaaggccaccttcatcaaggtgccccagaaccagaacggcaagagcaagggctacgccttcatcgagttcgccagcttcgaggacgccaaggaggccctgaacagctgcaacaagagagagatcgagggcagagccatcagactggagctgcagggccccagaggcagccccaacgccagaagccagcccagcaagaccctgttcgtgaagggcctgagcgaggacaccaccgaggagaccctgaaggagagcttcgacggcagcgtgagagccagaatcgtgaccgacagagagaccggcagcagcaagggcttcggcttcgtggacttcaacagcgaggaggacgccaaggccgccaaggaggccatggaggacggcgagatcgacggcaacaaggtgaccctggactgggccaagcccaagggcgagggcggcttcggcggcagaggcggcggcagaggcggcttcggcggcagaggcggcggcagaggcggcagaggcggcttcggcggcagaggcagaggcggcttcggcggcagaggcggcttcagaggcggcagaggcggcggcggcgaccacaagccccagggcaagaagaccaagttcgagtag

SEQ ID NO: 155527 - DNA, 1449 bp, Artificial Sequence
  derived and/or modified sequence
atggtgaagctggccaaggccggcaagaaccagggcgaccccaagaagatggcccccccccccaaggaggtggaggaggacagcgaggacgaggagatgagcgaggacgaggaggacgacagcagcggcgaggaggtggtgatcccccagaagaagggcaagaaggccgccgccaccagcgccaagaaggtggtggtgagccccaccaagaaggtggccgtggccacccccgccaagaaggccgccgtgacccccggcaagaaggccgccgccacccccgccaagaagaccgtgacccccgccaaggccgtgaccacccccggcaagaagggcgccacccccggcaaggccctggtggccacccccggcaagaagggcgccgccatccccgccaagggcgccaagaacggcaagaacgccaagaaggaggacagcgacgaggaggaggacgacgacagcgaggaggacgaggaggacgacgaggacgaggacgaggacgaggacgagatcgagcccgccgccatgaaggccgccgccgccgcccccgccagcgaggacgaggacgacgaggacgacgaggacgacgaggacggcaagagcaagggcatcgcctacatcgagttcaagaccgaggccgacgccgagaagaccttcgaggagaagcagggcaccgagatcgacggcagaagcatcagcctgtactacaccggcgagaagggccagaaccaggactacagaggcggcaagaacagcacctggagcggcgagagcaagaccctggtgctgagcaacctgagctacagcgccaccgaggagaccctgcaggaggtgttcgagaaggccaccttcatcaaggtgccccagaaccagaacggcaagagcaagggctacgccttcatcgagttcgccagcttcgaggacgccaaggaggccctgaacagctgcaacaagagagagatcgagggcagagccatcagactggagctgcagggccccagaggcagccccaacgccagaagccagcccagcaagaccctgttcgtgaagggcctgagcgaggacaccaccgaggagaccctgaaggagagcttcgacggcagcgtgagagccagaatcgtgaccgacagagagaccggcagcagcaagggcttcggcttcgtggacttcaacagcgaggaggacgccaaggccgccaaggaggccatggaggacggcgagatcgacggcaacaaggtgaccctggactgggccaagcccaagggcgagggcggcttcggcggcagaggcggcggcagaggcggcttcggcggcagaggcggcggcagaggcggcagaggcggcttcggcggcagaggcagaggcggcttcggcggcagaggcggcttcagaggcggcagaggcggcggcggcgaccacaagccccagggcaagaagaccaagttcgagtag

SEQ ID NO: 155528 - DNA, 1809 bp, Artificial Sequence
  derived and/or modified sequence
atggtgaagctggccaaggccggcaagaaccagggcgaccccaagaagatggcccccccccccaaggaggtggaggaggacagcgaggacgaggagatgagcgaggacgaggaggacgacagcagcggcgaggagctgaacgacgacttctaccagaccaccatgcacaccctgtggaagaagggcaagaaggccgccgccaccagcgccatccccgccaagggcgccaagaacggcaagaacgccaagaaggaggacagcgacgaggaggaggacgacgacagcgaggaggacgaggaggacgacgaggacgaggacgaggacgaggacgagatcgagcccgccgccatgaaggccgccgccgccgcccccgccagcgaggacgaggacgacgaggacgacgaggacgacgaggacgacgacgacgacgaggaggacgacgacgacgacgaggacgacgaggaggaggaggaggaggaggaggaggagcccgtgaaggaggcccccggcaagagaaagaaggagatggccaagcagaaggccgcccccgaggccaagaagcagaaggtggagggcaccgagcccaccaccgccttcaacctgttcgtgggcaacctgaacttcaacaagagcgcccccgagctgaagaccggcatcagcgacgtgttcgccaagaacgacctggccgtggtggacgtgagaatcggcatgaccagaaagttcggctacgtggacttcgagagcgccgaggacctggagaaggccctggagctgaccggcctgaaggtgttcggcaacgagatcaagctggagaagcccaagggcaaggacagcaagaaggagagagacgccagaaccctgctggccaagaacctgccctacaaggtgacccaggacgagctgaaggaggtgttcgaggacgccgccgagatcagactggtgagcaaggacggcaagagcaagggcatcgcctacatcgagttcaagaccgaggccgacgccgagaagaccttcgaggagaagcagggcaccgagatcgacggcagaagcatcagcctgtactacaccggcgagaagggccagaaccaggactacagaggcggcaagaacagcacctggagcggcgagagcaagaccctggtgctgagcaacctgagctacagcgccaccgaggagaccctgcaggaggtgttcgagaaggccaccttcatcaaggtgccccagaaccagaacggcaagagcaagggctacgccttcatcgagttcgccagcttcgaggacgccaaggaggccctgaacagctgcaacaagagagagatcgagggcagagccatcagactggagctgcagggccccagaggcagccccaacgccagaagccagcccagcaagaccctgttcgtgaagggcctgagcgaggacaccaccgaggagaccctgaaggagagcttcgacggcagcgtgagagccagaatcgtgaccgacagagagaccggcagcagcaagggcttcggcttcgtggacttcaacagcgaggaggacgccaaggccgccaaggaggccatggaggacggcgagatcgacggcaacaaggtgaccctggactgggccaagcccaagggcgagggcggcttcggcggcagaggcggcggcagaggcggcttcggcggcagaggcggcggcagaggcggcagaggcggcttcggcggcagaggcagaggcggcttcggcggcagaggcggcttcagaggcggcagaggcggcggcggcgaccacaagccccagggcaagaagaccaagttcgagtag

SEQ ID NO: 155529 - DNA, 2133 bp, Artificial Sequence
  derived and/or modified sequence
atggtcaaacttgcaaaggcagggaaaaaccaaggggaccctaagaagatggcacctcccccgaaagaagttgaggaggatagcgaggatgaagaaatgagtgaggacgaggaggatgacagctccggggaggaggtagtaattcctcagaagaaggggaaaaaagcagctgctaccagtgctaaaaaagtggtcgtttcaccaacaaagaaggtggctgtcgctacccccgccaaaaaggccgcagttacccccggaaagaaggctgctgccacccccgccaagaaaaccgtcactccagccaaagccgtaactacccccggcaagaagggcgcgacccccggtaaggccctggtggctacaccaggcaagaagggggctgcaatcccagccaagggcgccaagaacggcaaaaacgccaagaaggaggacagcgatgaagaggaggatgatgatagcgaagaggacgaagaggatgatgaagatgaggacgaggacgaggatgagatcgagcccgccgccatgaaagccgccgccgcagccccagctagcgaggacgaggatgacgaagatgatgaagacgacgaagacgacgacgacgacgaagaggacgactccgaagaggaggcgatggagacaactccagcaaaaggtaaaaaggccgcaaaagtagtgccggtcaaagccaagaatgtagctgaagacgaagatgaggaagaggatgacgaagatgaggacgacgatgacgatgaagatgatgaggacgatgatgatgaggatgatgaagaagaagaagaggaggaggaggaagagcccgtgaaggaagctccgggaaaaaggaaaaaagaaatggccaagcagaaagcggcaccggaggcgaagaagcagaaggtcgaaggtaccgaaccaacaacggcttttaatctcttcgtggggaacctcaacttcaataagagcgctccagaattgaagaccggaatctcagacgtgtttgcaaagaatgaccttgctgtcgtggacgtgaggattggcatgactagaaagttcggctacgtggacttcgagagtgccgaagatctcgaaaaagctttggaactgaccggcctaaaagtcttcggtaatgagatcaagctggagaagcctaagggtaaggactccaagaaggagcgggacgctcgaactttgctggcaaagaacctcccttacaaagttacacaggatgagttaaaggaggtttttgaggatgcagcagagataaggctggtctcaaaggacggcaaatcaaagggaatcgcctatatcgagtttaaaacagaagctgatgcagaaaagacgtttgaagagaagcagggtaccgagatcgatggccgttcaatttctctgtattacaccggcgaaaaagggcagaaccaagattacaggggggggaagaactcaacttggagtggtgagtctaagactctggttctgtctaatctgagttactctgccacagaagagaccttacaggaagtgttcgaaaaggcaaccttcataaaggtcccccagaatcagaacggcaagtctaaggggtacgcttttatagaatttgcctcttttgaagatgctaaggaagccctcaatagctgtaataagagggagatcgaaggtcgcgctattagattggagctccagggacctagagggagccccaatgccaggtcccagccatctaagaccctgttcgttaagggcctatctgaggataccaccgaagagacattgaaggagtcttttgacggaagcgtgagagctaggattgtgactgaccgagagacaggatcttcaaaaggcttcggattcgtcgactttaactccgaggaggacgctaaagccgccaaagaggccatggaggacggcgaaatcgacgggaataaggtcacgctcgactgggcaaagccaaagggcgagggcggatttggtggaaggggaggcggcagagggggatttggcgggagaggggggggtcgaggcggacgcgggggcttcggcggcaggggcagagggggcttcggtggccgaggcggctttagaggagggcgtggtggcggcggggatcacaagccccaaggtaagaaaacgaagtttgaatag

SEQ ID NO: 155530 - DNA, 1449 bp, Artificial Sequence
  derived and/or modified sequence
atggttaaattagcaaaggctgggaagaaccagggggatcctaaaaaaatggcccctccccccaaggaagtggaggaggatagtgaggatgaggaaatgtctgaggatgaggaggatgattcgtcaggggaagaagtggtcataccacagaagaagggcaaaaaggccgcagctacatctgcgaagaaggtggtcgtgtctcctaccaaaaaggttgcagtggccacacccgctaagaaagctgctgttacacctgggaaaaaggcagccgccaccccagcgaaaaagaccgttacccctgccaaagcagtgacgactcccggtaagaagggagctactcctgggaaggctctggtcgccactcccggtaaaaaaggtgcggctatacctgccaaaggcgcaaagaacgggaagaacgcaaagaaggaggacagcgacgaagaagaggatgatgattctgaggaggatgaagaggacgatgaggacgaggacgaagacgaggatgagatcgaaccggcggcaatgaaggccgcagctgccgcccccgctagcgaggacgaagacgatgaagacgacgaagacgacgaggacggcaagtccaagggaattgcatacattgagttcaaaacagaagcggatgctgaaaaaaccttcgaagagaagcaaggcaccgaaatcgacggacgaagcatcagcctctattatacaggggaaaagggccaaaatcaagactacagaggtggtaagaacagcacttggtccggggaatccaagacactggttttatctaatctttcctactccgctacagaagagaccctgcaggaggttttcgagaaggccactttcatcaaggtgcctcagaaccagaacggtaaaagtaagggatatgcctttatcgagttcgctagttttgaggatgctaaggaagccttgaactcgtgtaataaaagggaaatcgagggtcgagccatcagactggagttgcaaggcccccgcgggtctcccaatgcccggagccagccaagcaagactctcttcgtgaaggggctttcagaggacaccaccgaagaaactcttaaggaatccttcgatgggagcgtgagagctaggattgtcacagacagagagaccggaagttctaagggtttcgggttcgtggatttcaattccgaggaagatgcaaaggccgccaaggaggccatggaggacggcgagattgacgggaacaaggttactttggactgggcgaaacccaagggtgagggaggctttggtggtcgcggcggaggacgcggtggtttcgggggcaggggcgggggccgcggaggcagaggagggttcggggggcgcggccgcggcggcttcgggggacgagggggatttcggggtggtcgcgggggtggtggggatcacaaaccacaaggcaaaaaaaccaagttcgagtag

SEQ ID NO: 155531 - DNA, 1809 bp, Artificial Sequence
  derived and/or modified sequence
atggtgaaattggccaaggcgggaaaaaaccagggcgatcctaagaagatggccccaccacctaaggaagtggaagaagactccgaagacgaagagatgtcagaggatgaggaggatgattcttcaggcgaggaattgaacgacgatttttatcaaactacaatgcacaccctttggaagaagggtaagaaggcagcagccacatccgctatacctgctaaaggcgccaaaaatggtaaaaacgcaaaaaaggaggacagcgatgaggaagaggacgatgactctgaggaagatgaggaagacgatgaggacgaagacgaggacgaggatgaaatcgagcctgcagcaatgaaggctgcagcagcagcgcctgcctccgaggatgaggatgacgaggacgacgaggatgacgaagatgatgatgatgacgaagaagacgacgacgacgatgaagacgacgaggaggaggaggaagaggaggaagaagagcctgtgaaagaagcccccgggaaaaggaaaaaggaaatggctaaacagaaagcagcacccgaagcgaaaaagcagaaagtagagggcacagaacctaccaccgcctttaacctgtttgtcggaaatcttaattttaataagtctgctcccgaactaaaaactggcatttcagacgtgttcgccaaaaacgacttggcggtggtcgacgttagaatcggtatgaccagaaaattcggctatgtggacttcgaaagcgcagaggacctcgagaaggcactggagctgaccgggctgaaggtgttcggaaatgaaataaagttggagaagcctaaaggcaaagattccaaaaaggagcgggacgcgagaacacttctagccaaaaacctgccctataaggtcacacaggatgagctcaaagaagtatttgaggatgctgcagagattcgcttagtcagtaaagatggaaaatccaaggggatcgcctacatcgagttcaagacagaggcggacgccgaaaaaacgtttgaagaaaaacagggcacagagattgatggccgaagcatttccctctactatacaggcgagaaaggtcagaaccaagactatcggggcggcaaaaattctacgtggtccggagagagcaagacgcttgtgctctcaaatctgtcctactctgcaactgaagaaacgctacaggaagttttcgagaaggccacctttataaaggtgccacaaaatcagaacggtaaaagtaagggctacgcttttatagaattcgcttcatttgaggacgctaaagaagcgctgaactcttgcaacaaacgcgagatagaaggccgggccatcaggctggaattacaagggcctagaggctcacccaatgcccggagccaaccatccaaaaccctgttcgtcaagggcctcagtgaggacacaacggaggagactctaaaagagagttttgatggaagtgtgagagccagaatcgtgactgaccgcgaaacggggagctctaagggatttggctttgtggatttcaacagcgaagaggacgcgaaggctgctaaggaagctatggaggatggggaaatcgatggtaacaaggtcaccctagactgggccaaacccaaaggcgaaggtggcttcgggggccggggtggaggaagaggaggattcggtggacggggtggcggccgggggggtagaggagggtttggcggccgaggacggggcggatttggagggagaggagggtttcgcgggggccgaggcggagggggggaccataaacctcaagggaagaagacaaagtttgagtag

SEQ ID NO: 155532 - DNA, 2133 bp, Artificial Sequence
  derived and/or modified sequence
atggtgaagctggccaaggccggcaagaaccagggcgaccccaagaagatggcccccccacccaaggaggtggaggaggacagtgaagatgaggagatgtctgaagatgaggaggatgacagcagcggggaggaggtggtgatcccccagaagaagggcaagaaggctgctgccaccagcgccaagaaggtggtggtgagccccaccaagaaggtggccgtggccaccccagccaagaaggctgctgtgaccccaggcaagaaggccgccgccaccccagccaagaagacagtgaccccagccaaggctgtgaccaccccaggcaagaagggggccacccctgggaaggccctggtggccacccctgggaagaagggagctgccatcccagccaagggggccaagaatggcaagaatgccaagaaggaggacagtgatgaggaggaggatgatgattctgaagaagatgaggaggatgatgaagatgaagatgaagatgaagatgaaattgagcctgctgccatgaaggctgctgctgctgccccagcctctgaagatgaagatgatgaagatgatgaagatgatgaagatgatgatgatgatgaagaagatgacagcgaggaggaggccatggagaccaccccagccaagggcaagaaggccgccaaggtggtgcctgtgaaggccaagaatgtggccgaggatgaagatgaggaggaggatgatgaagatgaagatgatgatgatgatgaagatgatgaagatgatgatgatgaagatgatgaggaggaggaggaggaggaggaggaggagcctgtgaaggaggcccctgggaagaggaagaaggagatggccaagcagaaggccgcccctgaggccaagaagcagaaggtggagggcacagagcccaccacagccttcaacctgtttgtgggcaacctgaacttcaacaagagcgcccctgagctgaagacaggcatcagtgatgtgtttgccaagaatgacctggccgtggtggatgtgagaattggcatgaccaggaagtttggctacgtggactttgagagcgctgaggacctggagaaggccctggagctgaccggcctgaaggtgtttggaaatgagatcaagctggagaagcccaagggcaaggacagcaagaaggagagagatgcccggaccctgctggccaagaacctgccctacaaggtgacccaggatgagctgaaggaggtgtttgaagatgctgctgagatccggctggtgtccaaggatggcaagagcaaaggaattgcctacatcgagttcaagacagaagcagatgctgagaagacctttgaggagaagcagggcacagaaattgatggccgcagcatcagcctgtactacaccggggagaagggccagaaccaggactacagaggaggcaagaacagcacctggagcggggagagcaagaccctggtgctgagcaacctgagctacagcgccacagaggagaccctgcaggaggtgtttgagaaggccaccttcatcaaggtgccccagaaccagaatggcaagagcaagggctacgccttcatcgagtttgccagctttgaagatgccaaggaggccctgaacagctgcaacaagcgggagattgagggccgggccatccggctggagctgcagggcccccggggcagccccaatgcccggagccagcccagcaagaccctgtttgtgaagggcctgtctgaggacaccacagaggagaccctgaaggagagctttgatggctctgtgcgggcccgcatcgtgacagaccgggagaccggcagcagcaagggcttcggctttgtggacttcaacagtgaagaagatgccaaggccgccaaggaggccatggaggatggagaaattgatggcaacaaggtgaccctggactgggccaagcccaagggggagggcggctttggaggccggggcggcggccggggcggctttggaggccggggcggcggccggggcggccggggcggctttggaggccggggccggggcggctttggaggccggggcggcttccggggcggccggggcggcggcggggaccacaagccccagggcaagaagaccaagtttgaatag

SEQ ID NO: 155533 - DNA, 1449 bp, Artificial Sequence
  derived and/or modified sequence
atggtgaagctggccaaggccggcaagaaccagggcgaccccaagaagatggcccccccacccaaggaggtggaggaggacagtgaagatgaggagatgtctgaagatgaggaggatgacagcagcggggaggaggtggtgatcccccagaagaagggcaagaaggctgctgccaccagcgccaagaaggtggtggtgagccccaccaagaaggtggccgtggccaccccagccaagaaggctgctgtgaccccaggcaagaaggccgccgccaccccagccaagaagacagtgaccccagccaaggctgtgaccaccccaggcaagaagggggccacccctgggaaggccctggtggccacccctgggaagaagggagctgccatcccagccaagggggccaagaatggcaagaatgccaagaaggaggacagtgatgaggaggaggatgatgattctgaagaagatgaggaggatgatgaagatgaagatgaagatgaagatgaaattgagcctgctgccatgaaggctgctgctgctgccccagcctctgaagatgaagatgatgaagatgatgaagatgatgaagatggcaagagcaaaggaattgcctacatcgagttcaagacagaagcagatgctgagaagacctttgaggagaagcagggcacagaaattgatggccgcagcatcagcctgtactacaccggggagaagggccagaaccaggactacagaggaggcaagaacagcacctggagcggggagagcaagaccctggtgctgagcaacctgagctacagcgccacagaggagaccctgcaggaggtgtttgagaaggccaccttcatcaaggtgccccagaaccagaatggcaagagcaagggctacgccttcatcgagtttgccagctttgaagatgccaaggaggccctgaacagctgcaacaagcgggagattgagggccgggccatccggctggagctgcagggcccccggggcagccccaatgcccggagccagcccagcaagaccctgtttgtgaagggcctgtctgaggacaccacagaggagaccctgaaggagagctttgatggctctgtgcgggcccgcatcgtgacagaccgggagaccggcagcagcaagggcttcggctttgtggacttcaacagtgaagaagatgccaaggccgccaaggaggccatggaggatggagaaattgatggcaacaaggtgaccctggactgggccaagcccaagggggagggcggctttggaggccggggcggcggccggggcggctttggaggccggggcggcggccggggcggccggggcggctttggaggccggggccggggcggctttggaggccggggcggcttccggggcggccggggcggcggcggggaccacaagccccagggcaagaagaccaagtttgaatag

SEQ ID NO: 155534 - DNA, 1809 bp, Artificial Sequence
  derived and/or modified sequence
atggtgaagctggccaaggccggcaagaaccagggcgaccccaagaagatggcccccccacccaaggaggtggaggaggacagtgaagatgaggagatgtctgaagatgaggaggatgacagcagcggggaggagctgaatgatgacttctaccagaccaccatgcacaccctgtggaagaagggcaagaaggccgccgccaccagcgccatcccagccaagggggccaagaatggcaagaatgccaagaaggaggacagtgatgaggaggaggatgatgattctgaagaagatgaggaggatgatgaagatgaagatgaagatgaagatgaaattgagcctgctgccatgaaggctgctgctgctgccccagcctctgaagatgaagatgatgaagatgatgaagatgatgaagatgatgatgatgatgaagaagatgatgatgatgatgaagatgatgaggaggaggaggaggaggaggaggaggagcctgtgaaggaggcccctgggaagaggaagaaggagatggccaagcagaaggccgcccctgaggccaagaagcagaaggtggagggcacagagcccaccacagccttcaacctgtttgtgggcaacctgaacttcaacaagagcgcccctgagctgaagacaggcatcagtgatgtgtttgccaagaatgacctggccgtggtggatgtgagaattggcatgaccaggaagtttggctacgtggactttgagagcgctgaggacctggagaaggccctggagctgaccggcctgaaggtgtttggaaatgagatcaagctggagaagcccaagggcaaggacagcaagaaggagagagatgcccggaccctgctggccaagaacctgccctacaaggtgacccaggatgagctgaaggaggtgtttgaagatgctgctgagatccggctggtgtccaaggatggcaagagcaaaggaattgcctacatcgagttcaagacagaagcagatgctgagaagacctttgaggagaagcagggcacagaaattgatggccgcagcatcagcctgtactacaccggggagaagggccagaaccaggactacagaggaggcaagaacagcacctggagcggggagagcaagaccctggtgctgagcaacctgagctacagcgccacagaggagaccctgcaggaggtgtttgagaaggccaccttcatcaaggtgccccagaaccagaatggcaagagcaagggctacgccttcatcgagtttgccagctttgaagatgccaaggaggccctgaacagctgcaacaagcgggagattgagggccgggccatccggctggagctgcagggcccccggggcagccccaatgcccggagccagcccagcaagaccctgtttgtgaagggcctgtctgaggacaccacagaggagaccctgaaggagagctttgatggctctgtgcgggcccgcatcgtgacagaccgggagaccggcagcagcaagggcttcggctttgtggacttcaacagtgaagaagatgccaaggccgccaaggaggccatggaggatggagaaattgatggcaacaaggtgaccctggactgggccaagcccaagggggagggcggctttggaggccggggcggcggccggggcggctttggaggccggggcggcggccggggcggccggggcggctttggaggccggggccggggcggctttggaggccggggcggcttccggggcggccggggcggcggcggggaccacaagccccagggcaagaagaccaagtttgaatag

SEQ ID NO: 155535 - DNA, 2133 bp, Artificial Sequence
  derived and/or modified sequence
atggtgaagctggccaaggccggcaagaaccagggcgaccccaagaaaatggccccacctccaaaggaggttgaggaagactcagaggatgaggagatgagcgaggatgaggaggacgacagctctggcgaggaagtggttatcccacagaaaaagggcaaaaaggcagctgcaacatcagccaaaaaggtagtagtgtcccccaccaagaaggttgccgtggccaccccggcaaagaaggcggcagtaacccctggtaaaaaggctgcagctacaccagcgaagaaaacagtgacaccggcaaaagctgtgactacaccaggcaaaaagggggctactcctgggaaggctctggtggcgacacctgggaaaaaaggagctgcaatccccgccaagggcgctaagaacggtaaaaacgccaagaaggaagatagtgatgaggaggaagacgatgattccgaggaggacgaggaagatgatgaggacgaggacgaagacgaggacgagatagaacccgcagcaatgaaagccgccgctgcagcccctgcgagtgaggacgaggacgacgaggatgatgaggatgatgaggatgacgacgatgatgaagaagacgacagtgaggaagaggccatggaaaccacgcctgccaagggtaagaaggcggctaaagtagtgcctgtaaaagccaaaaatgtggccgaagacgaggatgaggaagaagacgatgaggacgaagacgacgatgacgatgaggacgacgaggatgatgatgatgaggacgacgaagaggaagaagaggaggaggaagaggagcctgtgaaagaagctcccggtaagcgtaaaaaggaaatggctaaacagaaagccgccccagaagctaagaaacagaaggtggaagggaccgaacccacaactgcttttaacttattcgtcgggaacctgaactttaacaaatctgcgcccgaactgaagaccggtatatcggacgtgtttgcaaaaaacgacctggctgtggtggatgttaggatcgggatgactaggaaatttgggtacgtagactttgagagcgcggaggatctggagaaggctcttgaactgactggcttgaaagtgttcggaaacgagatcaagctggaaaaacctaagggcaaagatagtaagaaggagagggacgcccgcactcttttagctaagaatctaccatataaagtgacccaggatgaactaaaagaagtattcgaagacgccgccgaaattagattagtaagtaaggatggtaaatccaagggcattgcatacatcgagttcaaaactgaggccgacgctgaaaagacatttgaggaaaagcagggcacggaaatcgatggcaggagtatatcattatactataccggtgagaaaggacagaatcaggattatcgcggcggcaaaaattctacctggagcggggagagtaaaacgctggtgctctctaatctgtcttattctgccacagaagagaccctccaggaggtctttgaaaaggctaccttcatcaaggtgccccagaaccagaatggaaagtcaaagggatacgcctttattgagttcgcaagcttcgaggacgccaaggaggcgctcaattcatgcaataagcgtgagatcgaaggcagggccattcgcctcgaactgcagggacctcgaggctctccaaatgcccgaagccagccgtccaaaacattgttcgttaagggcctgtctgaagatacaacagaggagaccttgaaggagtcctttgacggcagcgtgcgggcgagaatagtcaccgaccgggagacagggtcaagtaaagggttcggatttgtggacttcaattctgaagaagatgcgaaggccgctaaagaggccatggaggatggagagatagatggaaataaagtaacactcgattgggcaaaacctaagggcgaggggggctttgggggccgcggcggcggcagaggcggcttcgggggaaggggcggcggacgcggtgggcgcgggggatttgggggacgcggaagagggggcttcggtgggcgcggaggatttcgcggcggacgcggaggaggcggcgaccataagccccaagggaagaaaacaaagtttgagtag

SEQ ID NO: 155536 - DNA, 1449 bp, Artificial Sequence
  derived and/or modified sequence
atggtgaagctggccaaggccggcaagaaccagggcgaccccaagaaaatggctccccccccaaaagaggtcgaggaggactccgaggacgaggagatgtccgaagacgaggaagacgattcctcaggagaggaagtagttatcccacagaaaaagggaaaaaaagcagcagccactagcgctaagaaagttgtagtgtcacctactaagaaggtagccgtggccactccagcaaagaaagccgctgttacccccggtaagaaagccgctgctacccccgccaagaaaactgtgacccctgccaaggcggtcacgactccagggaaaaaaggagccactcctggaaaggctctggtggcaacgccaggtaagaagggtgctgcaatccctgctaaaggcgccaagaacgggaagaacgctaaaaaggaagacagcgacgaagaggaggatgatgatagcgaagaagatgaggaagacgacgaggatgaggatgaggacgaggatgaaattgagcccgccgccatgaaagcggccgccgccgccccagcatctgaggacgaggacgatgaagatgatgaggatgacgaggatgggaaatctaagggcatcgcctacatcgaattcaaaaccgaggctgacgctgagaaaacctttgaagaaaagcagggtacagaaattgatgggagatcgatcagcctatattacacaggagagaaaggccagaaccaggattaccggggcgggaagaacagcacatggtcaggggaatctaaaaccctggttctctcaaaccttagctactccgctacagaagaaacattgcaggaagtgttcgagaaagccacatttattaaggtcccccagaatcagaacggaaagagtaaaggatatgcatttatcgagtttgccagcttcgaggacgccaaagaggctctgaatagttgtaacaaacgtgagatcgaggggcgtgccatccgactcgaattacagggcccaagggggtcacctaacgccagatcacaaccttctaaaacactctttgtaaaaggattaagcgaggataccacagaagaaactctgaaagagtcttttgacggatctgtaagggcacgcatcgtgactgaccgcgagacaggtagttcaaagggattcgggtttgtcgactttaattctgaggaggacgccaaagcagcgaaggaggccatggaagacggcgagatcgatggtaacaaggtgaccttagattgggcgaagcccaagggcgagggcgggtttggcggccgaggcggggggagaggaggcttcggcggacgcggcggagggcggggtgggagaggcgggtttggtgggaggggcagaggcggatttggcggacggggcgggtttaggggcggacgaggaggcgggggggaccataagcctcagggcaaaaaaaccaaatttgagtag

SEQ ID NO: 155537 - DNA, 1809 bp, Artificial Sequence
  derived and/or modified sequence
atggtgaagctggccaaggccggcaagaaccagggcgaccccaagaagatggctcctccacccaaagaggtggaagaggatagtgaggatgaggagatgagcgaggacgaggaagacgactccagcggggaggagttaaacgatgacttctatcaaacaaccatgcatacattgtggaagaaaggtaaaaaagccgccgccacttctgcgatacctgccaaaggagctaaaaacgggaagaatgccaagaaggaggactccgatgaggaagaggacgatgattcggaggaagatgaggaagacgatgaggacgaagatgaggatgaggacgaaatcgagccagctgccatgaaggccgccgcagcggctcctgcaagcgaagacgaggatgacgaagacgatgaggatgacgaggacgacgacgacgatgaagaggatgacgatgacgacgaagatgatgaggaagaagaagaggaggaagaagaggaacctgtgaaggaggcgcccggcaaacggaagaaggagatggctaaacaaaaggcagcccctgaagccaagaaacaaaaagttgaaggcacagagccgacaactgcctttaacctttttgtgggcaatctgaatttcaacaaatctgccccagagctgaagacaggcatttctgacgtctttgccaaaaacgacctggcagtggtggatgtgaggatcggcatgacgcggaaattcgggtacgtcgacttcgaaagtgccgaagacctcgagaaggcattggagctcacgggtctgaaggtgtttggtaacgagattaagttggagaaacccaagggcaaggatagtaaaaaagaacgggatgctcgcacactgctggccaaaaatttaccctacaaggtgacacaggacgagctgaaagaggtttttgaagacgcggcagagattaggttggtgagtaaggacggtaaatcaaaagggattgcctatattgagttcaagacagaagctgatgctgagaaaacctttgaagagaaacaaggtacggaaattgacggccgcagcatcagcctctactatacaggggaaaaagggcaaaatcaggactatcgaggtgggaagaactccacgtggtccggggagagcaagacactggtgttgtccaaccttagctatagcgcaaccgaggagactctccaggaagtgtttgaaaaggctaccttcatcaaagttcctcagaatcagaacgggaaatccaaaggctacgcctttattgagttcgccagcttcgaagatgcgaaagaggccctgaacagctgtaataaaagagagatagaaggacgtgcaattagactggagttacaaggcccacgaggttctcccaatgccaggtctcagccttcaaaaacattatttgttaaaggcctgagtgaagatactacagaggagacactgaaagagtcattcgatggatccgtccgagctcgtatcgtgacagaccgggaaactggatcttcaaagggtttcggttttgtggacttcaactctgaagaggacgcaaaggctgccaaagaggcaatggaagatggcgagatcgatgggaataaggtcactctcgattgggcaaagcctaaaggagaaggcgggttcggaggccgtggaggagggaggggtggatttggcgggcggggtggagggcgggggggtaggggtgggttcggaggaagaggccggggcggctttggtggccgcggcggcttccgtggcggccgaggtgggggtggcgaccataagccacagggcaaaaagacaaaatttgagtag

SEQ ID NO: 155538 - DNA, 4034 bp, Artificial Sequence
  derived and/or modified sequence
gattggctcatggggacggccgcgagctttggttggtcggcgcggagtcacgagggcgccgtcgtcgcctttccacaggcgattactgggcaggctcagtctttcgcctcagtctcgagctctcgctggccttcgggtgtacgtgctccgggatcttcagcacccgcggccgccatcgccgtcgcttggcttcttctggactcatctgcgccacttgtccgcttcacactccgccgccatcatggtgaagctcgcgaaggcaggtaaaaatcaaggtgaccccaagaaaatggctcctcctccaaaggaggtagaagaagatagtgaagatgaggaaatgtcagaagatgaagaagatgatagcagtggagaagaggtcgtcatacctcagaagaaaggcaagaaggctgctgcaacctcagcaaagaaggtggtcgtttccccaacaaaaaaggttgcagttgccacaccagccaagaaagcagctgtcactccaggcaaaaaggcagcagcaacacctgccaagaagacagttacaccagccaaagcagttaccacacctggcaagaagggagccacaccaggcaaagcattggtagcaactcctggtaagaagggtgctgccatcccagccaagggggcaaagaatggcaagaatgccaagaaggaagacagtgatgaagaggaggatgatgacagtgaggaggatgaggaggatgacgaggacgaggatgaggatgaagatgaaattgaaccagcagcgatgaaagcagcagctgctgcccctgcctcagaggatgaggacgatgaggatgacgaagatgatgaggatgacgatgacgatgaggaagatgactctgaagaagaagctatggagactacaccagccaaaggaaagaaagctgcaaaagttgttcctgtgaaagccaagaacgtggctgaggatgaagatgaagaagaggatgatgaggacgaggatgacgacgacgacgaagatgatgaagatgatgatgatgaagatgatgaggaggaggaagaagaggaggaggaagagcctgtcaaagaagcacctggaaaacgaaagaaggaaatggccaaacagaaagcagctcctgaagccaagaaacagaaagtggaaggcacagaaccgactacggctttcaatctctttgttggaaacctaaactttaacaaatctgctcctgaattaaaaactggtatcagcgatgtttttgctaaaaatgatcttgctgttgtggatgtcagaattggtatgactaggaaatttggttatgtggattttgaatctgctgaagacctggagaaagcgttggaactcactggtttgaaagtctttggcaatgaaattaaactagagaaaccaaaaggaaaagacagtaagaaagagcgagatgcgagaacacttttggctaaaaatctcccttacaaagtcactcaggatgaattgaaagaagtgtttgaagatgctgcggagatcagattagtcagcaaggatgggaaaagtaaagggattgcttatattgaatttaagacagaagctgatgcagagaaaacctttgaagaaaagcagggaacagagatcgatgggcgatctatttccctgtactatactggagagaaaggtcaaaatcaagactatagaggtggaaagaatagcacttggagtggtgaatcaaaaactctggttttaagcaacctctcctacagtgcaacagaagaaactcttcaggaagtatttgagaaagcaacttttatcaaagtaccccagaaccaaaatggcaaatctaaagggtatgcatttatagagtttgcttcattcgaagacgctaaagaagctttaaattcctgtaataaaagggaaattgagggcagagcaatcaggctggagttgcaaggacccaggggatcacctaatgccagaagccagccatccaaaactctgtttgtcaaaggcctgtctgaggataccactgaagagacattaaaggagtcatttgacggctccgttcgggcaaggatagttactgaccgggaaactgggtcctccaaagggtttggttttgtagacttcaacagtgaggaggatgccaaagctgccaaggaggccatggaagacggtgaaattgatggaaataaagttaccttggactgggccaaacctaagggtgaaggtggcttcgggggtcgtggtggaggcagaggcggctttggaggacgaggtggtggtagaggaggccgaggaggatttggtggcagaggccggggaggctttggagggcgaggaggcttccgaggaggcagaggaggaggaggtgaccacaagccacaaggaaagaagacgaagtttgaatagcttctgtccctctgctttcccttttccatttgaaagaaaggactctggggtttttactgttacctgatcaatgacagagccttctgaggacattccaagacagtatacagtcctgtggtctccttggaaatccgtctagttaacatttcaagggcaataccgtgttggttttgactggatattcatataaactttttaaagagttgagtgatagagctaacccttatctgtaagttttgaatttatattgtttcatcccatgtacaaaaccattttttcctacaaatagtttgggttttgttgttgtttcttttttttgttttgtttttgttttttttttttttgcgttcgtggggttgtaaaagaaaagaaagcagaatgttttatcatggtttttgcttcagcggctttaggacaaattaaaagtcaactctggtgccagacgtgttacttcctaaagagtgtttcccctggaatgtcactggagagcatggcaaagccagctctgccacttgcttcacccatcccaatggaaatggcttagtgcgtgtttccagtatcccagccctaactaacttggttgaaatgctggtgaggggacctgctcctgcagccctggtgctgacttgaaggctgctgcagcttctcctacttttagcaggtctgaggattatgtcctgaagaccactctggaaagaggtgcaggaacagattagtcaggtttcctaggacaaggaagagcttcagggaagagcagtggctaactcctgtaatcccaacacttggggaggccgaggcaggcagatcaactgaggtcaggagttgaagaccagcctggccaacatggtgaaagcccatctctactaaaaatacaaaaattagctgggcatggtggtgtactcctgtagtcccagctactcaggaggctgaagcgggagagtcacgtgaacccgggaagcagagtgagctgagcacacactactatactccaggctgggtaacaaagcgagactcccatctcccaaaaagcagttctggaatagaactcacgctagatggatagaccagtggacactttggaaccttggggctggggaggaaactgcccatccagtaaacccccaaaaagccatttgttctgcactacgtatattgcttattctttctggtcttaagtacttgcctctcaacctccctttttagtaaaagacaaggccacgtgagaggcgggactatcaacattgtgatgaatttacttgaaacccagtgcccaaaatcaatgtaggtagccaagtccaaaaacctgttctagtccaactagtgaaatcaaactgtgatacttggataagcttagaaggaaacgtgaagaatacgtagctgctttgggtttactctggttcagttgggctgttgaaatcttaacatccttgggcttatcacctactgcttgtcagccctgttccatgtccaggggatgggggtggtgacaatccagttccaagaccctcatgctctagagaggaaggtggccagccagggttgtaactacgatgaaaaagcagtgggagggtctcctatgaggcaagcctaaggacaaaaaggaaggccttgcagcctgtattctggataaggaattaaaagctcagttaattgaagccca

SEQ ID NO: 155539 - DNA, 1877 bp, Artificial Sequence
  derived and/or modified sequence
ctcagtctttcgcctcagtctcgagctctcgctggccttcgggtgtacgtgctccgggatcttcagcacccgcggccgccatcgccgtcgcttggcttcttctggactcatctgcgccacttgtccgcttcacactccgccgccatcatggtgaagctcgcgaaggcaggtaaaaatcaaggtgaccccaagaaaatggctcctcctccaaaggaggtagaagaagatagtgaagatgaggaaatgtcagaagatgaagaagatgatagcagtggagaagaggtcgtcatacctcagaagaaaggcaagaaggctgctgcaacctcagcaaagaaggtggtcgtttccccaacaaaaaaggttgcagttgccacaccagccaagaaagcagctgtcactccaggcaaaaaggcagcagcaacacctgccaagaagacagttacaccagccaaagcagttaccacacctggcaagaagggagccacaccaggcaaagcattggtagcaactcctggtaagaagggtgctgccatcccagccaagggggcaaagaatggcaagaatgccaagaaggaagacagtgatgaagaggaggatgatgacagtgaggaggatgaggaggatgacgaggacgaggatgaggatgaagatgaaattgaaccagcagcgatgaaagcagcagctgctgcccctgcctcagaggatgaggacgatgaggatgacgaagatgatgaggatgggaaaagtaaagggattgcttatattgaatttaagacagaagctgatgcagagaaaacctttgaagaaaagcagggaacagagatcgatgggcgatctatttccctgtactatactggagagaaaggtcaaaatcaagactatagaggtggaaagaatagcacttggagtggtgaatcaaaaactctggttttaagcaacctctcctacagtgcaacagaagaaactcttcaggaagtatttgagaaagcaacttttatcaaagtaccccagaaccaaaatggcaaatctaaagggtatgcatttatagagtttgcttcattcgaagacgctaaagaagctttaaattcctgtaataaaagggaaattgagggcagagcaatcaggctggagttgcaaggacccaggggatcacctaatgccagaagccagccatccaaaactctgtttgtcaaaggcctgtctgaggataccactgaagagacattaaaggagtcatttgacggctccgttcgggcaaggatagttactgaccgggaaactgggtcctccaaagggtttggttttgtagacttcaacagtgaggaggatgccaaagctgccaaggaggccatggaagacggtgaaattgatggaaataaagttaccttggactgggccaaacctaagggtgaaggtggcttcgggggtcgtggtggaggcagaggcggctttggaggacgaggtggtggtagaggaggccgaggaggatttggtggcagaggccggggaggctttggagggcgaggaggcttccgaggaggcagaggaggaggaggtgaccacaagccacaaggaaagaagacgaagtttgaatagcttctgtccctctgctttcccttttccatttgaaagaaaggactctggggtttttactgttacctgatcaatgacagagccttctgaggacattccaagacagtatacagtcctgtggtctccttggaaatccgtctagttaacatttcaagggcaataccgtgttggttttgactggatattcatataaactttttaaagagttgagtgatagagctaacccttatctgtaagttttgaatttatattgtttcatcccatgtacaaaaccattttttcct

SEQ ID NO: 155540 - DNA, 2380 bp, Artificial Sequence
  derived and/or modified sequence
agtctcgagctctcgctggccttcgggtgtacgtgctccgggatcttcagcacccgcggccgccatcgccgtcgcttggcttcttctggactcatctgcgccacttgtccgcttcacactccgccgccatcatggtgaagctcgcgaaggcaggtaaaaatcaaggtgaccccaagaaaatggctcctcctccaaaggaggtagaagaagatagtgaagatgaggaaatgtcagaagatgaagaagatgatagcagtggagaagagctaaatgatgacttttatcaaactaccatgcacactctttggaagaaaggcaagaaggctgctgcaacctcagccatcccagccaagggggcaaagaatggcaagaatgccaagaaggaagacagtgatgaagaggaggatgatgacagtgaggaggatgaggaggatgacgaggacgaggatgaggatgaagatgaaattgaaccagcagcgatgaaagcagcagctgctgcccctgcctcagaggatgaggacgatgaggatgacgaagatgatgaggatgacgatgacgatgaggaagatgatgatgatgatgaagatgatgaggaggaggaagaagaggaggaggaagagcctgtcaaagaagcacctggaaaacgaaagaaggaaatggccaaacagaaagcagctcctgaagccaagaaacagaaagtggaaggcacagaaccgactacggctttcaatctctttgttggaaacctaaactttaacaaatctgctcctgaattaaaaactggtatcagcgatgtttttgctaaaaatgatcttgctgttgtggatgtcagaattggtatgactaggaaatttggttatgtggattttgaatctgctgaagacctggagaaagcgttggaactcactggtttgaaagtctttggcaatgaaattaaactagagaaaccaaaaggaaaagacagtaagaaagagcgagatgcgagaacacttttggctaaaaatctcccttacaaagtcactcaggatgaattgaaagaagtgtttgaagatgctgcggagatcagattagtcagcaaggatgggaaaagtaaagggattgcttatattgaatttaagacagaagctgatgcagagaaaacctttgaagaaaagcagggaacagagatcgatgggcgatctatttccctgtactatactggagagaaaggtcaaaatcaagactatagaggtggaaagaatagcacttggagtggtgaatcaaaaactctggttttaagcaacctctcctacagtgcaacagaagaaactcttcaggaagtatttgagaaagcaacttttatcaaagtaccccagaaccaaaatggcaaatctaaagggtatgcatttatagagtttgcttcattcgaagacgctaaagaagctttaaattcctgtaataaaagggaaattgagggcagagcaatcaggctggagttgcaaggacccaggggatcacctaatgccagaagccagccatccaaaactctgtttgtcaaaggcctgtctgaggataccactgaagagacattaaaggagtcatttgacggctccgttcgggcaaggatagttactgaccgggaaactgggtcctccaaagggtttggttttgtagacttcaacagtgaggaggatgccaaagctgccaaggaggccatggaagacggtgaaattgatggaaataaagttaccttggactgggccaaacctaagggtgaaggtggcttcgggggtcgtggtggaggcagaggcggctttggaggacgaggtggtggtagaggaggccgaggaggatttggtggcagaggccggggaggctttggagggcgaggaggcttccgaggaggcagaggaggaggaggtgaccacaagccacaaggaaagaagacgaagtttgaatagcttctgtccctctgctttcccttttccatttgaaagaaaggactctggggtttttactgttacctgatcaatgacagagccttctgaggacattccaagacagtatacagtcctgtggtctccttggaaatccgtctagttaacatttcaagggcaataccgtgttggttttgactggatattcatataaactttttaaagagttgagtgatagagctaacccttatctgtaagttttgaatttatattgtttcatcccatgtacaaaaccattttttcctacaaatagtttgggttttgttgttgtttcttttttttgttttgtttttgttttttttttttttgcgttcgtggggttgtaaaagaaaagaaagcagaatgttttatcatggtttttgcttcagcggctttaggacaaattaaaagtcaactctggtgcc

SEQ ID NO: 155541 - DNA, 2133 bp, Artificial Sequence
  derived and/or modified sequence
atggtcaagctagccaaagctggcaaaaaccaaggagaccccaaaaagatggcaccccctcctaaagaggtggaggaggatagcgaggatgaggagatgtctgaggatgaggaggacgatagttctggagaagaggtagtgatccctcaaaagaaaggaaaaaaagctgctgcaacatctgccaagaaggtggtagtgagtccgaccaagaaggtcgctgtggctacacctgcaaagaaggccgcagttacaccaggaaaaaaagcggcagctacaccagccaaaaagacggttacgccggctaaggctgtcaccacccccggtaaaaaaggcgcaacccctggcaaggccctggttgctacaccgggaaaaaagggggctgcaatcccggctaaaggagctaagaacggtaagaacgctaaaaaggaggattctgatgaggaagaggacgatgattctgaggaagacgaagaggatgacgaagatgaggacgaggatgaggacgagatcgaacccgcagctatgaaagccgcagccgctgcccctgcctctgaggatgaggacgatgaggatgacgaggatgatgaggacgacgatgatgatgaggaggacgattcagaggaagaagccatggagactacacctgccaaaggaaagaaggcggcaaaagtcgtgcccgtgaaggcaaaaaacgtggccgaggatgaggacgaggaagaagatgacgaagatgaggatgacgacgacgacgaggatgacgaggatgatgatgacgaagacgatgaagaggaagaagaagaggaagaagaagagcctgtgaaggaggccccaggaaaacgaaaaaaggaaatggcaaaacaaaaagccgcacctgaggccaaaaaacaaaaagtagaagggacagagccgacaacagccttcaatctcttcgttggaaacctaaactttaacaagtccgccccagaactgaagaccggaatcagcgacgtattcgccaagaacgacctcgccgttgtggatgtcaggattggaatgacacggaaattcggttacgtcgatttcgaatcggccgaagatctggagaaggctttagagctgacagggctgaaggttttcggcaacgagattaaactcgagaagcctaaggggaaggactccaaaaaggaaagagacgctcggacactgctagcaaagaatcttccttataaggtgacccaggatgaacttaaggaggtgtttgaagatgccgcagagattcgcttagtatcaaaagacgggaagtccaagggaattgcctacatagaatttaagactgaagcagacgctgaaaaaaccttcgaggagaaacaagggacagaaatagacgggaggagcatctcactttattataccggcgaaaagggccagaatcaggattatcgagggggtaaaaattcaacgtggtccggagaaagtaaaaccttggtgctgtcaaatctcagttattcagcaaccgaggaaacgctgcaggaggtattcgaaaaagccacattcatcaaagtcccacagaaccagaacgggaaatcaaagggctacgcttttatagaattcgctagtttcgaagatgccaaagaagccttgaatagctgcaataagcgagaaatcgagggcagagcaattaggctcgagctgcagggcccacgaggaagcccaaatgccaggtcacaaccgagcaagaccttattcgtgaaggggctatccgaagatactactgaagagacactcaaagaaagcttcgacggatctgtccgtgctcgcattgtgaccgaccgggagaccggctcctccaaaggattcggattcgtggacttcaactctgaagaagacgccaaagctgctaaggaagcaatggaagacggagagatagatggcaacaaggtgaccttggattgggctaagcctaaaggagagggaggattcggcggtcggggaggtggaaggggaggttttggcggtcgaggaggcggacgtggaggaaggggcggatttggaggacgcggaagaggaggattcgggggtagaggtggcttcaggggaggtcggggaggaggtggcgatcataagccccagggaaaaaaaaccaagttcgagtag

SEQ ID NO: 155542 - DNA, 1449 bp, Artificial Sequence
  derived and/or modified sequence
atggtgaaactggctaaagccggaaagaatcagggggatcccaaaaagatggcgcctccgccaaaggaggtggaggaggacagcgaagatgaggaaatgtccgaggacgaggaagacgactctagcggcgaggaggtggtaatcccgcaaaaaaagggtaagaaggccgctgcaaccagtgcaaaaaaggtggtcgtctcacccacaaagaaagtggccgttgcaacacccgcaaagaaagccgctgttactccagggaaaaaagcagccgctaccccagctaagaaaacagtcaccccagcaaaagctgtcacaacaccgggtaaaaaaggggcaaccccaggcaaggctttggtcgccacccccggaaagaaaggcgcagcgatcccagccaaaggggcaaagaatggaaagaatgccaaaaaagaggactcagatgaagaagaggatgacgattctgaggaggatgaagaggacgatgaagacgaagatgaggatgaggacgagatcgagcccgctgccatgaaagccgcagccgctgcccctgcatccgaggatgaagacgatgaggatgatgaggatgatgaggacggtaaaagcaagggaatcgcatatatcgaattcaagactgaagcagatgcagagaagacatttgaagagaagcagggcacagagattgacggccgaagcatcagtctgtactacactggcgagaaggggcagaaccaggattaccgaggcggaaagaattctacctggtcaggggagtctaagactctagtattgagtaatttgagctactcagctacagaggaaaccctgcaggaggtgttcgaaaaagctacctttataaaggtaccccaaaatcagaacgggaagtctaaaggatatgcatttatcgaatttgccagctttgaggacgcaaaagaagcgctgaattcctgcaacaagagagagatcgaaggcagagctatccgactagaactccaggggccacgaggcagtcctaacgccaggagccaacctagcaagacgctattcgtgaagggactttctgaggacacaaccgaagagactctcaaagagtcatttgacgggtctgtgcgggctcggatcgtcaccgatcgagagaccggctcatcgaagggctttggtttcgtggatttcaattctgaggaggatgctaaggccgctaaggaggcaatggaggacggggagattgacgggaataaagtgaccttagattgggcaaagccaaagggtgaaggcggatttgggggtaggggaggtggcagagggggtttcggcggacggggtggtggtcgcggagggaggggaggctttgggggacgcggtcgaggcggttttggaggtcggggaggctttcgcggagggcgaggaggaggaggcgatcataagccacagggaaagaagactaagtttgagtag

SEQ ID NO: 155543 - DNA, 1809 bp, Artificial Sequence
  derived and/or modified sequence
atggtgaaattggcaaaagccggaaaaaaccagggagatccaaagaagatggctcctcccccaaaggaggtcgaagaagacagcgaagatgaggaaatgagcgaagatgaagaagatgacagcagtggcgaggaattaaatgacgatttctatcagacaaccatgcacaccttatggaagaagggaaagaaggcagctgcaactagtgcaatcccggctaagggcgcaaagaatgggaagaacgccaagaaggaggactcagacgaggaggaggatgacgactccgaagaggacgaggaggacgatgaagacgaagatgaagacgaagatgagatcgagccggctgccatgaaggccgcagctgctgctccagccagcgaggacgaggacgacgaggacgatgaagacgatgaggacgatgatgacgatgaagaggatgacgatgatgatgaggatgacgaggaggaggaggaggaggaggaggaggaacccgtgaaggaagctccaggcaagcggaagaaggagatggctaaacaaaaagccgcaccagaagccaaaaagcagaaagtggaggggaccgaacccactacagcttttaacctattcgtcggaaacctgaactttaataaaagtgctcctgagttaaaaactggcatcagtgacgtgttcgcgaagaacgacctggccgtggtggacgtgcggatcgggatgaccagaaagttcgggtatgttgacttcgaaagcgctgaagacctggagaaagcgctggaactgaccggcttaaaggtttttggtaatgaaatcaagttggagaaacccaaagggaaagattctaagaaagaaagggatgccagaactttgcttgcaaagaatctgccatataaggtgacccaggacgagctaaaggaagtattcgaagacgcggctgaaatccgactggtgtctaaggatggaaagagcaagggtattgcatacattgagtttaagaccgaagcggacgcagaaaagacattcgaagagaaacaagggactgaaatcgacggtagatctatctctctatactatactggtgaaaagggccagaaccaagactatcggggaggtaaaaacagcacctggtctggtgagtccaaaaccttggtgctgagcaatctttcttattccgccaccgaggagacactacaggaggtatttgaaaaagcaacatttatcaaggtcccgcagaaccaaaacgggaagtccaaaggttatgcgttcatcgagtttgcatccttcgaagatgccaaagaggcgcttaactcctgcaacaagagggaaattgaagggagggccataaggctggagctgcagggtccccgtggaagcccaaacgccagatcacagcccagtaaaaccctctttgtgaaagggctttctgaggatactaccgaggagactctgaaggagagctttgatggttccgtcagagcgagaatcgtcaccgatagagaaaccggttcctccaaagggttcggcttcgtcgactttaactcagaggaagacgcaaaggccgctaaagaggccatggaggatggagagattgacggcaacaaagtcacactggattgggccaaacccaagggggaaggcggatttggagggagaggcggtggacgcggtggattcggagggaggggaggaggcagagggggaaggggtgggtttggcggaaggggcagggggggttttgggggaaggggaggtttcagagggggaaggggcggaggaggggatcataagccacaaggaaagaagaccaaatttgagtag

SEQ ID NO: 155544 - protein, 916 aa, Artificial Sequence
  derived and/or modified sequence
MSYTLDSLGNPSAYRRVTETRSSFSRVSGSPSSGFRSQSWSRGSPSTVSSSYKRSMLAPRLAYSSAMLSSAESSLDFSQSSSLLNGGSGPGGDYKLSRSNEKEQLQGLNDRFAGYIEKVHYLEQQNKEIEAEIQALRQKQASHAQLGDAYDQEIRELRATLEMVNHEKAQVQLDSDHLEEDIHRLKERFEEEARLRDDTEAAIRALRKDIEEASLVKVELDKKVQSLQDEVAFLRSNHEEEVADLLAQIQASHITVERKDYLKTDISTALKEIRSQLESHSDQNMHQAEEWFKCRYAKLTEAAEQNKEAIRSAKEEIAEYRRQLQSKSIELESVRGTKESLERQLSDIEERHNHDLSSYQDTIQQLENELRGTKWEMARHLREYQDLLNVKMALDIEIAAYRKLLEGEETRFSTFAGSITGPLYTHRPPITISSKIQKPKVEAPKLKVQHKFVEEIIEETKVEDEKSEMEEALTAITEELAVSMKEEKKEAAEEKEEEPEAEEEEVAAKKSPVKATAPEVKEEEGEKEEEEGQEEEEEEDEGAKSDQAEEGGSEKEGSSEKEEGEQEEGETEAEAEGEEAEAKEEKKVEEKSEEVATKEELVADAKVEKPEKAKSPVPKSPVEEKGKSPVPKSPVEEKGKSPVPKSPVEEKGKSPVPKSPVEEKGKSPVSKSPVEEKAKSPVPKSPVEEAKSKAEVGKGEQKEEEEKEVKEAPKEEKVEKKEEKPKDVPEKKKAESPVKEEAVAEVVTITKSVKVHLEKETKEEGKPLQQEKEKEKAGGEGGSEEEGSDKGAKGSRKEDIAVNGEVEGKEEVEQETKEKGSGREEEKGVVTNGLDLSPADEKKGGDKSEEKVVVTKTVEKITSEGGDGATKYITKSVTVTQKVEEHEETFEEKLVSTKKVEKVTSHAIVKEVTQSD

SEQ ID NO: 155545 - protein, 877 aa, Artificial Sequence
  derived and/or modified sequence
MSYTLDSLGNPSAYRRVTETRSSFSRVSGSPSSGFRSQSWSRGSPSTVSSSYKRSMLAPRLAYSSAMLSSAESSLDFSQSSSLLNGGSGPGGDYKLSRSNEKEQLQGLNDRFAGYIEKVHYLEQQNKEIEAEIQALRQKQASHAQLGDAYDQEIRELRATLEMVNHEKAQVQLDSDHLEEDIHRLKERFEEEARLRDDTEAAIRALRKDIEEASLVKVELDKKVQSLQDEVAFLRSNHEEEVADLLAQIQASHITVERKDYLKTDISTALKEIRSQLESHSDQNMHQAEEWFKCRYAKLTEAAEQNKEAIRSAKEEIAEYRRQLQSKSIELESVRGTKESLERQLSDIEERHNHDLSSYQDTIQQLENELRGTKWEMARHLREYQDLLNVKMALDIEIAAYRKLLEGEETRFSTFAGSITGPLYTHRPPITISSKIQKPKVEAPKLKVQHKFVEEIIEETKVEDEKSEMEEALTAITEELAVSMKEEKKEAAEEKEEEPEAEEEEVAAKKSPVKATAPEVKEEEGEKEEEEGQEEEEEEDEGAKSDQAEEGGSEKEGSSEKEEGEQEEGETEAEAEGEEAEAKEEKKVEEKSEEVATKEELVADAKVEKPEKAKSPVPKSPVEEKGKSPVSKSPVEEKAKSPVPKSPVEEAKSKAEVGKGEQKEEEEKEVKEAPKEEKVEKKEEKPKDVPEKKKAESPVKEEAVAEVVTITKSVKVHLEKETKEEGKPLQQEKEKEKAGGEGGSEEEGSDKGAKGSRKEDIAVNGEVEGKEEVEQETKEKGSGREEEKGVVTNGLDLSPADEKKGGDKSEEKVVVTKTVEKITSEGGDGATKYITKSVTVTQKVEEHEETFEEKLVSTKKVEKVTSHAIVKEVTQSD

SEQ ID NO: 155546 - DNA, 2751 bp, Artificial Sequence
  derived and/or modified sequence
atgagctacaccctggacagcctgggcaaccccagcgcctacagaagagtgaccgagaccagaagcagcttcagcagagtgagcggcagccccagcagcggcttcagaagccagagctggagcagaggcagccccagcaccgtgagcagcagctacaagagaagcatgctggcccccagactggcctacagcagcgccatgctgagcagcgccgagagcagcctggacttcagccagagcagcagcctgctgaacggcggcagcggccccggcggcgactacaagctgagcagaagcaacgagaaggagcagctgcagggcctgaacgacagattcgccggctacatcgagaaggtgcactacctggagcagcagaacaaggagatcgaggccgagatccaggccctgagacagaagcaggccagccacgcccagctgggcgacgcctacgaccaggagatcagagagctgagagccaccctggagatggtgaaccacgagaaggcccaggtgcagctggacagcgaccacctggaggaggacatccacagactgaaggagagattcgaggaggaggccagactgagagacgacaccgaggccgccatcagagccctgagaaaggacatcgaggaggccagcctggtgaaggtggagctggacaagaaggtgcagagcctgcaggacgaggtggccttcctgagaagcaaccacgaggaggaggtggccgacctgctggcccagatccaggccagccacatcaccgtggagagaaaggactacctgaagaccgacatcagcaccgccctgaaggagatcagaagccagctggagagccacagcgaccagaacatgcaccaggccgaggagtggttcaagtgcagatacgccaagctgaccgaggccgccgagcagaacaaggaggccatcagaagcgccaaggaggagatcgccgagtacagaagacagctgcagagcaagagcatcgagctggagagcgtgagaggcaccaaggagagcctggagagacagctgagcgacatcgaggagagacacaaccacgacctgagcagctaccaggacaccatccagcagctggagaacgagctgagaggcaccaagtgggagatggccagacacctgagagagtaccaggacctgctgaacgtgaagatggccctggacatcgagatcgccgcctacagaaagctgctggagggcgaggagaccagattcagcaccttcgccggcagcatcaccggccccctgtacacccacagaccccccatcaccatcagcagcaagatccagaagcccaaggtggaggcccccaagctgaaggtgcagcacaagttcgtggaggagatcatcgaggagaccaaggtggaggacgagaagagcgagatggaggaggccctgaccgccatcaccgaggagctggccgtgagcatgaaggaggagaagaaggaggccgccgaggagaaggaggaggagcccgaggccgaggaggaggaggtggccgccaagaagagccccgtgaaggccaccgcccccgaggtgaaggaggaggagggcgagaaggaggaggaggagggccaggaggaggaggaggaggaggacgagggcgccaagagcgaccaggccgaggagggcggcagcgagaaggagggcagcagcgagaaggaggagggcgagcaggaggagggcgagaccgaggccgaggccgagggcgaggaggccgaggccaaggaggagaagaaggtggaggagaagagcgaggaggtggccaccaaggaggagctggtggccgacgccaaggtggagaagcccgagaaggccaagagccccgtgcccaagagccccgtggaggagaagggcaagagccccgtgcccaagagccccgtggaggagaagggcaagagccccgtgcccaagagccccgtggaggagaagggcaagagccccgtgcccaagagccccgtggaggagaagggcaagagccccgtgagcaagagccccgtggaggagaaggccaagagccccgtgcccaagagccccgtggaggaggccaagagcaaggccgaggtgggcaagggcgagcagaaggaggaggaggagaaggaggtgaaggaggcccccaaggaggagaaggtggagaagaaggaggagaagcccaaggacgtgcccgagaagaagaaggccgagagccccgtgaaggaggaggccgtggccgaggtggtgaccatcaccaagagcgtgaaggtgcacctggagaaggagaccaaggaggagggcaagcccctgcagcaggagaaggagaaggagaaggccggcggcgagggcggcagcgaggaggagggcagcgacaagggcgccaagggcagcagaaaggaggacatcgccgtgaacggcgaggtggagggcaaggaggaggtggagcaggagaccaaggagaagggcagcggcagagaggaggagaagggcgtggtgaccaacggcctggacctgagccccgccgacgagaagaagggcggcgacaagagcgaggagaaggtggtggtgaccaagaccgtggagaagatcaccagcgagggcggcgacggcgccaccaagtacatcaccaagagcgtgaccgtgacccagaaggtggaggagcacgaggagaccttcgaggagaagctggtgagcaccaagaaggtggagaaggtgaccagccacgccatcgtgaaggaggtgacccagagcgactag

SEQ ID NO: 155547 - DNA, 2751 bp, Artificial Sequence
  derived and/or modified sequence
atgagttacactttggatagcctggggaacccgtcggcctatagaagggttacggaaactcgatccagcttcagtagagtgagcggatccccttccagcggtttccgaagtcagtcatggtctcgggggtcgcctagcactgtgagtagctcctacaaacgctccatgctggcgcctcggctggcctatagctccgcaatgctctccagcgcagaaagcagtctagattttagccagagctcatccctactcaatggggggtcaggaccaggcggagactataaactcagcaggagcaacgagaaagagcagctccaaggcctgaatgaccgattcgcggggtacatcgaaaaggtgcactatctcgaacagcagaataaggagattgaggcggaaatccaggctctaagacaaaagcaggctagccacgcccagctcggcgacgcctatgaccaggaaatacgggagctccgcgccactcttgaaatggtgaatcacgaaaaggcccaagtacagctggacagtgatcatctggaggaggatatccaccggctcaaggagcgtttcgaagaggaggctcgccttagagatgataccgaggccgctatccgggcactaagaaaggatatcgaggaagctagtctcgtgaaagttgagctagacaagaaggtgcagtcgttacaggacgaggttgccttcctgagaagcaaccacgaggaggaggtagccgatttgttggcacagatccaggcctctcacattactgtggagcgaaaggactatctcaagaccgacatttccaccgccctgaaggagatcagaagtcagctcgagtcccatagtgatcagaatatgcaccaagccgaagagtggtttaaatgtaggtatgccaagttgaccgaagcagccgagcagaacaaagaggcaataaggagcgcaaaggaagaaatcgccgagtacagacgccaacttcagagcaagagtattgagcttgagagtgtccggggaacaaaagaatcactggaaaggcaactgtcagacatagaggagcgtcacaaccacgatctgtcaagttatcaggacacaatccagcagctcgagaatgagctcagagggactaagtgggaaatggccaggcacctgcgcgaataccaagaccttctcaatgtaaagatggctctggatatcgagattgccgcctaccggaagctcctagaaggagaagagacaagattttcaaccttcgcaggctccattaccgggcccttgtatactcacaggccccccattacaataagctcaaagatccagaagccgaaggtcgaagctccgaaacttaaggtccagcacaagttcgtggaggagatcatcgaggagacgaaggtggaggatgagaagtccgagatggaagaggctttgactgctatcactgaggagcttgctgtcagtatgaaggaagaaaaaaaagaagctgctgaagagaaagaggaggaaccagaggcagaagaagaggaggttgctgccaaaaaatctccagtgaaggcaacagcgcccgaggtgaaagaggaagaaggtgagaaggaggaagaagagggccaagaggaagaagaagaggaggatgagggcgccaagtccgatcaggcggaagaaggagggagtgagaaagaaggctcctcagaaaaggaggagggcgaacaggaagaaggagaaactgaggctgaggcagaaggtgaggaagcagaggccaaagaagagaagaaagtggaggagaagagcgaagaggtcgctacgaaggaagagctggttgccgatgctaaggtagaaaagccagagaaggcaaaaagtcctgtaccaaagagtcccgtggaggaaaaaggcaagagtcctgtccctaagtctccagtagaggagaagggtaagtccccggttcctaaatcccccgttgaagagaaaggcaagagcccagttccaaagtccccagtggaggagaagggaaagagtccagtgagcaagagtcctgtggaagagaaagccaagtccccagtgccaaagagtccggtggaagaggccaagagtaaagccgaggtcggcaaaggggaacagaaagaggaggaagagaaagaagtgaaggaagctccaaaagaagaaaaagttgaaaaaaaggaagaaaagcctaaggatgtccccgagaagaagaaggccgaatcacccgtgaaggaggaggccgtcgctgaagtcgttaccatcacgaaatctgtgaaagtacacctggaaaaagagacaaaggaggaggggaagcccctgcaacaggaaaaagagaaagaaaaggccggaggcgagggtgggagtgaggaagaaggatcagataagggggccaagggttcccgcaaggaggacattgccgtcaacggcgaagtggagggaaaggaagaagtggaacaggaaacaaaggagaaggggtctggccgggaggaggaaaaaggagtggttactaatggcctcgacctttcgccagctgacgagaaaaagggtggcgacaagagtgaagagaaggttgtggttactaaaaccgtggagaagatcacctcagagggaggggatggggccaccaagtatatcaccaaaagtgttacagttacacagaaagtcgaagaacacgaggaaacgttcgaagagaagctggttagcacaaaaaaggtggagaaggtcactagccatgccattgtgaaagaggtgacacagtcagactag

SEQ ID NO: 155548 - DNA, 2751 bp, Artificial Sequence
  derived and/or modified sequence
atgagctacaccctggacagcctgggcaaccccagcgcctacagaagagtgacagagaccaggagcagcttcagccgggtgtctggcagccccagcagcggcttccgcagccagagctggagccggggcagccccagcacagtgagcagcagctacaagaggtccatgctggccccccggctggcctacagcagcgccatgctgagcagcgctgagagcagcctggacttcagccagagcagcagcctgctgaatggaggcagcggccctggaggagactacaagctgagccgcagcaatgagaaggagcagctgcagggcctgaatgacagatttgctggctacatcgagaaggtgcactacctggagcagcagaacaaggagattgaagctgagatccaggccctgcggcagaagcaggccagccacgcccagctgggagatgcctatgaccaggagatccgggagctgcgggccaccctggagatggtgaaccacgagaaggcccaggtgcagctggacagcgaccacctggaggaggacatccaccggctgaaggagagatttgaggaggaggcccggctgagagatgacacagaagctgccatccgggccctgaggaaggacatcgaggaggccagcctggtgaaggtggagctggacaagaaggtgcagagcctgcaggatgaggtggccttcctgcggagcaaccacgaggaggaggtggccgacctgctggcccagatccaggccagccacatcaccgtggagaggaaggactacctgaagacagacatcagcacagccctgaaggagatccgcagccagctggagagccacagcgaccagaacatgcaccaggccgaggagtggttcaagtgccgctatgccaagctgacagaggccgctgagcagaacaaggaggccatccgcagcgccaaggaggagattgctgagtaccgccggcagctgcagagcaagagcattgagctggagagcgtgcggggcaccaaggagagcctggagcggcagctgagtgacatcgaggagcggcacaaccacgacctgagcagctaccaggacaccatccagcagctggagaatgagctgcggggcaccaagtgggagatggcccggcacctgcgggagtaccaggacctgctgaatgtgaagatggccctggacatcgagattgctgcctacaggaagctgctggagggggaggagacccgcttcagcacctttgctggcagcatcaccggccccctgtacacccaccggccccccatcaccatcagcagcaagatccagaagcccaaggtggaggcccccaagctgaaggtgcagcacaagtttgtggaggagatcatcgaggagaccaaggtggaggatgagaagtctgagatggaggaggccctgacagccatcacagaggagctggccgtgtccatgaaggaggagaagaaggaggccgctgaggagaaggaggaggagcctgaggccgaggaggaggaggtggccgccaagaagagccctgtgaaggccacagcccctgaggtgaaggaggaggagggggagaaggaggaggaggagggccaggaggaggaggaggaggaggatgagggcgccaagagtgaccaggccgaggagggcggcagcgagaaggagggcagcagcgagaaggaggagggggagcaggaggagggggagacagaagctgaggccgagggggaggaggccgaggccaaggaggagaagaaggtggaggagaagtctgaggaggtggccaccaaggaggagctggtggctgatgccaaggtggagaagccagagaaggccaagagccctgtgcccaagagccctgtggaggagaagggcaagagccctgtgcccaagagccctgtggaggagaagggcaagagccctgtgcccaagagccctgtggaggagaagggcaagagccctgtgcccaagagccctgtggaggagaagggcaagagccctgtgtccaagagccctgtggaggagaaggccaagagccctgtgcccaagagccctgtggaggaggccaagagcaaggccgaggtgggcaagggggagcagaaggaggaggaggagaaggaggtgaaggaggcccccaaggaggagaaggtggagaagaaggaggagaagcccaaggatgtgcctgagaagaagaaggccgagagccctgtgaaggaggaggccgtggccgaggtggtgaccatcaccaagtctgtgaaggtgcacctggagaaggagaccaaggaggagggcaagcccctgcagcaggagaaggagaaggagaaggccggcggggagggcggcagcgaggaggagggcagtgacaagggggccaagggcagcaggaaggaggacattgctgtgaatggagaggtggagggcaaggaggaggtggagcaggagaccaaggagaagggcagcggccgggaggaggagaagggcgtggtgaccaacggcctggacctgagccctgcagatgagaagaagggcggggacaagtctgaggagaaggtggtggtgaccaagacagtggagaagatcaccagcgagggcggagatggagccaccaagtacatcaccaagtctgtgacagtgacccagaaggtggaggagcacgaggagacctttgaggagaagctggtgtccaccaagaaggtggagaaggtgaccagccacgccatcgtgaaggaggtgacccagagcgactag

SEQ ID NO: 155549 - DNA, 2751 bp, Artificial Sequence
  derived and/or modified sequence
atgagctacaccctggacagcctgggcaaccccagcgcctaccggagggtgacagagaccaggagtagcttctcccgcgtctctggttcaccttcaagcggattccgatcgcaatcatggagtcgcggttccccttctactgtgtcgtcgtcttacaagagatcaatgctagccccccgtctggcctacagcagcgcaatgctgtcaagcgccgaaagctcgctcgacttttcgcagtcgtcctctcttctcaatgggggcagtggcccaggaggggactataagttgagtcgttccaatgaaaaagagcagctgcagggcctgaatgacaggttcgctggttacatcgagaaggtgcattatctggagcaacagaacaaagaaatagaggcggagattcaggctcttagacagaaacaggccagtcacgcccagcttggagatgcatatgatcaggaaattagagaacttcgggccaccctggaaatggtgaaccacgagaaagcccaggtacagcttgactcagaccaccttgaggaagatatacatcggctgaaggagagatttgaagaggaggcgcggctgcgcgacgacactgaagcagctatccgggccctgagaaaggatatcgaggaggctagccttgtgaaggttgagctcgataaaaaggtccagagtctgcaggatgaagtcgcctttctgcggtcgaaccacgaagaggaggtggcagacctgctggctcagatacaggctagtcacataacagttgagagaaaggactacctcaaaaccgatatctcgacggccctgaaggagatccggagccaactggagagtcacagtgaccagaacatgcaccaggcagaagaatggtttaaatgcaggtacgccaaactgaccgaagccgctgagcagaataaagaagctatcagatccgcaaaagaggaaatcgccgaatatagacgacagctacaatccaagtccatcgagctcgaatcagtgcggggtaccaaggaaagtctggaaaggcagcttagcgatatagaggaacgccacaatcacgatctttcctcctatcaggatacaatacagcaacttgaaaatgagcttagaggaaccaaatgggaaatggcaaggcacctcagagaatatcaggatctgctgaacgtaaagatggctctggatatcgagatagcggcttataggaaactccttgagggcgaagagaccaggttcagtacatttgcgggaagcatcaccggccccctgtatacacatcgcccccctattacgatttcgtctaagatacaaaaaccgaaggtggaggcccccaagctgaaagtccagcacaaatttgttgaggagataatcgaggagaccaaggtagaagatgagaaatctgagatggaggaggccttaactgcaattacggaggagctcgccgtatcaatgaaggaagagaaaaaggaggcagctgaagagaaggaggaagagcctgaggccgaggaggaggaggtagctgccaagaaatcaccggtaaaggctaccgctcctgaagttaaggaggaagaaggagagaaagaggaggaggagggacaggaagaagaggaagaggaggatgaaggagccaaaagtgatcaggctgaagagggtggatccgaaaaggagggtagctccgagaaggaggaaggtgaacaggaagagggtgagacagaggcagaggccgaaggtgaggaggcggaggccaaggaggagaagaaagttgaggagaagagcgaggaagttgcaacaaaggaggagctggttgccgacgccaaagtcgaaaagcctgaaaaagctaaatcccctgtgcccaaatcaccagttgaagagaaggggaagtcccccgtaccaaaaagtcccgtggaagaaaaaggtaagtcccccgtaccaaaatcccctgtcgaggaaaaaggcaagagccccgtgccaaaatcccccgtggaagagaagggtaagtccccagtatcaaagtcaccggttgaggaaaaggccaagtccccagtgccgaagtcacccgtggaggaagccaaatctaaagctgaagtgggtaagggagaacagaaagaggaggaggagaaagaagtgaaagaagcaccgaaggaagaaaaagtcgaaaagaaagaggagaagccaaaagacgtgcctgagaagaagaaggcagagtctccggttaaggaggaagccgttgccgaagtggtgacgatcacaaagtccgtgaaagtgcatctggagaaagagactaaagaagaagggaaaccgctgcaacaggagaaagaaaaggagaaggccggcggggaaggtggatcagaagaggagggaagtgataaaggggccaagggtagcaggaaggaagatatagcagttaacggcgaggttgaaggaaaggaagaagtggagcaggagacgaaggagaagggaagtgggcgggaggaggaaaaaggcgtggtgacaaatggactagatctgagtcctgctgatgagaaaaagggcggagataaaagcgaggagaaggtcgtggtgacaaagaccgtcgaaaagattacgtcagagggaggggatggggccaccaaatacataaccaaatcggtgaccgtgactcaaaaggtcgaggaacatgaagaaacctttgaggagaaactagtatcaacaaagaaggttgagaaggttacgtcgcacgcgattgtcaaagaggttacccagtcggactag

SEQ ID NO: 155550 - DNA, 2751 bp, Artificial Sequence
  derived and/or modified sequence
atgtcctacactctcgacagcctggggaatccttctgcctataggagagtgaccgagacacgttcctcctttagccgggtttccgggagcccttcctcagggttccggagtcagagctggagcagaggatcgccaagcacagtgagctcttcatacaagagatctatgctggcgccaaggcttgcatactctagcgctatgctctcttcagcagaatcctccctggatttctcccaatcttcaagtttgttgaacggaggctctgggccaggtggtgactacaaactcagtcgcagcaacgagaaagagcagttgcaagggttgaacgataggtttgccggatatatcgagaaggtacactatttagaacagcagaacaaagaaattgaggcagaaatacaggctctgcggcagaagcaggcctcacatgcccagttgggtgacgcttatgatcaggaaatccgcgagctgcgagcaaccctggaaatggttaatcacgagaaagcgcaggtgcaactggatagcgaccatttggaagaggatatccacaggctgaaagagaggtttgaagaggaggcacgtctccgcgatgataccgaggccgctatacgggctttgagaaaggacattgaggaagcatccctcgtcaaagttgagctggataagaaggtccagagcctgcaggacgaggtcgccttcctgcgttctaatcacgaagaagaggtggctgacctcctggcacaaatccaagccagccatatcactgtggaacggaaggattatctcaaaacggacatatctactgcactcaaagagatcagatcacagctcgagtcccatagtgaccagaacatgcatcaggctgaggagtggtttaagtgtcgctacgcaaagctgactgaggctgccgaacagaacaaagaagccatccggtccgcgaaagaagagatcgcagagtacaggagacaattgcagagcaaatctatagagttagaaagcgtcaggggcactaaagagtctctggaaaggcagctgagcgatatcgaggaaaggcacaatcatgatttgagctcataccaggataccatccaacaacttgaaaacgaactgcgtgggaccaagtgggaaatggctcggcacctgagggagtatcaggacttgctcaacgtgaaaatggcactggacatcgagattgctgcctaccggaaacttctcgaaggggaagagacgaggttctccacctttgcaggaagcattacggggccactgtatacccaccgccctcctattacaatcagcagcaagattcaaaagcccaaagtggaagctcccaaactgaaagtccagcacaagttcgttgaagagatcatagaggagaccaaggtggaggatgaaaagtcagagatggaggaggccttgaccgcgattacagaagagctggctgtctcaatgaaggaagagaaaaaagaggctgccgaagaaaaagaggaggaacctgaagccgaagaggaggaggtagctgccaaaaaatcccctgtcaaagcgaccgctcctgaggtgaaggaggaggaaggcgagaaggaagaagaggagggccaggaggaggaggaggaggaggatgagggagccaaaagtgaccaagcagaggagggcggaagcgagaaggaggggagttccgaaaaagaggaaggcgaacaagaagaaggcgagactgaggcagaagccgagggagaagaagccgaggctaaggaggaaaaaaaggtggaggaaaagagcgaagaggtagcaaccaaggaggaactcgtggcggatgccaaagttgaaaagccagagaaggccaagagcccggtgcccaagtcacccgtggaggagaaaggcaagtctcctgtgccaaaatccccagtggaagaaaagggcaagtccccagtgccaaagagtccagttgaggagaaagggaaatctcccgtaccaaagtcgcccgtggaggaaaagggaaagtcccccgttagcaaatcaccggtggaagaaaaagctaagagccccgtgccgaaatctccagtggaggaggctaagtctaaagcagaagtcggcaagggagaacagaaagaggaggaggagaaagaggtcaaggaggctcccaaggaggaaaaagtcgagaaaaaagaggagaaaccaaaggacgtacccgagaagaaaaaagccgaatcgccagttaaagaggaagcagtggccgaagtagtgacaatcactaagagtgtaaaagttcacctcgaaaaggagacaaaagaggagggaaagcccctacagcaggagaaggagaaggagaaagccggtggggaggggggttctgaggaagagggttctgataagggagcaaagggcagcaggaaagaagacattgctgttaatggcgaggtcgagggtaaggaggaggtggaacaggagactaaagaaaaaggcagtgggagagaggaggagaaaggggtcgtgaccaacggactggacctttcaccagccgatgaaaagaagggcggagacaagagtgaagagaaggtggtagttactaagactgtggagaagattacctctgagggaggcgatggcgcaaccaaatacattaccaaaagcgttacggtcactcagaaagtggaagagcatgaagagacatttgaggagaagctggtcagcacaaagaaggtggagaaagtgacctcccacgccatagtcaaagaagtaactcagtccgactag

SEQ ID NO: 155551 - DNA, 2634 bp, Artificial Sequence
  derived and/or modified sequence
atgagttacaccctggattcactcgggaacccaagtgcctataggcgcgtgactgagacacgctcctctttctcgagagtttctgggagtccatcaagcgggtttaggtcgcagtcatggagtagaggatccccaagtactgtcagtagctcgtataagaggtctatgctggcacctcggcttgcgtattctagtgcgatgctgtcctccgccgaatcatctcttgatttctctcagagcagttccctcctgaatggggggtcaggacccggcggagattataagctctcacggagcaacgagaaagagcaactgcagggtcttaacgacagattcgcaggttatattgaaaaggtccattacctggagcagcaaaataaagaaatagaagctgagatccaggctctgcgccagaaacaggccagccatgcccagttgggggatgcctatgaccaagaaataagagaacttcgggcaacactagagatggtgaaccatgagaaggctcaggtccagctggattctgaccacctggaggaggacatacacaggttgaaggagcgatttgaagaagaggcaaggctgcgcgatgacaccgaggccgcaattagagccctccgcaaggacattgaagaagcgtctcttgtcaaggttgaactggacaagaaagtgcagtctctccaagacgaggtggctttcctgcgctcgaatcacgaggaggaagtggcagatctgctggcacagatacaggctagccatataacggtagagagaaaggactatctgaagaccgacattagcaccgccctgaaagaaattcgcagccaattagaaagccattcagatcagaacatgcatcaagcagaagagtggtttaaatgccgctacgctaagctgacagaggccgctgagcagaataaagaagcaatcagatcagcaaaagaagaaatcgccgaatatcggaggcagctgcagagcaagtctatagagctggagtcagtgagaggaaccaaggagtctctcgagcggcagctgtccgatatcgaagaacgccacaaccacgatctttcttcctaccaggacacaattcaacaactcgaaaatgagctacgggggaccaaatgggagatggccagacacctgagggaataccaagacctgctcaatgtgaaaatggctctagacattgagattgccgcatatcgtaaacttctggagggggaagagacgcgcttctccaccttcgccggttcgattacagggcctctttatactcataggccacctattaccatctcttccaaaatccagaaaccaaaggtggaggcccctaaacttaaggttcagcataagttcgtggaagaaataatcgaagagacaaaggttgaagatgaaaagagtgaaatggaggaagctttgactgccattacagaagagttggcagtgtcaatgaaagaggagaaaaaggaggccgccgaggaaaaggaggaggaacccgaggctgaggaggaggaggttgccgccaagaaatccccagtcaaagctactgctcctgaggtgaaggaggaggaaggggagaaagaggaggaagaggggcaggaggaggaggaggaggaagacgagggcgctaagtccgaccaggcagaagagggtgggtcagaaaaggaaggatcatctgaaaaggaggagggggaacaagaagagggggagacagaggcggaagccgagggcgaagaggccgaggcgaaagaggagaagaaagtggaagaaaagtctgaggaagtcgctacaaaagaagagctggtcgccgacgctaaggtggagaaaccggagaaggccaagagtccggtccccaagagcccggtggaagaaaaaggaaaatccccagtgtctaagtcaccggtcgaggagaaggcaaaatctcccgtgccaaagtcaccagtcgaagaggccaaatccaaggccgaggttggtaaaggcgaacagaaagaggaagaggagaaagaggtgaaggaggctcccaaggaggagaaggtggagaagaaagaagagaaacccaaggatgtccccgaaaagaagaaagcggaaagcccagtaaaggaagaggctgtcgctgaagttgtgactataaccaagtccgtgaaggtacacttggagaaagaaactaaagaagaaggcaagcccctgcagcaagagaaggagaaagaaaaggctggtggtgaaggaggatccgaggaagagggttctgataagggcgccaagggctctagaaaggaagatattgccgttaacggggaggtcgaagggaaagaagaggtagagcaggagaccaaagaaaagggttctgggcgcgaggaagagaaaggtgtagtaacaaatggcctggacctgtcacctgccgacgagaaaaagggaggcgacaagagcgaggagaaagtcgttgtgactaagactgtagagaagattacatctgaaggcggggacggagcgacgaagtacatcaccaagagcgtcactgtgacccagaaggtggaagaacacgaggagacttttgaggaaaaactcgtaagcaccaagaaagtggagaaggtgacctcgcatgctatcgtgaaggaggtgacacagtctgactag

SEQ ID NO: 155552 - DNA, 2634 bp, Artificial Sequence
  derived and/or modified sequence
atgagctacaccctggacagcctgggcaaccccagcgcctacagaagagtgacagagaccaggagcagcttcagccgggtgtctggcagccccagcagcggcttccgcagccagagctggagccggggcagccccagcacagtgagcagcagctacaagaggtccatgctggccccccggctggcctacagcagcgccatgctgagcagcgctgagagcagcctggacttcagccagagcagcagcctgctgaatggaggcagcggccctggaggagactacaagctgagccgcagcaatgagaaggagcagctgcagggcctgaatgacagatttgctggctacatcgagaaggtgcactacctggagcagcagaacaaggagattgaagctgagatccaggccctgcggcagaagcaggccagccacgcccagctgggagatgcctatgaccaggagatccgggagctgcgggccaccctggagatggtgaaccacgagaaggcccaggtgcagctggacagcgaccacctggaggaggacatccaccggctgaaggagagatttgaggaggaggcccggctgagagatgacacagaagctgccatccgggccctgaggaaggacatcgaggaggccagcctggtgaaggtggagctggacaagaaggtgcagagcctgcaggatgaggtggccttcctgcggagcaaccacgaggaggaggtggccgacctgctggcccagatccaggccagccacatcaccgtggagaggaaggactacctgaagacagacatcagcacagccctgaaggagatccgcagccagctggagagccacagcgaccagaacatgcaccaggccgaggagtggttcaagtgccgctatgccaagctgacagaggccgctgagcagaacaaggaggccatccgcagcgccaaggaggagattgctgagtaccgccggcagctgcagagcaagagcattgagctggagagcgtgcggggcaccaaggagagcctggagcggcagctgagtgacatcgaggagcggcacaaccacgacctgagcagctaccaggacaccatccagcagctggagaatgagctgcggggcaccaagtgggagatggcccggcacctgcgggagtaccaggacctgctgaatgtgaagatggccctggacatcgagattgctgcctacaggaagctgctggagggggaggagacccgcttcagcacctttgctggcagcatcaccggccccctgtacacccaccggccccccatcaccatcagcagcaagatccagaagcccaaggtggaggcccccaagctgaaggtgcagcacaagtttgtggaggagatcatcgaggagaccaaggtggaggatgagaagtctgagatggaggaggccctgacagccatcacagaggagctggccgtgtccatgaaggaggagaagaaggaggccgctgaggagaaggaggaggagcctgaggccgaggaggaggaggtggccgccaagaagagccctgtgaaggccacagcccctgaggtgaaggaggaggagggggagaaggaggaggaggagggccaggaggaggaggaggaggaggatgagggcgccaagagtgaccaggccgaggagggcggcagcgagaaggagggcagcagcgagaaggaggagggggagcaggaggagggggagacagaagctgaggccgagggggaggaggccgaggccaaggaggagaagaaggtggaggagaagtctgaggaggtggccaccaaggaggagctggtggctgatgccaaggtggagaagccagagaaggccaagagccctgtgcccaagagccctgtggaggagaagggcaagagccctgtgtccaagagccctgtggaggagaaggccaagagccctgtgcccaagagccctgtggaggaggccaagagcaaggccgaggtgggcaaaggagagcagaaggaggaggaggagaaggaggtgaaggaggcccccaaggaggagaaggtggagaagaaggaggagaagcccaaggatgtgcctgagaagaagaaggccgagagccctgtgaaggaggaggccgtggccgaggtggtgaccatcaccaagtctgtgaaggtgcacctggagaaggagaccaaggaggagggcaagcccctgcagcaggagaaggagaaggagaaggccggcggggagggcggcagcgaggaggagggcagtgacaagggggccaagggcagcaggaaagaagatattgctgtgaatggagaggtggagggcaaggaggaggtggagcaggagaccaaggagaagggcagcggccgggaggaggagaagggcgtggtgaccaacggcctggacctgagccctgcagatgagaagaagggcggggacaagtctgaggagaaggtggtggtgaccaagacagtggagaagatcaccagcgagggcggagatggagccaccaagtacatcaccaagtctgtgacagtgacccagaaggtggaggagcacgaggagacctttgaggagaagctggtgtccaccaagaaggtggagaaggtgaccagccacgccatcgtgaaggaggtgacccagagcgactag

SEQ ID NO: 155553 - DNA, 2634 bp, Artificial Sequence
  derived and/or modified sequence
atgagctacaccctggacagcctgggcaaccccagcgcctaccggcgcgttaccgagacccgaagctccttcagtagagtgtcaggctccccaagcagtgggtttcgcagccagtcatggtctcgagggtcaccctccaccgtgtccagctcttacaagcgctcaatgctggcgccacggttagcctactcgtcagcgatgctgtccagtgccgagagctctctggacttctcacagagttcgtctctgctaaatggagggtcggggcctggcggcgattataagctgtctcgaagtaatgaaaaggaacaattacagggactcaacgaccggtttgcggggtacattgagaaagtgcactacctggagcagcagaacaaggagatcgaggcagaaattcaggccctacgccagaaacaggcaagccacgctcaattaggagatgcctatgaccaagaaatccgtgagctgcgggcgacgctcgaaatggttaatcatgaaaaggcacaggtgcagctcgactctgaccacctagaggaggacatacaccgattgaaagagcgtttcgaggaggaagcgaggcttcgggacgacacagaggctgccattcgtgctctcagaaaagacatcgaagaggctagccttgtgaaagtggagctggacaaaaaagttcagtcactccaggatgaagttgcctttctgaggtcgaaccatgaggaagaggttgccgacctgttagctcagatacaagctagccacattaccgtcgagcgaaaagattatcttaagacagatatctccacagcacttaaagagatccgaagccagctggaatcccactccgaccagaatatgcaccaggcagaggaatggtttaagtgcagatatgccaagttgaccgaagctgccgagcaaaacaaggaagccatcaggagtgctaaagaagagattgccgaatacaggagacagctgcagtccaagtccatagagcttgaaagcgtgcggggtacaaaggagagcttggaacgccaactgtccgacatcgaggaacgccacaatcacgatctcagttcgtatcaggacacaatccaacagctcgaaaacgagctccgtggcacgaaatgggaaatggcccgacatctacgggagtaccaggacttattgaatgtgaagatggctctggatatcgagattgcagcttatcggaagctgctagagggcgaggaaaccaggttctccacttttgcaggatctatcaccggtcccctgtacacacataggccgcctataaccatctcgtcgaaaattcagaaacccaaggtcgaagccccgaagctgaaagtgcagcacaagttcgttgaagaaatcattgaggagactaaggtggaagatgaaaagtccgagatggaagaggccttaaccgccatcaccgaggagctggcagtgtccatgaaagaggagaagaaggaggcagccgaggagaaggaggaggaaccagaagccgaagaggaggaggtggccgccaaaaagagtccggtcaaggcaacggcccccgaggtgaaggaggaggagggagaaaaagaagaagaggaaggtcaggaggaggaggaagaggaagatgagggagccaagtcagaccaggctgaagaggggggcagcgaaaaggagggatccagcgagaaagaggagggggagcaggaggaaggcgagaccgaggccgaggccgagggagaagaggcggaggcaaaggaggagaagaaggtggaggaaaagtcagaagaggttgctacaaaggaggagttggtagccgacgccaaagttgagaaacctgaaaaggcaaaatcacctgtgcccaagtctcctgtagaggagaaaggcaagtcccctgtgagtaagtctccggtagaagagaaagccaagtccccagttcccaagtcacccgtcgaagaagctaaatctaaggctgaagtaggcaaaggtgaacagaaggaagaagaggaaaaggaagtgaaggaagctcctaaggaggaaaaagtcgaaaaaaaggaggagaagcccaaagatgtccccgaaaagaaaaaggctgagagcccggttaaggaagaggcagttgccgaagtcgtcacaataacaaagagtgtgaaggtgcaccttgagaaagagacgaaggaagagggaaaaccactgcagcaggaaaaagagaaggagaaagccggaggggaaggggggtctgaggaagaaggatcagacaaaggggctaagggatcaagaaaagaggatattgcggtgaacggggaagtcgagggcaaggaagaggtcgaacaggagactaaagagaaaggctccggacgcgaggaagaaaagggagtcgtgacaaacggactggacttgagtcctgcagacgaaaaaaagggcggcgataagtctgaggaaaaggtggtagttaccaaaacagtggagaaaattacttcagagggcggcgacggcgccaccaagtacatcaccaagtcggtgaccgtaactcagaaggtggaggagcatgaggagacgttcgaggagaaactggtatcgaccaaaaaagtagagaaagttacttctcatgctatcgtaaaagaggtaactcagtcagattag

SEQ ID NO: 155554 - DNA, 4020 bp, Artificial Sequence
  derived and/or modified sequence
tttttttttgttttgttttgtcttctagacccagctcctcggcgctcatctccagctgctttaagacaaggggtgggggaaggggagggaggcaagaaaagatgagggtgggggaggggaaaagagggaatgcaaggggaaggagggaggagacggggagaaggaaagattggaagaaaaggatctccgaggaaggggctgagagaagggcagggtgaactggactaaaggccagagtaggaaggagaagaggggccaaaaaagaaggggatgaaattaagcacagaagatgggtaaagaaaaaagtatcagggaaagggcaaaataagagaaagccttgaggataagagggtagaaggctaaagaacaaggggaccactgggtcggggaagcgctgcctgaacggcgggacagtgacaaagaaagggcgctggcgatattcgcaccaagggtgcgaaacgcaatcgggaggtgagaaatggaaagaaggcgaatgcccggctacaagtagcctgggactgaaaggggacctgggggaggggctgggcccagggcagaaaagtccaggttcccatgcggcctgggcccacgtggagcgggcgctgaatcaccgttcagccgcccccctcccctcctccccgaccggtgcccgcagtccccgcctcctcggccgccgcctccacggggcggggccctggcccgggaccagcgccgcggctataaatgggctgcggcgaggccggcagaacgctgtgacagccacacgccccaaggcctccaagatgagctacacgttggactcgctgggcaacccgtccgcctaccggcgggtaaccgagacccgctcgagcttcagccgcgtcagcggctccccgtccagtggcttccgctcgcagtcgtggtcccgcggctcgcccagcaccgtgtcctcctcctataagcgcagcatgctcgccccgcgcctcgcttacagctcggccatgctcagctccgccgagagcagccttgacttcagccagtcctcgtccctgctcaacggcggctccggacccggcggcgactacaagctgtcccgctccaacgagaaggagcagctgcaggggctgaacgaccgctttgccggctacatagagaaggtgcactacctggagcagcagaataaggagattgaggcggagatccaggcgctgcggcagaagcaggcctcgcacgcccagctgggcgacgcgtacgaccaggagatccgcgagctgcgcgccaccctggagatggtgaaccacgagaaggctcaggtgcagctggactcggaccacctggaggaagacatccaccggctcaaggagcgctttgaggaggaggcgcggttgcgcgacgacactgaggcggccatccgcgcgctgcgcaaagacatcgaggaggcgtcgctggtcaaggtggagctggacaagaaggtgcagtcgctgcaggatgaggtggccttcctgcggagcaaccacgaggaggaggtggccgaccttctggcccagatccaggcatcgcacatcacggtggagcgcaaagactacctgaagacagacatctcgacggcgctgaaggaaatccgctcccagctcgaaagccactcagaccagaatatgcaccaggccgaagagtggttcaaatgccgctacgccaagctcaccgaggcggccgagcagaacaaggaggccatccgctccgccaaggaagagatcgccgagtaccggcgccagctgcagtccaagagcatcgagctagagtcggtgcgcggcaccaaggagtccctggagcggcagctcagcgacatcgaggagcgccacaaccacgacctcagcagctaccaggacaccatccagcagctggaaaatgagcttcggggcacaaagtgggaaatggctcgtcatttgcgcgaataccaggacctcctcaacgtcaagatggctctggatatagaaatcgctgcgtacagaaaactcctggagggtgaagagactagatttagcacatttgcaggaagcatcactgggccactgtatacacaccgacccccaatcacaatatccagtaagattcagaaacccaaggtggaagctcccaagcttaaggtccaacacaaatttgtcgaggagatcatagaggaaaccaaagtggaggatgagaagtcagaaatggaagaggccctgacagccattacagaggaattggccgtttccatgaaggaagagaagaaagaagcagcagaagaaaaggaagaggaacccgaagctgaagaagaagaagtagctgccaaaaagtctccagtgaaagcaactgcacctgaagttaaagaagaggaaggggaaaaggaggaagaagaaggccaggaagaagaggaggaagaagatgagggagctaagtcagaccaagccgaagagggaggatccgagaaggaaggctctagtgaaaaagaggaaggtgagcaggaagaaggagaaacagaagctgaagctgaaggagaggaagccgaagctaaagaggaaaagaaagtggaggaaaagagtgaggaagtggctaccaaggaggagctggtggcagatgccaaggtggaaaagccagaaaaagccaagtctcctgtgccaaaatcaccagtggaagagaaaggcaagtctcctgtgcccaagtcaccagtggaagagaaaggcaagtctcctgtgcccaagtcaccagtggaagagaaaggcaagtctcctgtgccgaaatcaccagtggaagagaaaggcaagtctcctgtgtcaaaatcaccagtggaagagaaagccaaatctcctgtgccaaaatcaccagtggaagaggcaaagtcaaaagcagaagtggggaaaggtgaacagaaagaggaagaagaaaaggaagtcaaggaagctcccaaggaagagaaggtagagaaaaaggaagagaaaccaaaggatgtgccagagaagaagaaagctgagtcccctgtaaaggaggaagctgtggcagaggtggtcaccatcaccaaatcggtaaaggtgcacttggagaaagagaccaaagaagaggggaagccactgcagcaggagaaagagaaggagaaagcgggaggagagggaggaagtgaggaggaagggagtgataaaggtgccaagggatccaggaaggaagacatagctgtcaatggggaggtagaaggaaaagaggaggtagagcaggagaccaaggaaaaaggcagtgggagggaagaggagaaaggcgttgtcaccaatggcctagacttgagcccagcagatgaaaagaaggggggtgataaaagtgaggagaaagtggtggtgaccaaaacggtagaaaaaatcaccagtgaggggggagatggtgctaccaaatacatcactaaatctgtaaccgtcactcaaaaggttgaagagcatgaagagacctttgaggagaaactagtgtctactaaaaaggtagaaaaagtcacttcacacgccatagtaaaggaagtcacccagagtgactaagatttgagtccattgcaaaaggttaagccatatgacaatttcaaaatgcatgtgattggcagcttcaaaacagaacgggttctcccatgggggctccagacattgtattttactttgtgcaatatgaggggactgcatgcaagctcagggtgctccctcctcagtctttgggggattcaaatgcatgatattgtatgtacctgggaaatttgccgatttcctaagctgttggaagggggtcacttaaggggggatgtcttgagatgtattatgcaaagtaccaactgagccaaaaacaataaacgaaacacagaactcagccttaagaaagctatatatgaataattatgtttacctcactggtgcatttaaaatggacttttgttcatgggagaacctcgttgacatgcacagtttgcaatcttatgttgatcgatgttaaacgtcacagcagtacttgctcaataaaggtcatattggaaacata

SEQ ID NO: 155555 - DNA, 3148 bp, Artificial Sequence
  derived and/or modified sequence
gtgacagccacacgccccaaggcctccaagatgagctacacgttggactcgctgggcaacccgtccgcctaccggcgggtaaccgagacccgctcgagcttcagccgcgtcagcggctccccgtccagtggcttccgctcgcagtcgtggtcccgcggctcgcccagcaccgtgtcctcctcctataagcgcagcatgctcgccccgcgcctcgcttacagctcggccatgctcagctccgccgagagcagccttgacttcagccagtcctcgtccctgctcaacggcggctccggacccggcggcgactacaagctgtcccgctccaacgagaaggagcagctgcaggggctgaacgaccgctttgccggctacatagagaaggtgcactacctggagcagcagaataaggagattgaggcggagatccaggcgctgcggcagaagcaggcctcgcacgcccagctgggcgacgcgtacgaccaggagatccgcgagctgcgcgccaccctggagatggtgaaccacgagaaggctcaggtgcagctggactcggaccacctggaggaagacatccaccggctcaaggagcgctttgaggaggaggcgcggttgcgcgacgacactgaggcggccatccgcgcgctgcgcaaagacatcgaggaggcgtcgctggtcaaggtggagctggacaagaaggtgcagtcgctgcaggatgaggtggccttcctgcggagcaaccacgaggaggaggtggccgaccttctggcccagatccaggcatcgcacatcacggtggagcgcaaagactacctgaagacagacatctcgacggcgctgaaggaaatccgctcccagctcgaaagccactcagaccagaatatgcaccaggccgaagagtggttcaaatgccgctacgccaagctcaccgaggcggccgagcagaacaaggaggccatccgctccgccaaggaagagatcgccgagtaccggcgccagctgcagtccaagagcatcgagctagagtcggtgcgcggcaccaaggagtccctggagcggcagctcagcgacatcgaggagcgccacaaccacgacctcagcagctaccaggacaccatccagcagctggaaaatgagcttcggggcacaaagtgggaaatggctcgtcatttgcgcgaataccaggacctcctcaacgtcaagatggctctggatatagaaatcgctgcgtacagaaaactcctggagggtgaagagactagatttagcacatttgcaggaagcatcactgggccactgtatacacaccgacccccaatcacaatatccagtaagattcagaaacccaaggtggaagctcccaagcttaaggtccaacacaaatttgtcgaggagatcatagaggaaaccaaagtggaggatgagaagtcagaaatggaagaggccctgacagccattacagaggaattggccgtttccatgaaggaagagaagaaagaagcagcagaagaaaaggaagaggaacccgaagctgaagaagaagaagtagctgccaaaaagtctccagtgaaagcaactgcacctgaagttaaagaagaggaaggggaaaaggaggaagaagaaggccaggaagaagaggaggaagaagatgagggagctaagtcagaccaagccgaagagggaggatccgagaaggaaggctctagtgaaaaagaggaaggtgagcaggaagaaggagaaacagaagctgaagctgaaggagaggaagccgaagctaaagaggaaaagaaagtggaggaaaagagtgaggaagtggctaccaaggaggagctggtggcagatgccaaggtggaaaagccagaaaaagccaagtctcctgtgccaaaatcaccagtggaagagaaaggcaagtctcctgtgtcaaaatcaccagtggaagagaaagccaaatctcctgtgccaaaatcaccagtggaagaggcaaagtcaaaagcagaagtggggaaaggtgaacagaaagaggaagaagaaaaggaagtcaaggaagctcccaaggaagagaaggtagagaaaaaggaagagaaaccaaaggatgtgccagagaagaagaaagctgagtcccctgtaaaggaggaagctgtggcagaggtggtcaccatcaccaaatcggtaaaggtgcacttggagaaagagaccaaagaagaggggaagccactgcagcaggagaaagagaaggagaaagcgggaggagagggaggaagtgaggaggaagggagtgataaaggtgccaagggatccaggaaggaagacatagctgtcaatggggaggtagaaggaaaagaggaggtagagcaggagaccaaggaaaaaggcagtgggagggaagaggagaaaggcgttgtcaccaatggcctagacttgagcccagcagatgaaaagaaggggggtgataaaagtgaggagaaagtggtggtgaccaaaacggtagaaaaaatcaccagtgaggggggagatggtgctaccaaatacatcactaaatctgtaaccgtcactcaaaaggttgaagagcatgaagagacctttgaggagaaactagtgtctactaaaaaggtagaaaaagtcacttcacacgccatagtaaaggaagtcacccagagtgactaagatttgagtccattgcaaaaggttaagccatatgacaatttcaaaatgcatgtgattggcagcttcaaaacagaacgggttctcccatgggggctccagacattgtattttactttgtgcaatatgaggggactgcatgcaagctcagggtgctccctcctcagtctttgggggattcaaatgcatgatattgtatgtacctgggaaatttgccgatttcctaagctgttggaagggggtcacttaaggggggatgtcttgagatgtattatgcaaagtaccaactgagccaaaaacaataaacgaaacacagaactcagccttaagaaagctatatatgaataattatgtttacctcactggtgcatttaaaatggacttttgttcatgggagaacctcgttgacatgcacagtttgcaatcttatgttgatcgatgttaaacgtcacagcagtacttgctcaataaaggtcatattggaaac

SEQ ID NO: 155556 - DNA, 2634 bp, Artificial Sequence
  derived and/or modified sequence
atgtcatacaccctggattccctgggaaatccaagcgcctataggcgtgtcaccgaaacacggagctctttcagtagagtgagcggcagtcccagctccggatttagaagtcaatcttggagtcggggtagcccgtccacagtatccagctcttataagcgtagcatgctggcacctcgattagcttattcttccgcaatgctctcctcggcagagtcttccctggacttttcccagtccagtagcctgttaaatggtggctccggcccaggcggagattacaagctatctagatccaacgagaaagagcagctccaaggtctcaacgaccgattcgccggatacatcgagaaggtgcattatttggagcagcagaataaggagatcgaggcggagattcaggcattgcgacagaagcaggcttctcacgcccagttgggcgatgcttacgatcaggaaattagagaactgagagccactctggagatggtcaatcacgagaaggctcaggtccagttggattccgaccatctggaggaagatattcaccggctgaaagagagatttgaggaagaggcacggcttagagacgatactgaagccgctatccgggctctgcgcaaggatatcgaggaggcctccctggtgaaagtagaactagataaaaaggttcagtccctccaggatgaagtggctttccttcggtcaaaccatgaggaggaagtggccgatttgctggcacagatccaagcttcccacatcaccgtggaacgaaaggattacctgaagactgatattagtaccgccttaaaagaaattagatctcagctggaatcccactccgaccaaaacatgcatcaggccgaggagtggttcaaatgtcgatatgccaaactgactgaggccgctgaacagaataaggaggctattcgaagcgccaaggaggaaatagctgagtacagacgccagctgcagagtaaatctatcgaactcgaatccgtgcggggtaccaaagagtcgcttgagcggcaactttctgatatcgaggaacgccataatcacgatctctcttcttaccaagacaccatccagcagctcgagaacgaactccgtggaacgaagtgggagatggcccgacacttgcgagaatatcaggatctcctcaatgtgaagatggctttggatatcgagatcgccgcatacaggaaattactggagggagaagaaactcgcttttcaacatttgccggtagcatcaccggcccactgtatacccatagaccacctatcaccatatcaagcaaaattcagaagcccaaagtagaggctccaaagcttaaggtacaacacaagttcgtggaggaaatcattgaagaaactaaggttgaggatgagaaatcagaaatggaagaggcgctcacagcaatcactgaagagctcgctgtctccatgaaggaagaaaaaaaggaagcagctgaggaaaaagaggaagagccagaggccgaagaggaagaggtagctgcaaagaagtcacctgtcaaagcaactgccccagaagtgaaggaggaggaaggggagaaggaagaagaagagggtcaggaagaagaagaagaagaagatgaaggggctaaatccgatcaagcagaagaggggggatcagagaaggaggggagttcggaaaaggaagagggagagcaagaagagggggagacggaggccgaggccgagggagaggaggccgaggcgaaagaggaaaaaaaagtagaggagaaaagcgaggaagtcgccacaaaggaggaattggtggcagacgctaaggtggaaaaacctgagaaagctaagagccccgtgcctaaaagtcccgttgaagagaagggcaaatctcctgtctctaagagtcccgttgaggaaaaggcaaagtccccagtgcctaaaagtcctgtcgaggaagccaaatccaaagctgaagtgggtaagggcgaacaaaaggaggaggaggagaaggaagtgaaagaggccccaaaagaggagaaagtcgaaaaaaaggaggagaagcctaaggatgttccggagaaaaaaaaagccgagtcccccgtgaaggaggaggccgtggccgaggtggttacaattaccaagtctgttaaggtgcacctggagaaggagactaaagaagaaggcaaaccgctccagcaggaaaaggagaaagagaaggccggaggagaggggggaagtgaagaggaaggaagcgataaaggagcaaaaggctcccggaaagaagacatcgctgtgaatggagaagtggaagggaaagaggaagttgaacaagaaactaaggagaagggcagcggacgggaggaggagaagggagtggtgaccaatgggttggacctttctcccgcagacgaaaaaaaagggggtgacaagagtgaggaaaaggtcgtcgtgactaaaaccgtcgaaaaaattacctccgagggcggtgacggggctactaaatatattaccaaatcagtaaccgttacccagaaggttgaggaacacgaggaaacctttgaagagaagctggtatccactaagaaagtcgagaaggtgacttcacatgcgatcgtgaaggaggttacccagtcagattag

SEQ ID NO: 155557 - DNA, 2634 bp, Artificial Sequence
  derived and/or modified sequence
atgagctacaccctggacagcctgggcaaccccagcgcctacagaagagtgaccgagaccagaagcagcttcagcagagtgagcggcagccccagcagcggcttcagaagccagagctggagcagaggcagccccagcaccgtgagcagcagctacaagagaagcatgctggcccccagactggcctacagcagcgccatgctgagcagcgccgagagcagcctggacttcagccagagcagcagcctgctgaacggcggcagcggccccggcggcgactacaagctgagcagaagcaacgagaaggagcagctgcagggcctgaacgacagattcgccggctacatcgagaaggtgcactacctggagcagcagaacaaggagatcgaggccgagatccaggccctgagacagaagcaggccagccacgcccagctgggcgacgcctacgaccaggagatcagagagctgagagccaccctggagatggtgaaccacgagaaggcccaggtgcagctggacagcgaccacctggaggaggacatccacagactgaaggagagattcgaggaggaggccagactgagagacgacaccgaggccgccatcagagccctgagaaaggacatcgaggaggccagcctggtgaaggtggagctggacaagaaggtgcagagcctgcaggacgaggtggccttcctgagaagcaaccacgaggaggaggtggccgacctgctggcccagatccaggccagccacatcaccgtggagagaaaggactacctgaagaccgacatcagcaccgccctgaaggagatcagaagccagctggagagccacagcgaccagaacatgcaccaggccgaggagtggttcaagtgcagatacgccaagctgaccgaggccgccgagcagaacaaggaggccatcagaagcgccaaggaggagatcgccgagtacagaagacagctgcagagcaagagcatcgagctggagagcgtgagaggcaccaaggagagcctggagagacagctgagcgacatcgaggagagacacaaccacgacctgagcagctaccaggacaccatccagcagctggagaacgagctgagaggcaccaagtgggagatggccagacacctgagagagtaccaggacctgctgaacgtgaagatggccctggacatcgagatcgccgcctacagaaagctgctggagggcgaggagaccagattcagcaccttcgccggcagcatcaccggccccctgtacacccacagaccccccatcaccatcagcagcaagatccagaagcccaaggtggaggcccccaagctgaaggtgcagcacaagttcgtggaggagatcatcgaggagaccaaggtggaggacgagaagagcgagatggaggaggccctgaccgccatcaccgaggagctggccgtgagcatgaaggaggagaagaaggaggccgccgaggagaaggaggaggagcccgaggccgaggaggaggaggtggccgccaagaagagccccgtgaaggccaccgcccccgaggtgaaggaggaggagggcgagaaggaggaggaggagggccaggaggaggaggaggaggaggacgagggcgccaagagcgaccaggccgaggagggcggcagcgagaaggagggcagcagcgagaaggaggagggcgagcaggaggagggcgagaccgaggccgaggccgagggcgaggaggccgaggccaaggaggagaagaaggtggaggagaagagcgaggaggtggccaccaaggaggagctggtggccgacgccaaggtggagaagcccgagaaggccaagagccccgtgcccaagagccccgtggaggagaagggcaagagccccgtgagcaagagccccgtggaggagaaggccaagagccccgtgcccaagagccccgtggaggaggccaagagcaaggccgaggtgggcaagggcgagcagaaggaggaggaggagaaggaggtgaaggaggcccccaaggaggagaaggtggagaagaaggaggagaagcccaaggacgtgcccgagaagaagaaggccgagagccccgtgaaggaggaggccgtggccgaggtggtgaccatcaccaagagcgtgaaggtgcacctggagaaggagaccaaggaggagggcaagcccctgcagcaggagaaggagaaggagaaggccggcggcgagggcggcagcgaggaggagggcagcgacaagggcgccaagggcagcagaaaggaggacatcgccgtgaacggcgaggtggagggcaaggaggaggtggagcaggagaccaaggagaagggcagcggcagagaggaggagaagggcgtggtgaccaacggcctggacctgagccccgccgacgagaagaagggcggcgacaagagcgaggagaaggtggtggtgaccaagaccgtggagaagatcaccagcgagggcggcgacggcgccaccaagtacatcaccaagagcgtgaccgtgacccagaaggtggaggagcacgaggagaccttcgaggagaagctggtgagcaccaagaaggtggagaaggtgaccagccacgccatcgtgaaggaggtgacccagagcgactag

SEQ ID NO: 155558 - protein, 1462 aa, Artificial Sequence
  derived and/or modified sequence
MGAQDRPQCHFDIEINREPVGRIMFQLFSDICPKTCKNFLCLCSGEKGLGKTTGKKLCYKGSTFHRVVKNFMIQGGDFSEGNGKGGESIYGGYFKDENFILKHDRAFLLSMANRGKHTNGSQFFITTKPAPHLDGVHVVFGLVISGFEVIEQIENLKTDAASRPYADVRVIDCGVLATKSIKDVFEKKRKKPTHSEGSDSSSNSSSSSESSSESELEHERSRRRKHKRRPKVKRSKKRRKEASSSEEPRNKHAMNPKGHSERSDTNEKRSVDSSAKREKPVVRPEEIPPVPENRFLLRRDMPVVTAEPEPKIPDVAPIVSDQKPSVSKSGRKIKGRGTIRYHTPPRSRSCSESDDDDSSETPPHWKEEMQRLRAYRPPSGEKWSKGDKLSDPCSSRWDERSLSQRSRSWSYNGYYSDLSTARHSGHHKKRRKEKKVKHKKKGKKQKHCRRHKQTKKRRILIPSDIESSKSSTRRMKSSCDRERSSRSSSLSSHHSSKRDWSKSDKDVQSSLTHSSRDSYRSKSHSQSYSRGSSRSRTASKSSSHSRSRSKSRSSSKSGHRKRASKSPRKTASQLSENKPVKTEPLRATMAQNENVVVQPVVAENIPVIPLSDSPPPSRWKPGQKPWKPSYERIQEMKAKTTHLLPIQSTYSLANIKETGSSSSYHKREKNSESDQSTYSKYSDRSSESSPRSRSRSSRSRSYSRSYTRSRSLASSHSRSRSPSSRSHSRNKYSDHSQCSRSSSYTSISSDDGRRAKRRLRSSGKKNSVSHKKHSSSSEKTLHSKYVKGRDRSSCVRKYSESRSSLDYSSDSEQSSVQATQSAQEKEKQGQMERTHNKQEKNRGEEKSKSERECPHSKKRTLKENLSDHLRNGSKPKRKNYAGSKWDSESNSERDVTKNSKNDSHPSSDKEEGEATSDSESEVSEIHIKVKPTTKSSTNTSLPDDNGAWKSSKQRTSTSDSEGSCSNSENNRGKPQKHKHGSKENLKREHTKKVKEKLKGKKDKKHKAPKRKQAFHWQPPLEFGEEEEEEIDDKQVTQESKEKKVSENNETIKDNILKTEKSSEEDLSGKHDTVTVSSDLDQFTKDDSKLSISPTALNTEENVACLQNIQHVEESVPNGVEDVLQTDDNMEICTPDRSSPAKVEETSPLGNARLDTPDINIVLKQDMATEHPQAEVVKQESSMSESKVLGEVGKQDSSSASLASAGESTGKKEVAEKSQINLIDKKWKPLQGVGNLAAPNAATSSAVEVKVLTTVPEMKPQGLRIEIKSKNKVRPGSLFDEVRKTARLNRRPRNQESSSDEQTPSRDDDSQSRSPSRSRSKSETKSRHRTRSVSYSHSRSRSRSSTSSYRSRSYSRSRSRGWYSRGRTRSRSSSYRSYKSHRTSSRSRSRSSSYDPHSRSRSYTYDSYYSRSRSRSRSQRSDSYHRGRSYNRRSRSCRSYGSDSESDRSYSHHRSPSESSRYS

SEQ ID NO: 155559 - protein, 104 aa, Artificial Sequence
  derived and/or modified sequence
MGAQDRPQCHFDIEINREPVGRIMFQLFSDICPKTCKNFLCLCSGEKGLGKTTGKKLCYKGSTFHRVVKNFMIQGGDFSEGNGKGGESIYGGYFKENVVFCKMK

SEQ ID NO: 155560 - DNA, 4389 bp, Artificial Sequence
  derived and/or modified sequence
atgggcgcccaggacagaccccagtgccacttcgacatcgagatcaacagagagcccgtgggcagaatcatgttccagctgttcagcgacatctgccccaagacctgcaagaacttcctgtgcctgtgcagcggcgagaagggcctgggcaagaccaccggcaagaagctgtgctacaagggcagcaccttccacagagtggtgaagaacttcatgatccagggcggcgacttcagcgagggcaacggcaagggcggcgagagcatctacggcggctacttcaaggacgagaacttcatcctgaagcacgacagagccttcctgctgagcatggccaacagaggcaagcacaccaacggcagccagttcttcatcaccaccaagcccgccccccacctggacggcgtgcacgtggtgttcggcctggtgatcagcggcttcgaggtgatcgagcagatcgagaacctgaagaccgacgccgccagcagaccctacgccgacgtgagagtgatcgactgcggcgtgctggccaccaagagcatcaaggacgtgttcgagaagaagagaaagaagcccacccacagcgagggcagcgacagcagcagcaacagcagcagcagcagcgagagcagcagcgagagcgagctggagcacgagagaagcagaagaagaaagcacaagagaagacccaaggtgaagagaagcaagaagagaagaaaggaggccagcagcagcgaggagcccagaaacaagcacgccatgaaccccaagggccacagcgagagaagcgacaccaacgagaagagaagcgtggacagcagcgccaagagagagaagcccgtggtgagacccgaggagatcccccccgtgcccgagaacagattcctgctgagaagagacatgcccgtggtgaccgccgagcccgagcccaagatccccgacgtggcccccatcgtgagcgaccagaagcccagcgtgagcaagagcggcagaaagatcaagggcagaggcaccatcagataccacaccccccccagaagcagaagctgcagcgagagcgacgacgacgacagcagcgagacccccccccactggaaggaggagatgcagagactgagagcctacagaccccccagcggcgagaagtggagcaagggcgacaagctgagcgacccctgcagcagcagatgggacgagagaagcctgagccagagaagcagaagctggagctacaacggctactacagcgacctgagcaccgccagacacagcggccaccacaagaagagaagaaaggagaagaaggtgaagcacaagaagaagggcaagaagcagaagcactgcagaagacacaagcagaccaagaagagaagaatcctgatccccagcgacatcgagagcagcaagagcagcaccagaagaatgaagagcagctgcgacagagagagaagcagcagaagcagcagcctgagcagccaccacagcagcaagagagactggagcaagagcgacaaggacgtgcagagcagcctgacccacagcagcagagacagctacagaagcaagagccacagccagagctacagcagaggcagcagcagaagcagaaccgccagcaagagcagcagccacagcagaagcagaagcaagagcagaagcagcagcaagagcggccacagaaagagagccagcaagagccccagaaagaccgccagccagctgagcgagaacaagcccgtgaagaccgagcccctgagagccaccatggcccagaacgagaacgtggtggtgcagcccgtggtggccgagaacatccccgtgatccccctgagcgacagccccccccccagcagatggaagcccggccagaagccctggaagcccagctacgagagaatccaggagatgaaggccaagaccacccacctgctgcccatccagagcacctacagcctggccaacatcaaggagaccggcagcagcagcagctaccacaagagagagaagaacagcgagagcgaccagagcacctacagcaagtacagcgacagaagcagcgagagcagccccagaagcagaagcagaagcagcagaagcagaagctacagcagaagctacaccagaagcagaagcctggccagcagccacagcagaagcagaagccccagcagcagaagccacagcagaaacaagtacagcgaccacagccagtgcagcagaagcagcagctacaccagcatcagcagcgacgacggcagaagagccaagagaagactgagaagcagcggcaagaagaacagcgtgagccacaagaagcacagcagcagcagcgagaagaccctgcacagcaagtacgtgaagggcagagacagaagcagctgcgtgagaaagtacagcgagagcagaagcagcctggactacagcagcgacagcgagcagagcagcgtgcaggccacccagagcgcccaggagaaggagaagcagggccagatggagagaacccacaacaagcaggagaagaacagaggcgaggagaagagcaagagcgagagagagtgcccccacagcaagaagagaaccctgaaggagaacctgagcgaccacctgagaaacggcagcaagcccaagagaaagaactacgccggcagcaagtgggacagcgagagcaacagcgagagagacgtgaccaagaacagcaagaacgacagccaccccagcagcgacaaggaggagggcgaggccaccagcgacagcgagagcgaggtgagcgagatccacatcaaggtgaagcccaccaccaagagcagcaccaacaccagcctgcccgacgacaacggcgcctggaagagcagcaagcagagaaccagcaccagcgacagcgagggcagctgcagcaacagcgagaacaacagaggcaagccccagaagcacaagcacggcagcaaggagaacctgaagagagagcacaccaagaaggtgaaggagaagctgaagggcaagaaggacaagaagcacaaggcccccaagagaaagcaggccttccactggcagccccccctggagttcggcgaggaggaggaggaggagatcgacgacaagcaggtgacccaggagagcaaggagaagaaggtgagcgagaacaacgagaccatcaaggacaacatcctgaagaccgagaagagcagcgaggaggacctgagcggcaagcacgacaccgtgaccgtgagcagcgacctggaccagttcaccaaggacgacagcaagctgagcatcagccccaccgccctgaacaccgaggagaacgtggcctgcctgcagaacatccagcacgtggaggagagcgtgcccaacggcgtggaggacgtgctgcagaccgacgacaacatggagatctgcacccccgacagaagcagccccgccaaggtggaggagaccagccccctgggcaacgccagactggacacccccgacatcaacatcgtgctgaagcaggacatggccaccgagcacccccaggccgaggtggtgaagcaggagagcagcatgagcgagagcaaggtgctgggcgaggtgggcaagcaggacagcagcagcgccagcctggccagcgccggcgagagcaccggcaagaaggaggtggccgagaagagccagatcaacctgatcgacaagaagtggaagcccctgcagggcgtgggcaacctggccgcccccaacgccgccaccagcagcgccgtggaggtgaaggtgctgaccaccgtgcccgagatgaagccccagggcctgagaatcgagatcaagagcaagaacaaggtgagacccggcagcctgttcgacgaggtgagaaagaccgccagactgaacagaagacccagaaaccaggagagcagcagcgacgagcagacccccagcagagacgacgacagccagagcagaagccccagcagaagcagaagcaagagcgagaccaagagcagacacagaaccagaagcgtgagctacagccacagcagaagcagaagcagaagcagcaccagcagctacagaagcagaagctacagcagaagcagaagcagaggctggtacagcagaggcagaaccagaagcagaagcagcagctacagaagctacaagagccacagaaccagcagcagaagcagaagcagaagcagcagctacgacccccacagcagaagcagaagctacacctacgacagctactacagcagaagcagaagcagaagcagaagccagagaagcgacagctaccacagaggcagaagctacaacagaagaagcagaagctgcagaagctacggcagcgacagcgagagcgacagaagctacagccaccacagaagccccagcgagagcagcagatacagctag

SEQ ID NO: 155561 - DNA, 4389 bp, Artificial Sequence
  derived and/or modified sequence
atgggggctcaggatagacctcagtgccattttgacatcgagattaatagggagccagtcggaaggataatgttccaactgtttagcgatatctgtccaaagacctgcaagaactttttgtgtctttgctccggagaaaaaggcctgggcaaaacgacgggcaagaaactgtgctacaaaggatccacatttcatagggttgtgaagaattttatgattcaggggggcgacttcagcgagggtaacggcaaaggcggagagtcaatatatggaggctattttaaggacgaaaattttatcttaaaacacgatagggctttcttactgtccatggctaatcgggggaaacataccaacgggtcccagttctttattacaacaaaacctgcgcctcatctggacggagtacacgttgtgtttgggctcgtcattagcggattcgaggtgattgagcagatcgagaacctgaagaccgacgccgcgagcagaccatatgctgatgtgagggtgatcgactgcggggtgctggctacaaaatccatcaaggatgtcttcgaaaagaaacggaagaaacctacacatagtgagggatcagacagttcaagcaactcaagctcatctagtgagtcaagctctgaaagcgagctcgagcacgaacggtcacgccgcaggaagcacaaacgcagacccaaagtcaagaggagcaagaaacgccgtaaagaagccagttcctctgaggagccacgcaataagcatgctatgaacccaaaaggccacagtgagagatctgataccaatgaaaagcgttcagtggatagttccgcaaaaagggaaaaaccagtggtgcggccagaggaaatacccccagttccggagaataggtttctgctgcgccgtgatatgccagtggtcaccgcggagccagaacccaaaatcccagacgtcgcccctatcgtgtctgatcagaagccttccgtctctaagtctggtcgtaagattaaaggccgggggaccataaggtaccacacccctccaaggtctcgatcatgtagtgaatccgatgacgacgacagctctgagacaccaccacattggaaagaggaaatgcagagattgcgggcctacaggcctccttctggcgagaaatggtcaaagggggacaagctgagtgatccatgcagcagtcggtgggacgagaggagcctgagccagcgcagtcggagttggtcttacaacggctactactcagatctgtcaaccgctcgccactccggccaccacaaaaaacggcggaaggaaaagaaagtcaagcataagaaaaaaggcaagaagcagaagcactgccgcagacataagcagactaaaaaacgcaggattttgatcccatctgatatcgaaagctcaaagtccagcaccagacggatgaagagttcgtgtgatagggagcgttccagtcggtcatcctctctctcatcccatcattcctctaagagagattggtcaaaatctgataaggatgtccaatcgtcactcacacattcttcacgggattcatatcgcagtaaatctcattctcagtcttactctcgcggttcgtcgcggagcagaactgcctctaagtccagcagccatagtagaagcaggagcaaatcacgatcttcctctaagtctggccaccgaaagcgcgcgtccaagtcacctagaaaaacggcttctcagctcagcgagaataaacctgtgaaaacagaacctctccgcgcaacaatggctcaaaatgaaaacgtggtggtgcaacctgtggtggcagagaatattcctgtaattcctctctctgattccccccccccttctagatggaagcccggccagaagccctggaagccttcctatgaaagaatccaagagatgaaggcgaagactacgcatctgttacctatccagtccacctacagtttagccaatatcaaggagacaggaagctcctcatcctaccacaaaagagagaagaattcagagagtgaccagtccacttattctaagtattccgacaggtcatcagaaagttcaccgagatctagatctcggtcatctcgttcacgcagctactcacgctcttacaccaggtcacggagtctcgcgagcagccattccaggtcccggtcaccttcctctcgcagccactccaggaacaagtatagtgaccattcccagtgctccaggtctagttcatatacgagcatttcctccgacgatggacgtcgggctaagaggcggctccgctcttctggtaagaaaaatagtgtgtcccacaagaagcactccagctcttctgagaagacactgcacagcaagtacgtgaaggggcgagacaggtcatcctgtgtccggaagtactctgaaagccggagttccctggactacagtagcgattcggaacaatcctccgtccaagctacacaatctgcgcaggaaaaagagaagcagggacagatggaacggactcataataaacaggaaaaaaatagaggcgaagagaaatctaagagcgagagggagtgcccccattcaaaaaagcgcaccttgaaggagaacttatctgaccacttgaggaacgggtctaagcctaaacggaaaaattacgccgggagcaaatgggatagtgagtcaaactccgagagggacgtgactaaaaattcaaaaaatgacagtcacccttcatccgacaaggaggagggtgaggccacatctgatagcgaaagcgaagtctctgagatccacataaaggtcaaacccactaccaaatcctctactaacacaagcctgcccgatgacaacggtgcctggaagtcctctaaacagagaacttcaacgtctgactctgaaggaagctgttcaaacagtgaaaataatcggggtaagccacagaagcacaaacacgggagcaaagagaacctgaaaagagagcacacaaagaaggtcaaagagaagttaaaaggtaagaaggataaaaagcacaaggctcccaagcgcaagcaggcattccactggcagcccccgctagaatttggggaggaggaggaagaggaaatcgatgacaaacaggtgacccaggaatcaaaagagaagaaagtgagtgaaaataacgaaaccataaaggataatatactaaagactgaaaagtctagcgaagaagacctgagcggcaagcatgacacagttaccgtgagctccgatctggaccaattcaccaaggatgactccaaactttctattagcccaactgcgctgaatacagaggagaacgtggcatgtctccagaatatccagcatgtggaagagtctgtccccaacggcgtggaggacgtcctgcagactgatgataatatggaaatctgtacaccagaccgctcgtccccagccaaggtcgaggaaactagcccactcggaaatgcacgtctcgacacaccagacataaacattgtcctaaagcaagacatggccaccgaacacccacaagcggaggtggtgaagcaggaaagtagtatgagcgagtcaaaagtcctcggagaggtaggcaaacaggacagctcctcagccagcctcgcatcggcgggcgaaagcactgggaaaaaggaagtcgctgagaaaagccaaatcaatctcatcgacaagaaatggaagcctctacagggagtgggcaacctggccgcgcccaatgcagccacgtcttcagccgtagaagtgaaggtgctgacgacagttccagaaatgaagccgcagggcctgcgcattgaaattaaaagcaaaaataaagtgagaccaggatccctctttgacgaagtgcgcaagactgccaggcttaaccggcggccgagaaatcaggagtcctcctcagatgagcaaacaccctctcgcgatgatgatagtcagtcgcggtctcccagcagatcaagaagtaaaagcgaaacgaaaagtcgacatcgaaccagatccgtgagctactctcactctcgcagcaggtccaggtcatcaaccagctcctacaggagccggtcatattctagatcccgttcacgtggatggtactcccgagggagaaccaggagcaggtcctccagttatagatcttacaagtcccaccggacctccagcaggagtaggtccagaagcagttcatacgatcctcattccaggagtcgcagttacacctacgactcctattactcacgtagcagaagtagatcacgatcacaacgctcggactcctaccacaggggaaggagctacaatcgacgatctagatcctgccggtcctacggcagtgacagcgagtccgatcggtcatatagtcaccataggagtccgagcgagagcagccgctactcttag

SEQ ID NO: 155562 - DNA, 4389 bp, Artificial Sequence
  derived and/or modified sequence
atgggcgcccaggaccggccccagtgccactttgatattgagatcaaccgggagcctgtgggccgcatcatgttccagctgttcagtgacatctgccccaagacctgcaagaacttcctgtgcctgtgcagcggggagaagggcctgggcaagaccaccgggaagaagctgtgctacaagggcagcaccttccaccgggtggtgaagaacttcatgatccagggcggggacttcagcgagggcaatggcaagggcggggagagcatctacggcggctacttcaaggatgagaacttcatcctgaagcatgaccgggccttcctgctgtccatggccaacagaggcaagcacaccaacggcagccagttcttcatcaccaccaagccagccccccacctggatggagtgcacgtggtgtttggcctggtgatcagcggctttgaagtcatcgagcagatcgagaacctgaagacagatgctgccagccggccctatgcagatgtgcgggtgattgactgtggggtgctggccaccaagagcatcaaggatgtgtttgagaagaagaggaagaagcccacccacagcgagggcagtgacagcagcagcaacagcagcagcagcagcgagagcagcagcgagagcgagctggagcacgagaggagcagaagaaggaagcacaagaggcggcccaaggtgaagaggagcaagaagaggaggaaggaggccagcagcagcgaggagcccaggaacaagcacgccatgaaccccaagggccacagcgagaggagtgacaccaatgagaagaggtctgtggacagcagcgccaagcgggagaagcctgtggtgcggcctgaggagatcccccctgtgcctgagaaccgcttcctgctgcggcgggacatgcctgtggtgacagctgagcctgagcccaagatcccagatgtggcccccatcgtgtctgaccagaagcccagcgtgtccaagagcggcaggaagatcaagggccggggcaccatccgctaccacaccccacccaggagccgcagctgcagcgagagtgatgatgatgacagcagcgagaccccaccccactggaaggaggagatgcagaggctgcgggcctacagacctccttctggagagaagtggagcaaaggagacaagctgagtgacccctgcagcagccgctgggatgagaggagcctgagccagaggagccgctcctggagctacaacggctactacagcgacctgagcacagcccggcacagcggccaccacaagaagaggaggaaggagaagaaggtgaagcacaagaagaagggcaagaagcagaagcactgcagaagacacaagcagaccaagaagaggcgcatcctgatccccagcgacatcgagagcagcaagagcagcaccaggaggatgaagagcagctgtgaccgggagaggagcagccgcagcagcagcctgagcagccaccacagcagcaagagggactggagcaagagtgacaaggatgtgcagagcagcctgacccacagcagccgggacagctaccgcagcaagagccacagccagagctacagccggggcagcagccgcagcaggacagccagcaagagcagcagccacagccgcagccgcagcaagagccgcagcagcagcaagagcggccacaggaagagggccagcaagagccccaggaagacagccagccagctgtctgagaacaagcctgtgaagacagagcccctgcgggccaccatggcccagaatgaaaatgtggtggtgcagcctgtggtggccgagaacatccctgtgatccccctgagtgacagccccccacccagccgctggaagccaggccagaagccctggaagcccagctatgaaagaatccaggagatgaaggccaagaccacccacctgctgcccatccagagcacctacagcctggccaacatcaaggagaccggcagcagcagcagctaccacaagcgggagaagaacagcgagagtgaccagagcacctacagcaagtacagcgacaggagcagcgagagcagccccaggagccgcagccgcagcagccgcagccgcagctacagccgcagctacaccaggagccgcagcctggccagcagccacagccgcagccgcagccccagcagccgcagccacagcaggaacaagtacagcgaccacagccagtgcagccgcagcagcagctacaccagcatcagcagtgatgatggaagaagagccaagaggcggctgcggagcagcggcaagaagaacagcgtgagccacaagaagcacagcagcagcagcgagaagaccctgcacagcaaatatgtgaagggccgggacaggagcagctgtgtgaggaagtacagcgagagccgcagcagcctggactacagcagtgacagcgagcagagctctgtgcaggccacccagagcgcccaggagaaggagaagcagggccagatggagaggacccacaacaagcaggagaagaacagaggagaggagaagagcaagtctgagcgggagtgcccccacagcaagaagaggaccctgaaggagaacctgagtgaccacctgagaaatggcagcaagcccaagaggaagaactatgccggcagcaagtgggacagcgagagcaacagcgagagagatgtgaccaagaacagcaagaatgacagccaccccagcagtgacaaggaggagggggaggccaccagtgacagcgagagcgaggtgtctgagatccacatcaaggtgaagcccaccaccaagagcagcaccaacaccagcctgcctgatgacaatggagcctggaagagcagcaagcagaggaccagcaccagtgacagcgagggcagctgcagcaacagcgagaacaacagaggcaagccccagaagcacaagcacggcagcaaagaaaacctgaagcgggagcacaccaagaaggtgaaggagaagctgaagggcaagaaggacaagaagcacaaggcccccaagaggaagcaggccttccactggcagccccccctggagtttggagaggaggaggaggaggagattgatgacaagcaggtgacccaggagagcaaggagaagaaggtgtctgagaacaatgagaccatcaaggacaacatcctgaagacagagaagagcagcgaggaggacctgagcggcaagcatgacacagtgacagtgtccagtgacctggaccagttcaccaaggatgacagcaagctgagcatcagccccacagccctgaacacagaggagaatgtggcctgcctgcagaacatccagcacgtggaggagagcgtgcccaatggagtggaggatgtgctgcagacagatgacaacatggagatctgcaccccagacaggagcagccctgccaaggtggaggagaccagccccctgggcaatgcccggctggacaccccagacatcaacatcgtgctgaagcaggacatggccacagagcacccccaggccgaggtggtgaagcaggagagctccatgtctgagagcaaggtgctgggggaggtgggcaagcaggacagcagcagcgccagcctggccagcgctggggagagcacaggcaagaaggaggtggccgagaagagccagatcaacctgattgacaagaagtggaagcccctgcagggcgtgggcaacctggccgccccaaatgctgccaccagcagcgctgtggaggtgaaggtgctgaccaccgtgcctgagatgaagccccagggcctgcgcatcgagatcaagagcaagaacaaggtgcggcccggcagcctgtttgatgaggtgaggaagacagcccggctgaacagaagacccaggaaccaggagagcagcagtgatgagcagacccccagcagagatgatgacagccagagccgcagccccagccgcagccgcagcaagtctgagaccaagagccgccacaggaccaggtctgtgtcctacagccacagccgcagccgcagccgcagcagcaccagcagctaccgcagccgcagctacagccgcagccgcagccggggctggtacagccggggccgcaccaggagccgcagcagcagctaccgcagctacaagagccacaggaccagcagccgcagccgcagccgcagcagcagctatgacccccacagccgcagccgcagctacacctatgacagctactacagccgcagccgcagccgcagccgcagccagaggagtgacagctaccaccggggccgcagctacaacagaagaagccgcagctgccgctcctatggcagtgacagcgagagtgacaggagctacagccaccacaggagccccagcgagagcagccgctacagctag

SEQ ID NO: 155563 - DNA, 4389 bp, Artificial Sequence
  derived and/or modified sequence
atgggcgcccaggaccggccccagtgccacttcgacatcgagatcaaccgcgagcccgtcggaagaataatgtttcagttgttttcagacatctgccctaagacatgtaagaacttcctgtgcctctgtagcggagaaaaggggttgggaaagactacggggaagaagctgtgctataaaggctccacctttcaccgagtggtgaaaaatttcatgatccaggggggggatttttcagaggggaacggtaaggggggtgaatcaatctatggcggatactttaaagacgagaatttcatcctaaagcacgatcgcgcttttttattgagtatggcaaacaggggtaaacacaccaacggcagtcaattcttcataaccacgaaaccagcacctcatctagatggcgtgcacgtggtgtttgggctggtcatttctggctttgaggtcattgagcaaattgagaacctcaagacagatgccgcaagccgaccatacgccgacgtaagagttatcgattgcggcgtgttagccaccaaaagtatcaaagacgtctttgaaaaaaaacgcaaaaagccaacccactcggagggaagcgattcttcatcaaactctagctcatcttccgagagctcatctgagtctgagctggagcacgagaggagtcgtcgtagaaagcacaaacgacggcccaaagtgaagagatccaaaaagcgtcgcaaagaggcatccagtagtgaggagcccagaaataaacacgcgatgaacccaaagggccatagtgaacggtcggacacaaatgagaagcggagcgtagacagcagtgccaaacgtgaaaaacccgtcgtgaggcccgaagagattccaccggtccctgagaaccgatttcttctgaggcgagacatgccagtggtgacagccgagcccgaacctaaaatccccgacgtcgcacctatcgtgtccgaccagaaaccgtccgtgtccaagagtgggcggaaaatcaagggccgggggactatccggtatcatactccaccacgcagcagaagctgcagcgaaagtgacgacgacgattctagcgaaactccccctcattggaaggaagagatgcagcgtctgcgggcttacagaccaccctcgggagaaaaatggtcaaagggggataagctctcagatccgtgtagcagccggtgggacgagcggtccctctcacagaggagccgcagttggtcttataacgggtactattcagatctatctactgctagacactcggggcatcacaaaaagaggagaaaggagaaaaaggtgaaacacaaaaagaagggaaagaagcaaaaacattgccgtcgtcacaagcagactaagaagagacgcattcttataccctccgacatagagtctagcaagtctagtaccagaaggatgaagagcagttgcgatcgagagcgctcatcacgctcctcatcccttagctcccatcactcatctaagagggactggtccaagagtgataaagacgtgcagtctagcctgacgcattcgagcagggattcctataggtcaaaatctcactcccagagttattccagaggaagctctcgtagcagaaccgcctccaagtcttcatcacacagcagaagccgctccaagtcacgttcatcaagtaagagcggacatcgaaaaagggcctccaaatcccccagaaagacagcttcccaactttccgaaaacaagccagttaagaccgaaccactgagagccactatggctcaaaatgagaatgtagttgtccaacctgtcgtggccgaaaacatcccggttatcccactgagcgactcccccccacctagtcgctggaagcctgggcaaaagccctggaagccctcgtacgagcgaatccaagagatgaaagcaaagactacccatctgctgcccatccagtccacatattctctcgctaatattaaagagacgggctccagcagtagttaccataaacgagaaaagaattccgagagtgaccagtcgacgtattctaaatattcagacagatctagcgagagcagccctcgtagtcgatccaggagtagtagaagccgctcatactcccgttcttacacgcgcagtcggtctttggcctcttctcacagccggtccaggagcccttcctccagatcacactctcgcaataaatacagtgaccatagtcagtgtagccgaagtagctcctacacaagcattagctctgatgacggcagacgagctaagagaagactccggagtagcggcaagaaaaactcggtctcccataagaagcattcctcaagctccgagaaaacgttgcactccaagtacgttaagggacgtgatcggtcttcctgtgtcagaaagtatagtgagtcaaggagtagccttgactatagttctgattccgaacaatcaagcgtgcaggccacacagagcgctcaggaaaaggagaaacaaggccagatggaacgcacccacaacaagcaggagaaaaatcgcggtgaagagaagagtaagtctgagagagagtgcccccattcaaaaaaacgaaccctgaaagaaaatctctctgaccacctaaggaacggttctaagccaaagagaaaaaactatgcggggagcaagtgggattcagaaagcaactccgaaagagatgttaccaaaaactcaaaaaacgactcccacccctcttcagacaaagaggagggggaggccacaagcgactccgagtccgaagtttcggagatccatattaaagttaagcccactactaagtctagtacaaatacaagtctgccagacgacaacggggcttggaaatcatcaaagcaaaggacaagcacctcggactcagagggctcctgctccaactctgagaacaaccgggggaagccgcagaaacacaagcacgggtctaaggagaatttaaagcgcgaacatactaagaaggtgaaggaaaagctaaaagggaaaaaggacaaaaaacacaaggcccccaaaagaaaacaggcattccattggcagccccctctggaatttggggaggaggaagaggaagagatcgatgacaagcaggttactcaagaaagtaaggagaagaaagttagcgagaacaatgaaaccataaaggacaacattctcaaaactgagaagagttcggaagaagacctgtctggaaaacacgacacggtaaccgtctcctctgatcttgaccagttcacaaaagatgacagtaagctcagcatcagtccaactgcattgaataccgaagagaacgtggcatgtcttcagaatattcaacacgtggaagaaagcgttccaaacggagtggaagacgtgctccagactgatgataatatggagatttgtacacctgataggtcttcacctgctaaggtggaagagacttctcccctggggaatgcaagattagacacaccagacattaatatcgtgctcaaacaagatatggcaactgaacatccccaggcagaggtggtgaagcaggagtctagcatgtccgaaagcaaagtgctgggagaagtgggcaaacaggactcttcttctgcctctctagcctcagctggtgagtccactgggaaaaaagaagtggccgagaaaagccaaatcaaccttattgataaaaagtggaagcctctgcaaggcgttgggaacctcgcggctccaaacgccgcaactagctctgctgtagaggtgaaagtgctcacaaccgttccggagatgaagcctcaggggctgaggatcgagataaaaagtaaaaataaggtgcggcctggaagccttttcgatgaggtgagaaagactgccagattaaacagaaggccaaggaaccaagaatcttcgtccgacgaacagacacccagccgcgacgatgacagccagagccggtccccctcgaggtcccgttctaagagcgagacaaagtccagacaccggacccgctccgtgtcatactcacattcccgctcaagaagccgatcatccacctcctcttaccggagccggagttactcgcgcagtcggtcccgggggtggtatagtcgagggcggaccaggtcccgttcttcttcctataggtcctacaaatctcatcgcacttcttcccgcagtcggagccgatcctcatcatacgacccgcatagtaggtctaggtcgtatacctacgactcatattactcccgtagccgaagtcgcagtcggagtcagaggtcagactcctaccatcggggccggagttataataggcggagccgttcttgcagaagctatgggagtgactccgaatccgacaggagttattcccatcaccgctccccctctgaaagcagtcggtattcatag

SEQ ID NO: 155564 - DNA, 4389 bp, Artificial Sequence
  derived and/or modified sequence
atgggggcacaggatagacctcaatgccattttgacattgagattaatagggaacccgtcgggaggattatgtttcagttattcagtgacatctgtcctaaaacctgcaagaactttctctgtctgtgcagtggcgaaaagggccttgggaagactacagggaaaaagctgtgttacaagggatccacgttccaccgggtggtgaagaacttcatgatccaaggcggagatttttctgaaggaaacggcaagggtggagagtccatctacggaggttacttcaaagatgaaaacttcatactgaagcacgacagagccttcctgctaagcatggccaaccggggtaaacacacaaacggcagccagttttttattacaactaaacctgcccctcacctcgacggagttcacgttgtgttcgggctggtaattagtggcttcgaagtcattgagcagatcgagaacctgaagacggacgctgctagtcgcccatacgcagatgtccgcgtgattgattgcggcgtgctggcaacgaaaagcatcaaagacgtttttgagaagaaaagaaagaaacccacgcattctgaaggctctgacagctcgtccaatagttcatcttcctctgaatcttcctctgagtctgaactggagcacgagagatcgcgacgacgcaaacataagagacgcccaaaagtcaagcggtcgaagaagagaaggaaagaggcgagctccagtgaagagccccgaaataagcacgctatgaatccaaaaggtcactctgagcggagcgatactaatgaaaagagatcagtggactctagtgccaaaagggagaagccagtggtaaggccagaggaaatcccgccagttcccgagaatcggttcttgctcaggagggatatgcctgtcgttactgctgagcccgaacccaagattcctgacgtcgcccctatcgtttctgaccaaaaacccagcgtgtccaagtctggcaggaaaataaaagggagaggtacaattcgctaccacacaccacccagaagccgctcatgctctgaatctgacgacgatgactccagcgagactcccccacactggaaagaggaaatgcagcggctgagggcttatcgccctccctccggcgagaagtggagcaaaggggacaaactgagcgacccatgcagctcccgatgggacgaaaggtccctatcccaaaggtccaggtcctggagttataacggatattattccgatctgtcgactgcccgacatagtggacatcataaaaaacgaaggaaagagaagaaggtcaagcacaagaaaaaaggcaaaaagcagaaacactgcagaagacataaacagaccaaaaagagaaggatcttgatcccgtcagacatcgagtcgtcaaagtcctctacgcgcagaatgaaaagtagctgtgacagagagcggagctctcgatccagctcattgtccagccatcacagctcaaagcgggattggtctaaatctgataaggatgtgcaaagtagcctcacccacagctcacgagattcctatagatcgaaaagccattcgcagtcctattcccggggatccagccgttccaggacagcatctaagagctcctcacatagtcggagccggtcgaagtcaagatctagtagtaagagcggccatcgaaaacgggcatctaagtctccaagaaagacagcgtcacagctctcagagaataaaccggtgaaaaccgagccacttcgggctacaatggcacagaatgagaacgtggtggtccagcccgtcgtagccgagaacatccctgtgatccctttgagcgattctccgccaccttctcggtggaaaccaggacaaaaaccttggaaaccgtcctatgaacggattcaggaaatgaaagctaaaacaactcatcttctcccaattcagtctacatatagcctcgctaatatcaaggaaacaggttctagcagcagttatcataagcgtgagaaaaacagcgagtctgaccagtccacctactcaaaatatagcgaccggagttctgagtcttcgcctcgcagtagatctcgcagtagtcgctctcgctcttacagcaggagttacacccggtcccgatcactggcaagttcccattctagatcccggtccccgtccagtagatcacattctcggaataaatattccgaccacagccagtgctccagatcatcctcttacacctccatcagttccgatgatggtagacgggcaaagcgacggctccgcagttcaggcaagaaaaactccgtgtcccacaaaaaacactctagcagcagtgaaaagactctccactcaaagtacgttaagggtcgtgatcgctcctcctgcgtacgcaagtactcggaatccagaagctcgttggactatagctccgatagcgagcaaagttccgtgcaggccacacagagcgctcaggagaaggagaaacaggggcagatggaacgaactcacaataagcaggagaaaaatcgaggagaggaaaaaagcaaaagcgagcgtgaatgcccccattctaagaaaaggacgttgaaagagaatctgtctgatcacttgcggaacggcagcaagccaaagcggaaaaattacgctggatctaaatgggacagcgaatccaattctgaacgcgatgttaccaagaactccaaaaatgactctcatccctcatccgacaaagaagagggcgaagccacctcagacagtgagagcgaagtcagcgagatccacattaaggtgaaaccaaccacaaaaagctctacaaatactagtcttccagacgataacggcgcttggaagtcaagcaaacaacgaacatccacgtctgattccgaggggtcttgctcaaattccgagaataaccggggtaagccgcagaagcacaagcacggttctaaagaaaacctgaagagagagcataccaagaaggttaaggagaagttgaaaggtaaaaaagacaaaaagcataaggcgccaaagagaaagcaagcctttcattggcaacctcccctggaatttggggaggaagaagaggaagaaattgatgataagcaagtaacccaagaatccaaagaaaagaaagttagtgagaataatgagacaatcaaagataatatccttaagacagaaaagagctctgaggaggatctgtctggtaagcatgatacagtgacggtgtcgtcggacctggaccagttcacaaaggatgacagtaagctgagtatctccccaacagccctgaatacggaggaaaatgtcgcttgtctgcagaatatccaacatgtagaggaatctgtacctaacggtgtagaggatgtgttacaaacagatgataatatggagatttgtacccctgatcgaagctcaccggctaaagtggaggaaacatcaccactgggcaacgccagactcgatacccccgacattaacatcgtgctcaaacaggacatggctacagagcatcctcaggctgaagtggtcaaacaggaatcatcaatgtctgagagcaaagtgctcggcgaggtgggcaagcaggactcatcgtctgcttcgttggcttcagcgggtgagtcgacaggtaaaaaggaagtggcggagaaatctcagataaatctcatcgacaaaaaatggaaacctctgcagggcgtcggtaatttggccgcacctaatgcagccaccagcagcgcagttgaggtcaaagtgctcaccaccgtgccagaaatgaaacctcaaggtcttcgaattgagattaagagcaaaaataaggttaggcccggttctctgttcgacgaagtgcgtaaaaccgcaagactcaatagacgacctagaaatcaggaaagttcctctgatgaacagactcctagtcgggacgatgattcccaatctaggagccctagtcggagccggagcaagagcgagacgaaatctaggcatcggacgcgttccgtttcctactcccattctcgctcccgctctcggtcgtctacctcatcctacaggtcgcggagctacagcaggtcccgatcgcgaggctggtacagtcggggaaggacccggtctcggtcatccagttatcgtagttacaagtcccacagaacttctagcaggtcacggtctcggtctagttcctacgacccccacagtaggtcccggtcatatacctatgactcatactatagcagatccaggtctcgtagtagatcccagaggtcagattcatatcacaggggcagatcctacaatcgccgatcgcgctcctgccggagttacggttcagattccgaatcagacaggtcttactcacaccaccgtagcccttcagaatcaagccggtatagctag

SEQ ID NO: 155565 - DNA, 246 bp, Artificial Sequence
  derived and/or modified sequence
atgtcttattatggcagctactatggaggattagggtatggctgcggaggcttcggaggcctcgggtacgggtatggctgcggctgtggaagctttagaaggttgggctcggggtgcggctatggagggtacggatacgggtccgggtttgggggttatgggtatggatcagggtttggaggctatgggtatgggtgctaccgcccttcttattacgggggatacggattctccggcttttactag

SEQ ID NO: 155566 - DNA, 7337 bp, Artificial Sequence
  derived and/or modified sequence
gtactctcgcggtatttgtcccgactctcgcggggtttagcgtggcattgggaggcccggcctgggggaggagacggcgttccgttagcggcgttggggtttggctgcagtggcagtgctttctcttctgctcacggggacccgctcaggctggaggccagccagctcttgccgccacctcggtcgcgatgggggcgcaggaccggccgcagtgccacttcgacatcgagatcaaccgggagccggttggtcgcattatgtttcagctcttctcagacatatgtccaaaaacatgcaaaaacttcctttgcttgtgctcaggagagaaaggccttgggaaaacaactgggaagaagttatgttataaaggttctacgttccatcgtgtggttaaaaactttatgattcagggtggggacttcagtgaaggtaatggaaaaggtggagaatcaatttatggtggatattttaaagatgaaaactttattctcaaacatgacagagcgttccttttatcaatggcaaatcgagggaaacataccaatggttcccagtttttcattaccacaaagcctgctccacacctggatggggtgcatgtagtctttggactggttatttctggttttgaagtaatcgaacaaattgaaaatctgaagaccgatgctgcaagcagaccatatgcagatgtgcgagttattgactgtggagtacttgccacaaaatcaataaaagatgtttttgagaaaaaaaggaagaaaccaactcattcagaaggctcggattcctcttccaattcctcctcttcttcagaatcatcttcagaaagtgaacttgaacatgagagaagcagaaggaggaaacataagaggaggccaaaagttaaacgttctaaaaagaggcgaaaggaagcaagcagttcagaagagccaaggaataaacatgcaatgaacccaaaaggtcactctgagaggagtgataccaatgaaaaaaggtcagttgattccagtgctaaaagggaaaaacctgtggtccgcccagaagagattcctccagtgcctgagaaccgatttttactgagaagagatatgcctgttgttactgcagaacctgaaccgaagattcctgatgttgcacccattgtaagtgatcagaaaccatctgtatcaaagtctggacggaagattaaaggaaggggcacaattcgctatcacacacctccaagatcaagatcctgttctgagtcagatgatgatgacagcagtgaaactcctcctcactggaaagaggaaatgcagagattaagagcatatagaccacctagtggagaaaaatggagtaaaggagataagttaagtgacccctgttcaagccgatgggatgaaagaagcttgtctcagagatccagatcatggtcctataatggatattattcagaccttagtacagcaagacactctggccaccataaaaaacgcagaaaagaaaaaaaggttaagcataaaaagaaagggaaaaagcagaaacactgcagaagacacaaacaaacaaagaagagaaggattcttataccgtctgacatagaatcctcaaaatcttccactcgaagaatgaaatcctcttgtgatagagaaaggagttctcgttcttcctcattgtcatctcatcactcatcaaagagagactggtctaaatctgataaggatgtccagagctctttaacccattccagcagagactcatacagatcaaaatctcactcacagtcttattctagaggaagctcaagatcaaggactgcgtcaaagtcctcatcacattctcgaagtagatcaaagtccagatctagttccaagtctgggcaccgaaagagagcatcaaaatcaccaagaaaaacagcttctcagttaagtgaaaataaaccagttaaaacagaacctttaagagcaaccatggcacaaaatgaaaatgtagtagtacaaccagttgtagcagaaaatattcctgtaataccactgagtgacagtccccccccttcaagatggaagcctggacagaaaccttggaagccctcttatgagcgaattcaggaaatgaaagctaaaacaacccatttgctacccatccaaagcacttacagtttagcaaatattaaagagactggtagctcatcatcctaccataaaagagaaaaaaattcggaaagtgatcagagcacttattcaaaatacagtgatagaagttcagaaagctcaccaaggtcaaggagcagatcttctaggagtagatcttattccagatcatatacaagatcacgtagtctagctagttcacattcaaggtctaggtctccatcatctagatctcattcacgaaataaatacagtgatcattcacagtgtagtagatcatcttcatatacttctattagcagtgatgatggaaggcgagctaagaggagacttagatccagtgggaaaaaaaatagcgtttcacataaaaagcatagcagcagctctgaaaagacacttcacagtaaatatgtcaaaggtagagacaggtcttcatgtgtgagaaagtatagcgagagcagatcatctttagattattcttcagacagtgagcagtcaagtgttcaggccacacagtcagcccaggaaaaagagaagcagggccaaatggaaagaacacataataaacaagaaaaaaacagaggtgaagaaaaatccaagtctgaacgggaatgccctcattcaaaaaaaagaactttgaaagagaatctttctgatcaccttagaaatggcagtaagcccaaaaggaagaattatgctggtagtaaatgggactctgagtcaaattcagaacgagatgtcactaaaaacagtaaaaatgactcccatccatcctctgacaaggaagaaggtgaggccacatccgattctgaatcagaggttagtgaaattcacatcaaagtcaaacccacaaccaagtcgtccacaaatacttcactgcctgatgataatggtgcttggaaatcaagcaaacagcgcacatcaacttctgactctgaggggtcctgttccaattcggaaaacaataggggaaagccacaaaagcacaaacatgggtcaaaggaaaatcttaaaagagaacacaccaaaaaagtgaaagagaaattgaaagggaaaaaagacaaaaagcataaggctccaaaacgaaagcaagcatttcactggcagcctccactagaatttggtgaagaggaggaggaggagattgatgacaagcaagttactcaggaatcaaaagagaaaaaagtttctgaaaacaatgaaaccataaaagataatattctaaaaactgagaaatccagtgaagaggacctttcaggtaaacatgatacagtgactgtttcatcagatcttgatcagtttactaaagatgatagtaaactcagtatttctcccacagctttaaatactgaggaaaatgtggcctgtttacaaaacattcagcacgttgaagaaagtgttcccaatggagtggaagatgtgcttcaaacagatgacaacatggagatctgcactcctgataggagttccccagcaaaagtagaggagacttcccctctaggaaatgcacggcttgataccccagatataaacattgttttgaagcaggatatggcaacggaacatcctcaagcagaggtagtaaaacaggaaagcagcatgtccgaaagtaaagtgttgggtgaagtggggaaacaggacagcagctctgctagcttggctagtgctggagaaagtaccgggaagaaggaggtggctgagaagagccagatcaacctcattgataagaaatggaagcccctgcaaggtgtggggaacctggcagcacctaatgctgccacatccagtgctgtggaagttaaggtgttgaccactgtgcctgaaatgaaaccacaaggcttgagaatagaaattaaaagcaaaaataaagttcggcctgggtctctctttgatgaagtaagaaagacagcacgcttaaaccgtagaccaagaaatcaggagagttcaagtgatgagcagacgcctagtcgggatgatgatagccagtccaggagtccaagtagatctcgaagtaaatctgaaaccaaatcaagacacagaacaaggtctgtctcctatagtcactcaagaagtcgatcgagaagttccacatcatcttatcgatcaagaagctactctagaagtcggagcagaggatggtacagcagaggccgaaccagaagccggagcagttcctaccggagttacaaaagtcacaggacgtccagcaggagcagatccaggagcagctcatatgatccccacagtcgatccaggtcctacacctacgatagctactatagcaggagtcggagtcgaagtagaagccagagaagtgacagttaccaccgaggcagaagttataatcggcggtccaggagttgtagatcttatggctctgacagtgaaagtgaccgaagttactctcatcaccggagccccagtgagagcagcagatacagttgaaaacgtccggatacaaattatatcttatttgtaaatatctggcaacttagcttaagaaatgtaatgacagtctgttgttctatttcaatatcagaggtgaatttcaaaaatagacacttcttaattgttactggttcatttacatgtggggagaagaatttaaaatacagatatgtctcctaaaaatatttttatgccacattttacagtagccaactatggaaatgaatttcattttcttgaatcaagaaatcgtgaaatttatctatgtataatttgcaatattattttaagtctatttcactctatcttacgtatcccttagaatacagattctttttgcctgtttttccagttttagcatatatgctgccaagcatagaactgtgaaggagaactgttaaaggcggccaaatatttatatactgattacatagagtcttgtacatatgtgctctaaaaacaaaccacccagaattgatactgttggtaaccaggagtataaggcagtggctctggggttcttaattcattcctaacttctttgatacttcacaggattaggaaagtggtcatcatacatcccacacagtctgtattacttcaggcttgtgggcaaggttaggaagaatcaatcagccttaactataaatacctgcactgtctctgaggacttactattttatgttctttttaatcaataccgatcagaagtttaggttataaaaacaattctacttcatgctttggtgcttggtaatttttggtgcgtctttaagcattactcttatatatcatatattaaaataccataaaaatgaaattcagacaaaatcactggcaccaaaaatggtttattctgagctgtcttcactttgactatttggggggcttctctcaagtacagatgtgggttggggtcccctggagcaggcaggattggcagtaagagatattggccactcaagtctactgtgtgtgtgtgcctctggaagagtgaagaatggacttcaaaagtaacatcaaaaatctaactgccaccatcctggagacattttgcagggctttcctttcaagtctttcaagtacaggatattaccacaacagcagctgaactgttgtaaccagcatgtttttcctatttccactgtgacctgcagctgactcaaagccttgcgtgacctgacccaggtgcaagagacaggggaagagggatagagggtatagcataaattacatattttcatggctttgggtggttcctccaaaaataattggacctgtaaaaactagtgtgtgtgtgtgtgtgtgtgtgtgtgtgtgtgtggtttttttttttaatctttactttgaatttgttccccaagtgtacttaatcaccttagtgccagtttaatccagttatgcagaagaaattcatattggttgcctgatgtagagctcagcaccaccctaccacaggccttgtctggtgtatttgggaagtggaaaagagccctcagttggagggagctgacaacccttggtggagggagggtgcccttgaatgtattaaaactatcacccaaagaaggtatgaaaacagggtaaggtggtcagttgtttgccaggtcaatagacagaaagtacattagaaaacaggacttaggccaaacaaacaatactggatactgaatacaaaacagtatgatttatattaaaggtttccaaaggttgcctgcaaaggagaatattactactagtcagcaggaaaaaaatgcattcagaacccaagcagaaactgccaaatgtaattaggttaagaaaagttacccttgggcagtgtattagttttctattgctgtgtgacaaattaccccaaatttagcagtttaaaaaacaatacccatagcagttctgtagctcatgagtctggcacagtgtggctggattctctgctcagggtcttaaaggctgaaataagggttggcaggacaacattccttcatggaggctctggggaagaatctgcttctaagttcattcaggttgttggcggaattcagttctttgctggctctcagctggaggcccctctctcacctcaaggctgcctgcattccttcttatgtggtcccctccagcttcaaaccagccttcctgctctttctcatgcttcatatctctctcccgtcctcctgttttaggggcatatgattagctcaagcccacagatatattttaaggttgattgtgcgatagaacataattgcaggagtactgtctcatctcatcatattcacgggttctggagattagctcattgaaagtgggaggggcattttcaaattctgcctaccacaggcaataactgcccatctcagctgtaggtggaatttttacccagaaaagataggccctagaagcctcatttcttttctccatggaaaaggacagccctctgctgcagcgttcaacttgtgtgtttactgacagagtgaactacagaaatagcttttcttcctaaaggggattgttctacattttgaagttattttttaataaaattgaattatgttgtgtattgtgcttcttaataggaaatgcattattggactgtttttgtaacatcctgtttattgcaaatagctagtatcgttcaaaaactgtataaaatacttttgtacatattagcaatgtctaatttgtatacacttcagttaaatttccctaaaacttgaaaggggaccttgtagaaattaaaatatatacttagtctaa

SEQ ID NO: 155567 - protein, 81 aa, Artificial Sequence
  derived and/or modified sequence
MAAVAAASAELLIIGWYIFRVLLQVFLECCIYWVGFAFRNPPGTQPIARSEVFRYSLQKLAYTVSRTGRQVLGERRQRAPN

SEQ ID NO: 155568 - DNA, 246 bp, Artificial Sequence
  derived and/or modified sequence
atggcagccgtggcggcggccagcgcagagctacttatcatcgggtggtacatcttccgggtgctgctccaagtgtttctggagtgttgtatctactgggtgggtttcgcattccggaatcccccgggcacccaacccatcgcaaggagcgaagtgtttcgttacagtcttcagaaactcgcttacacagtctctagaaccggaagacaagtactaggagagcggcgccagagggcacccaattag

SEQ ID NO: 155569 - DNA, 246 bp, Artificial Sequence
  derived and/or modified sequence
atggctgctgtggccgccgccagcgctgagctgctgatcatcggctggtacatcttccgggtgctgctgcaggtgttcctggagtgctgcatctactgggtgggctttgccttcagaaatcctcctggcacccagcccatcgcccggtctgaggtgttccgctacagcctgcagaagctggcctacacagtgtccaggacaggccggcaggtgctgggggagcggcggcagagggcccccaactag

SEQ ID NO: 155570 - DNA, 246 bp, Artificial Sequence
  derived and/or modified sequence
atggccgccgtggccgccgccagcgccgagctgctgatcatcggctggtatatttttcgcgtgttactccaggtgtttttggaatgttgcatttactgggtggggttcgccttccgcaacccccctggtactcagcccattgctcgttctgaagtctttcgttatagcctacagaagctggcctacaccgtgtccagaaccggacggcaggtgctcggagagaggaggcagcgcgccccaaattag

SEQ ID NO: 155571 - DNA, 1294 bp, Artificial Sequence
  derived and/or modified sequence
gcgggtacttaaggcgcggccaccgcggctgcggcagtgcgcccaacagcggactccgagaccagcggatctcggcaaaccctctttctcgaccacccacctaccattcttggaaccatggcggcagtggcggcggcctcggctgaactgctcatcatcggctggtacatcttccgcgtgctgctgcaggtgttcctggaatgctgcatttactgggtaggattcgcttttcgaaatcctccagggacacagcccattgcgagaagtgaggtgttcaggtactccctgcagaagctggcatacacggtgtcgcggaccgggcggcaggtgttgggggagcgcaggcagcgagcccccaactgaggccccagctcccagccctgggcggccgtatcatcaggtgctcctgtgcatctcggccagcacgggagccagtgccgcgcaggaatgtggggtcccctgtgttccctcgccagaggagcacttggcaaggtcagtgaggggccagtagacccccggagaagcagtaccgacaatgacgaagataccagatcccttcccaacccctttgcaccggtcccactaaggggcagggtcgagagaggaggggggatagggggagcagacccctgagatctgggcataggcaccgcattctgatctggacaaagtcgggacagcaccatcccagccccgaagccagggccatgccagcaggccccaccatggaaatcaaaacaccgcaccagccagcagaatggacattctgacatcgccagccgacgccctgaatcttggtgcagcaccaaccgcgtgcctgtgtggcgggactggagggcacagttgaggaaggagggtggttaagaaatacagtggggccctctcgctgtcccttgcccagggcacttgcattccagcctcgctgcatttgctctctcgattcccctttcctcctcactgcctcccaagcccaccctactccaaaataatgtgtcacttgatttggaactattcaagcagtaaaagtaaatgaatcccacctttactaaaacactttctctgaaccccccttgcccctcactgatcttgcttttccctggtctcatgcagttgtggtcaatattgtggtaatcgctaattgtactgattgtttaagtgtgcattagttgtgtctccccagctagattgtaagctcctggaggacagggaccacctctacaaaaaataaaaaaagtacctcccctgtctcgcacagtgtcccaggaccctgcggtgcagtagaggcgcaccaaaa

SEQ ID NO: 155572 - DNA, 246 bp, Artificial Sequence
  derived and/or modified sequence
atggcagccgtagcagctgcctccgccgagctgttaattattgggtggtacattttcagagtgctcttgcaggtcttcttggaatgttgtatttattgggtgggtttcgcatttcgaaatcctcctggtacccaacccattgcccgttccgaggtttttaggtatagcctgcagaagctggcctacacagtaagtcgcaccggacgccaagtgctgggcgagcggcgacagcgcgcacctaactag

SEQ ID NO: 155573 - DNA, 246 bp, Artificial Sequence
  derived and/or modified sequence
atggcagcggtggctgctgccagcgccgaacttctgataattggctggtacattttcagagtactgttgcaggtttttctcgagtgctgcatatattgggtcggcttcgcatttagaaatccccctggaacgcaaccaatcgctagatctgaggtcttccgttattccctgcagaaattagcttacacggtttcacgtacaggccgacaggtgctcggagagcgtcgccaacgcgccccaaattag

SEQ ID NO: 155574 - DNA, 246 bp, Artificial Sequence
  derived and/or modified sequence
atggccgccgtggccgccgccagcgccgagctgctgatcatcggctggtacatcttcagagtgctgctgcaggtgttcctggagtgctgcatctactgggtgggcttcgccttcagaaacccccccggcacccagcccatcgccagaagcgaggtgttcagatacagcctgcagaagctggcctacaccgtgagcagaaccggcagacaggtgctgggcgagagaagacagagagcccccaactag

SEQ ID NO: 155575 - RNA, 246 nt, Artificial Sequence
  derived and/or modified sequence
auggcagcgguggcugcugccagcgccgaacuucugauaauuggcugguacauuuucagaguacuguugcagguuuuucucgagugcugcauauauugggucggcuucgcauuuagaaaucccccuggaacgcaaccaaucgcuagaucugaggucuuccguuauucccugcagaaauuagcuuacacgguuucacguacaggccgacaggugcucggagagcgucgccaacgcgccccaaauuag

SEQ ID NO: 155576 - DNA, 2814 bp, Artificial Sequence
  derived and/or modified sequence
atgtttaataaatcattcggcactccgtttggaggcggtaccggcggatttgggactacgtccacgtttggccaaaacaccggctttggaaccacgagtggtggagccttcggtacaagcgccttcggatcctcaaataatacaggcgggctatttggaaacagtcagaccaaacccgggggtctctttggtacaagcagcttctcccagccagccacttccacaagcaccggctttggatttggaacatccacagggacggctaacacacttttcgggaccgcgagtactggtacttcactcttttcgagtcagaataacgcctttgcccagaacaagcctacggggttcggaaactttgggacaagcaccagctccggcgggcttttcggcactacgaatacaacctctaatcccttcggcagtactagtggctctctctttggccccagtagcttcacggccgcacctacaggaaccacaattaaatttaacccaccaacaggcacggatactatggtgaaagcaggcgtgtcgaccaacatttcaactaagcaccagtgtatcacagcgatgaaagagtacgagtccaagtcccttgaggagctcaggctggaagattatcaggcgaataggaagggacctcaaaaccaggtcggtgcaggaacgacgactggcttgtttggcagttcacctgccacctccagcgccaccggccttttcagttcttcgaccaccaattctggcttcgcttacggtcaaaacaagacagcctttggtacatccactacaggattcggcacgaaccctggcgggcttttcggtcagcagaatcagcaaacaaccagcctcttctctaaaccatttggacaggcaaccacaacacagaacactggcttttcattcggcaacacctcaacaataggccagccttcaactaacaccatggggctgttcggtgttacacaggcaagccagccaggaggcctgttcggtactgccacgaatacctccacaggcaccgcattcgggactggcacagggctatttggtcaaacaaataccggcttcggggccgtggggagcaccctttttggaaataataagctgaccacatttggctcatctactacatcagcaccttcattcggtacgactagcggtggactgtttggcaacaaacctaccctgacgcttgggactaacactaatacatccaatttcggattcgggactaacacatcaggcaacagcatttttggcagcaagcctgctcccggcacgctcggaactggcctcggtgcaggattcggaaccgctttgggtgctggccaggccagcctgttcggaaataatcaacctaaaattgggggaccacttggtactggagcttttggggctcccggattcaatactactacagccacactaggctttggagcccctcaagcccccgtggccctcacagaccccaatgcaagcgcggcacagcaagcagtactgcagcagcacattaatagccttacatactccccttttggtgactctcctctattcagaaacccgatgtcagatcccaagaaaaaggaagaacggctcaaacccaccaaccctgccgcgcagaaggccttgacaacgccaacacattacaagctgacgcccagacccgctaccagagtcaggcccaaggccctgcagaccacaggcactgcgaagtcgcacttattcgacggattggacgacgacgagccctctctggccaacggggcctttatgcctaagaagagtatcaagaagctggtgcttaaaaacctgaataactcgaacttgttcagccctgtgaatagagattctgagaacctcgctagtccaagtgaataccctgagaacggagagcgcttttcctttttgtccaaacctgttgacgagaatcaccagcaggacggggacgaggacagcctggtttctcacttctataccaaccccattgcaaaaccgatccctcagacccccgaaagtgcgggaaataaacattctaacagtaactccgtggacgacacaattgtcgcactgaacatgcgagctgcactgaggaacggcctggaaggtagcagcgaagaaacgtcgtttcatgacgaaagcctccaagacgatcgggaagagatcgagaacaattcttatcacatgcaccccgccggcatcattcttaccaaagtcggctactatacgattccatccatggatgacctggccaagatcacgaatgagaaaggcgaatgcatcgtttctgactttaccatcggacgcaagggttatggtagtatatactttgagggcgacgttaacttgactaacctgaacctagacgatatagtccatatacggcggaaagaggtggtggtgtatctcgacgataatcaaaaacctccagtgggagagggcttaaatcggaaggctgaggtgacgttggacggagtatggccaacggacaagacatcccgatgccttatcaaatcacccgacaggttggcggacattaactatgaggggcggctggaagcggtgagtcggaagcagggtgcccaattcaaggaatatcggcctgagactggttcatgggtgtttaaagtgtcccatttttccaaatacggtttacaggatagtgatgaagaagaggaggagcacccaagtaaaacaagcaccaaaaagctaaaaactgctcccttgcctcccgccagccagaccacccctcttcaaatggcacttaacggcaaaccggctccacccccgcaagtcgagaaaaaggggcagtag

SEQ ID NO: 155577 - DNA, 2814 bp, Artificial Sequence
  derived and/or modified sequence
atgttcaacaagagctttggcaccccatttggaggcggcaccggcggcttcggcaccaccagcaccttcggccagaacacaggcttcggcaccaccagcggcggggccttcggcaccagcgccttcggcagcagcaacaacacaggaggcctgtttggaaacagccagaccaagccaggcggcctgtttggcaccagcagcttcagccagcctgccaccagcaccagcactggatttggatttggcaccagcactggaacagccaacaccctgtttggaacagccagcacaggcaccagcctcttcagcagccagaacaatgcctttgcccagaacaagcccactggatttggaaactttggcaccagcaccagcagcggcggcctgtttggcaccaccaacaccaccagcaaccccttcggcagcaccagcggcagcctgtttggccccagcagcttcaccgctgcccccaccggcaccaccatcaagttcaacccccccaccggcacagacaccatggtgaaggccggcgtgtccaccaacatcagcaccaagcaccagtgcatcacagccatgaaggagtatgagagcaagagcctggaggagctgcggctggaggactaccaggccaacaggaagggcccccagaaccaggtgggcgccggcaccaccaccggcctgtttggcagcagccctgccaccagcagcgccaccggcctcttcagcagcagcaccaccaacagcggctttgcctacggccagaacaagacagccttcggcaccagcaccaccggcttcggcaccaaccctgggggcctgtttggccagcagaaccagcagaccaccagcctcttcagcaagcccttcggccaggccaccaccacccagaacacaggcttctcctttggaaacaccagcaccatcggccagcccagcaccaacaccatgggcctgtttggagtgacccaggccagccagcccggcggcctgtttggaacagccaccaacaccagcactggaacagcctttggaactggaacaggcctgtttggccagaccaacacaggctttggagctgtgggcagcaccctgtttggaaacaacaagctgaccaccttcggcagcagcaccaccagcgcccccagctttggcaccaccagcggcggcctgtttggaaacaagcccaccctgaccctgggcaccaacaccaacaccagcaactttggcttcggcaccaacaccagcggcaacagcatcttcggcagcaagccagcccctggcaccctgggcaccggcctgggcgccggctttggaacagccctgggcgccggccaggccagcctgtttggaaacaaccagcccaagattggaggccccctgggcaccggggcctttggagcccctggcttcaacaccaccacagccaccctgggctttggagccccccaggcccctgtggccctgacagaccccaatgccagcgctgcccagcaggccgtgctgcagcagcacatcaacagcctgacctacagcccctttggagacagccccctcttcaggaaccccatgtctgaccccaagaagaaggaggagcggctgaagcccaccaacccagctgcccagaaggccctgaccacccccacccactacaagctgacccccaggcctgccaccagggtgcggcccaaggccctgcagaccaccggcacagccaagagccacctgtttgatggcctggatgatgatgagcccagcctggccaacggggccttcatgcccaagaagagcatcaagaagctggtgctgaagaacctgaacaacagcaacctcttcagccctgtgaacagagacagcgagaacctggccagccccagcgagtacccagaaaatggagagcgcttctccttcctgagcaagcctgtggatgagaaccaccagcaggatggagatgaggacagcctggtgagccacttctacaccaaccccatcgccaagcccatcccccagaccccagagagcgctggcaacaagcacagcaacagcaacagcgtggatgacaccatcgtggccctgaacatgagagctgccctgagaaatggcctggagggcagcagcgaggagaccagcttccatgatgagagcctgcaggatgaccgggaggagattgagaacaacagctaccacatgcaccctgctggcatcatcctgaccaaggtgggctactacaccatccccagcatggatgacctggccaagatcaccaatgaaaaaggagaatgtattgtgtctgacttcaccatcggcaggaagggctacggcagcatctactttgaaggagatgtgaacctgaccaacctgaacctggatgacatcgtgcacatccggaggaaggaggtggtggtgtacctggatgacaaccagaagccccctgtgggggagggcctgaacaggaaggccgaggtgaccctggatggagtgtggcccacagacaagaccagccgctgcctgatcaagagcccagaccggctggccgacatcaactatgagggccgcctggaggccgtgtccaggaagcagggcgcccagttcaaggagtacagacctgagaccggctcctgggtgttcaaggtgagccacttcagcaaatatggcctgcaggacagtgatgaggaggaggaggagcaccccagcaagaccagcaccaagaagctgaagacagcccccctgcccccagccagccagaccacccccctgcagatggccctgaatggcaagccagcccccccaccccaggtggagaagaagggccagtag

SEQ ID NO: 155578 - DNA, 2814 bp, Artificial Sequence
  derived and/or modified sequence
atgttcaacaagagcttcggcacccccttcggcggcggcaccggcggtttcggcactacgtccactttcggacagaatactggttttggcaccaccagtggcggcgcttttgggacatcagcatttggcagctctaataacaccggcggcctcttcggcaactcacaaacaaagccaggtggccttttcgggacttcatctttctctcagcctgccaccagcactagtacaggattcggcttcggcacatcaacaggcactgctaacaccctctttggcacggcttctacaggaacctcactgttctcctcgcaaaataacgccttcgctcagaacaaacctaccggattcgggaattttggtacctctacgtcatctggcggtttgtttggcaccacaaacacaaccagcaacccatttggctccacttcaggctcattgtttggaccctcaagtttcactgccgccccaaccggaactaccatcaagttcaacccaccaactggtactgacacaatggtcaaagccggggtgtccactaatatttctaccaagcatcaatgcatcaccgctatgaaagagtatgagtccaaatcactcgaagaattgcggctcgaggactaccaggccaacagaaagggcccccaaaaccaggtgggggccggcacgactaccggcctattcggaagcagccctgcaacaagtagtgcgacgggattgtttagcagctccaccacaaactccggctttgcatacggacagaacaagacggcgttcggcacctccaccaccgggtttgggaccaaccccggcggactttttggtcagcagaatcaacagacaacgagcctattttccaagcccttcggccaagctacgaccacccagaacacagggttttccttcggcaataccagcacaatcgggcagccatccacaaataccatgggcctgttcggcgtgacgcaggccagccaacccggtggccttttcggcaccgcgaccaacacatctactgggacggctttcggcaccgggaccggcctgtttggccaaacgaacactgggttcggagctgtcgggagtacgcttttcggaaacaataagctcaccactttcggatcttccaccacatcggctccctcattcggtacaacttcggggggactttttggcaataagcctaccttgacattagggaccaataccaatactagcaacttcggctttggcacaaatacgtctgggaatagcatctttggatctaaacctgctcctggaactctcgggaccgggctcggggcgggttttgggaccgcgctgggggctgggcaggcaagtctgttcggaaataatcagccaaaaatcggcggccctctaggcactggcgcattcggcgcacctggattcaacacgacaaccgccacactgggattcggggctccacaagcgccggttgctctcaccgatcctaacgcaagcgccgcccaacaggcagtgttgcagcagcacattaacagcctaacctatagtccatttggtgactcacctcttttcaggaatccgatgtctgatccgaagaagaaagaggagcgtcttaagcccacaaatcctgccgctcagaaggcactgaccactccgacccactataagctgactccccgccctgccacccgcgtgagaccaaaggccctgcaaaccaccgggaccgcgaagagccatctctttgacggcctggacgatgacgaaccttctctcgccaatggagcatttatgcccaaaaagtccatcaagaagctggtcctcaaaaatctgaacaacagcaaccttttctctcccgtcaaccgagattctgagaacctggctagtcctagcgaataccccgagaacggcgagcgctttagctttctgtccaagcctgtggatgaaaatcaccagcaggatggagacgaagattcccttgtcagccatttttacactaacccgattgcgaaacccatcccccaaaccccagaatccgccggcaataaacattcgaattccaactccgtggatgataccattgttgcactgaatatgcgggctgcactacggaacggattggaaggttccagcgaggagacctccttccacgatgagagcttgcaggatgaccgggaagaaatcgagaacaactcataccacatgcatcccgcaggcatcattttgaccaaggtgggttattatactattccctccatggacgacctggctaagattactaacgaaaaaggtgaatgcatagtttctgacttcacaatcggcagaaagggatatggatctatttacttcgaaggggacgtcaatctgaccaatttgaatctagacgacatcgtccatatccggcgcaaagaagttgtggtatacctcgacgataatcagaaaccgccagtcggagagggcttaaacagaaaagcagaggttaccctggatggagtgtggcccaccgacaagacatcgagatgcctgataaagagccctgaccggctggctgacattaattacgagggacggcttgaagctgtcagtaggaaacaaggagcccagttcaaggagtaccgccctgagactggtagttgggtcttcaaagtcagccatttctctaagtatggtctgcaggactcagacgaagaggaagaggaacatcctagcaagacttcaacgaagaagctgaagacagcacctctgccaccagcctctcaaacgactccactgcagatggctctgaacggaaagcccgcgcctccaccgcaggtcgagaagaaaggacagtag

SEQ ID NO: 155579 - DNA, 3698 bp, Artificial Sequence
  derived and/or modified sequence
ggccctctgcgcgctgcgcccgaagcggcggtcggtggcaggggtggtagcggcggcggcgacggtttcgtgggggccgcgcgctgctctgtgagcggcgggtggcagcaggggactcctgacacttccccttccccaccgaaccgcgctttctgaaacaaagactcattttgaagatgtttaacaaatcatttggaacaccctttgggggtggcacaggtggctttggcacaacttcaacatttggacagaatactggctttggcactactagtggaggggcatttggaacatctgcatttggttctagcaacaatactggaggcctctttggaaattcacagactaaaccaggaggattgtttggaaccagttcatttagccagccagctacctccacaagcactggctttgggtttggtacgtcaacaggaacagcaaataccttgtttggaactgcaagcacagggaccagtctcttctcatcccaaaacaatgcctttgcacaaaataaaccaactggctttggcaattttggaaccagtactagcagtggaggactctttggaaccacaaataccacctctaatccttttggcagcacatctggctccctctttgggccaagtagttttacagctgctcctactgggactactattaaatttaaccctccaactggtacagatactatggtcaaagctggagttagcactaacataagtaccaagcaccagtgtattactgctatgaaagaatatgaaagcaagtcactagaggaacttcgtttagaggattatcaggctaacaggaagggcccacagaaccaggtgggagcaggtaccacaactggcttgtttgggtcttctccagccacttccagcgcaacaggactcttcagctcctccaccactaattcaggctttgcatatggtcagaacaaaactgcctttggaactagtacaactggatttggaacaaatccaggtggtctctttggccaacagaatcagcagactaccagcctcttcagcaaaccatttggccaggctacaaccacccagaacactggcttttcctttggtaataccagcaccataggacagccaagcaccaacaccatgggattatttggagtaacccaagcctcacagcctggaggtctttttgggacagctacaaacaccagcactgggacagcatttggaacaggaacaggtctctttgggcagaccaatactggatttggtgctgttggttcgaccctgtttggcaataacaagcttactacatttggaagcagcacaaccagtgcaccttcatttggtacaaccagtggcgggctctttggtaacaaaccaaccctgactttaggaaccaatacaaacacttctaattttggttttggcacaaataccagtgggaatagtatttttggaagtaaaccagcacctgggactcttggaactgggcttggtgcaggatttggaacagctcttggtgctggacaggcatctttgtttgggaacaaccaacctaagattggagggcctcttggtacaggagcctttggggcccctggatttaatactacgacagccactttgggctttggagccccccaggccccagtagctttgacagatccaaatgcttctgctgcccagcaggctgttctccagcagcacatcaatagtctaacatactcaccttttggagactctcctctcttccggaatccgatgtcagaccctaagaagaaggaagagagattgaaaccaacaaatccagcagcccagaaggctcttactacacctactcattataaactgacaccccgccctgccactagagtccggccaaaggctttacaaacaacaggcacagccaagtcacatctctttgatgggctggatgacgatgaaccatccctagccaatggagcattcatgcccaagaagagcattaagaagttggttttgaagaaccttaataatagcaatctcttttctcctgttaatcgtgattcagaaaatctagcttcaccatctgaatatccagaaaatggagagagatttagtttcctaagcaaacctgttgatgagaatcaccagcaggatggagatgaagattcccttgtttcacatttttatactaaccctattgccaaacctattcctcaaaccccagaaagtgctggaaataaacacagcaacagcaacagtgtggatgataccattgttgcattaaacatgcgtgctgctttgcgaaatgggctggaaggaagcagtgaagaaacgtcttttcatgatgagtcacttcaggatgaccgagaagaaatagaaaataattcttaccatatgcacccagcaggtattattctcactaaggttggttactatactattccatctatggatgaccttgctaaaattaccaatgaaaaaggagagtgcattgtctctgatttcactattggtcggaaaggttatggttcaatctattttgaaggagatgtgaatttgacaaatctaaatttggatgatattgtgcatatccggaggaaagaagtagttgtctacttagatgataaccaaaaaccacctgtgggtgaagggctaaataggaaggctgaagttacattggatggagtttggccaacagataaaacatctcgttgtttaataaagagcccagatcgccttgctgatatcaactatgaaggaagattggaagcagtttcaaggaaacagggagctcaattcaaagaataccggcctgaaactggttcttgggtgtttaaggtctcccatttttctaagtatggccttcaggattctgatgaagaggaggaggagcatccgtctaaaactagtacaaagaagttgaagactgctcctttgcctcctgcaagccagactacgcccttgcagatggctcttaatggcaaacctgcacctccacctcaggtagagaaaaaaggacagtgaatttgaatggaatccgtgataccgaagttgaaagcaagtcattcagctaatacaaagctgttttatgacccttggaactttgaagagtacaaacattggcaatcacgttgaaacaagtgcaagggagggcgtgaggtcttgcaggcatctgtctttttactggagagatttaaagaattctcttgctgtttggattattcctctacagattgtcatttttaaaccctttgttctctctcatttggacttgctgaattctctgctcagtgattaacttaagatttgctcatgtgggttcatgcacagtaaattctgcctttattgactacctgatgtgcagtttaatctttttctttacctccatggttttttaaaagttaaattagctttctgaaagggtttttaatctccatttttttaaagttgtttgcttatacttcgggtaaccttgatatttgtattttaatagtacataatctttatgaaaaatagtttgggaatgtaaatgaattattatttggcttggggagattagggcctacattgtttatcgcaattacttgtatcattgatacgggatttctttgtaaagcatcctctacctctcagctgctgaaagctagacctttggtattttccatgctataattcttatggctgctgaaatgtgtggtttttatgatttattaaataatctcttaggaggca

SEQ ID NO: 155580 - DNA, 2814 bp, Artificial Sequence
  derived and/or modified sequence
atgttcaacaaatcctttggaacaccattcggaggcggtactggcggtttcgggacaacatcaaccttcgggcagaacaccggttttggcacgacttctggaggggctttcggaacctctgcattcggatcatcaaacaacacaggcggtctcttcggcaacagtcagactaagcccggagggctcttcggcacatcatcctttagtcaaccggctacctcaacctccactggtttcggcttcggaacgagtaccggcaccgctaacacacttttcgggaccgcatctacaggcacatccctgttctccagtcaaaataacgcctttgcccagaataagcctacagggttcggcaacttcggaacctccaccagcagcggcggactgtttggaactacgaacacgacctccaatcccttcggctccacttcaggcagcctttttggaccttccagcttcaccgccgcacctaccgggaccactatcaagttcaaccctcctaccggaactgacacaatggtgaaagccggtgtgtcgaccaatataagtacaaagcatcagtgcattaccgcaatgaaggaatacgaaagtaagtccctggaggaactgcgcctggaggactaccaggccaaccggaaagggccacagaaccaggttggcgcagggacaaccactgggctcttcgggtcttcccccgcaacatccagcgccaccgggttgttctctagctcaacgaccaattctgggttcgcatacggtcagaataaaacagcctttggaacatccaccactggatttgggaccaacccagggggactgttcggccaacagaaccagcagacgacttccctgttttcaaagcccttcggacaggccaccacgacccagaataccggctttagcttcggcaatacatccactattgggcagccttcaaccaacacaatggggctgttcggggtgacccaggccagccaacccggaggactgtttgggaccgccacgaacacctcaactgggactgctttcgggacaggaaccgggttgttcggccagaccaatacaggatttggggctgttggctcaaccctcttcggaaataataaacttaccaccttcggcagttcaaccacttctgccccttcctttgggacaactagcggcggtcttttcggaaataaaccgacgcttaccctcggcactaacactaacacaagtaacttcggttttgggacaaatacgtccggaaacagcatttttgggagcaagcccgcaccaggaactttagggacaggacttggggcaggctttggcacagctctgggagcaggccaagccagtctgttcggtaataatcagcccaaaatcggaggaccactcggaaccggcgcttttggcgctcctgggtttaatacaactacggccaccctggggtttggggcaccgcaggcaccagtggccctgaccgatccaaatgcatccgcggctcagcaggccgtgttacagcagcatattaattccctgacatactccccctttggtgattcacctctcttcagaaatcccatgtccgaccctaagaagaaagaagagaggcttaagcctacaaaccccgcagcccaaaaagctttgactacaccaacccactacaaactcacccccaggccggctactcgggtacggcctaaggcactgcagacaacaggaacagccaaaagccacctgtttgacggcttggacgatgatgagccaagcctggctaatggtgccttcatgccaaagaagagcatcaaaaaacttgtgctgaagaatcttaataactctaatctcttttctcctgtgaatagagattcagagaacctggcttcacccagcgagtatcccgaaaacggcgagagatttagctttctttccaaacctgttgatgaaaatcatcagcaggacggtgatgaggattcactggtatcgcatttctataccaatccaattgctaaacccattccccagaccccagaatctgcgggaaacaaacattcaaactcgaactccgtggacgatacgatagttgctctgaatatgcgcgctgcattgcgcaacggtctggaaggatcatccgaggagacaagcttccatgatgaatcattgcaggatgatcgggaggagatagagaataattcctaccatatgcatccggcagggattattctcacaaaagtgggttactacaccataccgtctatggatgatcttgccaagatcacgaacgaaaagggggaatgcattgtgtcggactttacgatcggacgtaaaggctacgggtctatctacttcgagggcgacgtgaatctgacaaatctcaatttggatgatatcgtgcatatacgcagaaaagaagtcgtcgtatatctggatgacaatcagaaaccgccagttggggaaggcctgaacagaaaggccgaggtgaccctggacggagtgtggcctacagataagactagtcgctgtctcatcaagtcacctgaccgtctagccgacattaactatgagggcaggctggaagctgtgtctaggaagcaaggggctcaatttaaggaatacagacccgaaacaggcagctgggttttcaaagtctcccacttttcgaaatatggactccaggactccgacgaggaggaagaagagcaccccagcaagaccagcactaaaaaactgaagaccgccccactccccccagcgtcccaaactacacctctgcaaatggccttgaatgggaagcctgccccacccccacaggtggagaaaaaaggccagtag

SEQ ID NO: 155581 - DNA, 2814 bp, Artificial Sequence
  derived and/or modified sequence
atgttcaacaagagcttcggcacccccttcggcggcggcaccggcggcttcggcaccaccagcaccttcggccagaacaccggcttcggcaccaccagcggcggcgccttcggcaccagcgccttcggcagcagcaacaacaccggcggcctgttcggcaacagccagaccaagcccggcggcctgttcggcaccagcagcttcagccagcccgccaccagcaccagcaccggcttcggcttcggcaccagcaccggcaccgccaacaccctgttcggcaccgccagcaccggcaccagcctgttcagcagccagaacaacgccttcgcccagaacaagcccaccggcttcggcaacttcggcaccagcaccagcagcggcggcctgttcggcaccaccaacaccaccagcaaccccttcggcagcaccagcggcagcctgttcggccccagcagcttcaccgccgcccccaccggcaccaccatcaagttcaacccccccaccggcaccgacaccatggtgaaggccggcgtgagcaccaacatcagcaccaagcaccagtgcatcaccgccatgaaggagtacgagagcaagagcctggaggagctgagactggaggactaccaggccaacagaaagggcccccagaaccaggtgggcgccggcaccaccaccggcctgttcggcagcagccccgccaccagcagcgccaccggcctgttcagcagcagcaccaccaacagcggcttcgcctacggccagaacaagaccgccttcggcaccagcaccaccggcttcggcaccaaccccggcggcctgttcggccagcagaaccagcagaccaccagcctgttcagcaagcccttcggccaggccaccaccacccagaacaccggcttcagcttcggcaacaccagcaccatcggccagcccagcaccaacaccatgggcctgttcggcgtgacccaggccagccagcccggcggcctgttcggcaccgccaccaacaccagcaccggcaccgccttcggcaccggcaccggcctgttcggccagaccaacaccggcttcggcgccgtgggcagcaccctgttcggcaacaacaagctgaccaccttcggcagcagcaccaccagcgcccccagcttcggcaccaccagcggcggcctgttcggcaacaagcccaccctgaccctgggcaccaacaccaacaccagcaacttcggcttcggcaccaacaccagcggcaacagcatcttcggcagcaagcccgcccccggcaccctgggcaccggcctgggcgccggcttcggcaccgccctgggcgccggccaggccagcctgttcggcaacaaccagcccaagatcggcggccccctgggcaccggcgccttcggcgcccccggcttcaacaccaccaccgccaccctgggcttcggcgccccccaggcccccgtggccctgaccgaccccaacgccagcgccgcccagcaggccgtgctgcagcagcacatcaacagcctgacctacagccccttcggcgacagccccctgttcagaaaccccatgagcgaccccaagaagaaggaggagagactgaagcccaccaaccccgccgcccagaaggccctgaccacccccacccactacaagctgacccccagacccgccaccagagtgagacccaaggccctgcagaccaccggcaccgccaagagccacctgttcgacggcctggacgacgacgagcccagcctggccaacggcgccttcatgcccaagaagagcatcaagaagctggtgctgaagaacctgaacaacagcaacctgttcagccccgtgaacagagacagcgagaacctggccagccccagcgagtaccccgagaacggcgagagattcagcttcctgagcaagcccgtggacgagaaccaccagcaggacggcgacgaggacagcctggtgagccacttctacaccaaccccatcgccaagcccatcccccagacccccgagagcgccggcaacaagcacagcaacagcaacagcgtggacgacaccatcgtggccctgaacatgagagccgccctgagaaacggcctggagggcagcagcgaggagaccagcttccacgacgagagcctgcaggacgacagagaggagatcgagaacaacagctaccacatgcaccccgccggcatcatcctgaccaaggtgggctactacaccatccccagcatggacgacctggccaagatcaccaacgagaagggcgagtgcatcgtgagcgacttcaccatcggcagaaagggctacggcagcatctacttcgagggcgacgtgaacctgaccaacctgaacctggacgacatcgtgcacatcagaagaaaggaggtggtggtgtacctggacgacaaccagaagccccccgtgggcgagggcctgaacagaaaggccgaggtgaccctggacggcgtgtggcccaccgacaagaccagcagatgcctgatcaagagccccgacagactggccgacatcaactacgagggcagactggaggccgtgagcagaaagcagggcgcccagttcaaggagtacagacccgagaccggcagctgggtgttcaaggtgagccacttcagcaagtacggcctgcaggacagcgacgaggaggaggaggagcaccccagcaagaccagcaccaagaagctgaagaccgcccccctgccccccgccagccagaccacccccctgcagatggccctgaacggcaagcccgccccccccccccaggtggagaagaagggccagtag

SEQ ID NO: 155582 - protein, 406 aa, Artificial Sequence
  derived and/or modified sequence
MRLFRWLLKQPVPKQIERYSRFSPSPLSIKQFLDFGRDNACEKTSYMFLRKELPVRLANTMREVNLLPDNLLNRPSVGLVQSWYMQSFLELLEYENKSPEDPQVLDNFLQVLIKVRNRHNDVVPTMAQGVIEYKEKFGFDPFISTNIQYFLDRFYTNRISFRMLINQHTLLFGGDTNPVHPKHIGSIDPTCNVADVVKDAYETAKMLCEQYYLVAPELEVEEFNAKAPDKPIQVVYVPSHLFHMLFELFKNSMRATVELYEDRKEGYPAVKTLVTLGKEDLSIKISDLGGGVPLRKIDRLFNYMYSTAPRPSLEPTRAAPLAGFGYGLPISRLYARYFQGDLKLYSMEGVGTDAVIYLKALSSESFERLPVFNKSAWRHYKTTPEADDWSNPSSEPRDASKYKAKQ

SEQ ID NO: 155583 - DNA, 1221 bp, Artificial Sequence
  derived and/or modified sequence
atgagactgttcagatggctgctgaagcagcccgtgcccaagcagatcgagagatacagcagattcagccccagccccctgagcatcaagcagttcctggacttcggcagagacaacgcctgcgagaagaccagctacatgttcctgagaaaggagctgcccgtgagactggccaacaccatgagagaggtgaacctgctgcccgacaacctgctgaacagacccagcgtgggcctggtgcagagctggtacatgcagagcttcctggagctgctggagtacgagaacaagagccccgaggacccccaggtgctggacaacttcctgcaggtgctgatcaaggtgagaaacagacacaacgacgtggtgcccaccatggcccagggcgtgatcgagtacaaggagaagttcggcttcgaccccttcatcagcaccaacatccagtacttcctggacagattctacaccaacagaatcagcttcagaatgctgatcaaccagcacaccctgctgttcggcggcgacaccaaccccgtgcaccccaagcacatcggcagcatcgaccccacctgcaacgtggccgacgtggtgaaggacgcctacgagaccgccaagatgctgtgcgagcagtactacctggtggcccccgagctggaggtggaggagttcaacgccaaggcccccgacaagcccatccaggtggtgtacgtgcccagccacctgttccacatgctgttcgagctgttcaagaacagcatgagagccaccgtggagctgtacgaggacagaaaggagggctaccccgccgtgaagaccctggtgaccctgggcaaggaggacctgagcatcaagatcagcgacctgggcggcggcgtgcccctgagaaagatcgacagactgttcaactacatgtacagcaccgcccccagacccagcctggagcccaccagagccgcccccctggccggcttcggctacggcctgcccatcagcagactgtacgccagatacttccagggcgacctgaagctgtacagcatggagggcgtgggcaccgacgccgtgatctacctgaaggccctgagcagcgagagcttcgagagactgcccgtgttcaacaagagcgcctggagacactacaagaccacccccgaggccgacgactggagcaaccccagcagcgagcccagagacgccagcaagtacaaggccaagcagtag

SEQ ID NO: 155584 - DNA, 1221 bp, Artificial Sequence
  derived and/or modified sequence
atgagattgttcaggtggctactaaaacagcccgtgccgaagcagattgaacggtactctaggttctctccctcccctctaagtatcaagcaatttttagatttcgggcgggataatgcttgcgaaaaaacctcatacatgttcctgagaaaggagctccccgttcgattagcaaataccatgcgggaggtgaatctgcttcccgacaacctgctgaaccggccaagtgttgggttggtgcaaagttggtacatgcagtcctttcttgagttgctcgaatatgagaacaagtcgcccgaggacccccaagtcctcgacaacttcctccaggtcctgattaaagtccggaatagacacaacgacgttgtgccaaccatggcccagggcgttattgaatacaaagagaagttcggatttgacccttttatttctacgaacatccagtactttctggaccgcttttacacaaaccgcattagctttagaatgctgatcaatcaacataccctgcttttcggtggtgatacgaatccagtccacccgaaacacattggcagcatagaccccacctgcaatgtggccgacgttgttaaggacgcgtacgaaactgccaagatgctatgtgagcagtattatcttgttgctccggagctggaggtcgaagaattcaatgctaaggctcctgacaaacctatccaagttgtttatgtgccctctcatctgtttcatatgctttttgagctgttcaagaattcaatgagggctacagttgaactgtacgaggatcgcaaggaggggtatcccgccgttaagactctcgttactctagggaaagaggacctaagtatcaaaatttcagatctcggtggcggagttccactcagaaagatcgatcggctgttcaactacatgtactctacggctcccagaccttcgctggaaccaactagggccgcaccgctggctggttttgggtatggcctccccatctcaaggctgtatgctcggtacttccagggagatctgaagctatattctatggagggcgtgggtaccgacgctgtgatttacctgaaggccctatcaagtgagtcctttgaacggctacctgtgttcaataagtccgcgtggagacactataagactacacccgaggccgacgattggtctaatccttcgagcgagcctcgggacgccagtaagtacaaagctaaacagtag

SEQ ID NO: 155585 - DNA, 1221 bp, Artificial Sequence
  derived and/or modified sequence
atgaggctcttccgctggctgctgaagcagcctgtgcccaagcagatcgagcgctacagccgcttcagccccagccccctgagcatcaagcagttcctggactttggccgggacaatgcctgtgagaagaccagctacatgttcctgaggaaggagctgcctgtgcggctggccaacaccatgagggaggtgaacctgctgcctgacaacctgctgaaccggcccagcgtgggcctggtgcagagctggtacatgcagagcttcctggagctgctggagtatgagaacaagagccctgaggacccccaggtgctggacaacttcctgcaggtgctgatcaaggtgaggaacagacacaatgatgtggtgcccaccatggcccagggcgtgattgagtacaaggagaagtttggatttgaccccttcatcagcaccaacatccagtacttcctggaccgcttctacaccaaccgcatctccttcaggatgctgatcaaccagcacaccctgctgtttggaggagacaccaaccctgtgcaccccaagcacatcggcagcattgaccccacctgcaatgtggctgatgtggtgaaggatgcctatgaaacagccaagatgctgtgtgagcagtactacctggtggcccctgagctggaggtggaggagttcaatgccaaggccccagacaagcccatccaggtggtgtatgtgcccagccacctgttccacatgctgtttgagctgttcaagaacagcatgagggccaccgtggagctgtatgaggacaggaaggagggctacccagctgtgaagaccctggtgaccctgggcaaggaggacctgagcatcaagatcagtgacctgggcggcggcgtgcccctgaggaagattgacaggctcttcaactacatgtacagcacagccccccggcccagcctggagcccacccgggccgcccccctggccggcttcggctacggcctgcccatcagccggctgtatgcccgctacttccagggcgacctgaagctgtacagcatggagggcgtgggcacagatgctgtgatctacctgaaggccctgagcagcgagagctttgagcggctgcccgtcttcaacaagagcgcctggaggcactacaagaccaccccagaggctgatgactggagcaaccccagcagcgagcccagagatgccagcaagtacaaggccaagcagtag

SEQ ID NO: 155586 - DNA, 1221 bp, Artificial Sequence
  derived and/or modified sequence
atgcggctgttccggtggctgctgaagcagcccgtgcccaagcagatcgagagatattccaggttctccccaagcccactatctatcaaacagttcctcgatttcggcagggataacgcgtgtgaaaagacctcctacatgttcctgagaaaggagctcccagtacgcctggccaatactatgagagaggtgaacctgctgcctgataatttgctgaatcgaccctctgtgggactggtgcagagctggtacatgcagtcctttctggagctcctggagtatgaaaacaagtcccctgaggacccacaggtactggataattttctccaggtgttgatcaaggttaggaaccgccataatgacgtggtgcccaccatggcccagggagtgatcgaatacaaagagaagttcggctttgatccttttatttccactaacatccagtacttcctggatcgtttttacaccaaccgaatcagcttccgtatgctgataaaccagcacactcttctgtttggcggggacacgaaccctgtgcaccccaagcacatcggcagcatcgatccaacatgcaacgtggcagacgtggtgaaggatgcctatgagaccgctaagatgctatgtgagcagtattatttagttgctccggaactggaggtggaggagttcaacgctaaggcccctgataagcccattcaggtcgtgtatgttcctagtcacctgtttcatatgctgttcgagctgttcaagaattcaatgagagctacggtggagctgtacgaagatcggaaggaggggtaccctgcagtaaagaccctggtaacactgggtaaggaggacctttctattaagatctctgacctgggaggcggagtgccgctcaggaaaattgatcgactgtttaactacatgtactccactgcacctcgtcctagcttagagccgactcgcgccgcgcctctagccgggttcggttacgggctgccaatttccaggttatatgccaggtacttccagggcgatctcaagttgtactctatggagggagtggggacagatgccgtcatctatctgaaggcattaagctccgagagttttgaaaggctgcccgtattcaacaagtcagcttggagacactataaaacaacgcctgaagccgacgattggagcaatccctctagcgaacccagggatgcatccaagtataaagcaaagcagtag

SEQ ID NO: 155587 - DNA, 1221 bp, Artificial Sequence
  derived and/or modified sequence
atgagattatttcggtggttgctgaaacagcctgtgcccaagcagatcgagcgctactctcgattctcaccaagtcctctttctatcaagcaatttcttgacttcgggagagataacgcatgtgaaaagacatcttacatgtttcttaggaaggagttgcccgttcgcctggcgaacacaatgagagaggttaatctcctgcccgacaacctcttgaaccgcccaagcgttggccttgttcagtcatggtatatgcaatcatttttagagctgcttgaatatgagaacaagtcacctgaggatccccaagtgctggataactttctccaggtgctgatcaaagtgagaaatcggcacaatgatgttgtccctactatggctcagggagtgatcgaatataaggaaaagttcggtttcgacccctttatcagtacaaacatccagtatttcctagaccggttttacacaaaccggattagcttcaggatgctcatcaatcagcacaccttgctgtttggcggagataccaatccagtccatcctaagcacataggctctattgatcctacttgcaacgtcgcagatgttgtaaaagacgcatacgaaacagcaaagatgctatgtgaacagtattatcttgtagctcccgagttggaggtggaagaatttaacgcgaaagcacctgataaaccgatccaagtcgtctacgtgccgtctcatttgttccacatgctgtttgagctctttaagaactctatgcgcgctacagtggaactgtatgaagacagaaaagaagggtatcctgctgtgaaaacgttagtgactctgggcaaggaggatctgagtatcaaaataagcgacttgggaggtggggtcccactcaggaaaatagaccggttgtttaactacatgtacagcacagcccctagacccagcctagaacctacaagggcagcccctctggcaggatttggatacgggttgccaatttcacggttgtatgccagatattttcagggagacctcaaactgtattcaatggagggcgtcggcactgatgccgtgatctatctgaaggccctgtctagtgagtctttcgaacggctcccagtctttaataagagcgcctggagacactataaaacaacacccgaagcagatgattggagcaatccctcctccgaaccgagagatgcctctaagtataaagcaaagcagtag

SEQ ID NO: 155588 - DNA, 1809 bp, Artificial Sequence
  derived and/or modified sequence
gcgtacgtgcagcaaccgactccgcccagcgaggcggagcctagggaagccgcgggcggcccgccgctgtcctggagctgctgctgctgctgcggcggctgcaccggcggcgccgaggccgagatcgaggccggggtgcgcgcttcgcaaacgtgccctatccgtgcggcttggctgcgccagcccttgcggccacccgggcgtctaggcgggtctgtgcgccgcccgggcgaggatgcggctgttccggtggctgctgaagcagccggtgcccaagcagatcgagcgctactcgcgcttttcgccgtcgccgctctccatcaaacaattcctggacttcgggagagataatgcatgtgagaaaacttcatatatgtttctacgaaaggaacttcctgtgcggctggctaacacaatgagagaagttaatcttctgccggataatttacttaaccgcccttcagtgggattggttcagagttggtatatgcagagttttcttgaacttttagaatatgaaaataagagccctgaggatccacaggtcttggataactttctacaagttctgattaaagtcagaaatagacacaatgatgtggttcctacaatggcacaaggagtgattgaatacaaggagaagtttgggtttgatcctttcattagcactaacatccaatattttctggatcggttttataccaaccgcatctctttccgcatgcttattaatcagcacacacttctgtttgggggtgacactaatcctgttcatcctaaacacataggaagtatcgatcccacctgtaacgtggcggatgtggtgaaagatgcatatgaaacagccaagatgctgtgtgaacagtattacctggtagctccagagctggaagttgaagaattcaatgccaaagcgccagacaaacctattcaggtggtttatgtgccctcacatctgtttcatatgctatttgagttgttcaagaactcaatgagagcgacagttgaactctatgaagacagaaaagagggctaccctgctgttaaaaccctcgttactttgggtaaagaagacttatccattaagatcagtgacctaggtggtggtgtcccacttcgaaaaatagatcgtctttttaactacatgtattctactgctcctagacccagcctggagcctaccagagctgcccctttggctggatttggttatggtttgccaatttcccgtctgtatgctagatattttcaaggagatctgaaactgtattccatggaaggagtgggtactgatgctgtcatttatttgaaggctctttcaagtgagtcatttgagagacttccagtttttaataagtccgcatggcgccattacaagaccacgcctgaagccgatgattggagcaatcccagcagtgaacccagggatgcttcaaaatacaaagcaaaacagtaatataccaccttgatttccattacaaagtatctgatttgtctgaataaaggtgtcccactcactgttccaggaattcttgcagtgtagaggtattcacaacagcaagcagggatttggcctgccatcaattttatttaaaaagcaattaagtttgcagtttgtcctcataaacgttgtaggttgaaactgaaaaataagttaaaatgatcaatcaagataaaaggtgatctatccatccaatggaatattatttggccttaaaaaggaaggacattctgatatgtgctgcaacatgggtgaatcttgaagtcattatgctaagtgaaataaaccagacataaaaggacaaatac

SEQ ID NO: 155589 - protein, 1096 aa, Artificial Sequence
  derived and/or modified sequence
MATVPVYCVCRLPYDVTRFMIECDACKDWFHGSCVGVEEEEAPDIDIYHCPNCEKTHGKSTLKKKRTWHKHGPGQAPDVKPVQNGSQLFIKELRSRTFPSAEDVVARVPGSQLTLGYMEEHGFTEPILVPKKDGLGLAVPAPTFYVSDVENYVGPERSVDVTDVTKQKDCKMKLKEFVDYYYSTNRKRVLNVTNLEFSDTRMSSFVEPPDIVKKLSWVENYWPDDALLAKPKVTKYCLICVKDSYTDFHIDSGGASAWYHVLKGEKTFYLIRPASANISLYERWRSASNHSEMFFADQVDKCYKCIVKQGQTLFIPSGWIYATLTPVDCLAFAGHFLHSLSVEMQMRAYEVERRLKLGSLTQFPNFETACWYMGKHLLEAFKGSHKSGKQLPPHLVQGAKILNGAFRSWTKKQALAEHEDELPEHFKPSQLIKDLAKEIRLSENASKAVRPEVNTVASSDEVCDGDREKEEPPSPIEATPPQSLLEKVSKKKTPKTVKMPKPSKIPKPPKPPKPPRPPKTLKLKDGGKKKGKKSRESASPTIPNLDLLEAHTKEALTKMEPPKKGKATKSVLSVPNKDVVHMQNDVERLEIREQTKSKSEAKWKYKNSKPDSLLKMEEEQKLEKSPLAGNKDNKFSFSFSNKKLLGSKALRPPTSPGVFGALQNFKEDKPKPVRDEYEYVSDDGELKIDEFPIRRKKNAPKRDLSFLLDKKAVLPTPVTKPKLDSAAYKSDDSSDEGSLHIDTDTKPGRNARVKKESGSSAAGILDLLQASEEVGALEYNPSSQPPASPSTQEAIQGMLSMANLQASDSCLQTTWGAGQAKGSSLAAHGARKNGGGSGKSAGKRLLKRAAKNSVDLDDYEEEQDHLDACFKDSDYVYPSLESDEDNPIFKSRSKKRKGSDDAPYSPTARVGPSVPRQDRPVREGTRVASIETGLAAAAAKLSQQEEQKSKKKKSAKRKLTPNTTSPSTSTSISAGTTSTSTTPASTTPASTTPASTSTASSQASQEGSSPEPPPESHSSSLADHEYTAAGTFTGAQAGRTSQPMAPGVFLTQRRPSASSPNNNTAAKGKRTKKGMATAKQRLGKILKIHRNGKLLL

SEQ ID NO: 155590 - DNA, 3291 bp, Artificial Sequence
  derived and/or modified sequence
atggccaccgttcctgtttactgtgtgtgcaggctgccttacgatgtaacacggttcatgatcgaatgcgacgcttgtaaagactggttccacgggtcttgcgtgggtgttgaggaggaagaggctcccgatatcgatatctatcactgccccaactgcgaaaagacccacggaaaaagcacattaaagaaaaagaggacctggcacaagcacggccccgggcaggcccctgatgtgaaacccgtccagaatggctcccagctgtttatcaaggagctaaggtcaagaacctttccatcagcagaggacgttgtggccagggtaccaggaagccagttgacactcggttacatggaagagcatggattcaccgaacccatactggtgccaaaaaaagacgggctgggtctcgcggtgccggcccccacattctacgttagcgacgtggaaaattacgtaggcccagaacggagcgtggatgtgaccgacgtaacgaagcaaaaggattgtaagatgaagctgaaagaattcgttgattactattactccactaacagaaagcgcgtactaaacgtgaccaaccttgagttcagtgacacccgaatgtcgtcctttgtggaacctccagatatcgtgaagaaactctcatgggtcgagaattattggcccgatgatgcacttctcgcgaagcccaaagtgaccaaatattgcctgatatgtgtgaaagacagttacactgatttccacattgacagtgggggtgcatccgcctggtatcacgtactgaaaggagaaaagactttctaccttattagacctgcttctgcaaatatttctctatatgaacgatggcgctccgcatccaatcactccgagatgttctttgctgatcaagtggataagtgctacaaatgcatcgtaaaacaaggtcaaaccctctttatcccctcagggtggatctatgccacactgactcctgttgattgcctcgcattcgccggacactttttacactctctcagtgtggagatgcagatgcgcgcttacgaggtggagcggcggctgaagctaggatccctaacacagttcccaaacttcgaaaccgcttgttggtacatgggaaagcatttgctggaggcctttaaggggtcccacaagtcaggcaagcaactccctccgcacctggtgcagggagccaaaatactgaacggggccttccgaagctggacaaagaaacaagctctggctgaacatgaggacgaactgcccgaacacttcaagccgtctcagctgattaaagatctcgctaaagaaattcgattatccgaaaatgcctcgaaagctgtgagacccgaggtgaacaccgtggcttccagtgacgaagtatgtgatggcgatagggagaaggaggagcctccctcacctattgaagccaccccaccgcagtcactgttggagaaagtcagcaaaaaaaagactcctaaaacagtgaaaatgccgaaaccctccaagatccccaagccacctaagccccccaagccgccccggccgcccaagacactcaagcttaaggatggaggcaagaagaagggaaaaaagagtagggagtccgctagccccacgatccccaatctggacctcttagaagctcacaccaaggaagcactaaccaagatggagccccccaaaaagggcaaggccaccaaaagcgttttatcagtgcctaataaggatgtcgtgcacatgcagaacgacgtagagaggttagaaattagggagcaaacaaaatccaagtctgaagcgaagtggaaatataaaaatagcaaacctgattcactgctgaaaatggaggaggagcagaaactcgagaagtcccctctggcgggtaacaaggataataagtttagtttctccttctccaacaaaaaactgctgggatcgaaggcactgagacctcccactagtcccggcgtttttggtgctctgcagaattttaaagaggacaagcctaagcctgttcgagacgagtacgaatacgtaagtgacgacggcgagttgaaaattgatgaatttcccatcagacgaaaaaaaaatgcgccaaaacgcgatctgtccttcttactggacaaaaaagctgtgttgcccacacccgtcactaaacccaagctagactccgcagcctacaagagcgacgactcctcagacgaaggctccttacatattgacacggatacgaagcccggacggaacgctcgcgtcaagaaggagtctggcagtagcgccgctggaatactagatcttcttcaggcctccgaggaggtgggtgcattggagtacaatccgtcatcccagcccccagccagtccatccactcaagaggcaattcaaggtatgctctctatggcaaacctgcaggcctcagattcatgcctgcagacaacttggggggcggggcaagctaaaggttctagcttggcagcgcacggggccaggaagaatgggggcggttcagggaaatcggcggggaagaggttgctgaaacgcgcagcaaagaactcagtggacttggatgactatgaagaggagcaggatcatctggatgcatgctttaaagattccgattatgtctacccgagcttggagtccgacgaggacaatcccatttttaagagccgttccaagaaaagaaaaggcagtgacgatgcgccatactcccccaccgcaagggtaggccccagcgtgccgcggcaggatcggccagtaagagagggcactcgggtggccagtatcgaaaccggccttgccgccgctgcagcgaagctgtcacagcaggaagagcaaaaatcaaaaaaaaaaaagagtgccaaaagaaagctgactcccaacacaactagccctagcacctcaacctcaatctcagccggcaccacctctacatccaccacacctgctagtaccaccccagccagtaccacccccgcaagcacgtctaccgcaagttctcaggcatcccaggagggcagctcacctgagccccctcctgagagccattccagctcgcttgcggaccatgaatacacggcagccggcacatttacgggcgctcaggcagggcgcacctctcaaccaatggcaccaggagtcttcttaacccagcgtcgacccagtgcctcatcaccgaacaataataccgccgccaaaggcaaacgcactaaaaaaggaatggccacagcaaagcagcgccttggaaagatcctcaagatccacaggaatgggaaactgctgctctag

SEQ ID NO: 155591 - DNA, 3291 bp, Artificial Sequence
  derived and/or modified sequence
atggccaccgtgcctgtgtactgtgtgtgccgcctgccctatgatgtgacccgcttcatgattgaatgtgatgcctgcaaggactggttccacggcagctgtgtgggcgtggaggaggaggaggccccagacatcgacatctaccactgccccaactgtgagaagacccacggcaagagcaccctgaagaagaagaggacctggcacaagcacggccctggccaggccccagatgtgaagcctgtgcagaatggcagccagctgttcatcaaggagctgcggagcaggaccttccccagcgcagaagatgtggtggcccgggtgcccggcagccagctgaccctgggctacatggaggagcacggcttcacagagcccatcctggtgcccaagaaggatggcctgggcctggccgtgcctgcccccaccttctacgtgtctgatgtggagaactacgtgggccctgagaggtctgtggatgtgacagatgtgaccaagcagaaggactgcaagatgaagctgaaggagtttgtggactactactacagcaccaacaggaagagggtgctgaatgtgaccaacctggagttcagtgacaccaggatgagcagctttgtggagcccccagacatcgtgaagaagctgtcctgggtggagaactactggccagatgatgccctgctggccaagcccaaggtgaccaagtactgcctgatctgtgtgaaggacagctacacagacttccacatcgacagcggcggggccagcgcctggtaccacgtgctgaagggggagaagaccttctacctgatccggcctgccagcgccaacatcagcctgtatgagcgctggaggtctgccagcaaccacagcgagatgttctttgctgaccaggtggacaagtgctacaagtgcatcgtgaagcagggccagaccctcttcatccccagcggctggatctatgccaccctgacccctgtggactgcctggcctttgctggccacttcctgcacagcctgtctgtggagatgcagatgagggcctatgaggtggagcggcggctgaagctgggcagcctgacccagttccccaactttgaaacagcctgctggtacatgggcaagcacctgctggaggccttcaagggcagccacaagagcggcaagcagctgcccccccacctggtgcagggcgccaagatcctgaatggagccttccgctcctggaccaagaagcaggccctggccgagcatgaagatgagctgcctgagcacttcaagcccagccagctgatcaaggacctggccaaggagatccggctgtctgaaaatgccagcaaggctgtgcggcctgaggtgaacacagtggccagcagtgatgaggtgtgtgatggagaccgggagaaggaggagccccccagccccatcgaggccaccccaccccagagcctgctggagaaggtgtccaagaagaagacccccaagacagtgaagatgcccaagcccagcaagatccccaagccacccaagccacccaagccacccaggcctcccaagaccctgaagctgaaggatggcggcaagaagaagggcaagaagagccgggagagcgccagccccaccatccccaacctggacctgctggaggcccacaccaaggaggccctgaccaagatggagccccccaagaagggcaaggccaccaagtctgtgctgtctgtgcccaacaaggatgtggtgcacatgcagaatgatgtggagcggctggagatccgggagcagaccaagagcaagtctgaggccaagtggaagtacaagaacagcaagccagacagcctgctgaagatggaggaggagcagaagctggagaagagccccctggccggcaacaaggacaacaagttctccttctccttcagcaacaagaagctgctgggcagcaaggccctgcggccccccaccagccctggggtgtttggagccctgcagaacttcaaggaggacaagcccaagcctgtgagagatgaatatgaatatgtgtctgatgatggagagctgaagattgatgagttccccatccggaggaagaagaatgcccccaagagggacctgtccttcctgctggacaagaaggctgtgctgcccacccctgtgaccaagcccaagctggacagcgctgcctacaagagtgatgacagcagtgatgagggcagcctgcacatcgacacagacaccaagccaggaagaaatgcccgggtgaagaaggagagcggcagcagcgctgctggcatcctggacctgctgcaggccagcgaggaggtgggcgccctggagtacaaccccagcagccagcccccagccagccccagcacccaggaggccatccagggcatgctgtccatggccaacctgcaggccagtgacagctgcctgcagaccacctggggcgccggccaggccaagggcagcagcctggccgcccacggggccaggaagaatggaggcggcagcggcaagtctgctgggaagaggctgctgaagagagctgccaagaacagcgtggacctggatgattatgaggaggagcaggaccacctggatgcctgcttcaaggacagcgactatgtgtaccccagcctggagagtgatgaggacaaccccatcttcaagagccgcagcaagaagaggaaaggaagtgatgatgccccctacagccccacagcccgggtgggccccagcgtgccccggcaggacaggcctgtgcgggagggcaccagggtggccagcattgagaccggcctggccgctgctgctgccaagctgagccagcaggaggagcagaagagcaagaagaagaagagcgccaagaggaagctgacccccaacaccaccagccccagcaccagcaccagcatctctgctggcaccaccagcaccagcaccaccccagccagcaccaccccagccagcaccaccccagccagcaccagcacagccagcagccaggccagccaggagggcagcagccctgagcccccacctgagagccacagcagcagcctggccgaccacgagtacacagctgctggcaccttcaccggggcccaggccggccgcaccagccagcccatggcccctggggtcttcctgacccagaggcggcccagcgccagcagccccaacaacaacacagctgccaagggcaagaggaccaagaagggcatggccacagccaagcagaggctgggcaagatcctgaagatccacagaaatggcaagctgctgctgtag

SEQ ID NO: 155592 - DNA, 3291 bp, Artificial Sequence
  derived and/or modified sequence
atggccaccgtgcccgtgtactgcgtgtgccggctgccctacgacgttacacgttttatgatagaatgcgatgcgtgtaaggattggtttcacgggtcctgcgtgggcgtggaagaggaggaggctccagacattgatatttatcactgtcccaactgtgagaaaacacacggaaaaagcaccctgaagaagaagcgaacctggcacaaacatggacctgggcaggcccccgacgtcaaacctgtccagaacggaagccagttattcataaaagaactgagaagtagaacctttccctcagcagaagatgttgtggcacgcgtccccggaagccagctcacactcggatacatggaagagcacggctttactgaaccaattttggtgcctaagaaggacggcttaggtctcgctgtgcccgcacctacgttttatgtttccgatgtggagaactacgtgggccctgagaggagcgtggacgtcactgacgtgacgaagcagaaggattgcaaaatgaagctaaaagaattcgtggattactactattcgactaataggaagcgtgtgctcaacgtcacgaatctggaattcagcgataccaggatgtcctcttttgtcgaaccgcctgatatcgtgaaaaagttgagctgggtggaaaattattggcctgatgatgcactgttagccaagcccaaagttacaaaatattgtctgatctgtgttaaagactcatacaccgatttccatatagatagcgggggggccagcgcctggtatcatgtgctgaagggcgaaaagacattctacctcattagacccgcttccgctaacatcagcctgtacgaacggtggcgaagcgcatctaatcacagcgagatgttctttgcggaccaagtagataagtgttacaagtgtatcgtgaagcaggggcagactttgttcatccctagtggctggatctacgctaccttaacaccggttgactgtttggcattcgccggccatttcttgcattcattgtctgtggaaatgcagatgcgggcatacgaagtggaacggaggctcaagctcgggtctcttacccaattccccaattttgagaccgcttgttggtacatgggaaaacacctattagaggcttttaaagggagccacaagagcgggaagcaactgccaccacatctggttcagggcgcgaaaatcctaaacggggccttccgtagttggacaaagaaacaagcactggcggaacacgaagacgaactgcctgagcacttcaagccttcacaactgatcaaagatcttgcaaaggagatcaggttatcggagaatgccagtaaagccgtgcgacctgaggtcaacacagtcgcttcaagtgatgaggtctgcgatggggaccgcgaaaaggaagaacccccctcgcccatcgaagcgaccccaccacagtccctcctcgaaaaggtcagtaaaaaaaagactcccaagaccgtgaaaatgccaaaacctagcaagattccaaaacctcctaagccaccgaagccccctcgaccccctaagactctgaaacttaaagatggcggtaaaaagaaggggaaaaaatctcgcgagagcgcaagtcccaccattccgaaccttgatctcttggaggcccataccaaggaggcactgaccaaaatggagccacccaaaaagggcaaagccaccaagtcagtcctctcagtgcctaacaaagacgtggttcacatgcagaatgacgtcgaaaggttggagatacgtgagcagaccaaatcaaaatccgaggctaagtggaagtataaaaattccaaaccagattcactgttgaaaatggaggaggagcaaaagctcgaaaagtcgcctcttgcaggtaataaggacaataaattcagctttagtttctccaacaagaagcttctgggtagcaaggcgttgcggccccctaccagcccgggtgtgttcggggcccttcagaattttaaagaagataagccaaaacccgtccgggacgagtatgagtatgttagcgacgatggggagctcaaaattgacgagtttccaattaggagaaaaaaaaatgcgccaaagcgtgatttatcctttctcctagataagaaggctgtcctacctaccccggtcactaaacccaagctggattcggctgcctataagtcagacgacagtagcgacgaaggttcccttcacatcgatacggacactaagcccgggcgcaatgctcgagtgaagaaagaaagcgggagctccgcggccgggattcttgacctactccaggctagcgaggaagtgggcgccctggaatataacccatcttctcagcctcctgcctctcctagtacccaggaggcgatccagggaatgttgtccatggccaatctgcaggccagtgattcatgcctacagaccacttggggcgcaggccaagcgaagggatcttctctggcggcacacggggctcgtaaaaatggtggcggaagtgggaaatcggccgggaaacgtctgcttaagagagcagcgaagaacagtgttgacctcgatgactatgaagaggaacaggaccacctcgacgcatgctttaaggacagcgactacgtgtacccttctcttgaaagtgacgaggataatccaatttttaaatccagaagcaagaaaaggaaaggatccgacgacgctccctatagtcccactgcccgggtgggaccctcggtgccccggcaagatagacccgtcagggaggggaccagggttgccagtatcgaaactgggctcgctgctgccgcagctaaattatcccagcaggaggagcagaagtcaaaaaaaaaaaaatctgcaaaacgaaaacttacacctaataccacatccccttctactagcaccagtatatctgcaggaaccacatctacatcaacgacaccagcttctacgacacccgccagtacaacccccgcctcaacaagcaccgcatcttcccaagcttcacaggaaggatcgtcacccgagcctcctcctgaaagtcacagcagttccctggcagaccacgaatatacggccgcagggacttttacgggcgcccaggctggtcgaacttcgcagcccatggcccccggagtcttccttacacagcggaggccatcggcttctagccccaacaacaatacagctgcaaagggcaaacgaactaagaagggtatggctaccgccaagcagagactaggtaaaatcctcaagatacacagaaacggcaaattattgttgtag

SEQ ID NO: 155593 - DNA, 5565 bp, Artificial Sequence
  derived and/or modified sequence
ggccgctcggcggccgggggtcccttcggtggggccgcggctccccgcccgccgcccccgcgcgtccattcccttttgtgtcccgcgcgcggcccgtcccccgcgcacactagcgccctgagccccgcgggccggcgggcggctcccggcgcggcccctccagccagcgcgcccggcattgtgtggacgcgcctggccgggagcgcgcgcgggggctgtcgtgcgcccccgtccccgtcccctcccggccgcggcgccgcctgcgccccgccgcccccgccgcccccgcgcggcccggcccccggcccggcccggaccgacccgggcagcgcagcggcggggccgagcggcggcgcggcgcggcaacatggcgacggtgcccgtgtactgcgtctgccggctcccctacgacgttacccgcttcatgatcgagtgcgacgcctgcaaggactggttccacggcagctgtgttggggtggaagaggaggaggcgcccgacatcgacatataccactgcccaaactgtgagaaaacccatgggaagtccaccttaaagaagaagcggacctggcacaaacacggcccggggcaagcgcctgacgtcaagcccgtgcagaatggcagccagctcttcatcaaggagctgcggagccggacctttcccagtgctgaagacgtggtggcccgtgtgccaggaagtcagctcacgctgggctacatggaggagcacggcttcaccgagcccatcctcgtccctaagaaagacgggctgggtctggctgtcccggcccccacgttctatgtcagtgacgtcgagaactacgtggggccggaacggagtgtggatgtgacagatgtcaccaagcagaaggactgcaagatgaagctgaaggagtttgtggactattactacagcaccaaccgcaagcgggtcctcaacgtcaccaacctcgagttctctgacacccgaatgtccagcttcgtggagccacctgacattgtaaagaaactgtcatgggtagaaaactactggccagatgatgcattgctggccaagcccaaagtgaccaagtactgcctaatctgcgtgaaggacagttacaccgacttccacatcgactctgggggcgcctctgcctggtaccacgtgctcaagggggagaagaccttctatctcatcaggccggcctcggccaacatctccctgtatgagcgctggcggtctgcctctaaccacagcgagatgttctttgctgaccaggtcgacaaatgctacaagtgcatcgtcaagcagggccagaccctcttcatcccctcaggctggatctacgccacactcacccctgtggactgcctggccttcgcgggacatttcctccacagcctgagtgtggagatgcagatgagagcatatgaagtggaaaggaggttgaaactgggcagcctgactcagtttcccaactttgaaactgcgtgctggtacatggggaagcacctgctggaggcattcaaaggctctcacaaatctgggaagcagctgccccctcatctagtccaaggagctaaaattctcaatggtgctttccgatcgtggacgaagaagcaggctttggcagagcatgaggacgagctcccggagcacttcaaaccttcacagctaatcaaagacctggccaaagagatccggctcagtgagaatgcctccaaagccgtccgaccggaagtgaatactgtcgcctcgtcagatgaggtgtgtgacggggaccgggagaaggaggagcccccgtctcccattgaggccaccccgcctcaatccctcctggagaaagtgtccaaaaaaaagactcccaaaactgtgaagatgcccaagccatccaaaatccccaagcccccgaagccccctaagcccccaaggccccccaaaacgctgaagctcaaagatggaggcaagaagaaagggaagaagtcccgggagtcagcctcacccaccatccccaacctggacctgctcgaagcccacaccaaggaggcactgaccaagatggagccgcccaagaagggcaaggccacaaagagtgtcctgagtgtgcccaacaaagatgtggttcacatgcagaatgatgtggagaggctggaaattcgagagcaaaccaagagcaagtcagaggccaagtggaagtacaagaacagcaaacctgactccttactgaagatggaagaggagcagaagctagagaagtcgcctctagctggaaacaaagacaataagttctctttttctttctccaacaagaaactcctcggctccaaggctctcaggcccccgacgagccctggtgtgttcggggccttgcagaacttcaaggaggacaagcccaagcccgtgcgggatgagtatgagtacgtgtcggatgacggtgagctcaagatcgacgagtttcccatcaggaggaagaaaaacgccccgaaaagggacttgtccttcttgttggataagaaggctgtgctgcccacgcctgtcacgaagccaaagctggactcggcagcgtacaagagtgatgactcctcggacgagggttcgctgcacatcgacacagacaccaagcccggccgcaatgccagagtcaagaaggagagtgggagctcggcagctggcatcttggacctgctgcaggccagtgaggaggttggcgcgctggagtacaaccccagcagccagcccccggcctcccccagcacacaggaagccattcagggaatgctgtccatggccaacctgcaggcctccgactcctgcctgcagaccacgtggggagctggccaggccaaggggagctcgctggctgcccatggtgcccggaagaatgggggtggcagtggcaagagtgcaggcaaacgactgctgaagagggctgccaagaacagtgtcgacctggacgactacgaggaagagcaggaccacctggatgcctgcttcaaggactcagactacgtttacccctcactggagtcagatgaagacaaccccatctttaagtcccggtcgaagaaaaggaaaggctcagacgacgctccctacagcccaacagcaagggtcggcccatcggtgccaagacaggacaggcctgtgcgtgagggtacacgggtggcttccatcgagaccgggctggcggctgctgcagctaagttgtcccagcaggaggagcagaaaagcaagaaaaaaaagagtgccaagaggaagctgactcctaacaccacctccccttccacctccacctccatctctgccggcaccacctccacctccaccacgccagcctctaccaccccggcctccaccaccccggcctccaccagcacggccagcagccaggcctcgcaggagggcagctcgccagagcccccgcctgagtcgcatagcagcagcctggcggaccatgagtacacagccgctggcaccttcaccggggcccaggctggccgcacctcccagcccatggcccctggggtctttctcacacagaggcggccctccgcatcgtctccaaacaacaacaccgctgccaaaggaaaacgtacgaaaaagggcatggcgaccgccaagcagaggcttgggaaaattttgaaaattcatcggaacgggaaactactcctttaagatttggaaagccaggatccttctgctccgctcaggacccccggagccccgcgaaaacatctgcctcccaggagggtgccgagctgcctcaccagggagggccttgcctcttcccggctgccatctccccaacaagcgtctgtcccttcagccggcagagcgagcccagcgtggcccctcaatttgaaaatggacgtcttttctcaagttgctaagagtgatctgtcccagaaaagcggccctgcaagtttgaggaccgcttattccactttaaggacagccttcaggccccctgagcgtgggtgtgattgcagggcctctgcagctctgctgagagcatgagtccttcaaggaagacagagtgagccaatgctcaccagccccagagtcagagctggccacaggctggcagcctccaggggcttaaaaaaaaaggcaaagaacacagaaagaggaggagcaagtgggatgtttatgtccccccttctcttcctgagtgattctcagccaagtccagacagtgctcggcgggtgaggaagggtctgccccgagctttctggttggcaggtggcagcaggatggtgggtgttcagcctgaatgcccaggagcatttctggggggcagctaagactggcagctgggttggtgtgttagcgggcaggggagccattgtggggtccccaggaaagggcaagggctcagccacatcttggggtctgggaggcccaggctaagccatgtggcagggaccgtcttgccctgctggccacactctggagaagcacttctcagccaaggcacccctgccctgggactggcagggcaggggcaggggcagggacagtggccaggcggcccgaggacttacggtcggcacttctctgttctcccgtgtcagcgtgtggtgtcgcctgcatgggtcgtacctggatggtgtgtccaccatcgacacggaggggctggatttgtttctcaggcaatcctgtattttaattttagatgtatttcctgaagcatatttttcatagaatgtagcgtgtaaatagctttttaaataacttcttttttataagagtaaaagtatctttaggaatttctttctatagagttcttcattaacatttatacgagttttttgctgagtcagatggacagttgggttctgatgctttttccttctcctttccttttattattattatttttttcttttaagaactaaggtattgcctgaaaaacaagtgatgtctgtgcagccttacactctgtctttacagaagcaaatagtacacaaaagatctatttcagacacattttgaagatgaatcttcaactttaataccagctctttgttttccttgtatgatgaggggattgggggatacagttattttactagcaccttgtgaagtgtttccgtgttttgtgatgctgtaatttattaatgtttgtagctttttatatttgtacatttcttatgagctttgtttatatacccattacctggatgtttttgtccactgggagaggcagcttggtggaggccttatccactcccacttgtcctgtttggagggacgcagtccctagggcccgagactgggtgggagagggggagtctcacggggccccaggcttattcagaactggtgtttttaaagtttcctttaccctgcccttgttgaacatttatataatctaacctggacatcaagctgttctctctctctcttttttttaattttattattattattttggcaacatgtacatttctaacaaagtttatcgtggctattaaagtgttttatttcccaattcatattactcttgtatcgagtccatgaggtctaaggcaacttagatcaaagttttaaaaaagtaaaaatatttcaggttttgtac

SEQ ID NO: 155594 - DNA, 3291 bp, Artificial Sequence
  derived and/or modified sequence
atggctaccgttccagtctattgcgtgtgccgccttccttatgacgtgacccgttttatgattgagtgcgatgcttgtaaggattggttccatgggagttgcgtgggcgttgaagaggaggaggctccggacattgacatttaccattgccccaactgcgaaaagacccatggaaagtctaccctgaaaaaaaagaggacatggcataaacacggtcccggtcaggcaccagacgtgaagccagtgcagaatggctcccagcttttcattaaggagttgaggtcccgaacattcccctcagcagaagatgtcgtggcgcgagtgccagggagccaattgactcttggatacatggaagaacacgggttcacagagcctatcctagtaccgaagaaggatggtctggggcttgcagtgcccgcaccgacgttttatgtgagcgacgtcgagaactacgtcggtcccgaacgctccgtagacgtcacagacgtaactaagcagaaggactgtaaaatgaagcttaaagagttcgtcgactattactattccaccaacaggaaacgcgtgttgaacgtgacaaacctcgagttctccgatacaagaatgtcctcttttgttgaaccaccagatattgtgaaaaaactgtcctgggtcgagaattactggccagacgacgctttgctggccaaacctaaagtgacaaagtactgcctgatttgtgtgaaggactcctataccgacttccatattgacagcgggggagcttcagcctggtatcacgtgctgaagggcgagaagactttttatctgatccgccctgcgagcgcaaacatcagtctgtacgaaaggtggcgatctgcatcgaaccacagcgaaatgttcttcgccgaccaggtggataaatgttataagtgcatcgtcaaacaagggcagaccctgtttataccctccgggtggatctatgccacacttactcctgttgattgtttagcatttgctggacattttttacacagtctgagtgtggagatgcagatgagagcatacgaggtggagcgccgtttaaagcttggctcattgacacagtttcccaatttcgaaacagcctgttggtacatgggaaaacacctcctggaagcattcaaggggtcacacaagtctggcaagcaacttccaccacatcttgtgcaaggcgcaaagatcctgaatggagctttccggtcgtggacaaaaaagcaggccttggcagaacacgaggacgaactaccggaacattttaagcccagtcagctcattaaagatctggcgaaagaaattcggttgagtgagaatgcatctaaggcggtccgcccagaggtcaatacggtagcttcctcagatgaagtctgcgatggcgatagagaaaaggaagaaccacccagccctattgaagctacacctcctcaatccctgctcgagaaggtgagtaagaagaagacgccgaaaaccgtgaagatgccaaaaccatcaaaaattcctaagccacccaagcccccaaagcctccaagacctcccaagactcttaaactcaaggatggcggtaagaagaaaggaaagaagagccgcgagagcgcttcacccacaattcccaacttagatctgctcgaggctcacaccaaggaagccctcacaaagatggaacccccaaagaaaggaaaggcaacaaaaagcgtactgtcggtaccaaataaggacgtagtccatatgcagaatgatgttgaacggctcgaaatccgcgagcagacgaaaagcaaaagtgaagccaagtggaagtacaagaattcaaagccagattcccttttaaaaatggaggaggagcaaaaactcgaaaagtcaccattagccggaaacaaggataacaaattttccttttcatttagcaacaagaagcttttggggagcaaggccctgcggcctcctacatcaccgggagtctttggcgcattacagaactttaaagaagacaaaccaaagccggtgcgggatgaatatgaatatgtctctgacgacggagagctgaagatcgatgaatttcccattcggagaaaaaaaaacgctccgaagagagacctgagcttcttgcttgataagaaggctgtgcttccaacgccggtgaccaagcccaagctggactctgcggcatacaaaagtgacgacagctcggacgagggctcactccacatcgatactgacacaaaacctgggaggaatgctcgagtgaagaaggagtccggctcctccgctgccggtattctagatctactccaggcaagtgaagaggtcggagcccttgagtacaacccctctagccagcctccggcttcccccagcacccaggaggccatccaggggatgctgtctatggccaacctgcaggcttcagactcttgtttgcagactacctggggcgcaggacaggcaaaaggcagcagcctggccgctcacggggcacggaagaatggcggagggtccggaaaaagcgcaggaaagagactcctcaagcgcgctgccaagaattcagtggacctggacgactacgaagaagaacaggatcatctcgatgcctgttttaaggattcagattacgtgtacccttcactcgaaagcgatgaagacaaccctattttcaagagtcggtctaagaaaaggaaagggtctgatgatgccccttacagtccgaccgctagggtgggtccctccgtgcctaggcaggataggcccgtgcgtgagggcacccgagtcgcctctatcgagactggcctcgccgctgctgctgccaaactgagccaacaagaggagcagaaaagcaagaaaaaaaaatctgcaaagaggaagctgactcccaacacaacatcaccttccacttcgacgtcaattagcgccggaactacatccacgtccaccactccggcatccactacaccggcaagcacaacccctgcttcaacctccaccgctagtagtcaggctagtcaggaggggtccagccctgagccacctccagagtctcacagttcgagcctggccgatcacgagtatacagccgctggaacgttcactggagcgcaagccggtagaacatcacagcctatggctccaggagtttttctgacacagcgtcgcccaagtgcttcctcgcctaacaacaacactgccgctaaaggcaagaggactaaaaagggtatggctactgcaaaacagagactaggaaagattctgaagatccacagaaacgggaagctgcttctctag

SEQ ID NO: 155595 - DNA, 3291 bp, Artificial Sequence
  derived and/or modified sequence
atggccaccgtgcccgtgtactgcgtgtgcagactgccctacgacgtgaccagattcatgatcgagtgcgacgcctgcaaggactggttccacggcagctgcgtgggcgtggaggaggaggaggcccccgacatcgacatctaccactgccccaactgcgagaagacccacggcaagagcaccctgaagaagaagagaacctggcacaagcacggccccggccaggcccccgacgtgaagcccgtgcagaacggcagccagctgttcatcaaggagctgagaagcagaaccttccccagcgccgaggacgtggtggccagagtgcccggcagccagctgaccctgggctacatggaggagcacggcttcaccgagcccatcctggtgcccaagaaggacggcctgggcctggccgtgcccgcccccaccttctacgtgagcgacgtggagaactacgtgggccccgagagaagcgtggacgtgaccgacgtgaccaagcagaaggactgcaagatgaagctgaaggagttcgtggactactactacagcaccaacagaaagagagtgctgaacgtgaccaacctggagttcagcgacaccagaatgagcagcttcgtggagccccccgacatcgtgaagaagctgagctgggtggagaactactggcccgacgacgccctgctggccaagcccaaggtgaccaagtactgcctgatctgcgtgaaggacagctacaccgacttccacatcgacagcggcggcgccagcgcctggtaccacgtgctgaagggcgagaagaccttctacctgatcagacccgccagcgccaacatcagcctgtacgagagatggagaagcgccagcaaccacagcgagatgttcttcgccgaccaggtggacaagtgctacaagtgcatcgtgaagcagggccagaccctgttcatccccagcggctggatctacgccaccctgacccccgtggactgcctggccttcgccggccacttcctgcacagcctgagcgtggagatgcagatgagagcctacgaggtggagagaagactgaagctgggcagcctgacccagttccccaacttcgagaccgcctgctggtacatgggcaagcacctgctggaggccttcaagggcagccacaagagcggcaagcagctgcccccccacctggtgcagggcgccaagatcctgaacggcgccttcagaagctggaccaagaagcaggccctggccgagcacgaggacgagctgcccgagcacttcaagcccagccagctgatcaaggacctggccaaggagatcagactgagcgagaacgccagcaaggccgtgagacccgaggtgaacaccgtggccagcagcgacgaggtgtgcgacggcgacagagagaaggaggagccccccagccccatcgaggccacccccccccagagcctgctggagaaggtgagcaagaagaagacccccaagaccgtgaagatgcccaagcccagcaagatccccaagccccccaagccccccaagccccccagaccccccaagaccctgaagctgaaggacggcggcaagaagaagggcaagaagagcagagagagcgccagccccaccatccccaacctggacctgctggaggcccacaccaaggaggccctgaccaagatggagccccccaagaagggcaaggccaccaagagcgtgctgagcgtgcccaacaaggacgtggtgcacatgcagaacgacgtggagagactggagatcagagagcagaccaagagcaagagcgaggccaagtggaagtacaagaacagcaagcccgacagcctgctgaagatggaggaggagcagaagctggagaagagccccctggccggcaacaaggacaacaagttcagcttcagcttcagcaacaagaagctgctgggcagcaaggccctgagaccccccaccagccccggcgtgttcggcgccctgcagaacttcaaggaggacaagcccaagcccgtgagagacgagtacgagtacgtgagcgacgacggcgagctgaagatcgacgagttccccatcagaagaaagaagaacgcccccaagagagacctgagcttcctgctggacaagaaggccgtgctgcccacccccgtgaccaagcccaagctggacagcgccgcctacaagagcgacgacagcagcgacgagggcagcctgcacatcgacaccgacaccaagcccggcagaaacgccagagtgaagaaggagagcggcagcagcgccgccggcatcctggacctgctgcaggccagcgaggaggtgggcgccctggagtacaaccccagcagccagccccccgccagccccagcacccaggaggccatccagggcatgctgagcatggccaacctgcaggccagcgacagctgcctgcagaccacctggggcgccggccaggccaagggcagcagcctggccgcccacggcgccagaaagaacggcggcggcagcggcaagagcgccggcaagagactgctgaagagagccgccaagaacagcgtggacctggacgactacgaggaggagcaggaccacctggacgcctgcttcaaggacagcgactacgtgtaccccagcctggagagcgacgaggacaaccccatcttcaagagcagaagcaagaagagaaagggcagcgacgacgccccctacagccccaccgccagagtgggccccagcgtgcccagacaggacagacccgtgagagagggcaccagagtggccagcatcgagaccggcctggccgccgccgccgccaagctgagccagcaggaggagcagaagagcaagaagaagaagagcgccaagagaaagctgacccccaacaccaccagccccagcaccagcaccagcatcagcgccggcaccaccagcaccagcaccacccccgccagcaccacccccgccagcaccacccccgccagcaccagcaccgccagcagccaggccagccaggagggcagcagccccgagcccccccccgagagccacagcagcagcctggccgaccacgagtacaccgccgccggcaccttcaccggcgcccaggccggcagaaccagccagcccatggcccccggcgtgttcctgacccagagaagacccagcgccagcagccccaacaacaacaccgccgccaagggcaagagaaccaagaagggcatggccaccgccaagcagagactgggcaagatcctgaagatccacagaaacggcaagctgctgctgtag

SEQ ID NO: 155596 - protein, 1909 aa, Artificial Sequence
  derived and/or modified sequence
MCHAAQETPLLHHFMAPVMARWPPFGLCLLLLLLSPPPLPLTGAHRFSAPNTTLNHLALAPGRGTLYVGAVNRLFQLSPELQLEAVAVTGPVIDSPDCVPFRDPAECPQAQLTDNANQLLLVSSRAQELVACGQVRQGVCETRRLGDVAEVLYQAEDPGDGQFVAANTPGVATVGLVVPLPGRDLLLVARGLAGKLSAGVPPLAIRQLAGSQPFSSEGLGRLVVGDFSDYNNSYVGAFADARSAYFVFRRRGARAQAEYRSYVARVCLGDTNLYSYVEVPLACQGQGLIQAAFLAPGTLLGVFAAGPRGTQAALCAFPMVELGASMEQARRLCYTAGGRGPSGAEEATVEYGVTSRCVTLPLDSPESYPCGDEHTPSPIAGRQPLEVQPLLKLGQPVSAVAALQADGHMIAFLGDTQGQLYKVFLHGSQGQVYHSQQVGPPGSAISPDLLLDSSGSHLYVLTAHQVDRIPVAACPQFPDCASCLQAQDPLCGWCVLQGRCTRKGQCGRAGQLNQWLWSYEEDSHCLHIQSLLPGHHPRQEQGQVTLSVPRLPILDADEYFHCAFGDYDSLAHVEGPHVACVTPPQDQVPLNPPGTDHVTVPLALMFEDVTVAATNFSFYDCSAVQALEAAAPCRACVGSIWRCHWCPQSSHCVYGEHCPEGERTIYSAQEVDIQVRGPGACPQVEGLAGPHLVPVGWESHLALRVRNLQHFRGLPASFHCWLELPGELRGLPATLEETAGDSGLIHCQAHQFYPSMSQRELPVPIYVTQGEAQRLDNTHALYVILYDCAMGHPDCSHCQAANRSLGCLWCADGQPACRYGPLCPPGAVELLCPAPSIDAVEPLTGPPEGGLALTILGSNLGRAFADVQYAVSVASRPCNPEPSLYRTSARIVCVTSPAPNGTTGPVRVAIKSQPPGISSQHFTYQDPVLLSLSPRWGPQAGGTQLTIRGQHLQTGGNTSAFVGGQPCPILEPVCPEAIVCRTRPQAAPGEAAVLVVFGHAQRTLLASPFRYTANPQLVAAEPSASFRGGGRLIRVRGTGLDVVQRPLLSVWLEADAEVQASRAQPQDPQPRRSCGAPAADPQACIQLGGGLLQCSTVCSVNSSSLLLCRSPAVPDRAHPQRVFFTLDNVQVDFASASGGQGFLYQPNPRLAPLSREGPARPYRLKPGHVLDVEGEGLNLGISKEEVRVHIGRGECLVKTLTRTHLYCEPPAHAPQPANGSGLPQFVVQMGNVQLALGPVQYEAEPPLSAFPVEAQAGVGMGAAVLIAAVLLLTLMYRHKSKQALRDYQKVLVQLESLETGVGDQCRKEFTDLMTEMTDLSSDLEGSGIPFLDYRTYAERAFFPGHGGCPLQPKPEGPGEDGHCATVRQGLTQLSNLLNSKLFLLTLIHTLEEQPSFSQRDRCHVASLLSLALHGKLEYLTDIMRTLLGDLAAHYVHRNPKLMLRRTETMVEKLLTNWLSICLYAFLREVAGEPLYMLFRAIQYQVDKGPVDAVTGKAKRTLNDSRLLREDVEFQPLTLMVLVGPGAGGAAGSSEMQRVPARVLDTDTITQVKEKVLDQVYKGTPFSQRPSVHALDLEWRSGLAGHLTLSDEDLTSVTQNHWKRLNTLQHYKVPDGATVGLVPQLHRGSTISQSLAQRCPLGENIPTLEDGEEGGVCLWHLVKATEEPEGAKVRCSSLREREPARAKAIPEIYLTRLLSMKGTLQKFVDDTFQAILSVNRPIPIAVKYLFDLLDELAEKHGIEDPGTLHIWKTNSLLLRFWVNALKNPQLIFDVRVSDNVDAILAVIAQTFIDSCTTSEHKVGRDSPVNKLLYAREIPRYKQMVERYYADIRQSSPASYQEMNSALAELSGNYTSAPHCLEALQELYNHIHRYYDQIISALEEDPVGQKLQLACRLQQVAALVENKVTDL

SEQ ID NO: 155597 - protein, 176 aa, Artificial Sequence
  derived and/or modified sequence
  misc_feature (1)..(1): Xaa can be any naturally occurring amino acid
XASQGTLQKFVDDTFQAILSVNRPIPIAVKYLFDLLDELAEKHGIEDPGTLHIWKTNSLLLRFWVNALKNPQLIFDVRVSDNVDAILAVIAQTFIDSCTTSEHKVGRVRAVPAAAAGRGLRRKGLWGKPRGLCTELWVGSGSIMGAPSPPSSCLAPPLPPEQDSPVNKLLYAREIP

SEQ ID NO: 155598 - protein, 988 aa, Artificial Sequence
  derived and/or modified sequence
MCHAAQETPLLHHFMDSPESYPCGDEHTPSPIAGRQPLEVQPLLKLGQPVSAVAALQADGHMIAFLGDTQGQLYKVDRIPVAACPQFPDCASCLQAQDPLCGWCVLQGRCTRKGQCGRAGQLNQWLWSYEEDSHCLHIQSLLPGHHPRQEQGQVTLSVPRLPILDADEYFHCAFGDYDSLAHVEGPHVACVTPPQDQVPLNPPGTDHVTVPLALMFEDVTVAATNFSFYDCSAVQALEAAAPCRACVGSIWRCHWCPQSSHCVYGEHCPEGERTIYSAQEVDIQVRGPGACPQVEGLAGPHLVPVGWESHLALRVRNLQHFRGLPASFHCWLELPGELRGLPATLEETAGDSGLIHCQAHQFYPSMSQRELPVPIYVTQGEAQRLDNTHALYVILYDCAMGHPDCSHCQAANRSLGCLWCADGQPACRYGPLCPPGAVELLCPAPSIDAVEPLTGPPEGGLALTILGSNLGRAFADVQYAVSVASRPCNPEPSLYRTSARIVCVTSPAPNGTTGPVRVAIKSQPPGISSQHFTYQDPVLLSLSPRWGPQAGGTQLTIRGQHLQTGGNTSAFVGGQPCPILEPVCPEAIVCRTRPQAAPGEAAVLVVFGHAQRTLLASPFRYTANPQLVAAEPSASFRGGGRLIRVRGTGLDVVQRPLLSVWLEADAEVQASRAQPQDPQPRRSCGAPAADPQACIQLGGGLLQCSTVCSVNSSSLLLCRSPAVPDRAHPQRVFFTLDNVQVDFASASGGQGFLYQPNPRLAPLSREGPARPYRLKPGHVLDVEGEGLNLGISKEEVRVHIGRGECLVKTLTRTHLYCEPPAHAPQPANGSGLPQFVVQMGNVQLALGPVQYEAEPPLSAFPVEAQAGVGMGAAVLIAAVLLLTLMYRHKSKQALRDYQKVLVQLESLETGVGDQCRKEFTGGCGGGGTGYPRGLNSHLGASWPRRPHDGDDRPQQRPGGQRDPLPGLPHLRRARLLPWPWRLPAAAQA

SEQ ID NO: 155599 - protein, 224 aa, Artificial Sequence
  derived and/or modified sequence
MCHAAQETPLLHHFMVDRIPVAACPQFPDCASCLQAQDPLCGWCVLQGRCTRKGQCGRAGQLNQWLWSYEEDSHCLHIQSLLPGHHPRQEQGQVTLSVPRLPILDADEYFHCAFGDYDSLAHVEGPHVACVTPPQDQVPLNPPGTDHVTVPLALMFEDVTVAATNFSFYDCSAVQALEAAAPACLPPSTAGWSCLENFGDCRPPWRRQQGIQASSTARPTRSSP

SEQ ID NO: 155600 - DNA, 5730 bp, Artificial Sequence
  derived and/or modified sequence
atgtgtcacgcagcacaagaaactcctctcctccatcacttcatggcccccgttatggcaagatggcctccctttggtctgtgtctgctactgctgctcctttcgccgccccccctgcccctgaccggcgcacataggttttcagctccgaacacgactctcaatcacctggccctcgcccccggtcgaggaaccctgtatgtcggggccgtgaaccggttgtttcagttatcacctgagctccagctagaggcagttgctgtgactggtcctgtgattgattctcccgattgcgtcccatttagagacccagccgagtgtccacaggctcagctgactgataacgctaatcaattgctcctggtatctagccgagcccaagagttagtagcatgcggacaggttcggcagggtgtttgtgaaacaaggaggcttggagatgtcgcagaggtgctgtaccaggctgaggaccccggcgatggccagtttgtggcagcgaatactcctggggtggcaactgttggcttagtggtcccgctgcctggccgagacctattactcgttgcccgcgggcttgcgggcaaattgtctgcaggggtccccccgcttgcaataaggcaattggccggcagccagccattttcatccgagggactggggcggttggtagtgggcgatttcagcgattataataatagctatgtaggagcatttgccgatgccaggtccgcatatttcgtgttcagaaggagaggggcccgtgcacaggccgagtaccggagttacgtggcccgtgtgtgtctgggtgacaccaacctttattcttatgtcgaggtgccactggcctgtcaggggcaggggctgatccaggcggcttttctcgctcccgggaccctccttggcgtattcgctgcaggcccacgcggtacccaggctgcactgtgcgccttccccatggttgagctcggggcctctatggagcaagccagaaggctttgctacaccgccggcggtcgcggtcctagcggtgccgaggaagcaactgtcgaatatggtgtcacttctagatgcgtgaccctccctttggattcacccgagtcctacccgtgcggcgatgagcatacaccttcccctattgcaggaaggcagccactggaagtgcagcccctgctgaagctgggccagcccgtgagtgccgtggccgctctgcaggccgacggacacatgattgctttccttggtgacacacagggacaactatataaggtgttcctccacgggagccagggtcaagtctaccacagccagcaggtaggaccccccgggtctgccatctcccccgatctgctgctggactcttccgggagtcacctgtacgtgctcacagctcatcaggtcgacagaatccctgtagccgcttgtccccaatttcccgactgcgctagttgtctgcaggcacaggaccccctgtgtgggtggtgcgtactgcagggcaggtgtaccaggaagggtcagtgcggacgcgcgggacagttgaaccagtggctgtggtcctacgaggaagattctcattgtctgcatattcaaagtctgctccccggccaccacccccgccaggaacaagggcaagttaccctcagtgtgcccagattgcccatcctcgatgccgatgagtacttccactgcgcattcggggactatgattccctggcacacgttgaaggaccgcatgtcgcatgtgtgaccccgccccaagaccaggtgcccctcaatcctcccggaaccgatcatgtgacagtgcctctggccctcatgtttgaggatgtgaccgtggccgcaacaaacttcagtttctacgactgtagtgctgtgcaggccctagaggccgcggcaccctgtagagcctgcgtaggatccatctggcgctgtcattggtgcccccagagcagccactgcgtgtacggcgaacactgcccagaaggtgagagaaccatctactctgcacaggaagtggacatccaggttaggggtcctggtgcctgcccccaagtcgagggattggccggaccacatctggtgcctgtcggatgggagagccaccttgccctacgagtgaggaatctgcagcacttcagaggcctgccagccagcttccactgctggctggaactgcctggcgagctacgcggtcttcccgccactctcgaagaaaccgctggagactctgggctgatccattgtcaggcccaccagttttatccgtccatgtctcaacgcgagttaccagtgcccatctatgtaacacagggtgaagcacagcgtttggataatacccatgccctatacgttattctgtacgactgcgcgatgggacatcctgattgttcccattgccaggctgccaaccgctcactcggctgcttgtggtgtgcagacggccagcccgcatgtagatacggacctctgtgtccacccggcgccgtggagcttctttgtccagctccaagtatcgatgccgtcgaacccctgacagggcctcctgagggcggtttggctctcaccattttgggtagcaatctgggacgagcatttgcagacgtgcagtacgcggtctctgtggcatcaagaccatgtaatccggaaccaagtctctacaggaccagtgccaggatcgtgtgcgtgaccagtcctgccccaaacggcactacagggccagtacgtgttgcaatcaagtcccaaccgccagggattagctcacagcacttcacctaccaggaccccgttttgctttcgctgagtcctagatggggacctcaggccggaggcacccagttaacaatccgaggccagcacctccagactggtgggaatacaagcgcattcgtgggcgggcagccgtgtcccatcctcgagcctgtctgtccggaagccatcgtctgcagaaccaggcctcaggcagccccaggggaagccgccgttttggtggtattcgggcacgcgcaacgtactctgctcgcaagcccattcaggtatacagccaacccacagttggtggccgctgagccatctgcatcttttcgcgggggggggcgattgattcgcgttaggggcaccggtctggacgtggtccagcgtccattgctgagtgtctggttggaggccgacgcagaggtacaggcttctagggcccagcctcaggatccacagccaaggcggtcttgcggtgcaccagccgcagatcctcaggcctgcatccagctgggcggcgggttgcttcagtgttccacagtgtgctccgttaactcatcctccctgctgctgtgtcgttcccctgctgtccctgatcgagcacacccacagagagtgttctttacactcgataacgtgcaggtggacttcgcctctgctagtggaggccaaggcttcctgtaccagcctaatccccgcctggcgcccctgtcccgggaggggcctgcgcgaccctaccgcctgaagccggggcatgtgctagatgtggagggcgaagggctgaatctgggaatcagtaaagaagaggtgagagttcacattggaagaggagaatgcttagtgaagactctgacgcgaacccatctgtattgcgagccccctgctcatgcgccacagcctgccaatggatccggtctccctcaattcgtcgttcagatgggaaacgtgcagctggctttgggccccgtgcagtatgaagctgagcccccactgagcgcctttccggtggaggctcaggctggagtgggaatgggcgctgccgttcttatagccgcggtgttacttttgacgcttatgtatcggcacaagtccaagcaggccctgagggattaccagaaagtcttggtgcagctcgaaagcttggagaccggagttggagatcagtgtcgtaaagagtttacagatttaatgaccgagatgactgacttgagtagtgaccttgaaggctctggcataccttttctagattatcggacatacgcggagcgtgcctttttcccaggacacggtgggtgcccactgcagccaaagcctgaagggcctggggaagacggacattgtgctacggtgagacagggtctgacccaattatctaacctgctaaattctaagctgttcttactaacgcttattcatacgttagaggaacagccatctttctcacagcgagacagatgccatgtcgcctccttgctgtccctcgccctgcacggcaagctggagtatctgacagacatcatgcgcacactgctgggagacttagccgcgcactatgtccatcgtaatcccaagctgatgctgaggcgtaccgagacaatggttgagaagctcctgactaactggctgtctatttgcttgtacgctttcttgagggaggttgcgggcgaacccctgtatatgttgttcagagccatccagtatcaagtcgataaaggacctgtggatgccgtcacaggcaaggccaaaagaactctgaatgactcgaggctcctccgggaggatgtggaattccagcctctgactttgatggtgttggtgggtcccggcgctggaggagcagccggctcgagtgaaatgcagcgcgttcccgctcgggtgcttgacaccgataccattacccaggttaaagaaaaagttctcgaccaggtgtacaaggggactcctttttcccaacgacccagtgtgcatgcattggacctggaatggaggtcagggctggcagggcacctaacactgtccgacgaggacctaaccagcgttacacagaaccactggaagaggttgaacactctccaacattataaggtccctgacggggcaactgtggggctcgtgccgcaattgcaccgcgggtccactatctctcagtccctggcccagcggtgccccttgggggagaacattcccacactggaggatggagaggagggaggagtgtgcctctggcatttggtgaaggcaaccgaggaacccgagggcgccaaggttagatgttcttctttgagggagcgcgagcccgctcgggctaaagcaattccagaaatctacctaactcgactgctctcaatgaagggcaccctgcagaaatttgtggatgacacctttcaagctatcttgtcggttaataggccaattccgatcgcagtcaagtacctgttcgacctattggacgagctggcagagaaacacggcatagaagatcctggcactctccatatctggaaaaccaactctctgctgctgcggttctgggtgaacgccctcaaaaacccccaactcatatttgatgtgcgggtttcggataacgtggacgcaattctagccgtgatcgctcagacgtttatcgacagctgcaccacctctgagcataaagtcggaagagactcacccgtcaataaacttctgtacgcacgggagatcccacgttacaaacagatggttgagcggtattatgcagacatccgacagtccagcccggcgagctatcaggaaatgaacagtgccttagccgagctgagcggcaactatacctccgcaccgcattgccttgaagcgttacaggagctctataaccatatccataggtactatgatcagataattagcgcgctggaggaagatcccgtgggacaaaagcttcaactcgcatgcagactgcagcaggtagccgcactggttgagaacaaagtgaccgatctttag

SEQ ID NO: 155601 - DNA, 777 bp, Artificial Sequence
  derived and/or modified sequence
taaagtttagagacgggggtaggagaccagtgtaggaaggagtttaccgatctgatgacggagatgactgacctgtccagcgatctggaaggaagcggcatacccttcctcgattacagaacatacgcagagcgagccttctttccagggcacggcggttgtcccctccagccaaaacccgaaggccccggtgaggatggacattgtgctacggtccgccagggcttaacacagctgtcaaatctgcttaattctaagttgttcctgctgactctcatacatactttggaagagcaaccatccttctcccagcgtgatagatgccacgtggcctcactgttgtctctggctcttcacggaaagcttgagtatcttactgacatcatgcgcaccctgttgggtgatctagctgctcattacgtacatcggaatcctaaacttatgttacggagaacagagacaatggttgaaaagctgttgacgaactggcttagtatctgcttatacgctttcctcagggaggtcgcaggagagccactttacatgctctttagggcgatccagtaccaggtagataagggtccagtggacgccgtcaccgaatggcgctccggcctcgcgggacacctgacactgagcgatgaagacttaaccagtgtgactcaaaatcactggaagcgattgaatacattacaacactacaaggtccccgatggcgcgactgttggccttgtgccccagttgcatagaggttctactatttcccagtcgctatag

SEQ ID NO: 155602 - DNA, 2967 bp, Artificial Sequence
  derived and/or modified sequence
atgtgccatgccgctcaagagacgccactgctgcaccatttcatggactctcctgaaagctacccttgcggagacgaacataccccctctcctattgccggaaggcaaccactggaggtgcagcctttactgaaacttggccagcctgtttctgcagttgccgccctgcaggctgacgggcatatgattgccttcctgggggatacccagggccagttatacaaggtggaccgtatccctgtcgcggcatgcccccaatttccagactgcgccagctgtctgcaggcacaggaccccctgtgtggatggtgtgtgttgcagggacgatgtactaggaaaggacagtgtggcagggccggtcagcttaatcagtggctgtggagttatgaagaagactcacactgcctgcatatccagtcactcctgcccggccatcacccacggcaggaacaaggtcaggtgacgttaagcgtgccacggttaccgattttggacgccgatgagtatttccattgtgctttcggtgattacgactccctggcgcacgttgagggcccccatgttgcttgcgtgacacccccccaagaccaggtgccgttaaacccacccggcacagatcatgtaacagtgcctttggctctgatgttcgaagacgtcactgttgctgctactaacttttccttttatgactgtagcgccgtgcaggccctcgaagccgcggctccatgtagagcttgtgtgggctcgatctggaggtgccattggtgtccgcagagcagccactgtgtttacggggaacattgtccagagggcgaacggaccatttattctgctcaggaggtggacattcaagtgcgtggacccggggcgtgccctcaagtagaagggctggctggtcctcatttagtccctgtgggctgggagtctcacctggcactgcgagtgcggaacctgcaacatttccgaggactaccagcatccttccattgttggctggaactgccaggtgagctgagaggcctgcccgccacgctggaggagactgccggggactctggcctgattcactgccaggcacaccagttttaccctagtatgtcccagagggaacttcctgtgcccatctatgtaacacagggtgaagcccaacggctcgacaacacgcatgccctttacgtcatactctacgactgtgctatggggcaccccgattgtagccactgtcaggccgcgaatagaagcctcggatgcctgtggtgcgcggacggccaaccagcgtgtcggtacggacccctctgtccaccgggtgccgtcgagctgctctgcccggcccctagcatcgatgccgtcgagccactaacaggccctcccgaagggggactggctcttaccatccttgggtccaacctcggtcgggcttttgccgacgtgcaatacgccgtttccgttgcaagcagaccatgtaaccccgagccctccttataccgtaccagcgcacgtattgtgtgtgtcacgagccctgcaccaaatgggaccaccggccccgtgcgcgtcgctattaaaagccaacctcccggcatctcttcccagcacttcacctatcaggaccccgtcctccttagtctgagccctcgctgggggcctcaggccggaggcacgcagctaactataagagggcagcacttacagaccggcggcaatacatccgccttcgttggcggacagccttgccccattctggaacctgtgtgtccggaggctattgtgtgcagaaccagaccgcaggcggcaccaggcgaggctgccgtgctcgttgtctttggccacgctcagcgcacactgcttgcatcgccatttagatatactgccaacccccagctcgtagctgcagagccttcagcgtcgttcaggggcggcggcagattgatcagagtcaggggtaccggccttgacgtagttcagcgtccattgcttagcgtctggcttgaggcagacgccgaggtccaggcatcaagagcccaaccacaggacccccagcctcgacggtcctgcggcgccccagctgcagaccctcaggcctgtatccaactcgggggagggctgctgcagtgttccactgtttgttccgtgaatagtagctctctgctgctatgcaggagcccagccgtgcctgacagggctcacccacagagagttttttttactttggataacgttcaggtggacttcgcgtccgcatctggcggacagggcttcctctatcaaccaaacccgaggttagctcctctatcacgggaaggccccgctagaccgtacagactgaaacctggccacgtgctggatgtcgagggggaagggctgaacctggggatctctaaagaggaggtgagagtgcacatcggaagaggagagtgtctggttaagaccctgacaagaactcacttgtactgtgagccccctgcacatgcccctcaaccagcgaatgggagcgggctgccccagttcgtggtccaaatgggtaatgttcagctggccctcggacccgtccagtacgaggctgagccacccttgagcgctttccctgtcgaagcccaggccggtgtgggcatgggtgctgcagttttgatagccgctgtgctgctcctgaccctgatgtacaggcataagtccaaacaagctctgagagactatcaaaaggtgctggtccaactggaaagcctggaaacgggagtcggagatcaatgtcgcaaagaattcaccggcggatgtggaggtggaggcacaggctacccccggggactgaacagtcacttgggggcatcttggccaagacggccacacgatggggacgataggccgcaacagagacctggtggccagcgcgatccactcccaggactgccccatttaagaagggcacggcttctgccctggccctggaggctaccagccgccgctcaggcctag

SEQ ID NO: 155603 - DNA, 675 bp, Artificial Sequence
  derived and/or modified sequence
atgtgccacgctgcccaggagacccctcttctgcaccatttcatggtggacaggattcccgttgccgcgtgtccacagtttcccgattgcgcaagttgccttcaggcacaggatcctctctgtggctggtgtgtcctgcagggccgctgtacaaggaagggccaatgtgggagagctgggcaactcaatcagtggctttggtcctacgaggaagactcacattgtttacacatccagagtctcttacctgggcatcacccccgccaagagcagggacaggttacactgtccgtcccaaggttacccatactggatgccgatgaatacttccactgcgctttcggggactacgattcattagcacatgtggaaggcccgcacgtggcatgcgtgactcctccacaggatcaggtgcctctgaatccaccagggacggaccacgttaccgtccctctcgccctcatgttcgaggacgttactgtcgctgccactaatttttccttttatgactgctcggccgttcaggctctcgaagccgcagcccctgcttgtctgccgccaagcactgccggatggtcctgcctggagaatttcggtgactgcaggccaccgtggaggcgtcagcagggcatccaagctagcagcacggctcgcccgacaaggtcatccccatag

SEQ ID NO: 155604 - DNA, 4689 bp, Artificial Sequence
  derived and/or modified sequence
atgtgccatgctgctcaggaaacgcccctgttgcatcactttatggactctcccgagtcgtacccttgcggcgacgaacatacccctagccccatcgccgggcgacagcccctcgaggtgcagcccttactgaagttgggacagcctgtcagcgcagtcgccgccctgcaggccgacggtcacatgatcgctttcctcggcgatacgcaaggtcagctgtataaggttttcctacacggttcccaaggccaggtctaccacagccagcaggtcggaccgccagggtccgcaatcagccccgatctgttgttagactcttcaggtagccatctgtacgtacttacagcgcaccaggtggaccgtatccccgttgctgcttgccctcagtttccggattgtgccagttgcctgcaggcccaggaccctctctgtggttggtgtgtgctgcaaggacgctgtacacggaagggacagtgtggacgggcagggcaattgaatcagtggctgtggagctatgaggaggattctcactgtctgcacatacagagcctcctgcctggccatcaccctagacaagagcaggggcaggtgactctatccgtgccacggttgcccattctggacgctgatgaatactttcattgcgctttcggtgattatgactcgctggctcatgtggagggtccccatgtggcctgcgtcacccccccacaggaccaagtgccactgaaccctcctgggacggaccatgttacagtgcccctggccctgatgttcgaggacgtaacggtggctgccactaatttttcgttttatgactgtagcgctgtgcaggccctggaagccgcagctccctgtcgcgcttgtgtgggaagtatatggcgttgtcattggtgccctcagtcaagccattgcgtctatggcgaacactgtccagagggggagcgcaccatttactccgcacaggaggtggatatccaggtcagggggcccggagcctgccctcaggtggaaggtcttgcagggccccatctagtgcccgtgggctgggagagccaccttgcactgcgagtccgaaatctccagcatttcagaggcctgcctgcgagctttcattgttggctggaattgcccggagagttgaggggtctccctgccacgttggaagaaactgcaggagacagcggtctgattcactgccaagcgcaccagttttacccttctatgtctcagcgcgagctgcccgttccgatttatgtaacccagggggaagctcagcgcctggataatacacacgcattgtacgtgatactgtatgattgcgctatgggccaccccgattgcagccactgccaagccgccaaccggtctttggggtgcctctggtgcgcggatgggcagccagcttgccggtatggccccctatgcccccctggtgccgtggagctcctgtgcccggctcccagcatagacgccgttgaaccactcacgggaccccccgagggcggcctggcactgactattctcggttctaacctaggtcgcgctttcgctgacgtgcagtatgccgtgtcagttgcctccaggccatgcaacccagaaccatcactctaccgaacgtctgccaggatcgtgtgtgtcacatcccccgcacccaacggtaccacagggcctgttagggtagctattaagtcccagcctcctggcatcagttcccagcacttcacctaccaagaccccgtgctactctcgctgtccccaaggtggggcccccaggctggaggaacccaacttaccattaggggccagcacctccagactggcggaaatacctccgcctttgttggaggacagccatgcccaatactggaacccgtctgccctgaggccatcgtctgtcggacgcggcctcaggccgcaccgggagaggcggctgtcttggtagtgtttggacatgcacagcgcacattgctggcctccccctttaggtacactgcgaatcctcagctagtggcggccgaaccatcagcttcattcagagggggcggcagactgatcagagttcggggaacaggacttgatgttgtccagcgcccacttctgagtgtgtggctcgaggccgatgccgaagtacaggcctctagggctcagcctcaggaccctcaacctaggcggtcttgtggagctccagcagcagacccccaggcctgcatacagctgggcggaggcctgttgcagtgctcaaccgtctgttccgtgaactctagctctctgctgctgtgcaggtctcccgcagtccccgaccgtgctcacccccagagggtgttctttactcttgacaacgtgcaagtggactttgcaagtgcctcaggtggtcagggcttcctgtaccagccgaacccaagattggctcccttatcaagggaggggcctgcccgaccttatcgtcttaaaccaggacatgtgttggatgtggagggagagggcctgaatctgggtataagtaaggaagaggtgcgtgtgcatatcggacgaggagagtgcctcgtaaagactctgacccggacgcatctctattgcgagccaccggcacatgctccgcagccagctaatgggagtggcctaccccaattcgtcgtgcagatgggcaatgtgcagctggcgttggggccggtacaatacgaagccgaaccccctttgagcgcattccctgtggaagcccaggcaggcgtggggatgggggcagccgtgctgatcgctgctgtcctgctactcactctgatgtatagacataaatcaaaacaggcactgcgcgattatcaaaaagtcctggtgcagttggagtctcttgagaccggagtgggcgaccaatgccgcaaggagttcacggacctgatgacagagatgactgacctgtccagcgacctggagggctcaggaattccttttctcgattacagaacttacgccgagagagcctttttccccggtcacggggggtgcccattgcaaccaaaaccagaggggccaggagaggatggccattgcgccacagtcagacagggtctaacacagctgagcaacctgcttaattctaagctgttccttctcactctgattcatactttggaggagcaaccgtcatttagtcagcgagacagatgtcatgtagcctcactgctgtctctcgctctgcacggcaagttggaatacctgacagacatcatgaggactttactcggagatctggccgcacactatgtgcacaggaaccccaagctaatgctgcgccggacagaaacaatggttgaaaaactgctgactaactggctgtctatctgcctgtatgcctttctgagggaggtggcaggggagcctctctatatgctctttagagcgatccagtaccaggtagacaaaggtccagtggatgcagtgactggaaaagctaaacggacacttaatgattcccgcttgctcagggaggacgtcgagttccaacccctgactctaatggttctcgtaggacctggggccgggggcgccgctggatcctccgaaatgcagagggtcccagcccgggtgcttgacaccgatacgatcactcaagtaaaagaaaaagtcctggaccaggtgtacaaaggtacaccgttctcccagcgcccctctgtgcatgcgcttgatctcgagtggagatctggattagccgggcatctgacgctatctgacgaggatttaacttcagtcacccagaaccactggaaacggttgaatacactgcagcactacaaagttccggatggggccaccgtcggacttgtaccgcagctccatcgagggagtacgatcagccagtcccttgctcagcggtgcccgttaggagaaaacatcccaaccttggaagacggcgaggaaggaggggtgtgtctgtggcacctggtgaaagctacagaagaacctgaaggcgcaaaggtgagatgcagttccctccgagaacgtgagcccgcccgggccaaggcaatcccagaaatatacttaacaagactgctctcaatgaaaggcacccttcagaagtttgtagacgacacatttcaggctattctgtcggtcaaccgccccattccaatcgccgttaagtatctcttcgacctcctcgatgaactggcagagaagcatggaatcgaggacccaggcacactgcacatttggaagactaattcgttactactccgcttctgggttaacgccttgaagaacccacagcttatcttcgatgtgagagtgtcagacaatgtggacgcaattcttgctgttattgcgcagaccttcatagattcctgtactacctctgaacacaaggtagggcgcgactcacctgttaataagcttttgtacgcccgggagattccccgctacaagcagatggtagaacgatactacgcagatatacgacagagcagtccagcaagctaccaagaaatgaactccgccttggcagagctgagcggaaactatacaagcgctcctcactgcttagaagcattacaagagctctacaaccatattcacaggtattacgaccagattatttccgccctggaagaagatcccgtgggccagaaacttcaacttgcctgcagacttcagcaggtggccgctcttgtagagaacaaggtaacggacctctag

SEQ ID NO: 155605 - DNA, 5730 bp, Artificial Sequence
  derived and/or modified sequence
atgtgccacgccgcccaggagacccccctgctgcaccacttcatggcccctgtgatggcccgctggcccccatttggcctgtgcctgctgctgctgctgctgagccccccacccctgcccctgaccggggcccaccgcttcagcgcccccaacaccaccctgaaccacctggccctggcccctggccggggcaccctgtatgtgggcgctgtgaacagactcttccagctgagccctgagctgcagctggaggccgtggccgtgactggacctgtgattgacagcccagactgtgtgcccttccgggaccctgctgagtgcccccaggcccagctgacagacaatgccaaccagctgctgctggtgagcagccgggcccaggagctggtggcctgtggccaggtgcggcagggcgtgtgtgagacccggcggctgggagatgtggccgaggtgctgtaccaggccgaggaccctggagatggccagtttgtggccgccaacaccccaggagtggccaccgtgggcctggtggtgcccctgcccggccgggacctgctgctggtggcccggggcctggccggcaagctgtctgctggggtgccccccctggccatccggcagctggccggcagccagcccttcagcagcgagggcctgggccgcctggtggtgggggacttcagtgactacaacaacagctatgtgggcgcctttgctgatgcccggagcgcctactttgtgttcagaagaagaggagcccgggcccaggccgagtaccgctcctatgtggcccgggtgtgcctgggggacaccaacctgtacagctatgtggaggtgcccctggcctgccagggccagggcctcatccaggccgccttcctggcccctggcaccctgctgggcgtgtttgctgctggcccccggggcacccaggccgccctgtgtgccttccccatggtggagctgggcgcctccatggagcaggcccggcggctgtgctacacagctgggggccggggccccagcggggctgaggaggccaccgtggagtatggagtgaccagccgctgtgtgaccctgcccctggacagccctgagagctacccctgtggagatgagcacacccccagccccatcgccggccggcagcccctggaggtgcagcccctgctgaagctgggccagcctgtgtctgctgtggccgccctgcaggctgatggccacatgattgccttcctgggggacacccagggccagctgtacaaggtgttcctgcacggcagccagggccaggtgtaccacagccagcaggtgggccccccaggcagcgccatcagcccagacctgctgctggacagcagcggcagccacctgtatgtgctgacagcccaccaggtggaccgcatccctgtggccgcctgcccccagttcccagactgtgccagctgcctgcaggcccaggaccccctgtgtggctggtgtgtgctgcagggccgctgcaccaggaagggccagtgtggccgggccggccagctgaaccagtggctgtggagctatgaggaggacagccactgcctgcacatccagagcctgctgcccggccaccacccccggcaggagcagggccaggtgaccctgtctgtgccccggctgcccatcctggatgctgatgagtacttccactgtgccttcggggactatgacagcctggcccacgtggagggcccccacgtggcctgtgtgaccccaccccaggaccaggtgcccctgaaccccccaggcacagaccacgtgacagtgcccctggccctgatgtttgaagatgtgacagtggccgccaccaacttctccttctatgactgcagcgctgtgcaggccctggaggccgccgccccctgccgggcctgtgtgggcagcatctggcgctgccactggtgcccccagagcagccactgtgtgtatggagagcactgcccagagggggagaggaccatctacagcgcccaggaggtggacatccaggtgcggggccctggggcctgcccccaggtggagggcctggccggcccccacctggtgcctgtgggctgggagagccacctggccctgcgggtgaggaacctgcagcacttccggggcctgcctgccagcttccactgctggctggagctgcctggagagctgcggggcctgcctgccaccctggaggagacagctggggacagcggcctcatccactgccaggcccaccagttctaccccagcatgagccagcgggagctgcctgtgcccatctacgtgacccagggcgaggcccagaggctggacaacacccacgccctgtatgtgatcctgtatgactgtgccatgggccacccagactgcagccactgccaggccgccaacagaagcctgggctgcctgtggtgtgctgatggccagcctgcctgccgctatggccccctgtgccccccaggagctgtggagctgctgtgcccagcccccagcattgatgctgtggagcccctgaccggccccccagagggcggcctggccctgaccatcctgggcagcaacctgggccgggcctttgctgatgtgcagtatgctgtgtctgtggccagccggccctgcaaccctgagcccagcctgtaccgcaccagcgccagaattgtgtgtgtgaccagccctgcccccaacggcaccactggacctgtgcgggtggccatcaagagccagcccccaggcatcagcagccagcacttcacctaccaggaccctgtgctgctgagcctgagcccccgctggggcccccaggccggcggcacccagctgaccatccggggccagcacctgcagacaggaggcaacaccagcgcctttgtgggcggccagccctgccccatcctggagcctgtgtgcccagaggccatcgtgtgcaggacccggccccaggccgcccctggagaggccgctgtgctggtggtgtttggacatgcccagaggaccctgctggccagccccttccgctacacagccaacccccagctggtggccgctgagcccagcgccagcttccggggcggcggccgcctcatccgggtgcggggcaccggcctggatgtggtgcagaggcccctgctgtctgtgtggctggaggctgatgctgaggtgcaggccagccgggcccagccccaggacccccagcccaggaggagctgtggggccccagctgctgacccccaggcctgcatccagctgggcggcggcctgctgcagtgcagcacagtgtgcagcgtgaacagcagcagcctgctgctgtgccgcagccctgctgtgcctgaccgggcccacccccagagggtcttcttcaccctggacaacgtgcaggtggactttgccagcgccagcggcggccagggcttcctgtaccagcccaacccccggctggcccccctgagccgggagggccctgcccggccctaccgcctgaagccaggccacgtgctggatgtggagggggagggcctgaacctgggcatcagcaaggaggaggtgcgggtgcacatcggccgcggggagtgcctggtgaagaccctgaccaggacccacctgtactgtgagcccccagcccacgccccccagcctgccaacggcagcggcctgccccagtttgtggtgcagatgggaaatgtgcagctggccctgggccctgtgcagtatgaagctgagccccccctgagcgccttccctgtggaggcccaggccggcgtgggcatgggcgctgctgtgctgattgctgctgtgctgctgctgaccctgatgtaccgccacaagagcaagcaggccctgcgggactaccagaaggtgctggtgcagctggagagcctggagactggagtgggggaccagtgcaggaaggagttcacagacctgatgacagagatgacagacctgagcagtgacctggagggcagcggcatccccttcctggactaccgcacctatgcagagcgggccttcttccctggccatggaggctgccccctgcagcccaagccagagggccctggagaagatggccactgtgccaccgtgcggcagggcctgacccagctgagcaacctgctgaacagcaagctgttcctgctgaccctcatccacaccctggaggagcagcccagcttcagccagagggaccgctgccacgtggccagcctgctgagcctggccctgcacggcaagctggagtacctgacagacatcatgaggaccctgctgggggacctggccgcccactacgtgcacaggaaccccaagctgatgctgcggaggacagagaccatggtggagaagctgctgaccaactggctgagcatctgcctgtatgccttcctgcgggaggtggccggggagcccctgtacatgctgttccgggccatccagtaccaggtggacaagggccctgtggatgctgtgacaggcaaggccaagaggaccctgaatgacagccggctgctgagagaagatgtggagttccagcccctgaccctgatggtgctggtgggccctggggccggcggggccgccggcagcagcgagatgcagagggtgcctgcccgggtgctggacacagacaccatcacccaggtgaaggagaaggtgctggaccaggtgtacaagggcacccccttcagccagaggcccagcgtgcacgccctggacctggagtggaggagcggcctggccggccacctgaccctgagtgatgaggacctgacctctgtgacccagaaccactggaagaggctgaacaccctgcagcactacaaggtgcctgatggagccaccgtgggcctggtgccccagctgcaccggggcagcaccatcagccagagcctggcccagcgctgccccctgggggagaacatccccaccctggaggatggagaggagggcggcgtgtgcctgtggcacctggtgaaggccacagaggagcctgagggcgccaaggtgcgctgcagcagcctgcgggagcgggagcccgcccgggccaaggccatccctgagatctacctgacccggctgctgtccatgaagggcaccctgcagaagtttgtggatgacaccttccaggccatcctgtctgtgaaccggcccatccccatcgctgtgaagtacctgtttgacctgctggatgagctggccgagaagcatggaattgaggaccccggcaccctgcacatctggaagaccaacagcctgctgctgcgcttctgggtgaatgccctgaagaacccccagctgatctttgatgtgcgggtgtctgacaacgtggatgccatcctggccgtcatcgcccagaccttcatcgacagctgcaccaccagcgagcacaaggtgggccgggacagccctgtgaacaagctgctgtatgcccgggagatcccccgctacaagcagatggtggagcgctactatgctgacatccggcagagcagccctgccagctaccaggagatgaacagcgccctggccgagctgagcggcaactacaccagcgccccccactgcctggaggccctgcaggagctgtacaaccacatccaccgctactatgaccagatcatcagcgccctggaggaggaccctgtgggccagaagctgcagctggcctgccgcctgcagcaggtggccgccctggtggagaacaaggtgacagacctgtag

SEQ ID NO: 155606 - DNA, 777 bp, Artificial Sequence
  derived and/or modified sequence
tgaagcctggagactggagtgggggaccagtgcaggaaggagttcacagacctgatgacagagatgacagacctgagcagtgacctggagggcagcggcatccccttcctggactaccgcacctatgcagagcgggccttcttccctggccatggaggctgccccctgcagcccaagccagagggccctggagaagatggccactgtgccaccgtgcggcagggcctgacccagctgagcaacctgctgaacagcaagctgttcctgctgaccctcatccacaccctggaggagcagcccagcttcagccagagggaccgctgccacgtggccagcctgctgagcctggccctgcacggcaagctggagtacctgacagacatcatgaggaccctgctgggggacctggccgcccactacgtgcacaggaaccccaagctgatgctgcggaggacagagaccatggtggagaagctgctgaccaactggctgagcatctgcctgtatgccttcctgcgggaggtggccggggagcccctgtacatgctgttccgggccatccagtaccaggtggacaagggccctgtggatgctgtgacagagtggaggagcggcctggccggccacctgaccctgagtgatgaggacctgacctctgtgacccagaaccactggaagaggctgaacaccctgcagcactacaaggtgcctgatggagccaccgtgggcctggtgccccagctgcaccggggcagcaccatcagccagagcctgtag

SEQ ID NO: 155607 - DNA, 2967 bp, Artificial Sequence
  derived and/or modified sequence
atgtgccacgccgcccaggagacccccctgctgcaccacttcatggacagccctgagagctacccctgtggagatgagcacacccccagccccatcgccggccggcagcccctggaggtgcagcccctgctgaagctgggccagcctgtgtctgctgtggccgccctgcaggctgatggccacatgattgccttcctgggggacacccagggccagctgtacaaggtggaccgcatccctgtggccgcctgcccccagttcccagactgtgccagctgcctgcaggcccaggaccccctgtgtggctggtgtgtgctgcagggccgctgcaccaggaagggccagtgtggccgggccggccagctgaaccagtggctgtggagctatgaggaggacagccactgcctgcacatccagagcctgctgcccggccaccacccccggcaggagcagggccaggtgaccctgtctgtgccccggctgcccatcctggatgctgatgagtacttccactgtgccttcggggactatgacagcctggcccacgtggagggcccccacgtggcctgtgtgaccccaccccaggaccaggtgcccctgaaccccccaggcacagaccacgtgacagtgcccctggccctgatgtttgaagatgtgacagtggccgccaccaacttctccttctatgactgcagcgctgtgcaggccctggaggccgccgccccctgccgggcctgtgtgggcagcatctggcgctgccactggtgcccccagagcagccactgtgtgtatggagagcactgcccagagggggagaggaccatctacagcgcccaggaggtggacatccaggtgcggggccctggggcctgcccccaggtggagggcctggccggcccccacctggtgcctgtgggctgggagagccacctggccctgcgggtgaggaacctgcagcacttccggggcctgcctgccagcttccactgctggctggagctgcctggagagctgcggggcctgcctgccaccctggaggagacagctggggacagcggcctcatccactgccaggcccaccagttctaccccagcatgagccagcgggagctgcctgtgcccatctacgtgacccagggcgaggcccagaggctggacaacacccacgccctgtatgtgatcctgtatgactgtgccatgggccacccagactgcagccactgccaggccgccaacagaagcctgggctgcctgtggtgtgctgatggccagcctgcctgccgctatggccccctgtgccccccaggagctgtggagctgctgtgcccagcccccagcattgatgctgtggagcccctgaccggccccccagagggcggcctggccctgaccatcctgggcagcaacctgggccgggcctttgctgatgtgcagtatgctgtgtctgtggccagccggccctgcaaccctgagcccagcctgtaccgcaccagcgccagaattgtgtgtgtgaccagccctgcccccaacggcaccactggacctgtgcgggtggccatcaagagccagcccccaggcatcagcagccagcacttcacctaccaggaccctgtgctgctgagcctgagcccccgctggggcccccaggccggcggcacccagctgaccatccggggccagcacctgcagacaggaggcaacaccagcgcctttgtgggcggccagccctgccccatcctggagcctgtgtgcccagaggccatcgtgtgcaggacccggccccaggccgcccctggagaggccgctgtgctggtggtgtttggacatgcccagaggaccctgctggccagccccttccgctacacagccaacccccagctggtggccgctgagcccagcgccagcttccggggcggcggccgcctcatccgggtgcggggcaccggcctggatgtggtgcagaggcccctgctgtctgtgtggctggaggctgatgctgaggtgcaggccagccgggcccagccccaggacccccagcccaggaggagctgtggggccccagctgctgacccccaggcctgcatccagctgggcggcggcctgctgcagtgcagcacagtgtgcagcgtgaacagcagcagcctgctgctgtgccgcagccctgctgtgcctgaccgggcccacccccagagggtcttcttcaccctggacaacgtgcaggtggactttgccagcgccagcggcggccagggcttcctgtaccagcccaacccccggctggcccccctgagccgggagggccctgcccggccctaccgcctgaagccaggccacgtgctggatgtggagggggagggcctgaacctgggcatcagcaaggaggaggtgcgggtgcacatcggccgcggggagtgcctggtgaagaccctgaccaggacccacctgtactgtgagcccccagcccacgccccccagcctgccaacggcagcggcctgccccagtttgtggtgcagatgggaaatgtgcagctggccctgggccctgtgcagtatgaagctgagccccccctgagcgccttccctgtggaggcccaggccggcgtgggcatgggcgctgctgtgctgattgctgctgtgctgctgctgaccctgatgtaccgccacaagagcaagcaggccctgcgggactaccagaaggtgctggtgcagctggagagcctggagactggagtgggggaccagtgcaggaaggagttcaccggcggctgcggcggcggcggcaccggctacccccggggcctgaacagccacctgggcgcctcctggccccggcggccccatgatggagatgaccggccccagcagaggcctgggggccagagggaccccctgcccggcctgccccacctgcggcgggcccggctgctgccctggccctggaggctgcctgctgctgcccaggcctag

SEQ ID NO: 155608 - DNA, 675 bp, Artificial Sequence
  derived and/or modified sequence
atgtgccacgccgcccaggagacccccctgctgcaccacttcatggtggaccgcatccctgtggccgcctgcccccagttcccagactgtgccagctgcctgcaggcccaggaccccctgtgtggctggtgtgtgctgcagggccgctgcaccaggaagggccagtgtggccgggccggccagctgaaccagtggctgtggagctatgaggaggacagccactgcctgcacatccagagcctgctgcccggccaccacccccggcaggagcagggccaggtgaccctgtctgtgccccggctgcccatcctggatgctgatgagtacttccactgtgccttcggggactatgacagcctggcccacgtggagggcccccacgtggcctgtgtgaccccaccccaggaccaggtgcccctgaaccccccaggcacagaccacgtgacagtgcccctggccctgatgtttgaagatgtgacagtggccgccaccaacttctccttctatgactgcagcgctgtgcaggccctggaggccgccgccccagcctgcctgccccccagcacagctggctggagctgcctggagaactttggagactgcaggcctccctggaggcggcagcagggcatccaggccagcagcacagcccggcccaccaggagcagcccctag

SEQ ID NO: 155609 - DNA, 4689 bp, Artificial Sequence
  derived and/or modified sequence
atgtgccacgccgcccaggagacccccctgctgcaccacttcatggacagccctgagagctacccctgtggagatgagcacacccccagccccatcgccggccggcagcccctggaggtgcagcccctgctgaagctgggccagcctgtgtctgctgtggccgccctgcaggctgatggccacatgattgccttcctgggggacacccagggccagctgtacaaggtgttcctgcacggcagccagggccaggtgtaccacagccagcaggtgggccccccaggcagcgccatcagcccagacctgctgctggacagcagcggcagccacctgtatgtgctgacagcccaccaggtggaccgcatccctgtggccgcctgcccccagttcccagactgtgccagctgcctgcaggcccaggaccccctgtgtggctggtgtgtgctgcagggccgctgcaccaggaagggccagtgtggccgggccggccagctgaaccagtggctgtggagctatgaggaggacagccactgcctgcacatccagagcctgctgcccggccaccacccccggcaggagcagggccaggtgaccctgtctgtgccccggctgcccatcctggatgctgatgagtacttccactgtgcctttggagactatgacagcctggcccacgtggagggcccccacgtggcctgtgtgaccccaccccaggaccaggtgcccctgaaccccccaggcacagaccacgtgacagtgcccctggccctgatgtttgaagatgtgacagtggccgccaccaacttctccttctatgactgcagcgctgtgcaggccctggaggccgccgccccctgccgggcctgtgtgggcagcatctggcgctgccactggtgcccccagagcagccactgtgtgtatggagagcactgcccagagggggagaggaccatctacagcgcccaggaggtggacatccaggtgcggggccctggggcctgcccccaggtggagggcctggccggcccccacctggtgcctgtgggctgggagagccacctggccctgcgggtgaggaacctgcagcacttccggggcctgcctgccagcttccactgctggctggagctgcccggggagctgcggggcctgcctgccaccctggaggagacagctggggacagcggcctcatccactgccaggcccaccagttctaccccagcatgagccagcgggagctgcctgtgcccatctacgtgacccagggcgaggcccagaggctggacaacacccacgccctgtatgtgatcctgtatgactgtgccatgggccacccagactgcagccactgccaggccgccaacagaagcctgggctgcctgtggtgtgctgatggccagcctgcctgccgctatggccccctgtgccccccaggagctgtggagctgctgtgcccagcccccagcattgatgctgtggagcccctgactggacctcctgagggcggcctggccctgaccatcctgggcagcaacctgggccgggcctttgctgatgtgcagtatgctgtgtctgtggccagccggccctgcaaccctgagcccagcctgtaccgcaccagcgcccgcatcgtgtgtgtgaccagccctgccccaaatggcaccaccggccctgtgcgggtggccatcaagagccagcccccaggcatcagcagccagcacttcacctaccaggaccctgtgctgctgagcctgagcccccgctggggcccccaggccggcggcacccagctgaccatccggggccagcacctgcagacaggaggcaacaccagcgcctttgtgggcggccagccctgccccatcctggagcctgtgtgcccagaggccatcgtgtgcaggacccggccccaggccgcccctggagaggccgctgtgctggtggtgtttggccacgcccagaggaccctgctggccagccccttccgctacacagccaacccccagctggtggccgctgagcccagcgccagcttccggggcggcggccgcctcatccgggtgcggggcaccggcctggatgtggtgcagaggcccctgctgtctgtgtggctggaggctgatgctgaggtgcaggccagccgggcccagccccaggacccccagccccggcgcagctgtggggccccagctgctgacccccaggcctgcatccagctgggcggcggcctgctgcagtgcagcacagtgtgcagcgtgaacagcagcagcctgctgctgtgccgcagccctgctgtgcctgaccgggcccacccccagagggtcttcttcaccctggacaacgtgcaggtggactttgccagcgccagcggcggccagggcttcctgtaccagcccaacccccggctggcccccctgagccgggagggccctgcccggccctaccgcctgaagccaggccacgtgctggatgtggagggggagggcctgaacctgggcatcagcaaggaggaggtgcgggtgcacatcggcagaggagaatgtctggtgaagaccctgaccaggacccacctgtactgtgagcccccagcccacgccccccagcctgccaatggaagtggcctgccccagtttgtggtgcagatgggaaatgtgcagctggccctgggccctgtgcagtatgaggccgagccccccctgagcgccttccctgtggaggcccaggccggcgtgggcatgggcgctgctgtgctgattgctgctgtgctgctgctgaccctgatgtaccgccacaagagcaagcaggccctgcgggactaccagaaggtgctggtgcagctggagagcctggagaccggggtgggggaccagtgcaggaaggagttcacagacctgatgacagagatgacagacctgagcagtgacctggagggcagcggcatccccttcctggactaccgcacctacgccgagcgggccttcttccctggccacggcggctgccccctgcagcccaagccagagggccctggagaagatggccactgtgccaccgtgcggcagggcctgacccagctgagcaacctgctgaacagcaagctgttcctgctgaccctcatccacaccctggaggagcagcccagcttcagccagagggaccgctgccacgtggccagcctgctgagcctggccctgcacggcaagctggagtacctgacagacatcatgaggaccctgctgggggacctggccgcccactacgtgcacaggaaccccaagctgatgctgcggaggacagagaccatggtggagaagctgctgaccaactggctgagcatctgcctgtatgccttcctgcgggaggtggccggggagcccctgtacatgctgttccgggccatccagtaccaggtggacaagggccctgtggatgctgtgacaggcaaggccaagaggaccctgaatgacagccggctgctgcgggaggatgtggagttccagcccctgaccctgatggtgctggtgggccctggagctggaggagctgctggcagcagcgagatgcagagggtgcctgcccgggtgctggacacagacaccatcacccaggtgaaggagaaggtgctggaccaggtgtacaagggcacccccttcagccagaggccttctgtgcacgccctggacctggagtggaggagcggcctggccggccacctgaccctgagtgatgaggacctgacctctgtgacccagaaccactggaagaggctgaacaccctgcagcactacaaggtgcctgatggagccaccgtgggcctggtgccccagctgcaccggggcagcaccatcagccagagcctggcccagcgctgccccctgggggagaacatccccaccctggaggatggagaggagggcggcgtgtgcctgtggcacctggtgaaggccacagaggagcctgagggcgccaaggtgcgctgcagcagcctgcgggagcgggagcccgcccgggccaaggccatccctgagatctacctgacccggctgctgtccatgaagggcaccctgcagaagtttgtggatgacaccttccaggccatcctgtctgtgaaccggcccatccccatcgctgtgaagtacctgtttgacctgctggatgagctggccgagaagcacggcattgaagatcctggcaccctgcacatctggaagaccaacagcctgctgctgcgcttctgggtgaatgccctgaagaacccccagctgatctttgatgtgcgggtgtctgacaacgtggatgccatcctggccgtgattgcccagaccttcatcgacagctgcaccaccagcgagcacaaggtgggccgggacagccctgtgaacaagctgctgtatgcccgggagatcccccgctacaagcagatggtggagcgctactatgctgacatccggcagagcagccctgccagctaccaggagatgaacagcgccctggccgagctgagcggcaactacaccagcgccccccactgcctggaggccctgcaggagctgtacaaccacatccaccgctactatgaccagatcatcagcgccctggaggaggaccctgtgggccagaagctgcagctggcctgccgcctgcagcaggtggccgccctggtggagaacaaggtgacagacctgtag

SEQ ID NO: 155610 - DNA, 5730 bp, Artificial Sequence
  derived and/or modified sequence
atgtgccacgccgcccaggagacccccctgctgcaccacttcatggcaccagtaatggctcggtggcctccgttcggtttgtgtctgctgctgctgctgctatcccctccccccctgcccctgaccggtgcacatcggttcagcgcacctaacacaaccctgaatcaccttgccctggctccaggaagagggacactctacgtgggcgctgtaaatcggttgtttcaactttcacctgagctgcaactggaggccgtagcagttacaggccctgtgatcgattctcccgattgcgtgccattccgtgatccagcagaatgtccccaggcccaactcactgacaacgcaaatcagctgctgctcgtgtcctcccgcgcccaggagctggtggcctgtggtcaggtacgccagggtgtgtgcgagacccgaagactaggtgacgtggcagaagtcctgtatcaggcagaggatcccggcgacgggcagtttgtggccgctaatacaccaggtgtagcaactgttggcctggttgttcctttaccagggcgtgatttgctgctggtggcaaggggcctagccgggaagctaagcgccggagtaccgcctctcgcaatcagacagctagctggctcccaacccttcagttcggaaggtctgggcagattggtcgtcggagatttttctgattacaataatagctatgtgggcgctttcgccgatgcccgcagcgcgtactttgtgtttcggagacggggcgccagagcccaggctgagtaccgcagctacgtggcacgggtctgcctgggagacacgaacttatacagttatgtggaagttccactcgcttgtcaggggcaggggcttattcaggccgcattcttagcaccaggcacattgttaggagtatttgcggccggccccagaggcacgcaggctgcactctgcgcatttccaatggtggaactaggcgcgtcaatggagcaggcccggagactgtgttacacagcagggggacgcggacctagcggggccgaggaggctaccgtggaatatggcgtcacctcccgctgtgtgacacttccgttggactctcccgaatcctacccttgtggtgacgagcatacaccatctccaatcgcagggagacagccgctggaggtgcagccgcttcttaagctgggacaacccgtctccgccgttgcagcattgcaggctgacggccatatgattgccttcttgggagacacccagggccagctctacaaggtcttcctacatggatcgcaaggtcaggtgtatcacagccaacaggtgggacctcctggaagcgccattagtccagatcttctgctcgattcctccggctctcacttgtacgtgcttactgcccaccaagtggacagaatacccgtcgcggcctgtccccaattccctgactgcgcatcgtgcctgcaggctcaggaccctctgtgtggatggtgcgtgttgcagggaaggtgtacccgaaaaggacaatgtgggcgggccggacagctgaaccagtggctgtggtcctacgaagaagacagccactgcctccacatacagtctctgctgcctggccaccatcccagacaggaacaggggcaagtcaccctgagcgtgccgcgattgccgattctggatgccgatgaatatttccactgcgcatttggcgattacgacagcttagctcatgtggaggggccgcatgttgcctgtgtcactccaccccaagaccaggtcccattgaacccacctggcacagaccatgtgactgtgcctctcgccctgatgttcgaagacgtgaccgttgctgctacgaacttctccttctacgattgtagtgctgtccaggctctggaggccgctgcaccttgccgcgcctgtgtaggctccatttggcggtgccattggtgcccacagtcgagtcattgcgtttacggtgagcattgtccggagggtgagagaacaatatattctgcgcaggaagttgacattcaagtaagaggccccggtgcttgtcctcaagtggaaggccttgcgggcccccacctggttcctgtgggatgggagtctcatctggccctcagggtcagaaacctccagcacttccgcgggctccccgcgtcctttcattgttggttagagctgcctggagagctgagaggccttcccgccacactggaagagactgcaggtgattctgggcttattcactgtcaggcacaccagttctatccttctatgagtcagagagagttaccggtgcctatttacgttactcagggcgaagctcagaggctggacaatacccatgcattatacgtcattctatacgattgtgctatggggcatcccgactgcagccactgtcaggccgccaacagatctttaggttgcctgtggtgcgcggacggccagcccgcctgccgctacggccccctgtgccctcccggcgcggtggaacttctctgccccgccccctccattgatgcagtggagcctctcacagggcctcccgagggggggctggcactgacaatactcggctcaaacctcggcagggcctttgcagatgtgcagtatgctgtttccgtggcgtcacgcccctgcaatcctgaaccctcactctaccgcacatcagctcgaattgtatgtgtgacttcacccgcaccaaatggaacgacagggccagtgagggttgccattaagagccagcctcccggaataagtagtcaacacttcacctatcaagaccctgtgctactgtccctcagcccccgctggggtcctcaggcaggagggactcaattaaccatcagaggccaacatcttcaaaccggtggcaacactagcgcgtttgttggcggccagccgtgtccaatactcgagcccgtctgcccagaagcgatcgtatgcagaactagaccacaagccgccccaggtgaggccgcagtactagttgtgtttggacacgctcagaggaccttgctagcatcccctttccggtatacagctaacccccaactggtggctgccgagccatctgcttccttcagaggaggtggaagacttattcgggttaggggcactgggttggacgtggtgcaacgccccctgctaagcgtgtggctagaggccgatgcggaagtgcaggcttcaagagcgcagccgcaggaccctcaaccacgtaggagctgcggagctccagccgccgacccccaggcttgtatccagttggggggggggctgctgcagtgctccacggtatgtagcgtcaattcttccagcttactgctgtgtcggagcccagcagtacctgaccgggcccatcctcagcgggtgttctttactctcgataatgtgcaggtggacttcgcatctgccagcggcgggcaaggcttcctctatcagcccaaccctagactggcaccgttgagtcgtgaaggaccagctaggccgtatagattgaaaccaggccatgtgctggacgtcgaaggagaaggcctcaatctcgggatcagcaaagaagaggtgcgtgtccacattggccgcggcgaatgtcttgtgaagaccctgaccagaacacacctctactgtgagcctccagcgcacgccccacaaccagctaacggttccggactcccacaatttgtcgtgcagatgggaaatgttcaacttgcattagggccagtgcagtatgaagcagagccacctctgtctgcgttccccgtggaagcgcaagccggagtgggtatgggggccgccgtcctgatagccgcagttctgctccttactttgatgtatcgccacaaatctaagcaggcccttcgggattaccagaaggtcctcgtccagttggagagtctggaaactggggtgggagatcagtgtcgtaaggagtttacagatctgatgacagagatgaccgatctctcaagcgatctagaaggtagtgggatccccttcctggattatcggacctacgcagagagggccttttttccaggtcacggcgggtgtcccctgcagccaaaacctgaggggccaggagaagatgggcattgcgccaccgtacggcaggggctcacacagttgtccaacctcttaaattcaaagctcttcctgctaaccctgattcacaccctggaggagcagccctctttttcccagagggaccggtgccatgttgcctctcttttgtccttagccttgcacggtaagctggaatacctgactgatattatgaggactttacttggcgacctcgccgcacactacgtgcatagaaaccctaagctgatgctgcgccgcactgagacgatggtggagaagcttctgaccaattggctctccatatgtctctatgccttccttcgcgaagtagccggcgagccattatatatgttatttcgcgcaatacaataccaggttgataaaggacctgtggatgccgtgacaggaaaagccaaaagaactctcaatgattcccgactgcttagggaagatgtggagttccagccgctgaccctcatggtgctggtggggccaggagctggcggggccgccggctcgtccgagatgcagcgggtaccagcacgggtccttgacaccgacaccatcacccaggtgaaggaaaaggtcttagaccaggtctacaagggcaccccctttagccagcgcccatccgtgcacgccctcgatcttgaatggagatccggtctcgctggccacttaaccctgagtgacgaggacttaaccagtgtgacacagaatcattggaaacggttaaacactctgcaacattataaggtgcccgacggtgcgactgtgggactcgtaccccaactccatcgtggcagtactattagccagagcctggctcagaggtgtcctttgggagagaacataccgacactcgaggacggagaggaagggggggtgtgtctgtggcatctcgttaaagccaccgaagaaccagagggcgcgaaggtgcggtgttccagtttacgcgagagggagcctgctcgagctaaggccattcctgagatatacctcactagactgctttctatgaagggtaccctccagaagtttgtagacgatacctttcaggccattctgtcagtgaacagacctatccccatcgctgtcaagtatctgtttgatctgctcgacgaactcgcagagaagcatgggatcgaggacccgggcactctgcatatctggaaaaccaatagcctgctgctccgattttgggtcaatgcgctgaaaaacccccagctcattttcgatgtacgggtcagcgataatgtggatgccattctcgcagtaatcgctcagaccttcatcgattcgtgcactaccagcgagcacaaggtcggccgagactctccagtgaacaagctcctttacgctagagagataccaaggtacaaacaaatggtagagcggtattacgccgatattcggcagtcttcacctgccagttaccaggaaatgaacagcgctctggctgagctcagcggcaattacacatcggcgccgcattgtctggaagcgctacaagagctgtacaaccatatccacaggtactacgaccagattatttctgcacttgaagaggaccctgtcggacagaagcttcagctggcctgtagacttcagcaggtagctgcactcgtcgagaataaagtgaccgacctctag

SEQ ID NO: 155611 - DNA, 777 bp, Artificial Sequence
  derived and/or modified sequence
tgaagcctggagaccggcgtgggcgaccagtgccggaaggagttcacagatctgatgaccgagatgacagacctgtccagcgatctggaaggttccggtataccatttctcgattacagaacatatgctgagagagccttctttcccggacatggcggctgtcccttgcaacctaaaccggagggccctggcgaggacggtcactgtgcaaccgtacggcaaggtctcacacagttatctaacctgctgaacagtaagctgtttttgctgacactgatacataccttagaggaacagccttctttctctcagcgggatcggtgtcatgtggccagtctgctttctctcgccctgcatgggaagttggagtacctgactgatatcatgcggacgttgctgggcgaccttgccgcgcactatgtgcacaggaaccctaagctcatgttgaggcggacagaaacaatggtggagaagctgctaaccaactggctcagtatctgtctctacgcttttttgagggaagtggctggcgaacccctctatatgctatttcgcgccatacagtaccaggtagacaaaggccccgtagacgcagtgaccgaatggagaagcgggctggctggccatcttactctgtccgatgaagatcttaccagtgtcacccagaaccactggaagcggttgaacacactacagcactacaaagtgcctgacggcgcgactgttggcctggtcccccaactccaccgtggaagtactatttcacagagtctgtag

SEQ ID NO: 155612 - DNA, 2967 bp, Artificial Sequence
  derived and/or modified sequence
atgtgccacgccgcccaggagacccccctgctgcaccacttcatggatagccccgagagttacccttgtggcgacgagcacacgccgagtccaatcgccgggagacagccactggaagtccagcctttgctgaagttagggcaaccagtgtcggctgttgctgcactgcaggccgacggccacatgatcgcctttctaggcgatacccaggggcagctgtataaagtggacagaattccagtagccgcttgcccgcagtttccagactgtgcaagctgtctacaggctcaggaccccctttgtggttggtgtgtcctccagggccgatgcacgagaaaaggccaatgcggacgggcaggtcagctcaaccagtggctgtggagttacgaggaagattcgcattgcctccatatacagtctcttctgccaggccaccatccccggcaggaacagggacaggtcactttgagcgtccctcgcctgcctatcctggatgccgatgaatacttccactgtgcttttggagactatgatagcttagcacacgtggagggcccgcacgttgcctgtgtgacccccccccaggaccaggtgccgctgaacccaccgggcacagatcacgttactgtgccgttggccttaatgtttgaagatgttactgtggctgccacgaacttctctttctacgattgttccgccgtacaagctctggaagccgctgcaccctgtcgggcatgcgttggctctatatggcgatgccattggtgcccacaaagcagtcattgcgtgtatggcgagcactgccccgaaggcgaacgcactatttatagtgcccaggaggttgatattcaggtgcgaggacctggagcgtgcccgcaggtggagggcctggcggggccgcacctggtgccagtaggctgggaaagtcacctggccctgcgagtgcggaatctccagcacttccgggggctccccgcttccttccactgttggctcgagctgcctggggagcttcgaggcctgccagcaacattagaagaaaccgctggggattccggactgatccattgtcaggctcaccagttttacccatcaatgtcacagagagaactgcccgtgccaatttatgttacacagggtgaggcccagcgcctggacaatacacacgccttatacgtgattctgtatgactgtgccatgggacaccccgattgtagtcactgccaagcagcaaataggagcctggggtgcttatggtgcgcggatggacagcctgcctgccggtacggccccctctgtccccctggcgccgtggaactgctgtgccccgcgccttctattgatgccgtcgaaccactgactggaccgccagaggggggtttggcccttaccatcttgggttcaaatctgggcagagcattcgctgatgtccaatacgccgtatctgtggcctcccggccatgtaatcctgaaccatctctgtaccggaccagcgctaggattgtatgtgtgacttcacccgcacccaatggcaccaccggtccggtgcgggtagccatcaaatcccagccgccaggtatatccagtcagcactttacttatcaggaccccgttttgctgtctttgtctcctcggtggggacctcaggcaggcgggacccagttgacaatccgtggccagcacctgcaaacaggcgggaacacttcagccttcgtcggggggcaaccctgtcccatcctggagcctgtatgtccagaagccatcgtgtgcaggaccagaccccaggcggccccaggcgaagccgcagtgctagtggtgttcggccatgctcagcggactcttctggcttccccattcaggtacacagctaatccgcagctggtggctgctgagcccagtgcctcattcaggggcggaggccgtttgatacgggtgagaggcaccggcttagatgttgttcagcgcccactgttgtctgtatggctcgaggcagatgccgaagtccaagcatcaagagcgcagccacaggaccctcagccccgtcgcagctgcggcgctcctgccgccgaccctcaggcttgcatacagttggggggcggcttgctccagtgtagcactgtctgttccgttaattctagtagtctgctcttgtgccgatccccggcagttccagaccgggcccatccacagcgggtcttttttactctggataacgttcaagtggattttgcttcagcctccggcggccaggggttcctgtaccagccgaatccgcggctggccccgctttcaagggaaggacccgcccggccctaccgcctgaagcccgggcacgtactagacgtggagggcgaggggctcaatttgggcattagtaaagaagaggtgcgcgtgcatattggcaggggcgaatgcctggtaaagactttgaccaggacccacctctactgcgagccccccgcccacgcccctcagcctgctaacggcagcggcctcccccagtttgtagtgcagatgggcaatgtgcagctggcactggggccggtccaatacgaggccgaaccccctttgtccgccttccccgtggaagcacaggctggcgtgggcatgggagcggcagtgctgatagcggctgtcctcctactgacactcatgtatagacataaatcaaagcaagcgctgagggattaccagaaggtcctggtacagcttgaaagtctggaaactggggtgggcgaccagtgtaggaaagagttcacaggcggctgcggcggcggcggaacaggatatcccagagggcttaattcgcatctcggcgccagctggccaaggagaccgcatgacggagacgatcgccctcagcagcgcccgggaggccaacgggaccccctccccgggcttccacacctccgaagagctagactgctcccgtggccgtggcgtctgccagccgccgcccaggcgtag

SEQ ID NO: 155613 - DNA, 675 bp, Artificial Sequence
  derived and/or modified sequence
atgtgccacgccgcccaggagacccccctgctgcaccacttcatggtagatagaatccccgtggcagcatgccctcagtttcccgactgcgcttcatgtttgcaagcccaggacccgctgtgcggctggtgtgtgctgcaaggacggtgtacacggaagggccaatgcggcagggcaggtcagctaaatcaatggttgtggtcttacgaggaagacagtcactgcctgcacatccagtctctactgcccggacatcacccccggcaggagcagggccaggttacactcagtgtgcctaggctccccatccttgacgcagatgaatactttcactgtgcattcggagactatgactcgctcgcccatgtagaagggccccacgtcgcctgtgtgacgcctccacaggatcaggttcctctgaacccgcctggtactgatcatgtgaccgtgcctcttgctctgatgttcgaagatgtcactgtagccgctaccaacttctccttttatgactgctctgcggtacaggctctggaagccgccgctccagcatgcctccctcccagtactgccgggtggtcatgcttggaaaatttcggggactgccgaccaccttggaggaggcaacaaggcatccaggcttctagtacagctcgccccacaaggtcaagtccctag

SEQ ID NO: 155614 - DNA, 4689 bp, Artificial Sequence
  derived and/or modified sequence
atgtgccacgccgcccaggagacccccctgctgcaccacttcatggactctcctgagtcctacccttgcggcgacgagcacaccccatcgcccatcgctggccgtcaaccgctggaggttcagcctcttctgaagctgggccagcccgtcagcgcggtggcagcgctacaagcagacggtcatatgattgcctttcttggcgacacacagggtcagctttacaaagtgtttctacacggttctcaagggcaagtgtatcattctcagcaggtcggacccccaggttccgccattagcccagacctgctcctagacagtagcggcagccatttatacgtcctcacagcacatcaggtcgatcgtataccagtcgccgcgtgtccacagtttcctgattgcgcaagctgtctgcaggcccaggatccactctgcggatggtgtgtgctgcagggacgttgtacaagaaaagggcagtgtgggcgggcggggcaactgaatcaatggctgtggagttacgaagaggattcccattgtctccacatccagtccctgctgccagggcaccacccacggcaggagcagggccaagtgacactctccgtgcctaggctccccattctggacgctgatgagtatttccactgtgcgtttggtgattatgatagtctggcccacgtggaaggccctcacgtggcttgcgtgaccccgccccaggaccaagtcccactgaacccgcccgggacagatcacgtaaccgtacccctggcactgatgtttgaggatgtgacagtcgccgcaacaaacttctctttctatgattgtagtgccgtccaggccctggaggctgcagctccctgccgcgcctgtgtgggaagcatatggcgctgccattggtgtccccaatcctcccactgcgtgtacggcgagcattgccccgaaggtgaaaggaccatttacagcgcccaggaagttgacattcaggtgaggggtcccggagcttgtcctcaagttgagggcctggcaggaccccatctcgttcccgtgggttgggagtcacacctcgcccttcgggtgaggaacctgcagcactttcgcggccttccagctagcttccactgttggttagaacttcccggcgaactgcgtggcttgcctgcaactctggaagagacggccggtgacagtggcttgattcattgtcaggcccatcagttttacccctcaatgagtcagagagagctacctgtgcccatatacgtcacccaaggtgaggcccaacggctcgacaatacccacgctctctacgtgatcttatatgattgcgcaatgggccacccggattgctctcactgtcaagccgcaaaccgaagcctaggctgcctgtggtgcgccgacggccagcctgcctgtagatacggtcccttgtgtccacccggggctgttgaactgctctgtcccgcaccctctattgacgctgtggagcctttgactggcccccctgaaggtggtctggctttgaccatcctaggatctaacctaggccgagcatttgccgacgtgcagtacgctgtgtccgtggcctcgcggccctgtaaccccgaaccctccctttaccgaacttccgctagaatcgtatgtgtaacctctcccgctccaaatggtacaaccggccctgtgcgggttgcaatcaagtcccagccccccggtatatcttcccaacattttacttaccaagacccagtgctactgtcgttgagcccgaggtgggggccacaggcaggtggaacccaattaacaattcgtggccagcacttgcagacgggcggtaacacgtccgcgtttgtggggggccaaccctgccccatattggagccagtgtgccccgaggcgatcgtgtgccgcacaagaccccaggctgcccctggagaggccgcagtgcttgtggtgtttggacatgcgcagcggaccctgctggcctcccctttccgctatactgccaacccccaactcgtggccgcggagccctcagcctctttccgcggggggggcaggctaattagagtgcgcggaaccgggctggacgtggtccagcggcctctgctgtccgtgtggctggaagccgacgctgaagtccaggcctcacgcgcccagccacaggatccgcagcctaggagaagctgcggggccccagcagccgatcctcaggcatgtatccaactcggggggggcctcctccagtgcagcaccgtttgctctgttaactccagttctctgctgttatgtcgtagccctgcagttcctgatagagcacaccctcagagagtcttctttaccctggataacgtccaggtggatttcgcatcagctagtggtggacagggctttctgtatcagcccaatcctcgcctagctccacttagtcgggaaggtcccgcccgtccctataggttgaaacccggccatgttttggacgtcgagggggaaggtctgaatctcggaatctccaaagaagaggtgcgggtgcacataggccggggcgaatgcttggtcaagactctgaccaggacccatttgtactgcgaaccaccagcgcacgcgccacagcctgctaacggcagtgggctcccccagtttgttgtgcagatggggaacgtgcagctcgcactgggccctgtgcagtatgaagccgaaccgcctttatctgcttttcctgttgaggcacaagcaggtgtgggcatgggtgccgccgtcctgattgccgccgtgcttcttctaaccctcatgtaccgacacaagtccaagcaggcactgagagactatcagaaagttctggtgcagctagaatcactcgagacaggcgtaggtgatcaatgccggaaggagttcaccgacctgatgacagagatgaccgatctatcaagcgacctggagggatcaggcatcccattcttagactataggacctatgcggagagggcattcttccctggacacggcggatgcccgttgcagccaaaacctgagggtcctggggaggatggacactgcgctacagttaggcagggcctgacacagttgagtaacctgctgaatagcaagcttttccttctaacactcattcacaccctagaggagcagccttcctttagtcaaagggacagatgccacgtggcgtcccttttaagtcttgccctccatggcaagctcgaatatctaaccgatattatgaggactctgctcggggacttggccgctcactacgttcatcgtaaccccaaactgatgctccgtcggacagaaacaatggtcgagaaacttttaacaaactggctaagcatctgcctttatgcatttttgagagaagtggccggagaacctctttacatgttgtttcgtgccatccagtaccaagtggacaagggacctgtggacgcggtgaccgggaaagctaagcggaccttgaacgacagtcggctgctccgcgaggacgtggaattccagcccctgaccttgatggttctagttggccccggcgctgggggcgcagccgggagctcagaaatgcaacgtgtaccagcccgagtcttagatactgataccattactcaggtgaaagaaaaagtgctggaccaggtctacaagggcactcccttctctcagaggccctccgttcatgccttggatctcgagtggcgaagcgggctggcagggcatctgacgttatccgacgaagacctgacctcggtgacccagaatcattggaaaaggctgaacactctgcaacattataaagtgcccgatggggccacagttggcctggtcccgcagcttcatagaggaagcacaatcagtcaatcactcgcccagcgctgccccctgggggaaaatataccaaccctcgaggacggggaggaggggggggtgtgtttatggcatctcgtgaaggccactgaagaaccggaaggggccaaagtgcggtgctctagtttaagggaacgggagccagctcgcgctaaggcaatccctgaaatatatctgacgagactgctctccatgaaggggactctgcagaaatttgttgatgacacattccaggcgattctgagtgtgaatcgaccaatcccaattgcggtcaagtaccttttcgacctactggatgagttggccgaaaaacacggaatcgaagatcctggcactctgcatatatggaagaccaatagcctgctgctgcgcttctgggtgaatgcacttaagaatccacagttaatctttgacgtcagagtatccgacaacgtggatgcaattctcgctgttatagcacagacttttatagactcttgtactacgagcgagcacaaggtggggcgagatagccctgtgaataaactcctgtacgcacgggagattccccggtacaaacagatggtcgagaggtattatgccgacatccgccagtcttcacccgctagctatcaggagatgaattccgctcttgccgaactgtcaggcaactacacttcggctccgcactgccttgaagccctgcaggagctctacaatcacatccaccgctactacgatcagattatcagtgctctggaggaggaccctgtcggccagaagctccagctcgcatgtcgcttacagcaagtagctgcccttgtggagaataaggttaccgacttgtag

SEQ ID NO: 155615 - DNA, 6146 bp, Artificial Sequence
  derived and/or modified sequence
gctcctggcaccgccagctgctacttggccctcgccggtggcccaccaggacaatgcccccccgcagccatctcatgcccatcgccactgccctggggcagctgaactgagcgtatgtgccacgccgcccaggagacccctctgctgcaccacttcatggcccccgtgatggctcgctggcctcccttcggcctctgcctcctcctgctgctgctgtccccaccgccactgcccttgacaggggcccatcgcttctccgcacctaataccactctcaaccacttggcactggcacctggccgaggcacactctatgtcggcgcagtgaaccgcctcttccagctcagccccgagctgcagctcgaggccgtggctgtcactggccctgtaatcgacagccctgactgcgtgcccttccgtgacccagccgagtgcccacaggcccagctcactgacaatgccaaccagctgctgctggtgagcagccgcgcccaggagctggtggcctgcgggcaggtgcggcagggcgtgtgtgagacacggcgccttggggatgtggccgaggtgctgtaccaggctgaggaccctggtgacgggcagtttgtggctgccaataccccgggagtggcaacggtggggctggtggtgcccttgcccggccgggacctcctgcttgtggccagaggcctggcgggcaagctgtcggcaggggtgccacccctggccatccgccagctggccgggtctcagcccttctccagcgagggcctgggccgcctggtggtgggcgacttctccgactacaacaacagctacgtcggggcctttgccgacgcccgctccgcctacttcgtgttccgccgccgcggggcccgggcccaggctgagtaccgctcctacgtggcccgcgtctgcctgggggacaccaacctgtactcctacgtggaggtccccctcgcctgccagggccagggcctcatccaggccgccttccttgccccgggcaccttgctaggggtgtttgccgcgggcccaaggggcacccaggcggcgctctgtgccttccccatggtggagctgggtgccagcatggagcaggcccggagactctgctacacggcgggcggccggggccccagcggcgcagaggaagccaccgtggagtacggcgtcacgtcgcgctgcgtcaccctgccccttgattcccccgagtcgtacccctgtggcgacgagcacacccccagccccattgctggccgccagcccctggaggtccagcctctgctgaagctcgggcagccggtcagcgccgtggcagctctccaggcagatgggcacatgatagccttcctgggggacacccagggccagctgtacaaggtctttctccacggctcccagggccaggtttaccactcccagcaagtggggcctccaggctcagccatcagcccagacctgctgctggacagcagtggcagtcacctctatgtcctgactgcccaccaggtggaccggatacctgtggcagcctgcccccagttccctgactgtgccagctgcctccaggcccaggacccgctgtgtggctggtgtgtcctccagggcaggtgtacccggaagggccagtgcgggcgggcaggccagctgaaccagtggctgtggagttatgaggaggacagccactgcctgcacatccagagcctgctgccgggccaccacccccgccaggagcagggccaggtcactttgtctgtcccccggctgcccatcctggatgcagatgaatacttccattgtgcgttcggggactatgacagcttggctcatgtggaagggccccacgtggcctgtgtcacccctccccaagaccaggtgccacttaaccctccaggcacagaccacgtcactgtgcccctggccctgatgttcgaggacgtgactgtggctgccaccaacttctccttttatgactgcagtgccgtccaggccttggaggcggctgccccgtgtcgcgcttgcgtgggcagcatctggcggtgtcactggtgcccgcagagtagccactgcgtgtacggagagcactgcccagagggcgagaggaccatctacagcgcccaggaggtggacatccaggtgcgtggcccaggggcttgcccacaggtcgaaggcctggcaggtccccacctggtgcctgtgggctgggagagccatttggccctacgcgtgcggaaccttcaacatttccgaggcctgcctgcctccttccactgctggctggagctgcctggagaacttcggggactgccggccaccctggaggagacagcaggggattcaggcctcatccactgccaggcccaccagttttatccctccatgtcccagcgggagctcccagtgcccatctacgtcacccagggtgaagcccagaggctggacaacacccatgctctttatgtgatcctgtacgactgcgccatgggccacccggactgcagccactgccaagcggccaacaggagcctgggctgcctgtggtgtgctgacggccagcctgcctgtcgctatgggcccttgtgcccgccgggggctgtggagctgctgtgtcctgcgcccagcattgatgcagtcgagcccctgaccggtccccctgagggaggcttggccctcaccatcctgggctccaacctgggccgggccttcgccgatgtgcagtacgccgtgagcgtggccagccggccctgcaaccctgagccctctctctaccgcacgtcggcccggattgtgtgtgtgacatctcctgcccccaatggcaccactgggcccgtccgggtggccattaagagccagccaccaggcatctcaagccagcacttcacctaccaggaccctgtcctgctgagcctgagtcctcgctggggcccccaggcagggggcacccagctcaccatccgaggtcagcacctccagacaggtggcaacaccagtgccttcgtgggtggccaaccctgtcccatcctggagccagtgtgtccggaggccatcgtgtgccgtaccaggccccaggctgccccaggagaagcagcggtccttgtggtctttggccatgcccagcgcacactgctcgccagccccttccgctacaccgccaacccccagcttgtagcggcggagcccagtgccagcttccgggggggtgggcgactgatccgtgtcaggggcaccggcctagacgtggtgcagcggcccctactgtctgtgtggctggaggctgacgcagaggtgcaggcttccagggcccagccccaggacccacagccaaggaggagctgtggagcccctgctgcggacccccaggcttgtatccagctcggtggggggctgctgcagtgctccaccgtctgctccgtcaactcgtccagcctcctcctgtgccggagccctgctgtaccagacagagcccacccgcagcgggtcttcttcaccctagacaacgtgcaagtggacttcgccagtgccagtgggggccagggcttcctgtaccagcccaacccccgcctggcacccctcagccgcgaggggcctgcccgcccctaccgcctcaagccaggccatgtcctggatgtggagggcgagggcctcaacctgggcatcagcaaggaggaggtgcgcgtgcacatcggccgcggcgagtgcctggtgaagacgctcacgcgcacccacctgtactgcgagccgcctgcgcacgccccgcagcctgccaatggctccggcctgccacagttcgtggtgcagatgggcaatgtgcagctggccctgggccctgtgcagtacgaggctgaacccccgctgtctgcctttcccgtggaggcccaggcaggcgtgggcatgggtgctgcagtgctgattgccgccgtgctcctcctcaccctcatgtacaggcacaagagcaagcaggccctgcgggactaccagaaggtgctagtgcagctggagagcctggagaccggcgtgggagaccagtgccgcaaggagttcacagacctcatgacggagatgaccgacctcagcagcgacctggagggcagcgggatccccttcctggactaccgcacctacgccgagcgcgccttcttccctggccatggcggttgcccgctgcagcccaagcctgaggggccaggggaggacggccactgtgccactgtgcgccagggcctcacgcagctctccaacctgctcaacagcaagctcttcctcctcacgctcatccacaccctggaggagcagcccagcttttcccagagggatcgctgccatgtggcttcgctgctgtcgctagcgctacacggcaagctggagtacctgacggacatcatgaggaccctgctgggtgacctggcggcccattacgtgcacaggaaccccaagctcatgctacgcaggacagagaccatggtggagaaactgctcaccaactggctgtccatctgcctgtacgccttcctgagggaggtggctggtgaaccactgtacatgctcttccgggccatccagtaccaggtggacaaaggccccgtggacgccgtgacaggcaaggccaaacggaccctgaatgatagccgcttgctgcgggaggacgtggagttccagcccctgacgctgatggtgctggtggggcccggggctggcggggccgcaggcagcagcgagatgcagcgcgtgccagcccgggtgctcgacacggacaccatcacccaggtcaaggagaaggtgttggaccaagtctacaagggcacccccttctcccagaggccctcagtgcatgccctagaccttgagtggcgctcaggcctggctggtcacctgaccctatcggacgaagacttgacctccgtgacccaaaaccactggaagagactcaacaccttgcaacactacaaggtcccagatggagcaacagtggggctcgtccctcagctgcaccgtggcagcaccatctcccagagcctggcccagaggtgccccttgggagagaacatacccacgctggaggatggcgaggaggggggggtgtgcctctggcacctggtgaaagccaccgaggagccagaaggggccaaggtgcggtgcagcagcctgcgggagcgcgagccagcaagggccaaggccattccggaaatctacctcacccgtctgctgtccatgaagggcacgctgcagaagtttgtggacgacaccttccaggccattctcagcgtgaaccggcccatccccatcgccgtcaagtacctgtttgaccttctggatgagctagcagagaagcacggcatcgaggacccagggaccctgcacatctggaagaccaacagtctgctgctgcggttctgggtgaatgccttgaagaacccacagctcatctttgatgtacgggtgtcggacaatgtggacgccatccttgctgtcatcgcccagaccttcattgactcctgtaccacctcggagcataaagtgggccgggattccccagtgaacaaactgctctacgcccgggagatcccacgctacaagcagatggtggagaggtactatgcggacattcgccagagctctccggcgagctaccaggagatgaactctgctttggctgagctctccgggaactacacttctgctccccactgtctggaggctctgcaagaactctacaaccacatccacaggtactatgatcagattatcagtgccctggaggaggaccctgtgggccagaagctgcagctggcctgccgcctgcagcaggtcgccgccctggtggaaaacaaagtgactgacctgtgagctctggctcagacagcagcaagccggatccaccaacaccgcagcgccttatgaccccggaaccgagccagccactgaggggagctggcagagcctgggggcacagggtgcaaagccaggcactgtgcccagcagtgggctccctgcctgccacctcccctgccagcccacccaccttccccccacctgagattgtttctaatttataaggatccccctccttccccctctccccattgtatttatttgcctgctggaaaatcacatccggaaataaaatagaaatatgtctttttatttta

SEQ ID NO: 155616 - DNA, 774 bp, Artificial Sequence
  derived and/or modified sequence
agagcctggagaccggcgtgggagaccagtgccgcaaggagttcacagacctcatgacggagatgaccgacctcagcagcgacctggagggcagcgggatccccttcctggactaccgcacctacgccgagcgcgccttcttccctggccatggcggttgcccgctgcagcccaagcctgaggggccaggggaggacggccactgtgccactgtgcgccagggcctcacgcagctctccaacctgctcaacagcaagctcttcctcctcacgctcatccacaccctggaggagcagcccagcttttcccagagggatcgctgccatgtggcttcgctgctgtcgctagcgctacacggcaagctggagtacctgacggacatcatgaggaccctgctgggtgacctggcggcccattacgtgcacaggaaccccaagctcatgctacgcaggacagagaccatggtggagaaactgctcaccaactggctgtccatctgcctgtacgccttcctgagggaggtggctggtgaaccactgtacatgctcttccgggccatccagtaccaggtggacaaaggccccgtggacgccgtgacagagtggcgctcaggcctggctggtcacctgaccctatcggacgaagacttgacctccgtgacccaaaaccactggaagagactcaacaccttgcaacactacaaggtcccagatggagcaacagtggggctcgtccctcagctgcaccgtggcagcaccatctcccagagcctgg

SEQ ID NO: 155617 - DNA, 3106 bp, Artificial Sequence
  derived and/or modified sequence
atcgccactgccctggggcagctgaactgagcgtatgtgccacgccgcccaggagacccctctgctgcaccacttcatggattcccccgagtcgtacccctgtggcgacgagcacacccccagccccattgctggccgccagcccctggaggtccagcctctgctgaagctcgggcagccggtcagcgccgtggcagctctccaggcagatgggcacatgatagccttcctgggggacacccagggccagctgtacaaggtggaccggatacctgtggcagcctgcccccagttccctgactgtgccagctgcctccaggcccaggacccgctgtgtggctggtgtgtcctccagggcaggtgtacccggaagggccagtgcgggcgggcaggccagctgaaccagtggctgtggagttatgaggaggacagccactgcctgcacatccagagcctgctgccgggccaccacccccgccaggagcagggccaggtcactttgtctgtcccccggctgcccatcctggatgcagatgaatacttccattgtgcgttcggggactatgacagcttggctcatgtggaagggccccacgtggcctgtgtcacccctccccaagaccaggtgccacttaaccctccaggcacagaccacgtcactgtgcccctggccctgatgttcgaggacgtgactgtggctgccaccaacttctccttttatgactgcagtgccgtccaggccttggaggcggctgccccgtgtcgcgcttgcgtgggcagcatctggcggtgtcactggtgcccgcagagtagccactgcgtgtacggagagcactgcccagagggcgagaggaccatctacagcgcccaggaggtggacatccaggtgcgtggcccaggggcttgcccacaggtcgaaggcctggcaggtccccacctggtgcctgtgggctgggagagccatttggccctacgcgtgcggaaccttcaacatttccgaggcctgcctgcctccttccactgctggctggagctgcctggagaacttcggggactgccggccaccctggaggagacagcaggggattcaggcctcatccactgccaggcccaccagttttatccctccatgtcccagcgggagctcccagtgcccatctacgtcacccagggtgaagcccagaggctggacaacacccatgctctttatgtgatcctgtacgactgcgccatgggccacccggactgcagccactgccaagcggccaacaggagcctgggctgcctgtggtgtgctgacggccagcctgcctgtcgctatgggcccttgtgcccgccgggggctgtggagctgctgtgtcctgcgcccagcattgatgcagtcgagcccctgaccggtccccctgagggaggcttggccctcaccatcctgggctccaacctgggccgggccttcgccgatgtgcagtacgccgtgagcgtggccagccggccctgcaaccctgagccctctctctaccgcacgtcggcccggattgtgtgtgtgacatctcctgcccccaatggcaccactgggcccgtccgggtggccattaagagccagccaccaggcatctcaagccagcacttcacctaccaggaccctgtcctgctgagcctgagtcctcgctggggcccccaggcagggggcacccagctcaccatccgaggtcagcacctccagacaggtggcaacaccagtgccttcgtgggtggccaaccctgtcccatcctggagccagtgtgtccggaggccatcgtgtgccgtaccaggccccaggctgccccaggagaagcagcggtccttgtggtctttggccatgcccagcgcacactgctcgccagccccttccgctacaccgccaacccccagcttgtagcggcggagcccagtgccagcttccgggggggtgggcgactgatccgtgtcaggggcaccggcctagacgtggtgcagcggcccctactgtctgtgtggctggaggctgacgcagaggtgcaggcttccagggcccagccccaggacccacagccaaggaggagctgtggagcccctgctgcggacccccaggcttgtatccagctcggtggggggctgctgcagtgctccaccgtctgctccgtcaactcgtccagcctcctcctgtgccggagccctgctgtaccagacagagcccacccgcagcgggtcttcttcaccctagacaacgtgcaagtggacttcgccagtgccagtgggggccagggcttcctgtaccagcccaacccccgcctggcacccctcagccgcgaggggcctgcccgcccctaccgcctcaagccaggccatgtcctggatgtggagggcgagggcctcaacctgggcatcagcaaggaggaggtgcgcgtgcacatcggccgcggcgagtgcctggtgaagacgctcacgcgcacccacctgtactgcgagccgcctgcgcacgccccgcagcctgccaatggctccggcctgccacagttcgtggtgcagatgggcaatgtgcagctggccctgggccctgtgcagtacgaggctgaacccccgctgtctgcctttcccgtggaggcccaggcaggcgtgggcatgggtgctgcagtgctgattgccgccgtgctcctcctcaccctcatgtacaggcacaagagcaagcaggccctgcgggactaccagaaggtgctagtgcagctggagagcctggagaccggcgtgggagaccagtgccgcaaggagttcacaggtgggtgcggaggcggggggacagggtacccacgaggcctgaactcacacctcggcgcctcctggccccgcagacctcatgacggagatgaccgacctcagcagcgacctggagggcagcgggatccccttcctggactaccgcacctacgccgagcgcgccttcttccctggccatggcggttgcccgctgcagcccaagcctgaggggccaggggaggacggccactgtgccactgtgcgccagggcctcacgcagctctccaacctgctcaacagcaagctcttcctcctcacgctcatccacaccct

SEQ ID NO: 155618 - DNA, 961 bp, Artificial Sequence
  derived and/or modified sequence
agctgctacttggccctcgccggtggcccaccaggacaatgcccccccgcagccatctcatgcccatcgccactgccctggggcagctgaactgagcgtatgtgccacgccgcccaggagacccctctgctgcaccacttcatggtggaccggatacctgtggcagcctgcccccagttccctgactgtgccagctgcctccaggcccaggacccgctgtgtggctggtgtgtcctccagggcaggtgtacccggaagggccagtgcgggcgggcaggccagctgaaccagtggctgtggagttatgaggaggacagccactgcctgcacatccagagcctgctgccgggccaccacccccgccaggagcagggccaggtcactttgtctgtcccccggctgcccatcctggatgcagatgaatacttccattgtgcgttcggggactatgacagcttggctcatgtggaagggccccacgtggcctgtgtcacccctccccaagaccaggtgccacttaaccctccaggcacagaccacgtcactgtgcccctggccctgatgttcgaggacgtgactgtggctgccaccaacttctccttttatgactgcagtgccgtccaggccttggaggcggctgccccggcctgcctgcctccttccactgctggctggagctgcctggagaacttcggggactgccggccaccctggaggagacagcaggggattcaggcctcatccactgccaggcccaccaggtcgagcccctgaccggtccccctgagggaggcttggccctcaccatcctgggctccaacctgggccgggccttcgccgatgtgcagtacgccgtgagcgtggccagccggccctgcaaccctgagccctctctctaccgcacgtcggcccggtgaggcacttggagggtgaagatgggtggggaggccctcagagatgg

SEQ ID NO: 155619 - DNA, 5089 bp, Artificial Sequence
  derived and/or modified sequence
agctgctacttggccctcgccggtggcccaccaggacaatgcccccccgcagccatctcatgcccatcgccactgccctggggcagctgaactgagcgtatgtgccacgccgcccaggagacccctctgctgcaccacttcatggattcccccgagtcgtacccctgtggcgacgagcacacccccagccccattgctggccgccagcccctggaggtccagcctctgctgaagctcgggcagccggtcagcgccgtggcagctctccaggcagatgggcacatgatagccttcctgggggacacccagggccagctgtacaaggtctttctccacggctcccagggccaggtttaccactcccagcaagtggggcctccaggctcagccatcagcccagacctgctgctggacagcagtggcagtcacctctatgtcctgactgcccaccaggtggaccggatacctgtggcagcctgcccccagttccctgactgtgccagctgcctccaggcccaggacccgctgtgtggctggtgtgtcctccagggcaggtgtacccggaagggccagtgcgggcgggcaggccagctgaaccagtggctgtggagttatgaggaggacagccactgcctgcacatccagagcctgctgccgggccaccacccccgccaggagcagggccaggtcactttgtctgtcccccggctgcccatcctggatgcagatgaatacttccattgtgcgttcggggactatgacagcttggctcatgtggaagggccccacgtggcctgtgtcacccctccccaagaccaggtgccacttaaccctccaggcacagaccacgtcactgtgcccctggccctgatgttcgaggacgtgactgtggctgccaccaacttctccttttatgactgcagtgccgtccaggccttggaggcggctgccccgtgtcgcgcttgcgtgggcagcatctggcggtgtcactggtgcccgcagagtagccactgcgtgtacggagagcactgcccagagggcgagaggaccatctacagcgcccaggaggtggacatccaggtgcgtggcccaggggcttgcccacaggtcgaaggcctggcaggtccccacctggtgcctgtgggctgggagagccatttggccctacgcgtgcggaaccttcaacatttccgaggcctgcctgcctccttccactgctggctggagctgcctggagaacttcggggactgccggccaccctggaggagacagcaggggattcaggcctcatccactgccaggcccaccagttttatccctccatgtcccagcgggagctcccagtgcccatctacgtcacccagggtgaagcccagaggctggacaacacccatgctctttatgtgatcctgtacgactgcgccatgggccacccggactgcagccactgccaagcggccaacaggagcctgggctgcctgtggtgtgctgacggccagcctgcctgtcgctatgggcccttgtgcccgccgggggctgtggagctgctgtgtcctgcgcccagcattgatgcagtcgagcccctgaccggtccccctgagggaggcttggccctcaccatcctgggctccaacctgggccgggccttcgccgatgtgcagtacgccgtgagcgtggccagccggccctgcaaccctgagccctctctctaccgcacgtcggcccggattgtgtgtgtgacatctcctgcccccaatggcaccactgggcccgtccgggtggccattaagagccagccaccaggcatctcaagccagcacttcacctaccaggaccctgtcctgctgagcctgagtcctcgctggggcccccaggcagggggcacccagctcaccatccgaggtcagcacctccagacaggtggcaacaccagtgccttcgtgggtggccaaccctgtcccatcctggagccagtgtgtccggaggccatcgtgtgccgtaccaggccccaggctgccccaggagaagcagcggtccttgtggtctttggccatgcccagcgcacactgctcgccagccccttccgctacaccgccaacccccagcttgtagcggcggagcccagtgccagcttccgggggggtgggcgactgatccgtgtcaggggcaccggcctagacgtggtgcagcggcccctactgtctgtgtggctggaggctgacgcagaggtgcaggcttccagggcccagccccaggacccacagccaaggaggagctgtggagcccctgctgcggacccccaggcttgtatccagctcggtggggggctgctgcagtgctccaccgtctgctccgtcaactcgtccagcctcctcctgtgccggagccctgctgtaccagacagagcccacccgcagcgggtcttcttcaccctagacaacgtgcaagtggacttcgccagtgccagtgggggccagggcttcctgtaccagcccaacccccgcctggcacccctcagccgcgaggggcctgcccgcccctaccgcctcaagccaggccatgtcctggatgtggagggcgagggcctcaacctgggcatcagcaaggaggaggtgcgcgtgcacatcggccgcggcgagtgcctggtgaagacgctcacgcgcacccacctgtactgcgagccgcctgcgcacgccccgcagcctgccaatggctccggcctgccacagttcgtggtgcagatgggcaatgtgcagctggccctgggccctgtgcagtacgaggctgaacccccgctgtctgcctttcccgtggaggcccaggcaggcgtgggcatgggtgctgcagtgctgattgccgccgtgctcctcctcaccctcatgtacaggcacaagagcaagcaggccctgcgggactaccagaaggtgctagtgcagctggagagcctggagaccggcgtgggagaccagtgccgcaaggagttcacagacctcatgacggagatgaccgacctcagcagcgacctggagggcagcgggatccccttcctggactaccgcacctacgccgagcgcgccttcttccctggccatggcggttgcccgctgcagcccaagcctgaggggccaggggaggacggccactgtgccactgtgcgccagggcctcacgcagctctccaacctgctcaacagcaagctcttcctcctcacgctcatccacaccctggaggagcagcccagcttttcccagagggatcgctgccatgtggcttcgctgctgtcgctagcgctacacggcaagctggagtacctgacggacatcatgaggaccctgctgggtgacctggcggcccattacgtgcacaggaaccccaagctcatgctacgcaggacagagaccatggtggagaaactgctcaccaactggctgtccatctgcctgtacgccttcctgagggaggtggctggtgaaccactgtacatgctcttccgggccatccagtaccaggtggacaaaggccccgtggacgccgtgacaggcaaggccaaacggaccctgaatgatagccgcttgctgcgggaggacgtggagttccagcccctgacgctgatggtgctggtggggcccggggctggcggggccgcaggcagcagcgagatgcagcgcgtgccagcccgggtgctcgacacggacaccatcacccaggtcaaggagaaggtgttggaccaagtctacaagggcacccccttctcccagaggccctcagtgcatgccctagaccttgagtggcgctcaggcctggctggtcacctgaccctatcggacgaagacttgacctccgtgacccaaaaccactggaagagactcaacaccttgcaacactacaaggtcccagatggagcaacagtggggctcgtccctcagctgcaccgtggcagcaccatctcccagagcctggcccagaggtgccccttgggagagaacatacccacgctggaggatggcgaggaggggggggtgtgcctctggcacctggtgaaagccaccgaggagccagaaggggccaaggtgcggtgcagcagcctgcgggagcgcgagccagcaagggccaaggccattccggaaatctacctcacccgtctgctgtccatgaagggcacgctgcagaagtttgtggacgacaccttccaggccattctcagcgtgaaccggcccatccccatcgccgtcaagtacctgtttgaccttctggatgagctagcagagaagcacggcatcgaggacccagggaccctgcacatctggaagaccaacagtctgctgctgcggttctgggtgaatgccttgaagaacccacagctcatctttgatgtacgggtgtcggacaatgtggacgccatccttgctgtcatcgcccagaccttcattgactcctgtaccacctcggagcataaagtgggccgggattccccagtgaacaaactgctctacgcccgggagatcccacgctacaagcagatggtggagaggtactatgcggacattcgccagagctctccggcgagctaccaggagatgaactctgctttggctgagctctccgggaactacacttctgctccccactgtctggaggctctgcaagaactctacaaccacatccacaggtactatgatcagattatcagtgccctggaggaggaccctgtgggccagaagctgcagctggcctgccgcctgcagcaggtcgccgccctggtggaaaacaaagtgactgacctgtgagctctggctcagacagcagcaagccggatccaccaacaccgcagcgccttatgaccccggaaccgagccagccactgaggggagctggcagagcctgggggcacagggtgcaaagccaggcactgtgcccagcagtgggctccctgcctgccacctcccctgccagcccacccaccttccccccacctgagattgtttctaatttataaggatccccctccttccccctctccccattgtatttatttgcctgctggaaaatcacatccggaaataaaatagaaatatgtctttttatttt

SEQ ID NO: 155620 - DNA, 5729 bp, Artificial Sequence
  derived and/or modified sequence
atgtgtcacgccgcacaagagacccctctgctccatcacttcatggcgcctgttatggccagatggcctcctttcggactgtgtctcctcctgctcctgctgtctccccctccattgccactgaccggcgcacatagatttagcgccccaaacactacactcaatcacctggccctggctcccggtcgaggtaccctatacgttggcgcagttaaccggctgttccagctatccccggaactccaactcgaagctgtggctgttaccgggcctgtgattgactcgccagattgtgtcccgtttagagacccagcggagtgcccccaagcccagttgaccgataacgctaaccagctgttgcttgtctcaagcagagcccaagagcttgtggcttgcggccaggtgagacaaggggtttgcgagactaggaggctcggggacgtggcggaggtcttgtaccaggccgaggatcccggagacggccagtttgttgcagcgaatacacccggagtggcaacggtgggattggttgtgcctctgcccggacgggatctgctattagtcgcccgaggcttggcaggaaaattgtccgctggggttcctcccctggccatacggcagctggccggaagtcagcctttctcttctgagggactcggtcggctggttgtgggagacttttctgactacaataatagctacgtgggagcgtttgccgacgcccgaagcgcgtatttcgtttttcggcgacgtggggcacgggctcaagcagaatatcgctcgtacgtggccagagtctgcctgggagataccaatctttacagctacgtagaggttcccctcgcttgccaagggcaggggctaattcaggcagcctttctggcgcctggaacattgctgggcgtctttgctgcaggcccacggggtacacaagcggctttatgcgccttcccaatggtggaattgggcgcatcaatggagcaagctcgtagactgtgctacactgccggaggacgagggccttctggcgctgaagaggcgacggtggagtacggagtgacatcccggtgcgtgacgctccccctcgattctcccgagtcctatccttgcggcgacgagcatacaccaagcccgatagctgggagacagccgttggaggtacagcccctactgaaattaggtcagcccgtaagcgctgtcgccgctctccaggccgatggccatatgattgccttcttgggcgatacccagggccagctatacaaagtgtttctacatggctctcaggggcaagtgtaccatagtcagcaagtgggcccacctggctccgcgatttcccctgacttactgctggacagcagcggctcccacctttacgtgctcaccgcccaccaggtcgatcgcatcccagtggcggcatgtccccagttccccgattgtgccagctgcctccaggcgcaggatcccttatgtggctggtgtgtgctgcaagggaggtgcaccaggaagggacaatgcggcagggcgggacagcttaaccaatggctgtggagctacgaggaagacagtcattgtctccacatacagagccttcttcctggccaccaccccagacaggagcagggtcaggtgacactatcagtccctaggcttccgatcctcgatgcagacgaatacttccactgcgcctttggagactacgacagtctggcgcacgtcgagggccctcacgtggcatgcgttactccgcctcaggaccaggtgcccctgaaccctcccggaactgaccatgtaaccgtgccacttgcactcatgttcgaagatgtgacggtcgcagccacaaacttcagtttctacgattgctcagcagtccaggcactcgaggccgctgcaccttgtagggcctgtgtggggtccatatggcggtgtcactggtgtccccagtcatcccattgtgtctatggcgagcattgtccagagggggagcgaacaatttacagtgcgcaagaggtggacatacaggttcgcggtcctggcgcatgtccacaggtggaaggactggccggacctcacttggtgcccgtgggatgggagagccacctagcccttagagtcagaaatttgcagcactttcgcggtttaccagcctccttccactgctggcttgaattgccaggggaactcaggggcctgcccgcaactctggaagagactgctggggatagcggcttgatccactgccaggcgcaccaattttacccttcaatgagccagcgagaattgccagtccccatatatgttacacaaggggaagcacagaggctggataacacccacgcactgtacgtgatcctgtatgattgtgccatggggcatcccgattgcagtcattgccaggctgctaatcggtctctaggttgcttatggtgcgccgacggacaaccagcctgccgctatgggccattgtgtcccccaggagccgttgagctgctgtgccccgcaccctcaatagacgctgtggaacccttaactggaccaccagaaggaggtttagccctgactattcttgggagcaatctaggtcgcgctttcgccgatgtgcagtacgcagtgtctgtcgctagccgcccttgtaatcccgagccttccctgtacagaacgtccgcacgtatcgtgtgcgtcacaagtccagctcccaatggaaccacaggccctgttcgtgtcgcaattaaatctcagccgcctggtatcagttctcaacactttacatatcaggacccggtattgctcagcctgagccctcggtggggaccacaggctgggggaacgcagttgaccatccgaggtcagcatctccagacagggggtaatactagcgcatttgttgggggacagccatgcccgatcctggagcccgtgtgcccagaggctatcgtgtgtagaactcgtccccaggctgcgccaggagaagccgctgtgctggtcgtgtttggacacgcacagaggaccttgttggcaagccctttccggtacactgccaatccccagctcgtggcagccgaacccagtgcctcgtttaggggtggcggacggttgatccgagtgcggggtaccggcctcgatgtggtccagcgtcccctcctgtcagtttggctcgaggcagatgccgaggtccaggcctcccgggcacagccgcaggacccacagccacggcgatcctgtggagcgccagcggctgatccacaggcgtgtatccagctgggtggaggtctgctgcagtgttctaccgtgtgttctgtcaacagctcttcactgctcctgtgccgttctcctgcagtccctgacagagcacacccacagagagtgtttttcacccttgataatgtgcaagtcgacttcgcaagcgcaagcggaggacaaggctttctctaccagcccaatccacggctggcacccctctccagggaaggaccagccagaccgtatagattgaaaccagggcacgtactggatgtagagggcgagggacttaacttaggaatttccaaagaagaagtccgagtgcacattgggagaggagaatgcttagtgaagacactgaccagaacacatctgtactgcgagccccctgcacacgcaccccagccagcaaacgggagtgggttaccccaattcgtcgttcaaatgggaaacgttcaactggcactaggacctgtacagtatgaagccgagccccctctgtctgcgtttccagtagaggcccaggccggagtaggcatgggtgcggctgttctgatcgcggctgttctgctactcactctgatgtacagacacaagagcaagcaggctttgagggattatcagaaggtcctggtacagcttgagagtctggagaccggtgtcggcgatcagtgccggaaggaatttacagacctgatgacagagatgacagacttatcgtctgaccttgagggatcagggattcccttcctcgactatagaacctacgcagagcgcgcatttttccccggacatgggggttgtccattgcagcctaaacccgaaggacccggtgaggacgggcactgtgccactgttcgccaaggccttactcagctgtcgaacttgcttaatagcaaactcttccttttgacactgattcacacgctggaagaacagccctcattttctcaacgagatagatgccacgtggcctctctgctgtccctagccctgcatggcaaactggaatatctaaccgacatcatgcgaacactgctaggcgatctagccgctcattatgtgcacaggaatcctaagctgatgcttcgtaggacagaaaccatggtggaaaagctgctaactaactggctgagcatttgcctgtacgcctttttacgcgaggtggcgggtgagccattatacatgttgtttcgcgctatccagtatcaggtggataagggcccagtcgacgccgtgacgggaaaggccaagaggactctaaacgatagccgcctgctaagggaagatgtcgagttccagcccctaactctgatggtactggtgggaccaggagccggaggcgctgccggttcaagcgaaatgcagcgggtgccagcaagggtactcgacacggacaccatcacacaggtcaaagagaaggttctcgatcaggtttataaaggtacgcctttttctcagcgtccttctgttcatgcattggaccttgaatggagatctggactggccggacacctaaccttgagcgacgaggatcttacttcagtgacgcagaaccactggaagaggcttaacacactccaacactacaaggtgccggatggggctacggttggactggtgcctcagttacatcgagggtccaccatcagccagtctctggctcagcgatgccctctgggagaaaacattcccacactggaagacggtgaggaggggggagtttgtttatggcacctagtcaaagcaacggaagagcctgaaggcgcaaaggtgcggtgcagttccttgcgtgaacgggagcctgcgcgtgcgaaggccatcccagagatttaccttacccggttactgtctatgaagggaacccttcaaaaatttgttgacgatacgtttcaggctatcctgtcagttaataggcccattcctatagctgtgaagtatttgtttgatcttcttgatgaattggcggaaaagcatggaatcgaggatccagggacactacatatttggaagactaatagcctgctgctgagattctgggttaacgcgctgaaaaacccccagctcattttcgatgttagagtgagcgacaacgtcgacgccatcctggccgttatcgctcaaacatttatcgacagctgcactacctctgaacataaggttggaagagattccccggtcaataagctgctttatgcgagagaaattcctagatataagcaaatggtagaacgctattacgcggacatcagacagagttctcctgcttcataccaggagatgaattcggccctggcagaactgtcagggaattacactagcgcaccacattgcctcgaggcgctgcaagagctctacaatcacatccataggtattacgatcagattatttcggctctggaagaggatcccgtgggccaaaaactgcagctggcttgcagactccagcaggtcgcagccctcgtcgaaaacaaagtaaccgatttgta

SEQ ID NO: 155621 - DNA, 777 bp, Artificial Sequence
  derived and/or modified sequence
tagagtctggagacaggcgtaggagaccagtgcaggaaggagttcacagatctcatgacagagatgaccgacctatcctctgacttagaggggtccggcataccttttctggactatcgtacctatgccgagcgcgcattctttccaggtcacgggggatgtccactacagcccaaacctgagggccctggggaggatggccattgcgcaactgttaggcagggcctgactcaactttccaatcttctaaactctaagctgtttttgctcacacttattcatacattagaagagcagcctagtttctcacagagggatcgttgtcatgtcgcttccttactgagcctcgccctgcacgggaagttggaatatctaaccgacatcatgcgaaccctgctgggagacctggcggctcactatgtacatagaaatcctaagctgatgctcaggaggacggagactatggtggagaaacttttgacaaattggctgagtatatgcctctatgcattcctacgagaagtggccggagaaccactgtacatgttatttcgggcaatccaatatcaggtagataaagggcctgtcgatgctgtgacagaatggcgtagcggcctggctggccacttaaccctgagcgacgaagatctgaccagtgtaacacaaaaccactggaaaaggctgaatacattacagcattacaaggtgcccgacggtgccaccgtggggttagtaccccagttgcaccgaggctcaactattagccaatctctatag

SEQ ID NO: 155622 - DNA, 2967 bp, Artificial Sequence
  derived and/or modified sequence
atgtgtcacgcagcccaggagacacccctgttgcatcacttcatggacagcccagaaagttacccatgcggggacgagcatacccccagcccaattgcaggccgacagcccttggaagttcagcctctgctaaagttaggacagcctgttagcgccgtcgccgcactgcaggctgacggtcatatgatcgccttcctgggagatactcaaggtcagttgtacaaggtggatcgcatacctgtagccgcatgcccacagtttcccgactgcgcctcctgccttcaagcccaggatccactttgcgggtggtgcgtactccagggccgttgcacacgtaaaggccaatgcggacgggcaggccaattaaaccagtggctgtggagctacgaggaggactcccactgcttacatatccaaagtctgctaccgggtcaccatcctaggcaggagcagggtcaagtcaccctgagtgttccaaggctgccaatcctggatgctgacgaatatttccactgcgccttcggggactacgattcattagctcacgttgagggcccacacgtcgcctgtgtcactccacctcaggatcaggtgcccctcaatccacccggaacagatcacgtaaccgtacccttggcattaatgttcgaggacgtgacagtggccgctaccaattttagcttttatgattgtagcgctgtgcaggcgctggaggccgctgcaccatgtcgagcctgcgtgggaagcatatggcgatgccattggtgtcctcagtcctcccactgcgtgtacggtgagcactgtcctgaaggcgagagaactatatattctgcccaagaagtggacatccaggtccgaggaccaggggcatgtcctcaagtcgagggtctggcagggcctcacctagtgcccgtgggctgggagagtcatctcgctctgcgagtaagaaatctgcaacacttcaggggtctgcccgcttccttccactgttggcttgagctgcccggtgaactgcggggattgccagcgacgttggaggagacagccggagatagcgggctaattcattgtcaagcccaccaattttacccaagcatgagccaacgtgagctgccagttccgatctatgttacccagggtgaagcccagcgcttagacaacacccacgccctgtatgttattctgtatgattgtgcgatgggccaccctgattgcagtcattgtcaggccgctaatcggtctctcggatgcttgtggtgcgccgatggccagcctgcttgtaggtacggtccgttgtgcccgcctggtgctgtcgaactgctgtgccctgccccatcgatagatgctgtcgaaccacttacaggaccccctgaaggcggtctcgctctcaccatcctgggtagcaatctgggccgagcattcgcagatgtgcagtacgctgttagtgtggcatcccggccatgcaatccagaaccctccctctataggacatcagccaggatcgtctgcgtgacttccccagcccctaacggcacaactggcccagttcgagttgctattaaatctcagcctccagggatctccagccagcatttcacttaccaggatcctgtgttgttaagtctgagtcccagatggggcccacaggccggtggaacacaacttaccatcagaggccaacacctgcagacagggggaaatacatctgcattcgttggagggcagccctgccctatattggaaccagtttgcccagaggccatcgtgtgtcgaaccagaccacaagcagccccaggcgaggccgctgtccttgtcgtcttcggacatgcgcagcggaccctcctggccagtccttttagatacaccgcaaatcctcagctcgtggctgccgagccctcagcctcattccgagggggtggcagactgattagggtgcggggtactggcctcgacgtggtccagcggcctcttctatccgtgtggctcgaggctgatgcagaggtccaagcaagcagggcacagccccaggatccccagccaaggaggtcctgtggagcccctgcagcagacccacaggcttgtatacagcttgggggaggactgctgcagtgctccaccgtgtgttcagtcaacagttccagcctcctcctttgtcgatctccagctgtgcccgacagggcccaccctcagcgggtcttcttcactctcgataatgtgcaggtggatttcgcctcagcaagcggcggacaggggtttttgtatcagccaaaccccaggctggccccactctcaagggaaggaccagccagaccttacagactcaagccaggacacgtcctggatgtggaaggcgaagggctgaatctgggcatttcaaaggaggaggtaagagtgcatattggtcgcggagagtgcctggtgaagactctgacccgaacacacctgtattgcgagcctcccgcacacgcacctcagcctgcgaacggctcaggcctgcctcagttcgtggtgcagatggggaacgtgcagttggccttgggccctgtgcagtacgaggcagaacctcccctgtccgcttttccagtggaggcccaagccggagtcgggatgggggctgctgtgttaattgctgccgtgcttctgcttaccttgatgtaccggcacaaatcaaagcaagcactcagggactatcagaaggttctggtgcaactggagtcactggagactggggtgggcgaccagtgccggaaggagtttaccggcggatgtggcggaggaggcaccggataccccagaggactgaacagccatctgggggctagctggccacgcagacctcacgacggggatgacaggccacagcagcggccaggcggtcagcgtgaccctcttccaggactcccccatctccgcagggcccgactgctaccatggccttggagactccccgctgcagcccaagcctag

SEQ ID NO: 155623 - DNA, 675 bp, Artificial Sequence
  derived and/or modified sequence
atgtgccacgcggctcaggaaacccccctgttgcatcattttatggtggataggatccctgttgctgcctgtccacagtttcctgattgtgcatcctgccttcaggcccaggacccgctttgcggctggtgtgtcctgcagggccgttgtacacgcaagggccaatgtggtcgggctggtcagttgaatcaatggctctggtcctatgaggaagactctcactgcctccacatccaaagtttgcttcccggtcaccacccccgtcaggagcagggacaggtgacgctgtccgtccctcgactgccaatactggatgccgacgaatacttccattgtgcttttggtgattacgattctctggcgcacgtggagggcccacatgtggcttgcgttacaccccctcaagatcaggtgcccctcaatcccccaggcacagatcatgtgacagtgcctttggctcttatgtttgaggatgtcaccgtggctgctaccaattttagcttttacgattgcagtgctgtccaggctttggaggcggctgcccctgcctgtcttccaccaagtaccgccggttggtcctgcctggagaacttcggagactgccgcccaccttggagacgccagcagggcattcaggcctcctctacagcccgacctacacggtcttccccctag

SEQ ID NO: 155624 - DNA, 4689 bp, Artificial Sequence
  derived and/or modified sequence
atgtgccacgcagctcaggagacccccctcttgcatcacttcatggatagtcctgagtcctacccatgcggagacgagcatactccgagccccattgccggtaggcagccactcgaagtgcaacctctgctgaagctgggacagcctgtttcggccgttgcagcgctgcaggcagatgggcacatgatagcgttcctcggcgacacccagggtcagctgtataaggttttcctacatggtagccagggtcaggtgtaccatagtcagcaggtcggccctccaggctctgccatcagtccggacctgctcctcgatagcagtggctcccacttgtacgtgttaactgcccatcaggtggataggattcccgttgctgcctgtccccagttccctgactgtgcatcgtgcctgcaagcccaggatccactgtgcggttggtgtgtgttgcaggggagatgtaccagaaaagggcagtgcgggagggcgggacagctcaatcagtggctgtggtcctacgaagaagactcacattgcctgcacatccagtcactgcttcccggtcaccatccaagacaggaacagggtcaagtcactctgagtgtccctcgtctcccgattctggacgccgacgaatatttccactgcgccttcggagactacgactccctggcacacgtggagggtcctcacgttgcctgcgtcactccccctcaggaccaggtacctcttaatcctccgggaaccgatcatgtgactgtacctctagccctcatgttcgaagatgttaccgtcgccgcaaccaatttttccttctacgactgctctgctgttcaggccctggaggctgctgcaccatgtcgagcatgcgtgggatccatctggcgttgtcattggtgcccccagtcgtcgcactgtgtctacggcgagcactgtcctgaaggcgagcgaaccatatactcagcccaagaagtcgacatccaagtacgcggtcctggagcctgcccacaggtggagggtttagcaggccctcacctggtgcctgtgggttgggagtcacacctggccttgcgtgtccgtaacctgcagcattttcggggactgccggcttctttccactgctggctcgagctccccggtgaactgagggggctgcctgccaccctcgaggaaacagctggcgatagcgggcttattcattgtcaggcacatcagttctacccctcgatgtcccaaagggagctgcccgtcccaatctacgtgacccagggggaagctcagcgtctggataatactcacgcactttacgttattttatatgattgcgccatggggcatccggactgcagtcactgtcaagccgctaaccgttcccttggatgtttatggtgcgcggatggacagcctgcatgtaggtatggccctctgtgccctcctggcgctgttgagttgttgtgtccagccccttccatcgacgccgtcgaacctctgacagggcctcccgaggggggattggcactgacaattctggggagtaatcttggcagggcttttgccgatgtacagtatgccgttagtgtcgcctctaggccatgcaaccctgaacccagcctctatcgcacatctgctagaatcgtctgcgtaacatctcccgcaccaaacgggactactggcccagtgagagtcgcaattaagagtcagccgccaggcatttcctcccagcacttcacctaccaggaccccgtccttctgtcactctcacccaggtgggggccacaggcaggcggaacccagctcactattcggggtcagcacctgcagactgggggaaacaccagcgcctttgtgggcggacaaccttgtccgatacttgaaccggtctgccctgaggctatagtatgtcggacacgaccccaggccgcaccgggagaagccgcagttctggtagtgttcggtcacgcgcaaaggaccctgttagctagcccctttcgctatactgctaacccccaactggtggctgctgagccatcagcgagcttccgcggtggcggaagactgattcgtgtgagaggcacaggtcttgatgttgtgcagagaccactgctgagtgtgtggttggaagccgacgccgaggtgcaggcttcacgggctcagccacaggatcctcaacctagacgttcatgtggcgctccagccgcagaccctcaggcttgcatacagctcggcggagggctgctccagtgctctaccgtatgtagtgtgaattcctcatctctgttgctttgtaggtccccagccgtacccgaccgggcacatccccagcgcgtatttttcacacttgacaacgtccaggtcgattttgcatcagccagcggtggacaaggattcctgtaccagccaaaccctcggctagcccctctgtcacgagaagggcctgcccgtccatatcgcctaaagcccggacatgtgctggatgttgagggcgaaggactgaacctggggatctccaaagaggaagttcgagtgcacataggcagaggagaatgtctcgtgaaaacgctgacaagaactcatctctattgcgagcccccagctcatgccccacagcctgccaacggctcaggacttccccagttcgtggtgcaaatgggcaatgtgcaactggcactgggtcctgttcaatatgaggccgaacctccgctcagtgcctttcctgtggaagcacaagctggagtcggaatgggggcagcagtactgattgctgctgtgcttctcttgaccttgatgtacaggcataagtctaagcaggctctgagagactatcagaaggtccttgtgcagctggagagtctagaaacaggcgtgggtgatcagtgccgtaaggagtttacagacttgatgactgagatgaccgatctgagctcagacctcgaagggagcggcatcccttttttagactatagaacatacgcagagcgcgctttcttcccgggacacgggggttgcccgctgcaaccgaagcctgaaggacctggggaagatggccattgtgctacagtcagacaaggacttacgcagctttccaacctgctgaacagtaaactgtttctgctgactctgattcataccctggaggaacagcctagcttttcacaacgcgacagatgtcatgtggctagccttttgagtctggccttgcatggcaaactagagtacttgacggacatcatgaggaccttgctgggcgacctggccgctcactacgtacatagaaacccaaagctcatgctgcgacgcacagaaactatggtggagaaactgctgaccaattggctgtctatttgtctgtatgcattcctacgcgaagtagccggtgaaccactgtatatgcttttccgggcaatccagtatcaggtggataaagggcctgtggacgccgtgacaggcaaagccaagcgtacattaaatgatagccgactcctccgggaagatgtagaattccaacccttaaccctcatggtcttggttgggcctggcgctggaggtgccgcaggtagttctgaaatgcagcgggttcctgccagagtcctggataccgacacaatcacccaggtgaaggagaaggtgttagatcaagtgtacaagggcacaccgttcagccagcgaccaagtgtgcatgccctcgacctagaatggaggagtggcctggcgggtcacctgactctcagtgatgaagatttgacatctgtaacccagaaccactggaagaggcttaacaccctccagcactacaaagtgcctgatggcgcaaccgtcggtctggtacctcaactgcatcggggatccacaatcagccagagtctggcccagaggtgccccctgggcgaaaatatccctacccttgaggatggagaagagggaggggtctgcttatggcacctcgtaaaagccaccgaggagcctgagggtgccaaagtccgatgcagctctctgcgagagcgggagcccgctcgggctaaagccatccctgagatttatctcactaggctgcttagtatgaaaggcacactgcagaaatttgtagatgacacgtttcaggctatcttgtccgtgaatcggcctattcccattgcggtcaaataccttttcgatttgctcgacgaactggccgaaaagcatggaatcgaagaccctggcaccttacatatctggaagactaactctctcctgctgcggttctgggtgaatgcacttaaaaatccacagcttattttcgatgttagggtgagtgataacgtagatgctatcttggctgtcatcgcgcagacgttcatcgacagttgtacaacatcggagcacaaggtgggcagagatagtccagtgaataaactgctgtatgcccgagagatccccaggtacaagcagatggtggaacgctattatgctgatattcgccagtcttccccagccagctaccaggagatgaactccgccctggccgagctgagcgggaattacacctcagctccgcactgcctggaagctcttcaggagttatataatcatatccaccggtactatgaccagatcatcagcgcactcgaagaggatccagtgggacaaaagctgcagcttgcgtgcagactgcagcaagttgctgcactggtagaaaacaaagttactgatctctag

SEQ ID NO: 155625 - DNA, 5730 bp, Artificial Sequence
  derived and/or modified sequence
atgtgccacgccgcccaggagacccccctgctgcaccacttcatggcccccgtgatggccagatggccccccttcggcctgtgcctgctgctgctgctgctgagccccccccccctgcccctgaccggcgcccacagattcagcgcccccaacaccaccctgaaccacctggccctggcccccggcagaggcaccctgtacgtgggcgccgtgaacagactgttccagctgagccccgagctgcagctggaggccgtggccgtgaccggccccgtgatcgacagccccgactgcgtgcccttcagagaccccgccgagtgcccccaggcccagctgaccgacaacgccaaccagctgctgctggtgagcagcagagcccaggagctggtggcctgcggccaggtgagacagggcgtgtgcgagaccagaagactgggcgacgtggccgaggtgctgtaccaggccgaggaccccggcgacggccagttcgtggccgccaacacccccggcgtggccaccgtgggcctggtggtgcccctgcccggcagagacctgctgctggtggccagaggcctggccggcaagctgagcgccggcgtgccccccctggccatcagacagctggccggcagccagcccttcagcagcgagggcctgggcagactggtggtgggcgacttcagcgactacaacaacagctacgtgggcgccttcgccgacgccagaagcgcctacttcgtgttcagaagaagaggcgccagagcccaggccgagtacagaagctacgtggccagagtgtgcctgggcgacaccaacctgtacagctacgtggaggtgcccctggcctgccagggccagggcctgatccaggccgccttcctggcccccggcaccctgctgggcgtgttcgccgccggccccagaggcacccaggccgccctgtgcgccttccccatggtggagctgggcgccagcatggagcaggccagaagactgtgctacaccgccggcggcagaggccccagcggcgccgaggaggccaccgtggagtacggcgtgaccagcagatgcgtgaccctgcccctggacagccccgagagctacccctgcggcgacgagcacacccccagccccatcgccggcagacagcccctggaggtgcagcccctgctgaagctgggccagcccgtgagcgccgtggccgccctgcaggccgacggccacatgatcgccttcctgggcgacacccagggccagctgtacaaggtgttcctgcacggcagccagggccaggtgtaccacagccagcaggtgggcccccccggcagcgccatcagccccgacctgctgctggacagcagcggcagccacctgtacgtgctgaccgcccaccaggtggacagaatccccgtggccgcctgcccccagttccccgactgcgccagctgcctgcaggcccaggaccccctgtgcggctggtgcgtgctgcagggcagatgcaccagaaagggccagtgcggcagagccggccagctgaaccagtggctgtggagctacgaggaggacagccactgcctgcacatccagagcctgctgcccggccaccaccccagacaggagcagggccaggtgaccctgagcgtgcccagactgcccatcctggacgccgacgagtacttccactgcgccttcggcgactacgacagcctggcccacgtggagggcccccacgtggcctgcgtgacccccccccaggaccaggtgcccctgaacccccccggcaccgaccacgtgaccgtgcccctggccctgatgttcgaggacgtgaccgtggccgccaccaacttcagcttctacgactgcagcgccgtgcaggccctggaggccgccgccccctgcagagcctgcgtgggcagcatctggagatgccactggtgcccccagagcagccactgcgtgtacggcgagcactgccccgagggcgagagaaccatctacagcgcccaggaggtggacatccaggtgagaggccccggcgcctgcccccaggtggagggcctggccggcccccacctggtgcccgtgggctgggagagccacctggccctgagagtgagaaacctgcagcacttcagaggcctgcccgccagcttccactgctggctggagctgcccggcgagctgagaggcctgcccgccaccctggaggagaccgccggcgacagcggcctgatccactgccaggcccaccagttctaccccagcatgagccagagagagctgcccgtgcccatctacgtgacccagggcgaggcccagagactggacaacacccacgccctgtacgtgatcctgtacgactgcgccatgggccaccccgactgcagccactgccaggccgccaacagaagcctgggctgcctgtggtgcgccgacggccagcccgcctgcagatacggccccctgtgcccccccggcgccgtggagctgctgtgccccgcccccagcatcgacgccgtggagcccctgaccggcccccccgagggcggcctggccctgaccatcctgggcagcaacctgggcagagccttcgccgacgtgcagtacgccgtgagcgtggccagcagaccctgcaaccccgagcccagcctgtacagaaccagcgccagaatcgtgtgcgtgaccagccccgcccccaacggcaccaccggccccgtgagagtggccatcaagagccagccccccggcatcagcagccagcacttcacctaccaggaccccgtgctgctgagcctgagccccagatggggcccccaggccggcggcacccagctgaccatcagaggccagcacctgcagaccggcggcaacaccagcgccttcgtgggcggccagccctgccccatcctggagcccgtgtgccccgaggccatcgtgtgcagaaccagaccccaggccgcccccggcgaggccgccgtgctggtggtgttcggccacgcccagagaaccctgctggccagccccttcagatacaccgccaacccccagctggtggccgccgagcccagcgccagcttcagaggcggcggcagactgatcagagtgagaggcaccggcctggacgtggtgcagagacccctgctgagcgtgtggctggaggccgacgccgaggtgcaggccagcagagcccagccccaggacccccagcccagaagaagctgcggcgcccccgccgccgacccccaggcctgcatccagctgggcggcggcctgctgcagtgcagcaccgtgtgcagcgtgaacagcagcagcctgctgctgtgcagaagccccgccgtgcccgacagagcccacccccagagagtgttcttcaccctggacaacgtgcaggtggacttcgccagcgccagcggcggccagggcttcctgtaccagcccaaccccagactggcccccctgagcagagagggccccgccagaccctacagactgaagcccggccacgtgctggacgtggagggcgagggcctgaacctgggcatcagcaaggaggaggtgagagtgcacatcggcagaggcgagtgcctggtgaagaccctgaccagaacccacctgtactgcgagccccccgcccacgccccccagcccgccaacggcagcggcctgccccagttcgtggtgcagatgggcaacgtgcagctggccctgggccccgtgcagtacgaggccgagccccccctgagcgccttccccgtggaggcccaggccggcgtgggcatgggcgccgccgtgctgatcgccgccgtgctgctgctgaccctgatgtacagacacaagagcaagcaggccctgagagactaccagaaggtgctggtgcagctggagagcctggagaccggcgtgggcgaccagtgcagaaaggagttcaccgacctgatgaccgagatgaccgacctgagcagcgacctggagggcagcggcatccccttcctggactacagaacctacgccgagagagccttcttccccggccacggcggctgccccctgcagcccaagcccgagggccccggcgaggacggccactgcgccaccgtgagacagggcctgacccagctgagcaacctgctgaacagcaagctgttcctgctgaccctgatccacaccctggaggagcagcccagcttcagccagagagacagatgccacgtggccagcctgctgagcctggccctgcacggcaagctggagtacctgaccgacatcatgagaaccctgctgggcgacctggccgcccactacgtgcacagaaaccccaagctgatgctgagaagaaccgagaccatggtggagaagctgctgaccaactggctgagcatctgcctgtacgccttcctgagagaggtggccggcgagcccctgtacatgctgttcagagccatccagtaccaggtggacaagggccccgtggacgccgtgaccggcaaggccaagagaaccctgaacgacagcagactgctgagagaggacgtggagttccagcccctgaccctgatggtgctggtgggccccggcgccggcggcgccgccggcagcagcgagatgcagagagtgcccgccagagtgctggacaccgacaccatcacccaggtgaaggagaaggtgctggaccaggtgtacaagggcacccccttcagccagagacccagcgtgcacgccctggacctggagtggagaagcggcctggccggccacctgaccctgagcgacgaggacctgaccagcgtgacccagaaccactggaagagactgaacaccctgcagcactacaaggtgcccgacggcgccaccgtgggcctggtgccccagctgcacagaggcagcaccatcagccagagcctggcccagagatgccccctgggcgagaacatccccaccctggaggacggcgaggagggcggcgtgtgcctgtggcacctggtgaaggccaccgaggagcccgagggcgccaaggtgagatgcagcagcctgagagagagagagcccgccagagccaaggccatccccgagatctacctgaccagactgctgagcatgaagggcaccctgcagaagttcgtggacgacaccttccaggccatcctgagcgtgaacagacccatccccatcgccgtgaagtacctgttcgacctgctggacgagctggccgagaagcacggcatcgaggaccccggcaccctgcacatctggaagaccaacagcctgctgctgagattctgggtgaacgccctgaagaacccccagctgatcttcgacgtgagagtgagcgacaacgtggacgccatcctggccgtgatcgcccagaccttcatcgacagctgcaccaccagcgagcacaaggtgggcagagacagccccgtgaacaagctgctgtacgccagagagatccccagatacaagcagatggtggagagatactacgccgacatcagacagagcagccccgccagctaccaggagatgaacagcgccctggccgagctgagcggcaactacaccagcgccccccactgcctggaggccctgcaggagctgtacaaccacatccacagatactacgaccagatcatcagcgccctggaggaggaccccgtgggccagaagctgcagctggcctgcagactgcagcaggtggccgccctggtggagaacaaggtgaccgacctgtag

SEQ ID NO: 155626 - DNA, 777 bp, Artificial Sequence
  derived and/or modified sequence
tgaagcctggagaccggcgtgggcgaccagtgcagaaaggagttcaccgacctgatgaccgagatgaccgacctgagcagcgacctggagggcagcggcatccccttcctggactacagaacctacgccgagagagccttcttccccggccacggcggctgccccctgcagcccaagcccgagggccccggcgaggacggccactgcgccaccgtgagacagggcctgacccagctgagcaacctgctgaacagcaagctgttcctgctgaccctgatccacaccctggaggagcagcccagcttcagccagagagacagatgccacgtggccagcctgctgagcctggccctgcacggcaagctggagtacctgaccgacatcatgagaaccctgctgggcgacctggccgcccactacgtgcacagaaaccccaagctgatgctgagaagaaccgagaccatggtggagaagctgctgaccaactggctgagcatctgcctgtacgccttcctgagagaggtggccggcgagcccctgtacatgctgttcagagccatccagtaccaggtggacaagggccccgtggacgccgtgaccgagtggagaagcggcctggccggccacctgaccctgagcgacgaggacctgaccagcgtgacccagaaccactggaagagactgaacaccctgcagcactacaaggtgcccgacggcgccaccgtgggcctggtgccccagctgcacagaggcagcaccatcagccagagcctgtag

SEQ ID NO: 155627 - DNA, 2967 bp, Artificial Sequence
  derived and/or modified sequence
atgtgccacgccgcccaggagacccccctgctgcaccacttcatggacagccccgagagctacccctgcggcgacgagcacacccccagccccatcgccggcagacagcccctggaggtgcagcccctgctgaagctgggccagcccgtgagcgccgtggccgccctgcaggccgacggccacatgatcgccttcctgggcgacacccagggccagctgtacaaggtggacagaatccccgtggccgcctgcccccagttccccgactgcgccagctgcctgcaggcccaggaccccctgtgcggctggtgcgtgctgcagggcagatgcaccagaaagggccagtgcggcagagccggccagctgaaccagtggctgtggagctacgaggaggacagccactgcctgcacatccagagcctgctgcccggccaccaccccagacaggagcagggccaggtgaccctgagcgtgcccagactgcccatcctggacgccgacgagtacttccactgcgccttcggcgactacgacagcctggcccacgtggagggcccccacgtggcctgcgtgacccccccccaggaccaggtgcccctgaacccccccggcaccgaccacgtgaccgtgcccctggccctgatgttcgaggacgtgaccgtggccgccaccaacttcagcttctacgactgcagcgccgtgcaggccctggaggccgccgccccctgcagagcctgcgtgggcagcatctggagatgccactggtgcccccagagcagccactgcgtgtacggcgagcactgccccgagggcgagagaaccatctacagcgcccaggaggtggacatccaggtgagaggccccggcgcctgcccccaggtggagggcctggccggcccccacctggtgcccgtgggctgggagagccacctggccctgagagtgagaaacctgcagcacttcagaggcctgcccgccagcttccactgctggctggagctgcccggcgagctgagaggcctgcccgccaccctggaggagaccgccggcgacagcggcctgatccactgccaggcccaccagttctaccccagcatgagccagagagagctgcccgtgcccatctacgtgacccagggcgaggcccagagactggacaacacccacgccctgtacgtgatcctgtacgactgcgccatgggccaccccgactgcagccactgccaggccgccaacagaagcctgggctgcctgtggtgcgccgacggccagcccgcctgcagatacggccccctgtgcccccccggcgccgtggagctgctgtgccccgcccccagcatcgacgccgtggagcccctgaccggcccccccgagggcggcctggccctgaccatcctgggcagcaacctgggcagagccttcgccgacgtgcagtacgccgtgagcgtggccagcagaccctgcaaccccgagcccagcctgtacagaaccagcgccagaatcgtgtgcgtgaccagccccgcccccaacggcaccaccggccccgtgagagtggccatcaagagccagccccccggcatcagcagccagcacttcacctaccaggaccccgtgctgctgagcctgagccccagatggggcccccaggccggcggcacccagctgaccatcagaggccagcacctgcagaccggcggcaacaccagcgccttcgtgggcggccagccctgccccatcctggagcccgtgtgccccgaggccatcgtgtgcagaaccagaccccaggccgcccccggcgaggccgccgtgctggtggtgttcggccacgcccagagaaccctgctggccagccccttcagatacaccgccaacccccagctggtggccgccgagcccagcgccagcttcagaggcggcggcagactgatcagagtgagaggcaccggcctggacgtggtgcagagacccctgctgagcgtgtggctggaggccgacgccgaggtgcaggccagcagagcccagccccaggacccccagcccagaagaagctgcggcgcccccgccgccgacccccaggcctgcatccagctgggcggcggcctgctgcagtgcagcaccgtgtgcagcgtgaacagcagcagcctgctgctgtgcagaagccccgccgtgcccgacagagcccacccccagagagtgttcttcaccctggacaacgtgcaggtggacttcgccagcgccagcggcggccagggcttcctgtaccagcccaaccccagactggcccccctgagcagagagggccccgccagaccctacagactgaagcccggccacgtgctggacgtggagggcgagggcctgaacctgggcatcagcaaggaggaggtgagagtgcacatcggcagaggcgagtgcctggtgaagaccctgaccagaacccacctgtactgcgagccccccgcccacgccccccagcccgccaacggcagcggcctgccccagttcgtggtgcagatgggcaacgtgcagctggccctgggccccgtgcagtacgaggccgagccccccctgagcgccttccccgtggaggcccaggccggcgtgggcatgggcgccgccgtgctgatcgccgccgtgctgctgctgaccctgatgtacagacacaagagcaagcaggccctgagagactaccagaaggtgctggtgcagctggagagcctggagaccggcgtgggcgaccagtgcagaaaggagttcaccggcggctgcggcggcggcggcaccggctaccccagaggcctgaacagccacctgggcgccagctggcccagaagaccccacgacggcgacgacagaccccagcagagacccggcggccagagagaccccctgcccggcctgccccacctgagaagagccagactgctgccctggccctggagactgcccgccgccgcccaggcctag

SEQ ID NO: 155628 - DNA, 675 bp, Artificial Sequence
  derived and/or modified sequence
atgtgccacgccgcccaggagacccccctgctgcaccacttcatggtggacagaatccccgtggccgcctgcccccagttccccgactgcgccagctgcctgcaggcccaggaccccctgtgcggctggtgcgtgctgcagggcagatgcaccagaaagggccagtgcggcagagccggccagctgaaccagtggctgtggagctacgaggaggacagccactgcctgcacatccagagcctgctgcccggccaccaccccagacaggagcagggccaggtgaccctgagcgtgcccagactgcccatcctggacgccgacgagtacttccactgcgccttcggcgactacgacagcctggcccacgtggagggcccccacgtggcctgcgtgacccccccccaggaccaggtgcccctgaacccccccggcaccgaccacgtgaccgtgcccctggccctgatgttcgaggacgtgaccgtggccgccaccaacttcagcttctacgactgcagcgccgtgcaggccctggaggccgccgcccccgcctgcctgccccccagcaccgccggctggagctgcctggagaacttcggcgactgcagacccccctggagaagacagcagggcatccaggccagcagcaccgccagacccaccagaagcagcccctag

SEQ ID NO: 155629 - DNA, 4689 bp, Artificial Sequence
  derived and/or modified sequence
atgtgccacgccgcccaggagacccccctgctgcaccacttcatggacagccccgagagctacccctgcggcgacgagcacacccccagccccatcgccggcagacagcccctggaggtgcagcccctgctgaagctgggccagcccgtgagcgccgtggccgccctgcaggccgacggccacatgatcgccttcctgggcgacacccagggccagctgtacaaggtgttcctgcacggcagccagggccaggtgtaccacagccagcaggtgggcccccccggcagcgccatcagccccgacctgctgctggacagcagcggcagccacctgtacgtgctgaccgcccaccaggtggacagaatccccgtggccgcctgcccccagttccccgactgcgccagctgcctgcaggcccaggaccccctgtgcggctggtgcgtgctgcagggcagatgcaccagaaagggccagtgcggcagagccggccagctgaaccagtggctgtggagctacgaggaggacagccactgcctgcacatccagagcctgctgcccggccaccaccccagacaggagcagggccaggtgaccctgagcgtgcccagactgcccatcctggacgccgacgagtacttccactgcgccttcggcgactacgacagcctggcccacgtggagggcccccacgtggcctgcgtgacccccccccaggaccaggtgcccctgaacccccccggcaccgaccacgtgaccgtgcccctggccctgatgttcgaggacgtgaccgtggccgccaccaacttcagcttctacgactgcagcgccgtgcaggccctggaggccgccgccccctgcagagcctgcgtgggcagcatctggagatgccactggtgcccccagagcagccactgcgtgtacggcgagcactgccccgagggcgagagaaccatctacagcgcccaggaggtggacatccaggtgagaggccccggcgcctgcccccaggtggagggcctggccggcccccacctggtgcccgtgggctgggagagccacctggccctgagagtgagaaacctgcagcacttcagaggcctgcccgccagcttccactgctggctggagctgcccggcgagctgagaggcctgcccgccaccctggaggagaccgccggcgacagcggcctgatccactgccaggcccaccagttctaccccagcatgagccagagagagctgcccgtgcccatctacgtgacccagggcgaggcccagagactggacaacacccacgccctgtacgtgatcctgtacgactgcgccatgggccaccccgactgcagccactgccaggccgccaacagaagcctgggctgcctgtggtgcgccgacggccagcccgcctgcagatacggccccctgtgcccccccggcgccgtggagctgctgtgccccgcccccagcatcgacgccgtggagcccctgaccggcccccccgagggcggcctggccctgaccatcctgggcagcaacctgggcagagccttcgccgacgtgcagtacgccgtgagcgtggccagcagaccctgcaaccccgagcccagcctgtacagaaccagcgccagaatcgtgtgcgtgaccagccccgcccccaacggcaccaccggccccgtgagagtggccatcaagagccagccccccggcatcagcagccagcacttcacctaccaggaccccgtgctgctgagcctgagccccagatggggcccccaggccggcggcacccagctgaccatcagaggccagcacctgcagaccggcggcaacaccagcgccttcgtgggcggccagccctgccccatcctggagcccgtgtgccccgaggccatcgtgtgcagaaccagaccccaggccgcccccggcgaggccgccgtgctggtggtgttcggccacgcccagagaaccctgctggccagccccttcagatacaccgccaacccccagctggtggccgccgagcccagcgccagcttcagaggcggcggcagactgatcagagtgagaggcaccggcctggacgtggtgcagagacccctgctgagcgtgtggctggaggccgacgccgaggtgcaggccagcagagcccagccccaggacccccagcccagaagaagctgcggcgcccccgccgccgacccccaggcctgcatccagctgggcggcggcctgctgcagtgcagcaccgtgtgcagcgtgaacagcagcagcctgctgctgtgcagaagccccgccgtgcccgacagagcccacccccagagagtgttcttcaccctggacaacgtgcaggtggacttcgccagcgccagcggcggccagggcttcctgtaccagcccaaccccagactggcccccctgagcagagagggccccgccagaccctacagactgaagcccggccacgtgctggacgtggagggcgagggcctgaacctgggcatcagcaaggaggaggtgagagtgcacatcggcagaggcgagtgcctggtgaagaccctgaccagaacccacctgtactgcgagccccccgcccacgccccccagcccgccaacggcagcggcctgccccagttcgtggtgcagatgggcaacgtgcagctggccctgggccccgtgcagtacgaggccgagccccccctgagcgccttccccgtggaggcccaggccggcgtgggcatgggcgccgccgtgctgatcgccgccgtgctgctgctgaccctgatgtacagacacaagagcaagcaggccctgagagactaccagaaggtgctggtgcagctggagagcctggagaccggcgtgggcgaccagtgcagaaaggagttcaccgacctgatgaccgagatgaccgacctgagcagcgacctggagggcagcggcatccccttcctggactacagaacctacgccgagagagccttcttccccggccacggcggctgccccctgcagcccaagcccgagggccccggcgaggacggccactgcgccaccgtgagacagggcctgacccagctgagcaacctgctgaacagcaagctgttcctgctgaccctgatccacaccctggaggagcagcccagcttcagccagagagacagatgccacgtggccagcctgctgagcctggccctgcacggcaagctggagtacctgaccgacatcatgagaaccctgctgggcgacctggccgcccactacgtgcacagaaaccccaagctgatgctgagaagaaccgagaccatggtggagaagctgctgaccaactggctgagcatctgcctgtacgccttcctgagagaggtggccggcgagcccctgtacatgctgttcagagccatccagtaccaggtggacaagggccccgtggacgccgtgaccggcaaggccaagagaaccctgaacgacagcagactgctgagagaggacgtggagttccagcccctgaccctgatggtgctggtgggccccggcgccggcggcgccgccggcagcagcgagatgcagagagtgcccgccagagtgctggacaccgacaccatcacccaggtgaaggagaaggtgctggaccaggtgtacaagggcacccccttcagccagagacccagcgtgcacgccctggacctggagtggagaagcggcctggccggccacctgaccctgagcgacgaggacctgaccagcgtgacccagaaccactggaagagactgaacaccctgcagcactacaaggtgcccgacggcgccaccgtgggcctggtgccccagctgcacagaggcagcaccatcagccagagcctggcccagagatgccccctgggcgagaacatccccaccctggaggacggcgaggagggcggcgtgtgcctgtggcacctggtgaaggccaccgaggagcccgagggcgccaaggtgagatgcagcagcctgagagagagagagcccgccagagccaaggccatccccgagatctacctgaccagactgctgagcatgaagggcaccctgcagaagttcgtggacgacaccttccaggccatcctgagcgtgaacagacccatccccatcgccgtgaagtacctgttcgacctgctggacgagctggccgagaagcacggcatcgaggaccccggcaccctgcacatctggaagaccaacagcctgctgctgagattctgggtgaacgccctgaagaacccccagctgatcttcgacgtgagagtgagcgacaacgtggacgccatcctggccgtgatcgcccagaccttcatcgacagctgcaccaccagcgagcacaaggtgggcagagacagccccgtgaacaagctgctgtacgccagagagatccccagatacaagcagatggtggagagatactacgccgacatcagacagagcagccccgccagctaccaggagatgaacagcgccctggccgagctgagcggcaactacaccagcgccccccactgcctggaggccctgcaggagctgtacaaccacatccacagatactacgaccagatcatcagcgccctggaggaggaccccgtgggccagaagctgcagctggcctgcagactgcagcaggtggccgccctggtggagaacaaggtgaccgacctgtag

SEQ ID NO: 155630 - protein, 468 aa, Artificial Sequence
  derived and/or modified sequence
MLPPWTLGLLLLATVRGRKVCYGQLGCFSDEKPWAGTLQRPVKLLPWSPEDIDTRFLLYTNENPNNFQLITGTEPDTIEASNFQLDRKTRFIIHGFLDKAEDSWPSDMCKKMFEVEKVNCICVDWRHGSRAMYTQAVQNIRVVGAETAFLIQALSTQLGYSLEDVHVIGHSLGAHTAAEAGRRLGGRVGRITGLDPAGPCFQDEPEEVRLDPSDAVFVDVIHTDSSPIVPSLGFGMSQKVGHLDFFPNGGKEMPGCKKNVLSTITDIDGIWEGIGGFVSCNHLRSFEYYSSSVLNPDGFLGYPCASYDEFQESKCFPCPAEGCPKMGHYADQFKGKTSAVEQTFFLNTGESGNFTSKYKISVTLSGKEKVNGYIRIALYGSNENSKQYEIFKGSLKPDASHTCAIDVDFNVGKIQKVKFLWNKRGINLSEPKLGASQITVQSGEDGTEYNFCSSDTVEENVLQSLYPC

SEQ ID NO: 155631 - DNA, 1407 bp, Artificial Sequence
  derived and/or modified sequence
atgctgcccccctggaccctgggcctgctgctgctggccaccgtgagaggcagaaaggtgtgctacggccagctgggctgcttcagcgacgagaagccctgggccggcaccctgcagagacccgtgaagctgctgccctggagccccgaggacatcgacaccagattcctgctgtacaccaacgagaaccccaacaacttccagctgatcaccggcaccgagcccgacaccatcgaggccagcaacttccagctggacagaaagaccagattcatcatccacggcttcctggacaaggccgaggacagctggcccagcgacatgtgcaagaagatgttcgaggtggagaaggtgaactgcatctgcgtggactggagacacggcagcagagccatgtacacccaggccgtgcagaacatcagagtggtgggcgccgagaccgccttcctgatccaggccctgagcacccagctgggctacagcctggaggacgtgcacgtgatcggccacagcctgggcgcccacaccgccgccgaggccggcagaagactgggcggcagagtgggcagaatcaccggcctggaccccgccggcccctgcttccaggacgagcccgaggaggtgagactggaccccagcgacgccgtgttcgtggacgtgatccacaccgacagcagccccatcgtgcccagcctgggcttcggcatgagccagaaggtgggccacctggacttcttccccaacggcggcaaggagatgcccggctgcaagaagaacgtgctgagcaccatcaccgacatcgacggcatctgggagggcatcggcggcttcgtgagctgcaaccacctgagaagcttcgagtactacagcagcagcgtgctgaaccccgacggcttcctgggctacccctgcgccagctacgacgagttccaggagagcaagtgcttcccctgccccgccgagggctgccccaagatgggccactacgccgaccagttcaagggcaagaccagcgccgtggagcagaccttcttcctgaacaccggcgagagcggcaacttcaccagcaagtacaagatcagcgtgaccctgagcggcaaggagaaggtgaacggctacatcagaatcgccctgtacggcagcaacgagaacagcaagcagtacgagatcttcaagggcagcctgaagcccgacgccagccacacctgcgccatcgacgtggacttcaacgtgggcaagatccagaaggtgaagttcctgtggaacaagagaggcatcaacctgagcgagcccaagctgggcgccagccagatcaccgtgcagagcggcgaggacggcaccgagtacaacttctgcagcagcgacaccgtggaggagaacgtgctgcagagcctgtacccctgctag

SEQ ID NO: 155632 - DNA, 1407 bp, Artificial Sequence
  derived and/or modified sequence
atgttgcccccatggacccttggcctcctgcttctggccacagtccggggacggaaggtctgctatgggcagcttggctgttttagtgatgagaagccttgggcgggtacactgcagaggccagttaaattgttaccctggtcaccggaggacatagataccagattcctgctctacactaacgagaatcctaacaactttcagttaatcacagggaccgagcccgatactatagaggcctcaaacttccagcttgatcgcaaaacaagattcattatccacggattcctcgacaaggccgaagattcctggccatccgacatgtgcaaaaaaatgttcgaagtcgagaaagtgaattgcatttgcgtggactggcgacatggaagcagagctatgtacacccaagcagttcagaacatccgggtggtaggagcagagaccgccttccttatccaggcactgagcacacagctcggatacagcctggaggatgtccacgtgattggccattccctgggggcacacacagccgcagaggccggccggagactgggggggagagtgggcaggatcacgggattagaccctgccggcccctgttttcaagatgagcctgaggaggtacggttggacccaagtgacgcagtgtttgtagatgtgatccacacagattcctcccccatcgtgccttcactgggctttggtatgtcacaaaaggtgggtcacctggactttttcccaaatggcggaaaagagatgcctggttgcaaaaagaatgttcttagcactataacagacatcgacgggatctgggaaggcatcggtgggttcgttagctgtaaccacctccggagcttcgagtactacagctccagcgtcctcaaccccgatggctttttggggtatccatgtgccagttacgatgagtttcaggagagtaaatgcttcccgtgccctgccgaggggtgcccgaagatggggcactatgcagaccagttcaaaggcaaaacctcagctgtcgagcagaccttttttctcaatacaggtgaaagcggaaactttacttctaaatacaaaatcagcgtgaccttgtcaggaaaggagaaagtcaacggatatattaggattgccctgtatggctccaacgagaattcaaaacaatacgaaatcttcaaaggcagcctcaagcctgacgcctcccacacatgcgctattgacgtcgatttcaacgtcggcaaaattcaaaaggttaaattcctatggaataagcgaggtatcaacctttccgaacctaaactgggagcctcccagatcacggttcagagtggcgaggacggcacagagtacaatttctgctcaagcgataccgttgaagagaacgtcctccaatctttatatccctgctag

SEQ ID NO: 155633 - DNA, 1407 bp, Artificial Sequence
  derived and/or modified sequence
atgctgcccccctggaccctgggcctgctgctgctggccaccgtgcggggcaggaaggtgtgctacggccagctgggctgcttcagtgatgagaagccctgggccggcaccctgcagaggcctgtgaagctgctgccctggagccctgaggacatcgacacccgcttcctgctgtacaccaatgaaaaccccaacaacttccagctgatcactggaacagagccagacaccatcgaggccagcaacttccagctggacaggaagacccgcttcatcatccacggcttcctggacaaggcagaagattcctggcccagcgacatgtgcaagaagatgtttgaggtggagaaggtgaactgcatctgtgtggactggaggcatggcagccgggccatgtacacccaggccgtgcagaacatccgggtggtgggcgctgagacagccttcctgatccaggccctgagcacccagctgggctacagcctggaggatgtgcacgtgattggccacagcctgggcgcccacacagctgctgaggccggccggcggctgggcggccgggtgggccgcatcaccggcctggaccctgctggcccctgcttccaggatgagcctgaggaggtgcggctggaccccagtgatgctgtgtttgtggatgtgatccacacagacagcagccccatcgtgcccagcctgggcttcggcatgagccagaaggtgggccacctggacttcttccccaacggcggcaaggagatgcctggctgcaagaagaatgtgctgagcaccatcacagacattgatggcatctgggagggcatcggcggctttgtgtcctgcaaccacctgcggagctttgagtactacagcagctctgtgctgaacccagatggcttcctgggctacccctgtgccagctatgatgagttccaggagagcaagtgcttcccctgcccagctgagggctgccccaagatgggccactacgccgaccagttcaagggcaagaccagcgctgtggagcagaccttcttcctgaacacaggagagagcggcaacttcaccagcaagtacaagatctctgtgaccctgagcggcaaggagaaggtgaatggctacatccgcatcgccctgtatggcagcaatgaaaacagcaagcagtatgagatcttcaagggcagcctgaagccagatgccagccacacctgtgccattgatgtggacttcaacgtgggcaagatccagaaggtgaagttcctgtggaacaagaggggcatcaacctgtctgagcccaagctgggcgccagccagatcaccgtgcagagcggggaggatggaacagagtacaacttctgcagcagtgacacagtggaggagaatgtgctgcagagcctgtacccctgctag

SEQ ID NO: 155634 - DNA, 1407 bp, Artificial Sequence
  derived and/or modified sequence
atgctgcccccctggaccctgggcctgctgctgctggccaccgtgcggggcaggaaagtctgctatggccaactcgggtgcttcagcgatgaaaagccctgggccggcacactacaacgccccgtgaaacttctgccatggtcgcctgaagatatagacacaaggttcctactgtacaccaatgagaaccctaacaactttcagttaattactgggactgaaccagatacaatagaggcttccaacttccagctggatcgcaagactcgattcatcatccatggattcctcgataaagctgaagatagttggccttcagatatgtgtaagaaaatgtttgaggtggagaaagtcaattgtatttgcgtggactggcggcacggttcccgggctatgtacacacaagcagtccaaaatatcagggtggtgggggctgaaactgcctttctcatccaagccctaagcacccagctgggatacagcctagaagacgtacacgtgattggtcatagtttgggagcccacaccgcagccgaggctgggaggagactagggggtcgagtgggccgtattactggcctcgatccagctggtccatgctttcaggatgaacctgaagaggtccgccttgatccgagtgacgccgtgtttgtggatgtcatccatactgatagctcccctatcgtgccttcacttggtttcggtatgtctcagaaggtgggccacctggacttcttcccaaacggcggcaaggaaatgccaggctgtaaaaagaatgtgctgagcacaattactgatatcgacgggatatgggaggggatcggaggattcgtctcctgtaaccatttaaggtcgtttgagtattattcaagctctgtgctgaaccctgacggcttcctcggctacccatgtgcatcctacgacgaatttcaagagagtaagtgctttccatgcccagcagaaggttgccctaagatgggacactatgctgatcaattcaagggcaaaacttccgccgtagagcaaaccttcttcctcaacactggcgagtcagggaacttcacaagcaaatataaaatctccgtaacactctctgggaaggaaaaggtgaatggatacatccgcattgccctctacgggtcaaacgaaaacagtaaacaatatgagatctttaaaggctcactgaagccagacgcctcacacacatgtgccattgacgtggacttcaatgtagggaagatccagaaggtgaagtttctctggaataagcgcgggattaacctgagcgaacccaaactgggcgcttcacagataacggtgcaaagtggggaagacggaacggagtacaatttctgcagtagtgatacagtggaagagaatgtccttcagagcctgtacccatgctag

SEQ ID NO: 155635 - DNA, 1479 bp, Artificial Sequence
  derived and/or modified sequence
gtgagtggaagctctggtgcagcatgatgctgcccccttggaccctcggccttctcctgctggccacagtcagagggagaaaagtctgctacggacaacttggctgcttttctgatgaaaaaccatgggcaggaacccttcagcgacctgtaaaattacttccctggtcccccgaggacattgacacccgctttcttctgtacacaaatgaaaatccaaacaacttccaactaatcactggcacggaaccagacaccattgaggcttcaaacttccaactggaccgcaagacacgcttcatcatccatggcttcttagacaaggcggaggacagctggccatcggacatgtgcaagaaaatgtttgaagtggagaaggtgaactgcatctgtgtggactggaggcacgggtcccgggcaatgtacacccaagccgtgcaaaacattcgggttgttggggcggagacagctttcttaatacaagcactgtcgacgcagctagggtacagccttgaggacgtgcatgtcatcggccacagcctgggcgcgcacacggccgcggaggcgggcaggaggctggggggccgcgtgggcaggatcacagggctggatccagcagggccgtgcttccaggatgaacctgaggaggttcggttggatccatctgacgccgtgtttgtggatgtgattcacacagattcttctcccatagttccttccctaggtttcggaatgagccaaaaggtgggccatctggatttctttccaaatggaggaaaggaaatgcccggatgtaagaaaaatgtcctttcaaccattactgatattgatggaatatgggaaggaattggtggctttgtgtcttgcaatcacctaagaagcttcgagtattactcaagcagcgtcctcaaccctgatggcttcctgggctatccctgtgcctcctacgatgagtttcaggagagtaagtgtttcccttgtccagctgaaggatgccccaaaatggggcactatgctgaccaatttaaggggaaaacaagtgctgtggaacaaacctttttcctgaacacaggagagagtggtaactttactagtaaatataagatatcagtcacactttctggaaaagagaaagtgaatgggtacatcaggattgctttgtatggaagtaatgaaaactcaaaacaatatgagattttcaaaggatccctcaaaccagatgcaagtcacacgtgtgctattgatgtggattttaatgttggaaaaatacagaaagttaaattcctctggaacaaacgtgggataaatctatctgagcccaaactgggggcttcccaaatcacagtgcaaagtggtgaagatgggactgagtataatttttgtagcagcgacactgtggaagaaaacgtcttgcaatctctttacccttgttaaaaacgtggtgcagctattgcggtaataaaatctttaatgcactcgg

SEQ ID NO: 155636 - DNA, 1407 bp, Artificial Sequence
  derived and/or modified sequence
atgctccctccatggacgcttggactgctgctgctagcaacagttcgcggaaggaaagtgtgctatggacagctgggctgcttttctgatgagaagccttgggcgggtactcttcaacgtcccgtaaaactcctgccttggtcgcccgaggacatagacacccggttcctgctgtataccaatgagaaccccaataacttccagcttatcacagggaccgagcctgacactatcgaggcctccaactttcagctcgatagaaagacacgatttattatccacggcttcctggacaaggctgaggattcatggccaagtgatatgtgcaagaaaatgttcgaagtggaaaaagttaactgtatttgcgtggactggagacacggaagcagggctatgtatacccaggctgtccagaacattagagttgtcggcgctgaaactgccttcctcatccaggccttatcgacccaactgggatacagtctagaggacgtccacgttatagggcattcgcttggagctcatacagcagcggaagctggtagacgccttggcggtcgagtgggcaggataaccggcctggaccccgctggtccatgtttccaggacgagccagaagaggtcaggctggatccatctgatgccgtgtttgttgacgtcattcacaccgattctagtccaattgtgccatcattaggttttggtatgtcacagaaagtgggacatctcgacttttttccaaacgggggaaaagagatgcccggttgtaagaaaaacgtcctatccaccatcactgatatagacgggatatgggaggggatcggcggatttgtgagctgcaatcacctccgttcctttgaatattattcctcatctgtgctgaaccccgatggcttcttgggatatccctgcgcatcctatgacgagtttcaggagagcaagtgcttcccctgccctgccgagggctgtcctaagatgggccactatgctgatcaatttaagggaaagacaagcgccgtggagcagaccttttttttgaacactggggaaagcggcaacttcacatccaagtacaagatttccgttacattgtctgggaaggagaaggtgaatgggtatattcggattgcactttatggaagtaacgaaaattccaagcagtatgagatttttaaaggatcgctcaaaccagacgccagtcatacttgcgccatcgatgtggatttcaacgtcggtaagatacagaaggtcaagttcctttggaacaagcgaggaatcaacctcagcgaaccaaagctgggtgcttctcagatcactgttcagtctggagaagatggcacagagtataacttctgctcctcagataccgtggaagagaacgtgctgcaatcgttatacccatgctag

SEQ ID NO: 155637 - protein, 526 aa, Artificial Sequence
  derived and/or modified sequence
MRCALALSALLLLLSTPPLLPSSPSPSPSPSQNATQTTTDSSNKTAPTPASSVTIMATDTAQQSTVPTSKANEILASVKATTLGVSSDSPGTTTLAQQVSGPVNTTVARGGGSGNPTTTIESPKSTKSADTTTVATSTATAKPNTTSSQNGAEDTTNSGGKSSHSVTTDLTSTKAEHLTTPHPTSPLSPRQPTSTHPVATPTSSGHDHLMKISSSSSTVAIPGYTFTSPGMTTTLPSSVISQRTQQTSSQMPASSTAPSSQETVQPTSPATALRTPTLPETMSSSPTAASTTHRYPKTPSPTVAHESNWAKCEDLETQTQSEKQLVLNLTGNTLCAGGASDEKLISLICRAVKATFNPAQDKCGIRLASVPGSQTVVVKEITIHTKLPAKDVYERLKDKWDELKEAGVSDMKLGDQGPPEEAEDRFSMPLIITIVCMASFLLLVAALYGCCHQRLSQRKDQQRLTEELQTVENGYHDNPTLEVMETSSEMQEKKVVSLNGELGDSWIVPLDNLTKDDLDEEEDTHL

SEQ ID NO: 155638 - protein, 526 aa, Artificial Sequence
  derived and/or modified sequence
MRCALALSALLLLLSTPPLLPSSPSPSPSPSQNATQTTTDSSNKTAPTPASSVTIMATDTAQQSTVPTSKANEILASVKATTLGVSSDSPGTTTLAQQVSGPVNTTVARGGGSGNPTTTIESPKSTKSADTTTVATSTATAKPNTTSSQNGAEDTTNSGGKSSHSVTTDLTSTKAEHLTTPHPTSPLSPRQPTSTHPVATPTSSGHDHLMKISSSSSTVAIPGYTFTSPGMTTTLPSSVISQRTQQTSSQMPASSTAPSSQETVQPTSPATALRTPTLPETMSSSPTAASTTHRYPKTPSPTVAHESNWVTPAGVGTQTRVEEALRQALTHSLLPAGGASDEKLISLICRAVKATFNPAQDKCGIRLASVPGSQTVVVKEITIHTKLPAKDVYERLKDKWDELKEAGVSDMKLGDQGPPEEAEDRFSMPLIITIVCMASFLLLVAALYGCCHQRLSQRKDQQRLTEELQTVENGYHDNPTLEVMETSSEMQEKKVVSLNGELGDSWIVPLDNLTKDDLDEEEDTHL

SEQ ID NO: 155639 - protein, 516 aa, Artificial Sequence
  derived and/or modified sequence
MRCALALSALLLLLSTSPSPSQNATQTTTDSSNKTAPTPASSVTIMATDTAQQSTVPTSKANEILASVKATTLGVSSDSPGTTTLAQQVSGPVNTTVARGGGSGNPTTTIESPKSTKSADTTTVATSTATAKPNTTSSQNGAEDTTNSGGKSSHSVTTDLTSTKAEHLTTPHPTSPLSPRQPTSTHPVATPTSSGHDHLMKISSSSSTVAIPGYTFTSPGMTTTLPSSVISQRTQQTSSQMPASSTAPSSQETVQPTSPATALRTPTLPETMSSSPTAASTTHRYPKTPSPTVAHESNWAKCEDLETQTQSEKQLVLNLTGNTLCAGGASDEKLISLICRAVKATFNPAQDKCGIRLASVPGSQTVVVKEITIHTKLPAKDVYERLKDKWDELKEAGVSDMKLGDQGPPEEAEDRFSMPLIITIVCMASFLLLVAALYGCCHQRLSQRKDQQRLTEELQTVENGYHDNPTLEVMETSSEMQEKKVVSLNGELGDSWIVPLDNLTKDDLDEEEDTHL

SEQ ID NO: 155640 - DNA, 1581 bp, Artificial Sequence
  derived and/or modified sequence
atgcgctgtgcactggcactcagcgccctcctgctgctgcttagcacgccccctctgctaccttctagcccgtccccttcaccatctcctagtcaaaacgccacccagactacaactgattcgagcaataagacagcccctacacccgcctcaagcgtcactataatggctacagataccgctcagcagtcaacggtgccgacatctaaagccaatgaaattttagcgtcagtaaaggctacaaccttaggggtgagctccgatagccccggaactacgacgcttgcccagcaggtgtctggtcccgtgaacaccaccgtagcaagaggtggggggtcaggaaacccaaccacaactattgaatctccaaaatcaaccaagagtgctgacacaaccaccgttgccacttccaccgctaccgcaaagcctaacacgacatccagccagaatggagctgaagacacaaccaactctggtgggaaatccagtcactctgttacaacagatttaaccagtacgaaagctgagcatttgactacacctcacccaacgtctcccctttcacccaggcagccaacatctacccatcccgtggccacacctacgtcatccggtcacgaccacctgatgaagataagttcgtcttccagcaccgtggctatcccaggctacaccttcacaagtcccggcatgacaactacactgccgtcaagtgtcatttctcaacgtactcaacagactagttcccagatgccggcgtcaagcacggctccgagttcccaggaaaccgtgcagcctaccagccctgccacagcgctccgaacgccaacattgcccgaaactatgtcctcaagcccgactgcagccagcacaacacaccgctatcctaagactccatcaccaacagtggctcatgagtctaattgggcaaagtgcgaggatctagaaacacagacccagagcgagaaacagctcgtactaaacctgactggcaacaccttgtgcgccgggggggcctctgatgaaaaacttatctctctgatctgccgagcagtaaaggccacatttaatcccgcgcaggataagtgcggcatccgcctcgccagtgtgcctggctcccaaactgtagtggtaaaggaaattacaatccacaccaagctccccgccaaagatgtgtacgaaagattaaaggacaagtgggacgagctcaaagaggctggcgtgtctgacatgaaactgggcgatcagggcccccctgaggaggccgaagatcggttctcaatgccgctcataatcacgatcgtttgtatggcgtcgttcttgctgctggttgcggcattgtatggttgctgtcatcaaagactaagtcagagaaaggaccagcagaggctgaccgaggagctccaaaccgtggagaacgggtaccatgacaaccctactctcgaggtcatggaaacatcctccgaaatgcaggagaagaaagtcgtatcactgaatggagagttgggtgattcctggattgtccctcttgacaacttgacaaaggacgatctggacgaggaggaggacacacacctttag

SEQ ID NO: 155641 - DNA, 1581 bp, Artificial Sequence
  derived and/or modified sequence
atgcgatgtgccctcgccttgtctgccttgctcttactgttgtcaacaccaccgctactcccgtcctcacccagccctagtcctagcccaagccagaatgcaactcagacaactacggacagctccaacaagaccgcccccaccccggcttcgtcagtcaccattatggccactgacaccgctcaacagtccactgttcctacttcaaaagctaacgagatccttgccagcgtgaaagccacgacattaggggtttcaagtgatagtccaggaactactaccctggcacagcaggtgtccggacctgtaaacacaacagtcgccaggggcggtggctcgggcaatcctactacaacaatcgaaagcccaaagagcacaaaaagcgctgataccacaaccgtggccacctctaccgccaccgctaaacccaacaccacgtccagccagaacggggctgaagacactacaaatagtgggggcaagtcctctcatagcgtcaccacagacttgacgagcacaaaagctgagcatctgaccacaccgcaccccactagcccactgtcccccagacagccaacgtctacacatcccgttgccaccccaacatcttcaggacacgaccatctcatgaaaattagctctagtagtagcaccgtggcaatcccaggatacacctttacgtctcctggaatgacaactacactgccctcttcagtgatcagtcagaggacccagcagacaagctcccagatgcccgcaagttcaaccgctcctagcagccaagagaccgttcagcctacctcacccgccacagctctgcgtacgcccactttacctgagacaatgtcgagtagtcccactgctgcctccaccacccaccggtatccaaagaccccttcaccaacagtagcacacgagtccaactgggtcaccccggccggggtgggcactcagactcgggttgaggaagccctccgacaggccctgacacactccttattaccagctggaggcgcctctgatgagaaattaatctcgctgatttgccgcgccgttaaagccacattcaatcctgcacaggacaaatgcggcattcggctagccagcgtccctggctcccagactgttgtggtgaaggagattactatacataccaagttgcctgccaaggatgtgtatgagcggctgaaggacaaatgggatgagctgaaagaggccggagtgtcagatatgaaactcggggaccagggacctccggaggaagcggaggatagattcagcatgcctctgatcatcactatcgtgtgtatggcctcctttctcctgctcgtcgccgccttatacgggtgttgccaccagcggcttagtcagaggaaagaccagcagcgcctgacagaggaactgcagaccgtggagaacggctatcacgacaaccccacacttgaagtaatggagacttctagtgaaatgcaggagaagaaggtggtcagtttaaacggggaactcggggattcctggatagttccactggataatctgactaaggatgaccttgatgaggaagaggacactcatctttag

SEQ ID NO: 155642 - DNA, 1551 bp, Artificial Sequence
  derived and/or modified sequence
atgcgatgtgccctggctctttcggccctcctgctactgctgtccacctcgcccagtccatcgcagaacgccacacagaccactacagattcgagcaataaaactgcccctacccctgcttcatccgttaccattatggccacagatactgcacaacagagtaccgtgcccaccagtaaagccaacgagatcctggcctccgtcaaagccaccaccctgggagtgtccagcgattctcccggaacaactacattggcacagcaggtctctggcccagtaaacacgacagtagcacgaggcggaggatccggcaaccctacaaccacaatagaatctcctaagagcacaaaaagtgccgacactactacagtcgccactagcaccgcaaccgcaaagcctaacactaccagcagccaaaatggagccgaggacaccacgaacagcggtggcaaatctagccattcggtcacgactgaccttacctcaaccaaagccgaacatcttacgaccccccaccccacttctccactctccccacgccagcccacaagtacacatccagtggcaacccccaccagctccggccatgaccacctcatgaaaatttcctcctcaagttcaaccgtcgcaatccccggctacaccttcacttccccgggtatgaccacaacgcttccgtccagtgttataagtcaacgaacacaacaaacgagctctcagatgccggcctcctctaccgcgccgtcctcacaagagacggtgcaacccacctctccagcaacagctttgagaacaccaactcttcctgaaaccatgtctagtagcccaaccgccgcaagcaccactcatagatatccaaaaacacccagcccaacagtcgctcatgagagcaactgggccaaatgcgaggacttggaaacccagacacagtccgaaaaacagctggtattaaacctcacgggaaatacactgtgcgccggaggagccagtgatgagaagctcatttcgttaatctgtcgcgcagttaaggccacgtttaaccccgctcaggacaagtgcgggatccgacttgcctccgttcctggctcacaaactgtggtagtgaaggagataactatacatactaagctgccagctaaagacgtatacgagcggctaaaggataagtgggatgagttaaaggaggccggcgtaagtgacatgaaactgggggatcaaggacctcccgaggaggcggaggatagattcagcatgccactcataataaccatagtgtgcatggcatccttccttttgctggtggccgccctctatgggtgctgtcaccaaaggctcagccagaggaaagatcagcagagattgactgaagagctccagaccgtggagaacggttatcacgacaatcccacacttgaggttatggagacgagttctgagatgcaagaaaagaaagtcgttagcctgaatggagaactcggggattcatggattgtacccctggacaacctcacgaaggatgatttggacgaggaagaggacactcacctctag

SEQ ID NO: 155643 - DNA, 1581 bp, Artificial Sequence
  derived and/or modified sequence
atgagatgtgccctggccctgagcgccctgctgctgctgctgagcaccccacccctgctgcccagcagccccagccccagccccagccccagccagaatgccacccagaccaccacagacagcagcaacaagacagcccccaccccagccagctctgtgaccatcatggccacagacacagcccagcagagcacagtgcccaccagcaaggccaatgagatcctggcctctgtgaaggccaccaccctgggcgtgtccagtgacagccctggcaccaccaccctggcccagcaggtgtctggccctgtgaacaccaccgtggcccggggcggcggcagcggcaaccccaccaccaccatcgagagccccaagagcaccaagtctgctgacaccaccaccgtggccaccagcacagccacagccaagcccaacaccaccagcagccagaatggagctgaggacaccaccaacagcggcggcaagagcagccacagcgtgaccacagacctgaccagcaccaaggccgagcacctgaccaccccccaccccaccagccccctgagcccccggcagcccaccagcacccaccctgtggccacccccaccagcagcggccatgaccacctgatgaagatcagcagcagcagcagcacagtggccatccctggctacaccttcaccagccctggcatgaccaccaccctgcccagcagcgtcatcagccagaggacccagcagaccagcagccagatgcctgccagcagcacagcccccagcagccaggagaccgtgcagcccaccagccctgccacagccctgcggacccccaccctgcctgagaccatgagcagcagccccacagctgccagcaccacccaccgctaccccaagacccccagccccaccgtggcccacgagagcaactgggccaagtgtgaggacctggagacccagacccagagcgagaagcagctggtgctgaacctgaccggcaacaccctgtgtgccggcggggccagtgatgagaagctgatcagcctcatctgcagagctgtgaaggccaccttcaacccagcccaggacaagtgtggcatccggctggcctctgtgcccggcagccagacagtggtggtgaaggagatcaccatccacaccaagctgcctgccaaggatgtgtatgagcggctgaaggacaagtgggatgagctgaaggaggccggcgtgtctgacatgaagctgggggaccagggccccccagaggaggctgaagatcgcttctccatgcccctcatcatcaccatcgtgtgcatggccagcttcctgctgctggtggccgccctgtatggctgctgccaccagaggctgagccagaggaaggaccagcagaggctgacagaggagctgcagacagtggagaatggctaccatgacaaccccaccctggaggtgatggagaccagcagcgagatgcaggagaagaaggtggtgtccctgaatggagagctgggggacagctggatcgtgcccctggacaacctgaccaaggatgacctggatgaggaggaggacacccacctgtag

SEQ ID NO: 155644 - DNA, 1581 bp, Artificial Sequence
  derived and/or modified sequence
atgagatgtgccctggccctgagcgccctgctgctgctgctgagcaccccacccctgctgcccagcagccccagccccagccccagccccagccagaatgccacccagaccaccacagacagcagcaacaagacagcccccaccccagccagctctgtgaccatcatggccacagacacagcccagcagagcacagtgcccaccagcaaggccaatgagatcctggcctctgtgaaggccaccaccctgggcgtgtccagtgacagccctggcaccaccaccctggcccagcaggtgtctggccctgtgaacaccaccgtggcccggggcggcggcagcggcaaccccaccaccaccatcgagagccccaagagcaccaagtctgctgacaccaccaccgtggccaccagcacagccacagccaagcccaacaccaccagcagccagaatggagctgaggacaccaccaacagcggcggcaagagcagccacagcgtgaccacagacctgaccagcaccaaggccgagcacctgaccaccccccaccccaccagccccctgagcccccggcagcccaccagcacccaccctgtggccacccccaccagcagcggccatgaccacctgatgaagatcagcagcagcagcagcacagtggccatccctggctacaccttcaccagccctggcatgaccaccaccctgcccagcagcgtcatcagccagaggacccagcagaccagcagccagatgcctgccagcagcacagcccccagcagccaggagaccgtgcagcccaccagccctgccacagccctgcggacccccaccctgcctgagaccatgagcagcagccccacagctgccagcaccacccaccgctaccccaagacccccagccccaccgtggcccacgagagcaactgggtgaccccagctggggtgggcacccagaccagggtggaggaggccctgcggcaggccctgacccacagcctgctgcctgctgggggcgccagtgatgagaagctgatcagcctcatctgcagagctgtgaaggccaccttcaacccagcccaggacaagtgtggcatccggctggcctctgtgcccggcagccagacagtggtggtgaaggagatcaccatccacaccaagctgcctgccaaggatgtgtatgagcggctgaaggacaagtgggatgagctgaaggaggccggcgtgtctgacatgaagctgggggaccagggccccccagaggaggctgaagatcgcttctccatgcccctcatcatcaccatcgtgtgcatggccagcttcctgctgctggtggccgccctgtatggctgctgccaccagaggctgagccagaggaaggaccagcagaggctgacagaggagctgcagacagtggagaatggctaccatgacaaccccaccctggaggtgatggagaccagcagcgagatgcaggagaagaaggtggtgtccctgaatggagagctgggggacagctggatcgtgcccctggacaacctgaccaaggatgacctggatgaggaggaggacacccacctgtag

SEQ ID NO: 155645 - DNA, 1551 bp, Artificial Sequence
  derived and/or modified sequence
atgagatgtgccctggccctgagcgccctgctgctgctgctgagcaccagccccagccccagccagaatgccacccagaccaccacagacagcagcaacaagacagcccccaccccagccagctctgtgaccatcatggccacagacacagcccagcagagcacagtgcccaccagcaaggccaatgagatcctggcctctgtgaaggccaccaccctgggcgtgtccagtgacagccctggcaccaccaccctggcccagcaggtgtctggccctgtgaacaccaccgtggcccggggcggcggcagcggcaaccccaccaccaccatcgagagccccaagagcaccaagtctgctgacaccaccaccgtggccaccagcacagccacagccaagcccaacaccaccagcagccagaatggagctgaggacaccaccaacagcggcggcaagagcagccacagcgtgaccacagacctgaccagcaccaaggccgagcacctgaccaccccccaccccaccagccccctgagcccccggcagcccaccagcacccaccctgtggccacccccaccagcagcggccatgaccacctgatgaagatcagcagcagcagcagcacagtggccatccctggctacaccttcaccagccctggcatgaccaccaccctgcccagcagcgtcatcagccagaggacccagcagaccagcagccagatgcctgccagcagcacagcccccagcagccaggagaccgtgcagcccaccagccctgccacagccctgcggacccccaccctgcctgagaccatgagcagcagccccacagctgccagcaccacccaccgctaccccaagacccccagccccaccgtggcccacgagagcaactgggccaagtgtgaggacctggagacccagacccagagcgagaagcagctggtgctgaacctgaccggcaacaccctgtgtgccggcggggccagtgatgagaagctgatcagcctcatctgcagagctgtgaaggccaccttcaacccagcccaggacaagtgtggcatccggctggcctctgtgcccggcagccagacagtggtggtgaaggagatcaccatccacaccaagctgcctgccaaggatgtgtatgagcggctgaaggacaagtgggatgagctgaaggaggccggcgtgtctgacatgaagctgggggaccagggccccccagaggaggctgaagatcgcttctccatgcccctcatcatcaccatcgtgtgcatggccagcttcctgctgctggtggccgccctgtatggctgctgccaccagaggctgagccagaggaaggaccagcagaggctgacagaggagctgcagacagtggagaatggctaccatgacaaccccaccctggaggtgatggagaccagcagcgagatgcaggagaagaaggtggtgtccctgaatggagagctgggggacagctggatcgtgcccctggacaacctgaccaaggatgacctggatgaggaggaggacacccacctgtag

SEQ ID NO: 155646 - DNA, 1581 bp, Artificial Sequence
  derived and/or modified sequence
atgcggtgcgccctggccctgagcgccctgctgctgctgctgagcactccccctttattgccgagcagtccttcaccaagcccttctccctcacagaatgccacccagaccacaaccgattccagcaacaagacagccccaactcctgcatcttccgtgaccatcatggctacagatacagcacagcagagtactgtacccacttccaaagcgaatgagattctagcatctgtgaaagccactacattaggagtcagttctgatagcccaggaacgaccactctggctcagcaggtgtccggacctgttaatacaacagtggccaggggtggaggtagtgggaatcccacgaccaccatagagagtccaaaatccactaaaagcgccgatacaacaaccgtcgccacttcaactgcaacggccaagcctaacactacctcttcccaaaacggtgccgaggatacgacaaactcagggggcaaaagcagccactccgtcactaccgacctgacttctacaaaggctgaacacctgaccacaccccatcctacctcaccgctctcaccccggcagcccacatcaacgcatccggttgccaccccgacgagcagtggtcacgatcatctaatgaaaatttcatcctcctcctccactgtggcaataccaggatacaccttcacttccccaggcatgacaactacactgccctcatccgttatcagccagcgcactcagcagacatcctcccagatgccagcttcaagcacagcaccaagcagtcaagagaccgttcaacctactagcccggccacggcgctcagaacaccaaccctgccagagaccatgtcatccagcccgaccgccgcctccaccacacatcgctaccccaagacgccctccccgactgtagcccatgaaagcaactgggccaagtgtgaggatttagagacacagactcagagcgagaagcagctcgtactaaacctgaccggaaacactctctgcgctggaggggcctctgacgagaaactgattagtctgatatgccgcgcagtaaaagccacattcaaccccgcccaggacaagtgtgggataaggctggcaagtgtgcccggaagccaaaccgtggtagtaaaggagattactatacacaccaagctcccagccaaggacgtgtacgagaggctcaaagacaaatgggatgaactgaaggaggccggcgtgtccgatatgaagttgggcgaccaaggacctcctgaggaggccgaggatcgatttagtatgccgctcataatcacaatcgtgtgcatggccagcttcctcttactagtggctgcactctatggttgctgtcaccagcgcctctcccaacgcaaagatcagcagcgtcttacagaggagctgcagacagtggagaacggatatcatgacaatcctactctcgaggtgatggaaactagtagtgaaatgcaggagaaaaaggtcgtttcgcttaatggagaacttggtgactcatggatagttcctctcgacaacctgaccaaggatgatttggatgaagaagaagatactcacctgtag

SEQ ID NO: 155647 - DNA, 1581 bp, Artificial Sequence
  derived and/or modified sequence
atgcggtgcgccctggccctgagcgccctgctgctgctgctgagcacacctccccttctgccctccagcccaagtccaagtccttccccctcgcaaaatgcgacccagactacaaccgatagcagtaacaagaccgcgcctaccccggccagttccgtgacaatcatggcaaccgacacagcacaacagtctacagtgccaacctcaaaggccaacgagatactggcttcagtaaaggcaaccactctgggggtgagttccgatagcccaggaactacgactctggctcagcaggtctctgggccggttaatacgaccgtcgcaagggggggaggttcaggtaacccgactacgactattgagtccccaaaatcaaccaagtctgcggacactaccacagttgctactagtaccgctaccgcaaagccaaacacaacgtcgagccagaacggcgctgaggacactactaattccggcggtaaatcttctcattcagtgacaacggacctgacttcgaccaaggcagagcaccttacaaccccacaccccacctcaccgctctcaccaagacaaccaacatccacgcacccagtggcgacacccaccagctctgggcacgatcaccttatgaaaatctcctcgtccagcagcacagtcgctatcccaggctatactttcacaagccctgggatgactactactttgccgtcatctgtcatttcccagcgaacacaacaaaccagctctcaaatgcccgcgagtagtactgccccgtctagccaggagaccgtgcaacccacaagtcctgctactgccctacgcacgcccacgctgcccgaaaccatgagtagcagccccactgcggcaagcaccactcaccgctaccctaaaactcctagccctacagtcgcacatgaaagcaattgggtgaccccagcgggcgttggcacccagaccagggttgaggaggccctacggcaggctcttacacattccctcctgcccgcaggtggggcaagcgacgagaagctcatcagtttaatctgtcgggctgttaaagctaccttcaaccccgcccaggacaagtgcggcatccgactcgcctccgtgccgggatcacagacagttgtggtgaaggagattacgattcacaccaaactgccggctaaggacgtctacgaaaggctgaaggataaatgggatgaactgaaggaggctggggtcagtgacatgaaactaggagatcaaggtccacctgaggaggcagaagatagattctctatgccgctcattataacaattgtgtgcatggcctcgttcctgctgctggtggctgcactatatgggtgctgccaccagaggctcagtcaaagaaaggaccagcaaaggctgacagaggagctccaaactgtagaaaacgggtaccacgataatcctacattagaagtgatggaaacgagttccgaaatgcaggaaaagaaagtggtcagcctgaatggcgagctgggggattcatggattgtgccactagacaatcttaccaaagacgaccttgacgaggaagaggacacccacttatag

SEQ ID NO: 155648 - DNA, 1551 bp, Artificial Sequence
  derived and/or modified sequence
atgcggtgcgccctggccctgagcgccctgctgctgctgctgagcactagcccttccccctcccaaaacgcgacccagactacaacagattctagcaataagacagcacctacccccgcctccagcgtgacaattatggctaccgacactgcccagcagtccactgtaccaacgtcgaaagcaaacgagatacttgcctccgtcaaggccaccacactgggagtatcaagcgattcacccggtactactaccctcgctcagcaagtatcaggcccagttaatactactgttgccagaggaggaggcagcggcaatcctactacaactattgagtcacccaaaagtacgaaaagcgccgatactactactgtagcaacgtccaccgcaaccgctaaaccgaacacaacctcctcacagaacggggcggaggacacgaccaacagcggcggaaaatcctcacattcggtcactaccgatctgaccagcaccaaagccgaacacctcaccacgcctcaccccacatctccgctgtcccccaggcagccaaccagtactcacccagttgctactcctacttcatctggacacgatcaccttatgaagatatcaagctcctcgtcaacagtggcgattcccggctatacctttaccagccccggaatgaccacgacactgccatcttccgttatttcccagcgcacacaacagacctcaagccagatgcccgccagttccaccgctccatcctcccaagaaacggtccagccaactagtcccgccaccgcgctccgcactcctactctccctgaaaccatgagctcaagcccaactgccgcaagtactacccatagatacccaaagactccaagcccgacagtcgcccacgagtcaaactgggccaagtgtgaagacctggagacccagacccaatcagagaagcagctggttttgaaccttactggaaatacattgtgtgcaggcggggcatcagatgagaagctgatttctctcatttgcagggccgtcaaggccactttcaaccctgcccaggataagtgcgggattcggttggctagtgtgcctggctcccagaccgtggtagtgaaagagataacaatacatacgaagttacccgccaaggatgtctatgagcggctgaaggataagtgggacgagctcaaggaggctggagtgagcgacatgaaactgggggatcaggggcctccagaggaggcggaggatcggttttccatgcctctgatcataacgattgtgtgtatggccagcttcctcctgctggtggcagccctctacggctgttgtcatcaacgattatctcagaggaaagatcagcagaggctgacagaggagctgcagacagtggagaatgggtaccatgacaatccaacactggaggttatggagacttcgtccgaaatgcaggaaaagaaagtcgtctccctgaatggggaacttggtgactcttggattgtgcccttggataacctcacaaaggatgatctcgatgaggaagaagatacccacctctag

SEQ ID NO: 155649 - DNA, 2011 bp, Artificial Sequence
  derived and/or modified sequence
agacgccgcccaggacgcagccgccgccgccgccgctcctctgccactggctctgcgccccagcccggctctgctgcagcggcagggaggaagagccgccgcagcgcgactcgggagccccgggccacagcctggcctccggagccacccacaggcctccccgggcggcgcccacgctcctaccgcccggacgcgcggatcctccgccggcaccgcagccacctgctcccggcccagaggcgacgacacgatgcgctgcgcgctggcgctctcggcgctgctgctactgttgtcaacgccgccgctgctgccgtcgtcgccgtcgccgtcgccgtcgccctcccagaatgcaacccagactactacggactcatctaacaaaacagcaccgactccagcatccagtgtcaccatcatggctacagatacagcccagcagagcacagtccccacttccaaggccaacgaaatcttggcctcggtcaaggcgaccacccttggtgtatccagtgactcaccggggactacaaccctggctcagcaagtctcaggcccagtcaacactaccgtggctagaggaggcggctcaggcaaccctactaccaccatcgagagccccaagagcacaaaaagtgcagacaccactacagttgcaacctccacagccacagctaaacctaacaccacaagcagccagaatggagcagaagatacaacaaactctggggggaaaagcagccacagtgtgaccacagacctcacatccactaaggcagaacatctgacgacccctcaccctacaagtccacttagcccccgacaacccacttcgacgcatcctgtggccaccccaacaagctcgggacatgaccatcttatgaaaatttcaagcagttcaagcactgtggctatccctggctacaccttcacaagcccggggatgaccaccaccctaccgtcatcggttatctcgcaaagaactcaacagacctccagtcagatgccagccagctctacggccccttcctcccaggagacagtgcagcccacgagcccggcaacggcattgagaacacctaccctgccagagaccatgagctccagccccacagcagcatcaactacccaccgataccccaaaacaccttctcccactgtggctcatgagagtaactgggcaaagtgtgaggatcttgagacacagacacagagtgagaagcagctcgtcctgaacctcacaggaaacaccctctgtgcagggggcgcttcggatgagaaattgatctcactgatatgccgagcagtcaaagccaccttcaacccggcccaagataagtgcggcatacggctggcatctgttccaggaagtcagaccgtggtcgtcaaagaaatcactattcacactaagctccctgccaaggatgtgtacgagcggctgaaggacaaatgggatgaactaaaggaggcaggggtcagtgacatgaagctaggggaccaggggccaccggaggaggccgaggaccgcttcagcatgcccctcatcatcaccatcgtctgcatggcatcattcctgctcctcgtggcggccctctatggctgctgccaccagcgcctctcccagaggaaggaccagcagcggctaacagaggagctgcagacagtggagaatggttaccatgacaacccaacactggaagtgatggagacctcttctgagatgcaggagaagaaggtggtcagcctcaacggggagctgggggacagctggatcgtccctctggacaacctgaccaaggacgacctggatgaggaggaagacacacacctctagtccggtctgccggtggcctccagcagcaccacagagctccagaccaaccaccccaagtgccgtttggatggggaagggaaagactggggagggagagtgaactccgaggggtgtcccctcccaatccccccagggccttaatttttcccttttcaacctgaacaaatcacattctgtcca

SEQ ID NO: 155650 - DNA, 5886 bp, Artificial Sequence
  derived and/or modified sequence
agccgcgcagacgccgcccaggacgcagccgccgccgccgccgctcctctgccactggctctgcgccccagcccggctctgctgcagcggcagggaggaagagccgccgcagcgcgactcgggagccccgggccacagcctggcctccggagccacccacaggcctccccgggcggcgcccacgctcctaccgcccggacgcgcggatcctccgccggcaccgcagccacctgctcccggcccagaggcgacgacacgatgcgctgcgcgctggcgctctcggcgctgctgctactgttgtcaacgccgccgctgctgccgtcgtcgccgtcgccgtcgccgtcgccctcccagaatgcaacccagactactacggactcatctaacaaaacagcaccgactccagcatccagtgtcaccatcatggctacagatacagcccagcagagcacagtccccacttccaaggccaacgaaatcttggcctcggtcaaggcgaccacccttggtgtatccagtgactcaccggggactacaaccctggctcagcaagtctcaggcccagtcaacactaccgtggctagaggaggcggctcaggcaaccctactaccaccatcgagagccccaagagcacaaaaagtgcagacaccactacagttgcaacctccacagccacagctaaacctaacaccacaagcagccagaatggagcagaagatacaacaaactctggggggaaaagcagccacagtgtgaccacagacctcacatccactaaggcagaacatctgacgacccctcaccctacaagtccacttagcccccgacaacccacttcgacgcatcctgtggccaccccaacaagctcgggacatgaccatcttatgaaaatttcaagcagttcaagcactgtggctatccctggctacaccttcacaagcccggggatgaccaccaccctaccgtcatcggttatctcgcaaagaactcaacagacctccagtcagatgccagccagctctacggccccttcctcccaggagacagtgcagcccacgagcccggcaacggcattgagaacacctaccctgccagagaccatgagctccagccccacagcagcatcaactacccaccgataccccaaaacaccttctcccactgtggctcatgagagtaactgggtaactccagcaggggtgggaacccagactcgggtagaagaggctttaagacaagcacttacccattccctcctccctgcagggggcgcttcggatgagaaattgatctcactgatatgccgagcagtcaaagccaccttcaacccggcccaagataagtgcggcatacggctggcatctgttccaggaagtcagaccgtggtcgtcaaagaaatcactattcacactaagctccctgccaaggatgtgtacgagcggctgaaggacaaatgggatgaactaaaggaggcaggggtcagtgacatgaagctaggggaccaggggccaccggaggaggccgaggaccgcttcagcatgcccctcatcatcaccatcgtctgcatggcatcattcctgctcctcgtggcggccctctatggctgctgccaccagcgcctctcccagaggaaggaccagcagcggctaacagaggagctgcagacagtggagaatggttaccatgacaacccaacactggaagtgatggagacctcttctgagatgcaggagaagaaggtggtcagcctcaacggggagctgggggacagctggatcgtccctctggacaacctgaccaaggacgacctggatgaggaggaagacacacacctctagtccggtctgccggtggcctccagcagcaccacagagctccagaccaaccaccccaagtgccgtttggatggggaagggaaagactggggagggagagtgaactccgaggggtgtcccctcccaatccccccagggccttaatttttcccttttcaacctgaacaaatcacattctgtccagattcctcttgtaaaataacccactagtgcctgagctcagtgctgctggatgatgagggagatcaagaaaaagccacgtaagggactttatagatgaactagtggaatcccttcattctgcagtgagattgccgagacctgaagagggtaagtgacttgcccaaggtcagagccacttggtgacagagccaggatgagaacaaagattccatttgcaccatgccacactgctgtgttcacatgtgccttccgtccagagcagtcccgggcaggggtgaaactccagcaggtggctgggctggaaaggagggcagggctacatcctggctcggtgggatctgacgacctgaaagtccagctcccaagttttccttctcctaccccagcctcgtgtacccatcttcccaccctctatgttcttacccctccctacactcagtgtttgttcccacttactctgtcctggggcctctgggattagcacaggttattcataaccttgaaccccttgttctggattcggattttctcacatttgcttcgtgagatgggggcttaacccacacaggtctccgtgcgtgaaccaggtctgcttaggggacctgcgtgcaggtgaggagagaaggggacactcgagtccaggctggtatctcagggcagctgatgaggggtcagcaggaacactggcccattgcccctggcactccttgcagaggccacccacgatcttctttgggcttccatttccaccagggactaaaatctgctgtagctagtgagagcagcgtgttccttttgttgttcactgctcagctgatgggagtgattccctgagacccagtatgaaagagcagtggctgcaggagaggccttcccggggccccccatcagcgatgtgtcttcagagacaatccattaaagcagccaggaaggacaggctttcccctgtatatcataggaaactcagggacatttcaagttgctgagagttttgttatagttgttttctaacccagccctccactgccaaaggccaaaagctcagacagttggcagacgtccagttagctcatctcactcactctgattctcctgtgccacaggaaaagagggcctggaaagcgcagtgcatgctgggtgcatgaagggcagcctgggggacagactgttgtgggaacgtcccactgtcctggcctggagctaggccttgctgttcctcttctctgtgagcctagtggggctgctgcggttctcttgcagtttctggtggcatctcaggggaacacaaagctatgtctattccccaatataggacttttatgggctcggcagttagctgccatgtagaaggctcctaagcagtgggcatggtgaggtttcatctgattgagaagggggaatcctgtgtggaatgttgaactttcgccatggtctccatcgttctgggcgtaaattccctgggatcaagtaggaaaatgggcagaactgcttaggggaatgaaattgccatttttcgggtgaaacgccacacctccagggtcttaagagtcaggctccggctgtagtagctctgatgaaataggctatccactcgggatggcttactttttaaaagggtagggggaggggctggggaagatctgtcctgcaccatctgcctaattccttcctcacagtctgtagccatctgatatcctaggggaaaaggaaggccaggggttcacatagggccccagcgagtttcccaggagttagagggatgcgaggctaacaagttccaaaaacatctgccccgatgctctagtgtttggaggtgggcaggatggagaacagtgcctgtttgggggaaaacaggaaatcttgttaggcttgagtgaggtgtttgcttccttcttgcccagcgctgggttctctccacccagtaggttttctgttgtggtcccgtgggagaggccagactggattattcctcctttgctgatcctgggtcacacttcaccagccagggcttttgacggagacagcaaataggcctctgcaaatcaatcaaaggctgcaaccctatggcctcttggagacagatgatgactggcaaggactagagagcaggagtgcctggccaggtcggtcctgactctcctgactctccatcgctctgtccaaggagaacccggagaggctctgggctgattcagaggttactgctttatattcgtccaaactgtgttagtctaggcttaggacagcttcagaatctgacaccttgccttgctcttgccaccaggacacctatgtcaacaggccaaacagccatgcatctataaaggtcatcatcttctgccacctttactgggttctaaatgctctctgataattcagagagcattgggtctgggaagaggtaagaggaacactagaagctcagcatgacttaaacaggttgtagcaaagacagtttatcatcagctctttcagtggtaaactgtggtttccccaagctgcacaggaggccagaaaccacaagtatgatgactaggaagcctactgtcatgagagtggggagacaggcagcaaagcttatgaaggaggtacagaatattctttgcgttgtaagacagaatacgggtttaatctagtctaggcaccagatttttttcccgcttgataaggaaagctagcagaaagtttatttaaaccacttcttgagctttatcttttttgacaatatactggagaaactttgaagaacaagttcaaactgatacatatacacatatttttttgataatgtaaatacagtgaccatgttaacctaccctgcactgctttaagtgaacatactttgaaaaagcattatgttagctgagtgatggccaagttttttctctggacaggaatgtaaatgtcttactggaaatgacaagtttttgcttgatttttttttttaaacaaaaaatgaaatataacaagacaaacttatgataaagtatttgtcttgtagatcaggtgttttgttttgtttttttaattttaaaatgcaaccctgccccctccccagcaaagtcacagctccatttcagtaaaggttggagtcaatatgctctggttggcaggcaaccctgtagtcatggagaaaggtatttcaagatctagtccaatctttttctagagaaaaagataatctgaagctcacaaagatgaagtgacttcctcaaaatcacatggttcaggacagaaacaagattaaaacctggatccacagactgtgcgcctcagaaggaataatcggtaaattaagaattgctactcgaaggtgccagaatgacacaaaggacagaattcctttcccagttgttaccctagcaaggctagggagggcatgaacacaaacataagaactggtcttctacactttctctgaatcatttaggtttaagatgtaagtgaacaattctttctttctgccaagaaacaaagttttggatgagcttttatatatggaacttactccaacaggactgagggaccaaggaaacatgatgggggaggcagagagggcaagagtaaaactgtagcatagcttttgtcacggtcactagctgatccctcaggtctgctgcaaacacagcatggaggacacagatgactctttggtgttggtctttttgtctgcagtgaatgttcaacagtttgcccaggaactgggggatcatatatgtcttagtggacaggggtctgaagtacactggaatttactgagaaacttgtttgtaaaaactatagttaataattattgcattttcttacaaaaatatattttggaaaattgtatactgtcaattaaagtgtttttgtgtaaactggttc

SEQ ID NO: 155651 - DNA, 2078 bp, Artificial Sequence
  derived and/or modified sequence
agccgcgcagacgccgcccaggacgcagccgccgccgccgccgctcctctgccactggctctgcgccccagcccggctctgctgcagcggcagggaggaagagccgccgcagcgcgactcgggagccccgggccacagcctggcctccggagccacccacaggcctccccgggcggcgcccacgctcctaccgcccggacgcgcggatcctccgccggcaccgcagccacctgctcccggcccagaggcgacgacacgatgcgctgcgcgctggcgctctcggcgctgctgctactgttgtcaacgtcgccgtcgccctcccagaatgcaacccagactactacggactcatctaacaaaacagcaccgactccagcatccagtgtcaccatcatggctacagatacagcccagcagagcacagtccccacttccaaggccaacgaaatcttggcctcggtcaaggcgaccacccttggtgtatccagtgactcaccggggactacaaccctggctcagcaagtctcaggcccagtcaacactaccgtggctagaggaggcggctcaggcaaccctactaccaccatcgagagccccaagagcacaaaaagtgcagacaccactacagttgcaacctccacagccacagctaaacctaacaccacaagcagccagaatggagcagaagatacaacaaactctggggggaaaagcagccacagtgtgaccacagacctcacatccactaaggcagaacatctgacgacccctcaccctacaagtccacttagcccccgacaacccacttcgacgcatcctgtggccaccccaacaagctcgggacatgaccatcttatgaaaatttcaagcagttcaagcactgtggctatccctggctacaccttcacaagcccggggatgaccaccaccctaccgtcatcggttatctcgcaaagaactcaacagacctccagtcagatgccagccagctctacggccccttcctcccaggagacagtgcagcccacgagcccggcaacggcattgagaacacctaccctgccagagaccatgagctccagccccacagcagcatcaactacccaccgataccccaaaacaccttctcccactgtggctcatgagagtaactgggcaaagtgtgaggatcttgagacacagacacagagtgagaagcagctcgtcctgaacctcacaggaaacaccctctgtgcagggggcgcttcggatgagaaattgatctcactgatatgccgagcagtcaaagccaccttcaacccggcccaagataagtgcggcatacggctggcatctgttccaggaagtcagaccgtggtcgtcaaagaaatcactattcacactaagctccctgccaaggatgtgtacgagcggctgaaggacaaatgggatgaactaaaggaggcaggggtcagtgacatgaagctaggggaccaggggccaccggaggaggccgaggaccgcttcagcatgcccctcatcatcaccatcgtctgcatggcatcattcctgctcctcgtggcggccctctatggctgctgccaccagcgcctctcccagaggaaggaccagcagcggctaacagaggagctgcagacagtggagaatggttaccatgacaacccaacactggaagtgatggagacctcttctgagatgcaggagaagaaggtggtcagcctcaacggggagctgggggacagctggatcgtccctctggacaacctgaccaaggacgacctggatgaggaggaagacacacacctctagtccggtctgccggtggcctccagcagcaccacagagctccagaccaaccaccccaagtgccgtttggatggggaagggaaagactggggagggagagtgaactccgaggggtgtcccctcccaatccccccagggccttaatttttcccttttcaacctgaacaaatcacattctgtccagattcctcttgtaaaataacccactagtgcctgagctcagtgctgctggatgatgagggagatcaagaaaaagccacgtaagggacttt

SEQ ID NO: 155652 - DNA, 1581 bp, Artificial Sequence
  derived and/or modified sequence
atgaggtgcgctctagcgttgtcggctttgcttctcctcttatccaccccacccctgctgccgtcatcccctagtcctagccctagcccttcacagaacgctacgcagaccactactgattcaagtaacaagacagccccaactcccgcaagttctgtgaccattatggccacggataccgcccaacagagcaccgtcccaacttctaaggcgaacgagattttggctagtgtgaaagctaccactctgggcgtgagctccgattcccccggtaccaccaccctggcccagcaggttagcggccctgtgaatactacagtcgcccgaggaggaggatcagggaaccctactaccaccatagagtcccccaagtctacgaaaagcgcggatacgactactgtggccacttctaccgccacagctaagcccaatacaacgagctcccagaatggagccgaggacaccactaacagtggcggaaaatcttctcattcagtgacaacggacctgacatctaccaaagccgaacacctgacaactccgcaccctaccagtcccttgtcacctcgccagcctactagcactcaccccgtcgctaccccgacttccagcggccacgaccacctgatgaagatcagctcttcctccagtacagtggccatccctggctatacctttaccagccctggcatgactacaactctgccttcttctgtcatcagccagcgaacccagcagacaagctcccagatgccggcatcttccaccgccccaagtagccaggagacggtgcaacccacgagtcccgctacagcattgcgcacccctacactgcccgagaccatgagctcctctccaactgccgcatctacaacccaccgctatcctaagacaccgtctcctaccgttgctcatgaatccaattgggcgaaatgcgaggacctggagacgcagactcaaagtgagaaacagcttgtgctgaatttaaccggcaacacactttgcgcaggaggagcgagcgatgaaaaactcatttcgctgatctgccgggctgtgaaggcaacatttaatcctgcccaggataagtgtggaatcaggctcgcctctgtgcccggtagccaaaccgtggtggtcaaagaaattaccatacacaccaagcttcccgctaaggacgtctatgagcgcttgaaagataagtgggatgaactgaaggaagcgggagtctcagacatgaaactgggcgaccaaggccctcccgaagaggcggaggatcgattttctatgcctctaattatcacaatcgtatgcatggcgtccttcctgcttctagtggcggcattatacggctgttgccatcaacggctaagtcagagaaaagaccagcagcgactgaccgaggagttgcagactgtggaaaatggctaccatgacaaccccactctggaggtgatggaaactagctctgagatgcaagaaaagaaagtggtgagcttgaatggcgagctgggagactcctggatagtgccgttggataacttgacaaaagatgacctagatgaggaagaggacacccatctctag

SEQ ID NO: 155653 - DNA, 1581 bp, Artificial Sequence
  derived and/or modified sequence
atgaggtgcgccctcgcactgtcggctttacttctgctgctgtcaacacctcccttgctcccatcttcaccaagtcctagtccaagccctagccaaaatgcaacgcagacaaccacagatagttccaacaagaccgcaccaacccctgcttcaagcgttaccatcatggccactgacaccgcccagcagagcaccgtcccaactagcaaagctaacgagatcctggcctccgttaaagcaactacactcggggtctcaagcgattcaccaggcacaaccacactggcccagcaggtgtcaggccctgtgaatacaacggttgcgagagggggtgggtccggcaaccctaccactacgatagagagccctaaaagcacaaaatctgccgacacaaccaccgtcgccacttccaccgccacggcaaagcctaataccacatcctcccagaatggggctgaagatacgaccaattcaggaggcaaatcctctcatagtgtcaccaccgacttgactagcactaaagctgaacatctgactaccccacaccccaccagccccctgagccctcggcagcctacctctacgcaccctgtggcaacccccacgagctcaggtcatgaccacctgatgaagatctctagtagctcttcaactgtcgcaatcccaggttacaccttcacctccccaggcatgaccaccaccctgccatcatccgtgatcagccaacgaacccagcagacttcatcgcagatgcccgctagttctaccgccccaagtagtcaggaaaccgttcagcctacatctcccgctacagctttgcgtacacctacactgcctgagaccatgtcttcgagccccacagcagcctccaccactcatcgatacccaaagactccatcaccaacagttgcacacgagagtaactgggttacccccgctggggtcggaacgcagactagagtggaggaggcgctgcgacaggcgctgactcactccctcttacctgctggaggggcatccgacgagaagctgatatctctgatctgtcgggcagttaaagccaccttcaatcccgcacaggacaaatgtggaattcgacttgcttctgtcccaggaagtcagaccgtggtggtaaaggagatcacgatccacacgaagttgccggcaaaggacgtatatgagagactgaaagacaagtgggatgagttaaaagaagccggagtatctgacatgaaactgggagaccaggggcctccagaggaagcggaggatcggttctccatgcccttgataattactattgtctgcatggccagcttcctgttactggtggcggcactatacggctgttgccatcagaggctttctcagcggaaggaccagcagcggctgacggaagagctacagacagttgagaacggctaccatgataaccccactctcgaggtcatggagacctcctcagagatgcaagaaaagaaggtggtctccttgaacggcgaattaggggactcctggatcgtcccacttgataacttgaccaaggacgatctagacgaagaggaggacactcacctctag

SEQ ID NO: 155654 - DNA, 1551 bp, Artificial Sequence
  derived and/or modified sequence
atgaggtgcgcactggcactctctgccctgcttctgttgctttcaacttccccatctccatctcagaacgccactcagactactacagattcatcgaataagaccgctcctactcctgcgtcctctgtgaccatcatggccaccgacaccgcccagcagtcaacagtccccacctcaaaggctaacgaaattttggcctctgtcaaagccacgactctgggtgttagttcagattcccctggcaccaccactctggctcaacaggtcagcggtccagtgaacactaccgtcgccagggggggaggatccggcaatccaacaaccactatcgaatcgcctaaatccacaaagtcagcagacactacaacagtggcgaccagcactgccacagccaaaccaaataccacatcttcccagaatggcgctgaggatacaaccaattcggggggtaaaagctctcacagtgtaactacggacctcacaagtaccaaggctgaacaccttaccaccccccatcctaccagccctctgtctcctcggcagcccaccagcacacacccagttgcaacaccgacaagttcaggccacgaccacctcatgaagatcagttcaagttccagcacagtcgcaataccaggctacaccttcaccagtccgggaatgactacgacactgccttcttccgtgatttcccagcgtacacagcagacctcctcacagatgcccgctagcagtaccgcccctagcagccaggaaaccgttcaaccaacttctcccgcaacagctttgcgcacgccaacactgcccgaaaccatgtccagttcaccgacagctgcttctacaactcacagatatcccaagacacccagtccaacagtcgcccacgagtctaactgggccaaatgtgaggatctagaaacccagactcagtccgagaagcaacttgtgctaaatctaacagggaacaccttatgcgcgggaggcgcttcggacgagaaactgatatcattgatttgcagagccgtgaaagcaaccttcaatcctgcccaggataagtgtgggattcgactggcaagtgtgcccggaagccagacggtggtcgtgaaggagatcaccattcacaccaaactgccagcaaaagacgtgtacgaacgcctaaaggacaaatgggacgagctgaaggaggccggagtgtccgacatgaaacttggggaccaagggcctccggaagaggctgaggaccgctttagtatgccccttatcatcaccatcgtctgcatggcatccttcctcttgctggtggcagccctgtatggatgctgtcaccagcggttgtcccagcgaaaggatcagcagagactgactgaggagttacagacggtcgaaaatggttaccatgataaccccaccctcgaggtgatggagacatccagtgagatgcaagaaaagaaggtcgttagtctaaacggcgagctgggcgatagctggatagttcctctcgacaatctcaccaaggacgatcttgacgaagaagaggacacacacctctag

SEQ ID NO: 155655 - DNA, 1581 bp, Artificial Sequence
  derived and/or modified sequence
atgagatgcgccctggccctgagcgccctgctgctgctgctgagcaccccccccctgctgcccagcagccccagccccagccccagccccagccagaacgccacccagaccaccaccgacagcagcaacaagaccgcccccacccccgccagcagcgtgaccatcatggccaccgacaccgcccagcagagcaccgtgcccaccagcaaggccaacgagatcctggccagcgtgaaggccaccaccctgggcgtgagcagcgacagccccggcaccaccaccctggcccagcaggtgagcggccccgtgaacaccaccgtggccagaggcggcggcagcggcaaccccaccaccaccatcgagagccccaagagcaccaagagcgccgacaccaccaccgtggccaccagcaccgccaccgccaagcccaacaccaccagcagccagaacggcgccgaggacaccaccaacagcggcggcaagagcagccacagcgtgaccaccgacctgaccagcaccaaggccgagcacctgaccaccccccaccccaccagccccctgagccccagacagcccaccagcacccaccccgtggccacccccaccagcagcggccacgaccacctgatgaagatcagcagcagcagcagcaccgtggccatccccggctacaccttcaccagccccggcatgaccaccaccctgcccagcagcgtgatcagccagagaacccagcagaccagcagccagatgcccgccagcagcaccgcccccagcagccaggagaccgtgcagcccaccagccccgccaccgccctgagaacccccaccctgcccgagaccatgagcagcagccccaccgccgccagcaccacccacagataccccaagacccccagccccaccgtggcccacgagagcaactgggccaagtgcgaggacctggagacccagacccagagcgagaagcagctggtgctgaacctgaccggcaacaccctgtgcgccggcggcgccagcgacgagaagctgatcagcctgatctgcagagccgtgaaggccaccttcaaccccgcccaggacaagtgcggcatcagactggccagcgtgcccggcagccagaccgtggtggtgaaggagatcaccatccacaccaagctgcccgccaaggacgtgtacgagagactgaaggacaagtgggacgagctgaaggaggccggcgtgagcgacatgaagctgggcgaccagggcccccccgaggaggccgaggacagattcagcatgcccctgatcatcaccatcgtgtgcatggccagcttcctgctgctggtggccgccctgtacggctgctgccaccagagactgagccagagaaaggaccagcagagactgaccgaggagctgcagaccgtggagaacggctaccacgacaaccccaccctggaggtgatggagaccagcagcgagatgcaggagaagaaggtggtgagcctgaacggcgagctgggcgacagctggatcgtgcccctggacaacctgaccaaggacgacctggacgaggaggaggacacccacctgtag

SEQ ID NO: 155656 - DNA, 1581 bp, Artificial Sequence
  derived and/or modified sequence
atgagatgcgccctggccctgagcgccctgctgctgctgctgagcaccccccccctgctgcccagcagccccagccccagccccagccccagccagaacgccacccagaccaccaccgacagcagcaacaagaccgcccccacccccgccagcagcgtgaccatcatggccaccgacaccgcccagcagagcaccgtgcccaccagcaaggccaacgagatcctggccagcgtgaaggccaccaccctgggcgtgagcagcgacagccccggcaccaccaccctggcccagcaggtgagcggccccgtgaacaccaccgtggccagaggcggcggcagcggcaaccccaccaccaccatcgagagccccaagagcaccaagagcgccgacaccaccaccgtggccaccagcaccgccaccgccaagcccaacaccaccagcagccagaacggcgccgaggacaccaccaacagcggcggcaagagcagccacagcgtgaccaccgacctgaccagcaccaaggccgagcacctgaccaccccccaccccaccagccccctgagccccagacagcccaccagcacccaccccgtggccacccccaccagcagcggccacgaccacctgatgaagatcagcagcagcagcagcaccgtggccatccccggctacaccttcaccagccccggcatgaccaccaccctgcccagcagcgtgatcagccagagaacccagcagaccagcagccagatgcccgccagcagcaccgcccccagcagccaggagaccgtgcagcccaccagccccgccaccgccctgagaacccccaccctgcccgagaccatgagcagcagccccaccgccgccagcaccacccacagataccccaagacccccagccccaccgtggcccacgagagcaactgggtgacccccgccggcgtgggcacccagaccagagtggaggaggccctgagacaggccctgacccacagcctgctgcccgccggcggcgccagcgacgagaagctgatcagcctgatctgcagagccgtgaaggccaccttcaaccccgcccaggacaagtgcggcatcagactggccagcgtgcccggcagccagaccgtggtggtgaaggagatcaccatccacaccaagctgcccgccaaggacgtgtacgagagactgaaggacaagtgggacgagctgaaggaggccggcgtgagcgacatgaagctgggcgaccagggcccccccgaggaggccgaggacagattcagcatgcccctgatcatcaccatcgtgtgcatggccagcttcctgctgctggtggccgccctgtacggctgctgccaccagagactgagccagagaaaggaccagcagagactgaccgaggagctgcagaccgtggagaacggctaccacgacaaccccaccctggaggtgatggagaccagcagcgagatgcaggagaagaaggtggtgagcctgaacggcgagctgggcgacagctggatcgtgcccctggacaacctgaccaaggacgacctggacgaggaggaggacacccacctgtag

SEQ ID NO: 155657 - DNA, 1551 bp, Artificial Sequence
  derived and/or modified sequence
atgagatgcgccctggccctgagcgccctgctgctgctgctgagcaccagccccagccccagccagaacgccacccagaccaccaccgacagcagcaacaagaccgcccccacccccgccagcagcgtgaccatcatggccaccgacaccgcccagcagagcaccgtgcccaccagcaaggccaacgagatcctggccagcgtgaaggccaccaccctgggcgtgagcagcgacagccccggcaccaccaccctggcccagcaggtgagcggccccgtgaacaccaccgtggccagaggcggcggcagcggcaaccccaccaccaccatcgagagccccaagagcaccaagagcgccgacaccaccaccgtggccaccagcaccgccaccgccaagcccaacaccaccagcagccagaacggcgccgaggacaccaccaacagcggcggcaagagcagccacagcgtgaccaccgacctgaccagcaccaaggccgagcacctgaccaccccccaccccaccagccccctgagccccagacagcccaccagcacccaccccgtggccacccccaccagcagcggccacgaccacctgatgaagatcagcagcagcagcagcaccgtggccatccccggctacaccttcaccagccccggcatgaccaccaccctgcccagcagcgtgatcagccagagaacccagcagaccagcagccagatgcccgccagcagcaccgcccccagcagccaggagaccgtgcagcccaccagccccgccaccgccctgagaacccccaccctgcccgagaccatgagcagcagccccaccgccgccagcaccacccacagataccccaagacccccagccccaccgtggcccacgagagcaactgggccaagtgcgaggacctggagacccagacccagagcgagaagcagctggtgctgaacctgaccggcaacaccctgtgcgccggcggcgccagcgacgagaagctgatcagcctgatctgcagagccgtgaaggccaccttcaaccccgcccaggacaagtgcggcatcagactggccagcgtgcccggcagccagaccgtggtggtgaaggagatcaccatccacaccaagctgcccgccaaggacgtgtacgagagactgaaggacaagtgggacgagctgaaggaggccggcgtgagcgacatgaagctgggcgaccagggcccccccgaggaggccgaggacagattcagcatgcccctgatcatcaccatcgtgtgcatggccagcttcctgctgctggtggccgccctgtacggctgctgccaccagagactgagccagagaaaggaccagcagagactgaccgaggagctgcagaccgtggagaacggctaccacgacaaccccaccctggaggtgatggagaccagcagcgagatgcaggagaagaaggtggtgagcctgaacggcgagctgggcgacagctggatcgtgcccctggacaacctgaccaaggacgacctggacgaggaggaggacacccacctgtag

SEQ ID NO: 155658 - protein, 317 aa, Artificial Sequence
  derived and/or modified sequence
MSCTRMIQVLDPRPLTSSVMPVDVAMRLCLAHSPPVKSFLGPYDEFQRRHFVNKLKPLKSCLNIKHKAKSQNDWKCSHNQAKKRVVFADSKGLSLTAIHVFSDLPEEPAWDLQFDLLDLNDISSALKHHEEKNLILDFPQPSTDYLSFRSHFQKNFVCLENCSLQERTVTGTVKVKNVSFEKKVQIRITFDSWKNYTDVDCVYMKNVYGGTDSDTFSFAIDLPPVIPTEQKIEFCISYHANGQVFWDNNDGQNYRIVHVQWKPDGVQTQMAPQDCAFHQTSPKTELESTIFGSPRLASGLFPEWQSWGRMENLASYR

SEQ ID NO: 155659 - protein, 297 aa, Artificial Sequence
  derived and/or modified sequence
MSCTRMIQVLDPRPLTSSVMPVDVAMRLCLAHSPPVKSFLGPYDEFQRRHFVNKLKPLKSCLNIKHKAKSQNDWKCSHNQAKKRVVFADSKGLSLTAIHVFSDLPEEPAWDLQFDLLDLNDISSALSFRSHFQKNFVCLENCSLQERTVTGTVKVKNVSFEKKVQIRITFDSWKNYTDVDCVYMKNVYGGTDSDTFSFAIDLPPVIPTEQKIEFCISYHANGQVFWDNNDGQNYRIVHVQWKPDGVQTQMAPQDCAFHQTSPKTELESTIFGSPRLASGLFPEWQSWGRMENLASYR

SEQ ID NO: 155660 - protein, 199 aa, Artificial Sequence
  derived and/or modified sequence
MSSPTSPLKHHEEKNLILDFPQPSTDYLSFRSHFQKNFVCLENCSLQERTVTGTVKVKNVSFEKKVQIRITFDSWKNYTDVDCVYMKNVYGGTDSDTFSFAIDLPPVIPTEQKIEFCISYHANGQVFWDNNDGQNYRIVHVQWKPDGVQTQMAPQDCAFHQTSPKTELESTIFGSPRLASGLFPEWQSWGRMENLASYR

SEQ ID NO: 155661 - DNA, 954 bp, Artificial Sequence
  derived and/or modified sequence
atgtcttgtacaagaatgattcaggtactcgaccctcggccactgacatccagcgtgatgcccgtcgacgtggcgatgcggttgtgtttggcccactccccacctgtaaaaagttttcttgggccctatgacgaattccagagaaggcactttgtgaacaagctgaagcccctgaagagctgtctgaacatcaagcacaaggccaaaagccagaatgactggaagtgctcccacaaccaggcgaaaaagagggtggtgtttgcagattctaaaggactaagtctaaccgcgatacacgtgtttagtgacctccctgaggaacctgcatgggacctacagtttgacctcctcgatctcaatgacatctccagcgcgctgaaacaccatgaggaaaaaaacctcatcctcgattttccacaacccagcactgactacttatcattcagaagtcattttcaaaagaattttgtctgtctcgagaactgtagtttgcaggagcgaactgtcaccggcacggtcaaggtgaaaaatgtatcattcgaaaagaaagtgcagatccgtatcacatttgatagctggaagaactacaccgatgtagattgtgtctatatgaagaatgtgtacggagggaccgactctgacacctttagctttgccattgatcttccaccagtgatacccacagagcagaagatcgagttttgcatctcctaccacgctaacgggcaggtgttttgggacaacaacgacggccagaactataggatagtccacgtacagtggaaacccgacggggtccaaacgcagatggcacctcaggactgcgcctttcatcagacatctccaaaaactgaattggaaagcacaattttcgggtcacccagactggcatctggcctgtttcccgagtggcagagctgggggaggatggaaaaccttgctagctacaggtag

SEQ ID NO: 155662 - DNA, 894 bp, Artificial Sequence
  derived and/or modified sequence
atgagctgcacaagaatgatccaggtcctggacccgcgtccgctgaccagctctgtgatgccggtggatgtggcgatgagactttgcttagcacactcccccccagtgaagtcatttttgggcccctatgacgagtttcagagacgacattttgtgaataaacttaaaccacttaagtcctgcctcaatataaagcataaagcgaaatcccagaatgattggaagtgttcacataaccaggcgaagaaacgggttgtgtttgcggactctaagggactgtccctgacggccatacacgtgttcagcgatctgcccgaagaacccgcatgggatctacagtttgacctgctggatttgaacgatataagctctgctttgtcgttccggagccatttccagaaaaactttgtatgtcttgagaactgttcactgcaggaaaggaccgtcactggtaccgttaaagtaaaaaatgtgagtttcgaaaagaaggtacagattagaatcacattcgattcctggaaaaactacacagatgtagactgcgtttatatgaagaatgtctacggtgggactgacagcgacactttcagcttcgccatagacctccctcctgtgatccctactgagcagaagatcgagttttgtatctcctatcacgcgaacggccaggtcttctgggataataacgacggtcagaattaccggattgttcatgtgcagtggaaacccgacggcgtgcagactcagatggctccacaggactgtgccttccaccagacatctcccaagaccgagctggagtcaacaatctttggatcaccccggctggctagtggcttatttcccgagtggcagagctggggtaggatggaaaacctcgcttcctatcggtag

SEQ ID NO: 155663 - DNA, 600 bp, Artificial Sequence
  derived and/or modified sequence
atgagttcccctacatcccccttgaagcatcacgaggagaaaaaccttattctcgatttccctcagcctagtactgactatctttcattccgctcccactttcaaaagaattttgtgtgtctggagaactgctcattgcaggagagaaccgtgaccggcactgtgaaggtgaaaaatgtgtccttcgaaaaaaaggtccaaattaggattaccttcgacagttggaagaattacactgatgtggactgtgtctacatgaagaacgtttacggagggaccgattccgataccttttcttttgctatcgacctaccacccgtaatcccgacggagcagaagatcgagttttgcatttcctaccatgccaacggtcaagttttttgggacaataacgacggtcaaaattatcgcattgtgcatgttcaatggaagccggacggcgtgcagacccaaatggcaccacaggattgcgccttccaccagacaagccccaagactgagctggagtccaccattttcggcagtccacgattggcctctggactgtttccggagtggcagtcctggggaaggatggaaaacctggcgtcatatcgctag

SEQ ID NO: 155664 - DNA, 954 bp, Artificial Sequence
  derived and/or modified sequence
atgagctgcaccaggatgatccaggtgctggacccccggcccctgaccagctctgtgatgcctgtggatgtggccatgaggctgtgcctggcccacagcccccctgtgaagagcttcctgggcccctatgatgagttccagaggaggcactttgtgaacaagctgaagcccctgaagagctgcctgaacatcaagcacaaggccaagagccagaatgactggaagtgcagccacaaccaggccaagaagagggtggtgtttgctgacagcaagggcctgagcctgacagccatccacgtgttcagtgacctgcctgaggagcccgcctgggacctgcagtttgacctgctggacctgaatgacatcagcagcgccctgaagcaccacgaggagaagaacctgatcctggacttcccccagcccagcacagactacctgtccttccgcagccacttccagaagaactttgtgtgcctggagaactgcagcctgcaggagaggacagtgacaggcaccgtgaaggtgaagaatgtgtcctttgagaagaaggtgcagatccgcatcacctttgacagctggaagaactacacagatgtggactgtgtgtacatgaagaatgtgtatggaggaacagacagcgacaccttctcctttgccatcgacctgccccctgtgatccccacagagcagaagattgagttctgcatctcctaccacgccaacggccaggtgttctgggacaacaatgatggccagaactaccgcatcgtgcacgtgcagtggaagccagatggagtgcagacccagatggccccccaggactgtgccttccaccagaccagccccaagacagagctggagagcaccatcttcggcagcccccggctggccagcggcctcttccctgagtggcagagctggggccgcatggagaacctggccagctacagatag

SEQ ID NO: 155665 - DNA, 894 bp, Artificial Sequence
  derived and/or modified sequence
atgagctgcaccaggatgatccaggtgctggacccccggcccctgaccagctctgtgatgcctgtggatgtggccatgaggctgtgcctggcccacagcccccctgtgaagagcttcctgggcccctatgatgagttccagaggaggcactttgtgaacaagctgaagcccctgaagagctgcctgaacatcaagcacaaggccaagagccagaatgactggaagtgcagccacaaccaggccaagaagagggtggtgtttgctgacagcaagggcctgagcctgacagccatccacgtgttcagtgacctgcctgaggagcccgcctgggacctgcagtttgacctgctggacctgaatgacatcagcagcgccctgtccttccgcagccacttccagaagaactttgtgtgcctggagaactgcagcctgcaggagaggacagtgacaggcaccgtgaaggtgaagaatgtgtcctttgagaagaaggtgcagatccgcatcacctttgacagctggaagaactacacagatgtggactgtgtgtacatgaagaatgtgtatggaggaacagacagcgacaccttctcctttgccatcgacctgccccctgtgatccccacagagcagaagattgagttctgcatctcctaccacgccaacggccaggtgttctgggacaacaatgatggccagaactaccgcatcgtgcacgtgcagtggaagccagatggagtgcagacccagatggccccccaggactgtgccttccaccagaccagccccaagacagagctggagagcaccatcttcggcagcccccggctggccagcggcctcttccctgagtggcagagctggggccgcatggagaacctggccagctacagatag

SEQ ID NO: 155666 - DNA, 600 bp, Artificial Sequence
  derived and/or modified sequence
atgagcagccccaccagccccctgaagcaccacgaggagaagaacctgatcctggacttcccccagcccagcacagactacctgtccttccgcagccacttccagaagaactttgtgtgcctggagaactgcagcctgcaggagaggacagtgacaggcaccgtgaaggtgaagaatgtgtcctttgagaagaaggtgcagatccgcatcacctttgacagctggaagaactacacagatgtggactgtgtgtacatgaagaatgtgtatggaggaacagacagcgacaccttctcctttgccatcgacctgccccctgtgatccccacagagcagaagattgagttctgcatctcctaccacgccaacggccaggtgttctgggacaacaatgatggccagaactaccgcatcgtgcacgtgcagtggaagccagatggagtgcagacccagatggccccccaggactgtgccttccaccagaccagccccaagacagagctggagagcaccatcttcggcagcccccggctggccagcggcctcttccctgagtggcagagctggggccgcatggagaacctggccagctacagatag

SEQ ID NO: 155667 - DNA, 954 bp, Artificial Sequence
  derived and/or modified sequence
atgagctgcacccggatgatccaggtgctggacccccggcccctgaccagcagcgtgatgccagtggacgtagcaatgcggctatgtctggctcactcaccccccgttaagagttttctgggaccatatgatgagtttcagagaagacattttgtcaacaagttaaagccactcaagtcttgcctcaacattaagcataaagccaaaagccagaatgattggaagtgctcccacaaccaggctaaaaaaagagtagtgttcgccgatagtaaggggttatcactgacagccatacacgttttcagcgacctgccggaggagcccgcgtgggatttacagtttgacttactggatttgaacgacatttcgtctgccctgaaacaccatgaggaaaaaaatttgatcctggacttcccacagccatctacggactatctaagcttccgtagccacttccagaaaaatttcgtgtgtctcgagaattgtagcctgcaggaacgaacagtgactggtacagtcaaagtgaagaacgtgtcctttgagaagaaggtgcaaattcggattacgtttgatagttggaagaattacaccgatgtggactgcgtatacatgaagaatgtgtacggaggtactgatagcgacactttttcattcgctattgatttacccccagtgattccaaccgaacagaagatcgagttctgcatcagctaccacgccaatgggcaggtgttttgggataataatgacggacagaattaccgtatcgtccacgttcagtggaagcccgacggcgtgcagactcaaatggcaccccaggattgcgccttccaccagacttcgccaaaaactgagctcgagtcaaccatcttcggatcacccaggcttgcttctgggctgtttcctgagtggcagtcctggggtcgcatggagaatctggcctcgtacaggtag

SEQ ID NO: 155668 - DNA, 894 bp, Artificial Sequence
  derived and/or modified sequence
atgagctgcacccggatgatccaggtgctggacccccggcccctgacgagcagcgtcatgcctgtcgacgtcgccatgcggttgtgcctagcccactctcctccagtgaagtcatttctcggaccctatgatgaattccagaggaggcacttcgtcaataagctaaaacctctgaagtcgtgcctgaacatcaaacacaaagcaaaaagtcagaacgactggaaatgctcccataatcaagctaagaaacgagtggtctttgctgacagtaaaggtctcagtcttaccgccatccacgtttttagtgacttgcccgaggaacccgcgtgggacctccagttcgaccttctcgacctaaacgacattagctccgccctgagcttccggtcccactttcagaagaactttgtttgcttggaaaactgttctctgcaggagcggacagttactggaacagtgaaggtcaagaatgtgtccttcgagaaaaaggtgcaaatacgcattacttttgacagctggaagaactacacggacgttgactgtgtgtacatgaaaaacgtatacggcggaactgatagtgacacattttcatttgccattgatcttccaccagtcatcccgacagagcagaagatcgagttttgcattagctaccatgccaacggtcaggtattctgggataacaatgatggccagaactaccgtattgtgcacgttcaatggaaacctgatggggtacagactcagatggctccgcaagactgcgcctttcaccaaacttcacctaaaacagaactggagtcaactatttttggtagtccccggctggcttcgggattgttccctgaatggcagtcttggggaagaatggagaaccttgcctcctaccggtag

SEQ ID NO: 155669 - DNA, 600 bp, Artificial Sequence
  derived and/or modified sequence
atgagcagccccaccagccccctgaagcaccacgaggagaagaaccttatactggactttccacagccatcgaccgattacctgagcttccgcagccattttcagaagaactttgtctgcctggaaaactgttcattgcaggaacgaacggtcactggcaccgtgaaggtgaaaaacgtgtcatttgagaaaaaggtgcagatccggatcactttcgattcatggaagaattacaccgacgtcgattgcgtgtatatgaaaaacgtgtatggtggcacggactctgataccttcagttttgcgatcgacttgcctcccgtaattccaaccgagcagaaaatcgagttctgcatcagttatcatgccaacggtcaggttttttgggataacaacgatggccaaaactacaggatcgtacacgtgcagtggaagccagacggagtccagactcagatggccccacaggattgtgcttttcaccagaccagccctaaaacagagctggagtctaccatcttcggctcccctcgactggcctcaggcctcttccccgaatggcagtcatggggccgaatggaaaacttggcaagctatcggtag

SEQ ID NO: 155670 - DNA, 954 bp, Artificial Sequence
  derived and/or modified sequence
atgtcttgtacacgcatgatccaggttttggaccctaggcctttaacctcatcagtgatgcctgtggacgttgcgatgaggctatgtctggcgcacagcccgcctgtgaagtcatttttaggtccctatgatgaattccagagacgacatttcgtgaataaactcaagccactgaagagctgtctgaatataaagcataaagccaagagccagaacgattggaaatgtagccataatcaggcgaagaagcgagtggtgttcgccgattccaagggtttgagcctcacggctatccacgtgtttagtgacctgcccgaagagcctgcctgggacttgcaatttgatctgctggacttaaacgatatttctagcgccctaaagcaccacgaggaaaagaatctgatcttggactttcctcagccgagcactgattacctctcttttcgaagtcacttccagaaaaatttcgtctgtctggagaattgctcattgcaggagaggacggtgacaggaaccgtgaaagtgaagaatgtgtcattcgaaaagaaagtgcagatacgcattacatttgactcttggaaaaactacacagacgtcgactgtgtgtacatgaaaaatgtttatgggggaactgacagcgatacgttctcatttgccattgatctgccaccggtgatacctaccgagcaaaagatcgaattctgtatatcgtaccatgccaacgggcaggtcttctgggataataacgatggacagaattataggattgtccatgttcaatggaaacccgacggggtccagactcagatggctccccaagattgcgcgtttcaccagacatcaccaaagactgaactagaatcgactattttcggctcacccaggctggcctctggcctgtttcccgagtggcaatcctggggccgtatggagaatcttgccagttacaggtag

SEQ ID NO: 155671 - DNA, 894 bp, Artificial Sequence
  derived and/or modified sequence
atgtcctgtaccagaatgatacaagtgttggatcctcgccctcttaccagtagcgttatgccagtggatgtggcaatgcgcctgtgtctcgcacactccccccctgtgaagtcctttctaggaccttacgacgagttccagcgcaggcactttgtcaacaagctgaagcccctgaaatcctgtctgaatattaaacataaggcaaaatcccagaacgactggaagtgtagccataaccaggctaagaagagggtcgtgttcgcagatagcaagggcctgtctttgacagccattcatgtcttctccgacctgcctgaagagccagcttgggacctgcaattcgacctgctagacttgaacgatatttcttccgccctgagttttcgatctcattttcaaaagaacttcgtctgtctggagaactgttctctgcaggagcgaaccgtgactggcaccgtgaaagtcaaaaacgtgtccttcgaaaaaaaagtgcagatcagaatcacattcgattcatggaagaactacaccgacgttgactgcgtatatatgaagaacgtgtacggcggaacggactccgacaccttttcttttgccatagatctgcctcccgtgattccaactgagcaaaagatcgaattttgcatttcctaccatgcgaatggccaagtgttctgggacaacaacgatggacagaactatcgaatcgtccacgtgcagtggaagccagatggtgtgcaaactcagatggcccctcaggattgtgcatttcatcagaccagtcccaagaccgaattggaatccacaatctttggctcccccaggcttgcgtcaggactgtttcctgagtggcagtcctggggacgcatggagaaccttgcgagctataggtag

SEQ ID NO: 155672 - DNA, 600 bp, Artificial Sequence
  derived and/or modified sequence
atgagcagtcctactagccccctcaaacatcacgaggaaaagaatctgatactggactttccacaaccctcgacagattatttgtcgttcagaagtcacttccaaaagaactttgtgtgcctagagaactgtagccttcaggaaaggaccgttacagggactgttaaggtgaagaacgtgagttttgagaaaaaggtccaaattcggataacatttgattcatggaaaaactatacagatgtcgattgtgtttacatgaagaacgtgtacggagggacagactcagacacattctcatttgcaatcgatctgccacccgttattcctacagagcagaaaattgaattctgtatcagctatcacgctaacggacaagtgttctgggataacaacgacgggcagaactatagaatcgtgcatgttcagtggaaacccgacggggtgcagacccaaatggccccacaagactgcgcctttcatcaaaccagtccaaaaaccgagttggagtctactatctttggatcacctagactggcatctggattattcccagaatggcaaagctgggggaggatggaaaacctggccagctatcgatag

SEQ ID NO: 155673 - DNA, 2524 bp, Artificial Sequence
  derived and/or modified sequence
gccgcgggggcaaggcctggagctgtggttcgaatttgtgcaggcagcgggtgctggcttttagggtccgccgcctctctgcctaatgagctgcaccagaatgatccaggttttagatccacgtcctttgacaagttcggtcatgcccgtggatgtggccatgaggctttgcttggcacattcaccacctgtgaagagtttcctgggcccgtacgatgaatttcaacgacgacattttgtgaataaattaaagcccctgaaatcatgtctcaatataaaacacaaagccaaatcacagaatgactggaagtgctcacacaaccaagccaagaagcgcgttgtgtttgctgactccaagggcctctctctcactgcgatccatgtcttctccgacctcccagaagaaccagcgtgggatctgcagtttgatctcttggaccttaatgatatctcctctgccttaaaacaccacgaggagaaaaacttgattttagatttccctcagccttcaaccgattacttaagtttccggagccactttcagaagaactttgtctgtctggagaactgctcgttgcaagagcgaacagtgacagggactgttaaagtcaaaaatgtgagttttgagaagaaagttcagatccgtatcactttcgattcttggaaaaactacactgacgtagactgtgtctatatgaaaaatgtgtatggtggcacagatagtgataccttctcatttgccattgacttaccccctgtcattccaactgagcagaaaattgagttctgcatttcttaccatgctaatgggcaagtcttttgggacaacaatgatggtcagaattatagaattgttcatgttcaatggaagcctgatggggtgcagacacagatggcaccccaggactgtgcattccaccagacgtctcctaagacagagttagagtcaacaatctttggcagtccgaggctggctagtgggctcttcccagagtggcagagctgggggagaatggagaacttggcctcttatcgatgaattaagcaacaatgtaactggtcttgacttgtcatattcccccatgcaatcctaggtctgtattgctcaattttaggaagcctttgctactccatcagtaggtttagatttgagcttttgagacctggctatggaaaagaaagacacttgagaatttagtgttggggtctgtacagatgatgctacccaatttggctttgaaggatcaagtaacaggttgaaaactatttttataaaggtaatactttttcagttcccttcttccttccctctcaatccactagctttcatgttgggcaaggaaaagttgaggaaggatggctgatggtgatggaaagctgtgttaatggtatgaggaatgtgtgaaaagtatacacaaagggctctgaagctcaagtcagaggagtgggaggtctgatcattgttggtggaaaaacgtaaggttattttgtgtttttaagttggttttacaattctttcctggggaaattatttctggaggggaaaaagatccattctacgtatccttgtggagaaaagctaaataacctttaagaatgtgggtggtattggagaaagaagatgaattatagctccggagaatcaagatcttaagtgaagcctttctgttcagatgtgatctataaaaaatcataatttggggaaagtttaagcaaatctggctttgtagtcctgatgttataagtgactttgtgatcaaactgtcaggcttgggttcttgttatagaatgcttggtatagaaaaaccatgccatcattaatggctaacaacacgtagggacttcatgtcatgtcaaagatagctctttgcaagtgccttgattaaaccagaaaactgtcatcgtttaacccaaatatctgaatggtcatctggtaactcatgggtttttggcctcataagatggtccactctgtacacaggcattcctcctgcaataatgttgtatctttgagaccgttgtcagtgtacacaactcacatccttcatattgaaggtgactcatttttctgcacacttttttgatgtgatgcttgacgtgaggcccgacactaggattctcaatgcaagaatccagtaccttgcacatagaagtagcaacccatcccttgcctattttcatcttgctgttttcttttttttaaaaaaatggatgtgacttgttttgaatgttttgtattatacttgtttttgtgtgtgcataaattcattctgtaggatcttaagaaaaagagtcccagaatgttgcttctattattgtgcacaaccattgagaggtgttacaagaatgcagttaattttaacatgtgtgatgtgccatggtggaaaagtactatcggaataactctgcagtgacagaatttgaagtttggctagcatccatacttttctactgtaaatatttcactctcctctagctatccttgatgagcttctcactttaagaataaatgtgtttgatataa

SEQ ID NO: 155674 - DNA, 1375 bp, Artificial Sequence
  derived and/or modified sequence
agggtccgccgcctctctgcctaatgagctgcaccagaatgatccaggttttagatccacgtcctttgacaagttcggtcatgcccgtggatgtggccatgaggctttgcttggcacattcaccacctgtgaagagtttcctgggcccgtacgatgaatttcaacgacgacattttgtgaataaattaaagcccctgaaatcatgtctcaatataaaacacaaagccaaatcacagaatgactggaagtgctcacacaaccaagccaagaagcgcgttgtgtttgctgactccaagggcctctctctcactgcgatccatgtcttctccgacctcccagaagaaccagcgtgggatctgcagtttgatctcttggaccttaatgatatctcctctgccttaagtttccggagccactttcagaagaactttgtctgtctggagaactgctcgttgcaagagcgaacagtgacagggactgttaaagtcaaaaatgtgagttttgagaagaaagttcagatccgtatcactttcgattcttggaaaaactacactgacgtagactgtgtctatatgaaaaatgtgtatggtggcacagatagtgataccttctcatttgccattgacttaccccctgtcattccaactgagcagaaaattgagttctgcatttcttaccatgctaatgggcaagtcttttgggacaacaatgatggtcagaattatagaattgttcatgttcaatggaagcctgatggggtgcagacacagatggcaccccaggactgtgcattccaccagacgtctcctaagacagagttagagtcaacaatctttggcagtccgaggctggctagtgggctcttcccagagtggcagagctgggggagaatggagaacttggcctcttatcgatgaattaagcaacaatgtaactggtcttgacttgtcatattcccccatgcaatcctaggtctgtattgctcaattttaggaagcctttgctactccatcagtaggtttagatttgagcttttgagacctggctatggaaaagaaagacacttgagaatttagtgttggggtctgtacagatgatgctacccaatttggctttgaaggatcaagtaacaggttgaaaactatttttataaaggtaatactttttcagttcccttcttccttccctctcaatccactagctttcatgttgggcaaggaaaagttgaggaaggatggctgatggtgatggaaagctgtgttaatggtatgaggaatgtgtgaaaagtatacacaaagggctctgaagctcaagtcagaggagtgggaggtctgatcattgttggtggaaaaacgtaaggttattttgtgttttt

SEQ ID NO: 155675 - DNA, 1285 bp, Artificial Sequence
  derived and/or modified sequence
agtctctcccagcgaccgccgcgggggcaaggcctggagctgtggttcgaatttgtgcaggcagcgggtgctggcttttagggtccgccgcctctctgcctaatgagctgcaccagaatgatccaggttttagatccacgtcctttgacaagttcggtcatgcccgtggatgtggccatgaggctttgcttggcacattcaccacctgtgaagagtttcctgggcccgtacgatgtcttctccgacctcccccttaaaacaccacgaggagaaaaacttgattttagatttccctcagccttcaaccgattacttaagtttccggagccactttcagaagaactttgtctgtctggagaactgctcgttgcaagagcgaacagtgacagggactgttaaagtcaaaaatgtgagttttgagaagaaagttcagatccgtatcactttcgattcttggaaaaactacactgacgtagactgtgtctatatgaaaaatgtgtatggtggcacagatagtgataccttctcatttgccattgacttaccccctgtcattccaactgagcagaaaattgagttctgcatttcttaccatgctaatgggcaagtcttttgggacaacaatgatggtcagaattatagaattgttcatgttcaatggaagcctgatggggtgcagacacagatggcaccccaggactgtgcattccaccagacgtctcctaagacagagttagagtcaacaatctttggcagtccgaggctggctagtgggctcttcccagagtggcagagctgggggagaatggagaacttggcctcttatcgatgaattaagcaacaatgtaactggtcttgacttgtcatattcccccatgcaatcctaggtctgtattgctcaattttaggaagcctttgctactccatcagtaggtttagatttgagcttttgagacctggctatggaaaagaaagacacttgagaatttagtgttggggtctgtacagatgatgctacccaatttggctttgaaggatcaagtaacaggttgaaaactatttttataaaggtaatactttttcagttcccttcttccttccctctcaatccactagctttcatgttgggcaaggaaaagttgaggaaggatggctgatggtgatggaaagctgtgttaatggtatgaggaatgtgtgaaaagtatacacaaagggctctgaagctcaagtcagaggagtgggaggtctgatcattgttggtggaaaaacgtaaggttattttgtg

SEQ ID NO: 155676 - DNA, 954 bp, Artificial Sequence
  derived and/or modified sequence
atgagctgcaccagaatgatccaggtgctggaccccagacccctgaccagcagcgtgatgcccgtggacgtggccatgagactgtgcctggcccacagcccccccgtgaagagcttcctgggcccctacgacgagttccagagaagacacttcgtgaacaagctgaagcccctgaagagctgcctgaacatcaagcacaaggccaagagccagaacgactggaagtgcagccacaaccaggccaagaagagagtggtgttcgccgacagcaagggcctgagcctgaccgccatccacgtgttcagcgacctgcccgaggagcccgcctgggacctgcagttcgacctgctggacctgaacgacatcagcagcgccctgaagcaccacgaggagaagaacctgatcctggacttcccccagcccagcaccgactacctgagcttcagaagccacttccagaagaacttcgtgtgcctggagaactgcagcctgcaggagagaaccgtgaccggcaccgtgaaggtgaagaacgtgagcttcgagaagaaggtgcagatcagaatcaccttcgacagctggaagaactacaccgacgtggactgcgtgtacatgaagaacgtgtacggcggcaccgacagcgacaccttcagcttcgccatcgacctgccccccgtgatccccaccgagcagaagatcgagttctgcatcagctaccacgccaacggccaggtgttctgggacaacaacgacggccagaactacagaatcgtgcacgtgcagtggaagcccgacggcgtgcagacccagatggccccccaggactgcgccttccaccagaccagccccaagaccgagctggagagcaccatcttcggcagccccagactggccagcggcctgttccccgagtggcagagctggggcagaatggagaacctggccagctacagatag

SEQ ID NO: 155677 - DNA, 894 bp, Artificial Sequence
  derived and/or modified sequence
atgagctgcaccagaatgatccaggtgctggaccccagacccctgaccagcagcgtgatgcccgtggacgtggccatgagactgtgcctggcccacagcccccccgtgaagagcttcctgggcccctacgacgagttccagagaagacacttcgtgaacaagctgaagcccctgaagagctgcctgaacatcaagcacaaggccaagagccagaacgactggaagtgcagccacaaccaggccaagaagagagtggtgttcgccgacagcaagggcctgagcctgaccgccatccacgtgttcagcgacctgcccgaggagcccgcctgggacctgcagttcgacctgctggacctgaacgacatcagcagcgccctgagcttcagaagccacttccagaagaacttcgtgtgcctggagaactgcagcctgcaggagagaaccgtgaccggcaccgtgaaggtgaagaacgtgagcttcgagaagaaggtgcagatcagaatcaccttcgacagctggaagaactacaccgacgtggactgcgtgtacatgaagaacgtgtacggcggcaccgacagcgacaccttcagcttcgccatcgacctgccccccgtgatccccaccgagcagaagatcgagttctgcatcagctaccacgccaacggccaggtgttctgggacaacaacgacggccagaactacagaatcgtgcacgtgcagtggaagcccgacggcgtgcagacccagatggccccccaggactgcgccttccaccagaccagccccaagaccgagctggagagcaccatcttcggcagccccagactggccagcggcctgttccccgagtggcagagctggggcagaatggagaacctggccagctacagatag

SEQ ID NO: 155678 - DNA, 600 bp, Artificial Sequence
  derived and/or modified sequence
atgagcagccccaccagccccctgaagcaccacgaggagaagaacctgatcctggacttcccccagcccagcaccgactacctgagcttcagaagccacttccagaagaacttcgtgtgcctggagaactgcagcctgcaggagagaaccgtgaccggcaccgtgaaggtgaagaacgtgagcttcgagaagaaggtgcagatcagaatcaccttcgacagctggaagaactacaccgacgtggactgcgtgtacatgaagaacgtgtacggcggcaccgacagcgacaccttcagcttcgccatcgacctgccccccgtgatccccaccgagcagaagatcgagttctgcatcagctaccacgccaacggccaggtgttctgggacaacaacgacggccagaactacagaatcgtgcacgtgcagtggaagcccgacggcgtgcagacccagatggccccccaggactgcgccttccaccagaccagccccaagaccgagctggagagcaccatcttcggcagccccagactggccagcggcctgttccccgagtggcagagctggggcagaatggagaacctggccagctacagatag

SEQ ID NO: 155679 - protein, 1187 aa, Artificial Sequence
  derived and/or modified sequence
MPFGLKLRRTRRYNVLSKNCFVTRIRLLDSNVIECTLSVESTGQECLEAVAQRLELRETHYFGLWFLSKSQQARWVELEKPLKKHLDKFANEPLLFFGVMFYVPNVSWLQQEATRYQYYLQVKKDVLEGRLRCTLDQVIRLAGLAVQADFGDYNQFDSQDFLREYVLFPMDLALEEAVLEELTQKVAQEHKAHSGILPAEAELMYINEVERLDGFGQEIFPVKDNHGNCVHLGIFFMGIFVRNRIGRQAVIYRWNDMGNITHNKSTILVELINKEETALFHTDDIENAKYISRLFATRHKFYKQNKICTEQSNSPPPIRRQPTWSRSSLPRQQPYILPPVHVQCGEHYSETHTSQDSIFHGNEEALYCNSHNSLDLNYLNGTVTNGSVCSVHSVNSLNCSQSFIQASPVSSNLSIPGSDIMRADYIPSHRHSAIIVPSYRPTPDYETVMRQMKRGILHTDSQSQSLRNLNIINTHAYNQPEDLVYSQPEMRERHPYTVPYGPQGVYSNKLVSPSDQRNPKNNVVPSKPGASAISHTVSTPELANMQLQGSHNYSTAHMLKNYLFRPPPPYPRPRPATSTPDLASHRHKYVSGSSPDLVTRKVQLSVKTFQEDSSPVVHQSLQEVSEPLTATKHHGTVNKRHSLEVMNSMVRGMEAMTLKSLHLPMARRNTLREQGPPEEGSGSHEVPQLPQYHHKKTFSDATMLIHSSESEEEEEEAPESVPQIPMLREKMEYSAQLQAALARIPNKPPPEYPGPRKSVSNGALRQDQASLPPAMARARVLRHGPAKAISMSRTDPPAVNGASLGPSISEPDLTSVKERVKKEPVKERPVSEMFSLEDSIIEREMMIRNLEKQKMAGLEAQKRPLMLAALNGLSVARVSGREENRVDATRVPMDERFRTLKKKLEEGMVFTEYEQIPKKKANGIFSTAALPENAERSRIREVVPYEENRVELIPTKENNTGYINASHIKVVVGGAEWHYIATQGPLPHTCHDFWQMVWEQGVNVIAMVTAEEEGGRTKSHRYWPKLGSKHSSATYGKFKVTTKFRTDSVCYATTGLKVKHLLSGQERTVWHLQYTDWPDHGCPEDVQGFLSYLEEIQSVRRHTNSMLEGTKNRHPPIVVHCSAGVGRTGVLILSELMIYCLEHNEKVEVPMMLRLLREQRMFMIQTIAQYKFVYQVLIQFLQNSRLI

SEQ ID NO: 155680 - protein, 211 aa, Artificial Sequence
  derived and/or modified sequence
MPFGLKLRRTRRYNVLSKNCFVTRIRLLDSNVIECTLSVESTGQECLEAVAQRLELRETHYFGLWFLSKSQQARWVELEKPLKKHLDKFANEPLLFFGVMFYVPNVSWLQQEATRYQYYLQVKKDVLEGRLRCTLDQVIRLAGLAVQADFGDYNQFDSQDFLREYVLFPMDLALEEAVLEELTQKVAQEHKAHRTIMETVYTLAFSLWGFS

SEQ ID NO: 155681 - DNA, 3564 bp, Artificial Sequence
  derived and/or modified sequence
atgcctttcgggctgaagctgcgacgcacccgaaggtacaatgtcttatcgaagaactgttttgttacccgcattaggctgctcgattccaatgtgattgaatgtactctgtccgtagagtcaacaggtcaggaatgcttagaggccgtcgctcagcggctcgaactacgcgagacgcattattttggtctttggttcctctccaagtcccagcaggcacggtgggtggagcttgagaaaccactgaagaaacatttggataaatttgctaatgagccacttctgtttttcggcgtgatgttctacgtcccgaatgtgtcgtggttgcagcaagaggctacccgatatcagtactatctgcaggtaaaaaaggacgtgctcgaggggcggttaagatgtaccttggatcaggtgatcaggctggcaggattagcagtccaggcagatttcggagattacaatcaatttgatagccaggactttttaagagaatacgttctcttccccatggatttagcccttgaagaggccgtcctagaggagttgacgcagaaggtggcacaagaacataaagcccattccggcatcttacccgccgaagctgagctgatgtacattaacgaggttgagaggcttgacggcttcggccaggagatctttccagtgaaggacaaccacggcaactgtgttcacctcggcatattcttcatgggaatttttgtgagaaaccgcatcggaaggcaggccgtgatatatcgatggaacgatatgggaaatatcacacacaacaaatccacaatcctcgtggaattaattaacaaggaagaaaccgccctattccatactgacgacattgaaaacgcaaaatacataagtcgactgttcgcaacccgtcacaaattctacaaacaaaataaaatttgtaccgaacagagcaactctcctccccccattcggcgtcagccgacgtggagccgcagttccctgcctcgccagcagccctacattctcccaccagtgcacgttcagtgcggagaacactattctgaaactcacacgagccaggactccatttttcatgggaatgaagaagcgctgtattgtaacagtcataattctttggacctcaactatctgaacggcaccgttacaaatgggtccgtgtgctctgtacacagcgtcaatagtctgaattgcagccaatccttcattcaggctagtcccgtgtcaagcaatctctccattcctggatccgacattatgcgggctgattacattccgagccatagacacagcgctattatcgtgccaagctaccgcccgaccccagactacgaaacggttatgcgacaaatgaaaagaggaattctgcataccgatagccagtctcagtcgctgcgcaatcttaacatcatcaacacccacgcctataaccaaccagaggatctggtctactcacagcctgagatgcgggaacgtcacccttatacagtaccgtatgggccgcaaggcgtgtacagcaacaaacttgtgtccccctccgatcagagaaatccaaagaataacgtggtgccatcaaagccaggcgcctcagcaataagccacacagtgagtacacccgaactggcaaatatgcaattgcaaggctcacataactattccactgcacatatgctcaagaactatctatttaggcctccacctccgtacccgcgacctcggcccgctacatcaacgccagaccttgcctcccatcgacacaaatacgttagtggatcctcccctgacctggtaacccgaaaagtgcaactgagtgtcaaaacatttcaggaggactcttcccccgtggtacatcagagcctacaggaggtcagcgagccactcacagcaaccaaacaccatggaaccgttaataagagacactctctggaagtcatgaactccatggtgcgcggcatggaagctatgacgctgaaaagtctccatttgcccatggcgcgtagaaacaccctccgggagcagggtccacccgaagagggatccggctcacacgaggtgccccagctccctcagtatcaccacaaaaaaacattttccgacgccaccatgttgatccattcctctgaatccgaagaggaggaggaggaggcccctgagtccgtgccacaaatcccaatgctccgggagaagatggagtatagcgcgcagctccaggcagcgttggcaagaatccctaacaagccaccgcccgagtaccctggaccccgcaagagcgtgtccaatggcgcgttgcgtcaggaccaggcatcattgcccccggccatggccagagctcgcgtgcttcggcatggtccagcaaaggctatctcgatgagccgtacagaccctcctgccgtgaatggagcttctttggggccctcaatatccgagccggacctcacaagcgtaaaggagagggtcaagaaagaaccggtgaaggaaagacccgtttccgaaatgttttctttagaggattccatcatcgagcgggagatgatgatcagaaatctggagaagcagaagatggccggcctggaggcacaaaaacggcccctgatgttagctgcgcttaacgggctgagcgttgcccgggtctccggtcgcgaagaaaacagagtcgacgccacccgcgtccctatggatgagagatttcggacccttaaaaagaagctggaggaagggatggttttcaccgaatacgaacagatcccgaagaagaaagccaatggtatattcagtacagcagccctgccagagaacgccgaaagatccaggattcgtgaagttgtgccttacgaggagaaccgcgtggaactcattccaactaaggaaaacaataccggctacatcaatgccagccacatcaaggtcgtagtggggggcgccgagtggcattacattgccacacaggggcccctgccacacacctgccacgatttctggcaaatggtgtgggaacagggcgtgaacgtgatcgctatggttaccgccgaagaggagggcgggaggacgaagtcacaccgctattggccaaagctgggaagcaaacacagttctgcaacgtacggcaagttcaaggtcactacaaagttccgtaccgattctgtctgctacgccacaacagggctgaaagtgaagcatctgctgtcagggcaagagagaacggtgtggcacctgcagtacaccgattggcccgatcacggctgcccagaagacgtccagggattcctgtcatacctcgaagaaatccagtcagtgcgacgccatacaaactcaatgctcgaaggaacaaagaaccggcatccacccatagttgtgcattgcagcgcgggggtcggtagaaccggagtattaatcctgagtgagctgatgatctattgtttggagcacaacgaaaaggtggaggtgcccatgatgttaaggctccttcgtgagcagagaatgtttatgatacagacaattgcccaatacaaattcgtttatcaagtgctgatccagttcctgcagaactcaaggctgatctag

SEQ ID NO: 155682 - DNA, 636 bp, Artificial Sequence
  derived and/or modified sequence
atgccattcggtctaaagctgagacggaccaggcggtataatgttctttccaagaactgtttcgtgactaggattcggttactggactcgaacgtcattgagtgtacactttcagttgaatccaccggtcaggagtgtcttgaagccgtcgcacagcgactggaactgagggaaacccactacttcggcctgtggttcctgtctaagtcccagcaggcccgctgggtggagcttgaaaagcctttaaagaaacatctggataagttcgctaacgaacccctgctgttctttggagtaatgttctatgtgccaaatgtgtcatggctccagcaggaggcgacaaggtaccagtattacctacaagtgaagaaggatgttcttgaggggcgcctgcgctgcacactcgatcaggtgattcgcctcgccggcctcgccgtgcaggccgacttcggtgactataatcagttcgacagtcaggacttcctgagagaatacgtgctatttcctatggacctcgcactggaagaggctgttctggaagaactgacccagaaggtggcgcaagaacataaggctcaccgtaccatcatggagaccgtctacacattagctttctctttgtggggcttttcgtag

SEQ ID NO: 155683 - DNA, 3564 bp, Artificial Sequence
  derived and/or modified sequence
atgcccttcggcctgaagctgcggaggacccggcgctacaacgtgctgagcaagaactgctttgtgacccgcatccggctgctggacagcaatgtgattgagtgcaccctgtctgtggagagcacaggccaggagtgcctggaggccgtggcccagaggctggagctgcgggagacccactacttcggcctgtggttcctgagcaagagccagcaggcccgctgggtggagctggagaagcccctgaagaagcacctggacaagtttgccaatgagcccctgctcttctttggagtgatgttctacgtgcccaacgtgtcctggctgcagcaggaggccacccgctaccagtactacctgcaggtgaagaaggatgtgctggagggccgcctgcgctgcaccctggaccaggtgatccggctggccggcctggccgtgcaggccgactttggagactacaaccagtttgacagccaggacttcctgcgggagtatgtgctcttccccatggacctggccctggaggaggccgtgctggaggagctgacccagaaggtggcccaggagcacaaggcccacagcggcatcctgcctgctgaggccgagctgatgtacatcaatgaggtggagcggctggatggcttcggccaggagatcttccctgtgaaggacaaccacggcaactgtgtgcacctgggcatcttcttcatgggcatctttgtgaggaacagaattggccggcaggccgtcatctaccgctggaatgacatgggcaacatcacccacaacaagagcaccatcctggtggagctgatcaacaaggaggagacagccctcttccacacagatgacattgaaaatgccaagtacatcagccggctgtttgccaccaggcacaagttctacaagcagaacaagatctgcacagagcagagcaacagccccccacccatccggcggcagcccacctggagccgcagcagcctgccccggcagcagccctacatcctgccccctgtgcacgtgcagtgtggggagcactacagcgagacccacaccagccaggacagcatcttccacggcaatgaggaggccctgtactgcaacagccacaacagcctggacctgaactacctgaatggcaccgtgaccaatggatctgtgtgcagcgtgcacagcgtgaacagcctgaactgcagccagagcttcatccaggccagccctgtgagcagcaacctgagcatccctggcagtgacatcatgagagctgactacatccccagccaccgccacagcgccatcatcgtgcccagctaccggcccaccccagactatgaaacagtgatgaggcagatgaagaggggcatcctgcacacagacagccagagccagagcctgaggaacctgaacatcatcaacacccacgcctacaaccagcctgaggacctggtgtacagccagcctgagatgagggagcggcacccctacacagtgccctacggcccccagggcgtgtacagcaacaagctggtgagccccagcgaccagaggaaccccaagaacaacgtggtgcccagcaagccaggggccagcgccatcagccacacagtgtccaccccagagctggccaacatgcagctgcagggcagccacaactacagcacagcccacatgctgaagaactacctgttccggcccccaccaccctacccccggcccaggcctgccaccagcaccccagacctggccagccaccgccacaagtatgtgtctggcagcagcccagacctggtgaccaggaaggtgcagctgtctgtgaagaccttccaggaggacagcagccctgtggtgcaccagagcctgcaggaggtgtctgagcccctgacagccaccaagcaccacggcaccgtgaacaagaggcacagcctggaggtgatgaacagcatggtgcggggcatggaggccatgaccctgaagagcctgcacctgcccatggcccggaggaacaccctgcgggagcagggccccccagaggagggcagcggcagccatgaggtgccccagctgccccagtaccaccacaagaagaccttcagtgatgccaccatgctgatccacagcagcgagagcgaggaggaggaggaggaggcccctgagagcgtgccccagatccccatgctgcgggagaagatggagtacagcgcccagctgcaggccgccctggcccgcatccccaacaagcccccacctgagtacccaggccccaggaagtctgtgtccaatggagccctgcggcaggaccaggccagcctgcccccagccatggcccgggcccgggtgctgcggcacggccctgccaaggccatctccatgagcaggacagaccccccagctgtgaatggagccagcctgggccccagcatcagcgagccagacctgacctctgtgaaggagcgggtgaagaaggagcctgtgaaggagaggcctgtgtctgagatgttcagcctggaggacagcatcatcgagcgggagatgatgatccggaacctggagaagcagaagatggccggcctggaggcccagaagaggcccctgatgctggccgccctgaatggcctgtctgtggcccgggtgtctggccgggaggagaacagagtggatgccaccagggtgcccatggatgagcgcttccgcaccctgaagaagaagctggaggagggcatggtgttcacagaatatgagcagatccccaagaagaaggccaacggcatcttcagcacagctgccctgcctgaaaatgctgagaggagccgcatccgggaggtggtgccctatgaagaaaatagagtggagctgatccccaccaaggagaacaacacaggctacatcaatgccagccacatcaaggtggtggtgggcggcgctgagtggcactacatcgccacccagggccccctgccccacacctgccacgacttctggcagatggtgtgggagcagggcgtgaatgtgattgccatggtgacagctgaggaggagggcggccgcaccaagagccaccgctactggcccaagctgggcagcaagcacagcagcgccacctacggcaagttcaaggtgaccaccaagttcagaacagacagcgtgtgctacgccaccaccggcctgaaggtgaagcacctgctgagcggccaggagaggacagtgtggcacctgcagtacacagactggccagaccacggctgcccagaagatgtgcagggcttcctgagctacctggaggagatccagagcgtgcggcggcacaccaacagcatgctggagggcaccaagaacagacacccccccatcgtggtgcactgcagcgctggggtgggccgcactggagtgctgatcctgtctgagctgatgatctactgcctggagcacaatgagaaggtggaggtgcccatgatgctgcggctgctgcgggagcagaggatgttcatgatccagaccatcgcccagtacaagtttgtgtaccaggtgctgatccagttcctgcagaacagccgcctcatctag

SEQ ID NO: 155684 - DNA, 636 bp, Artificial Sequence
  derived and/or modified sequence
atgcccttcggcctgaagctgcggaggacccggcgctacaacgtgctgagcaagaactgctttgtgacccgcatccggctgctggacagcaatgtgattgagtgcaccctgtctgtggagagcacaggccaggagtgcctggaggccgtggcccagaggctggagctgcgggagacccactacttcggcctgtggttcctgagcaagagccagcaggcccgctgggtggagctggagaagcccctgaagaagcacctggacaagtttgccaatgagcccctgctcttctttggagtgatgttctacgtgcccaacgtgtcctggctgcagcaggaggccacccgctaccagtactacctgcaggtgaagaaggatgtgctggagggccgcctgcgctgcaccctggaccaggtgatccggctggccggcctggccgtgcaggccgactttggagactacaaccagtttgacagccaggacttcctgcgggagtatgtgctcttccccatggacctggccctggaggaggccgtgctggaggagctgacccagaaggtggcccaggagcacaaggcccacaggaccatcatggagaccgtgtacaccctggccttcagcctgtggggcttctcctag

SEQ ID NO: 155685 - DNA, 3564 bp, Artificial Sequence
  derived and/or modified sequence
atgcccttcggcctgaagctgcggcggacccggcggtacaacgtgctttcaaaaaactgtttcgtaacccgcataagactactcgatagcaatgttatcgagtgtaccctgtcagtcgagagcacagggcaagagtgcctcgaagccgtagctcagaggctggagttgcgggagacacattactttgggttgtggtttcttagtaagagccagcaggccagatgggttgagttggagaagccactgaagaagcacctcgacaaattcgctaacgagcctctgttgttctttggcgtgatgttctatgtccctaatgtgagctggctacaacaggaagcaactcgctaccagtattacctgcaggtgaagaaagatgttctggaaggccgcttgaggtgtaccctggatcaggttatacggctcgcagggctggccgtgcaggcagattttggcgactacaatcagttcgactcacaagattttctgcgagaatacgtgctgtttcctatggacctggctctggaagaagctgtactagaagagttgacccaaaaggtcgcgcaggaacataaagcccactccgggatattgcctgcggaagccgagctcatgtacattaacgaagtcgaacggctggacggctttggacaagaaatcttccccgtgaaagacaatcatggaaactgcgtgcatctgggtatcttcttcatgggaatatttgtgcgtaaccggatagggcgccaggcagtaatatatcgctggaatgacatgggcaacatcacccacaataaatctacaatcttggttgagttaattaataaggaggagactgccctcttccacaccgacgacatcgaaaacgccaagtatatttccaggttgtttgctacacggcataagttttataaacagaacaagatttgtaccgaacagtcgaactctccgccgccaattcgaaggcaacctacgtggtcacgaagctccttgcctcggcaacagccttatatcctccctcccgttcatgtgcaatgtggagaacattattccgaaacccatacatctcaagacagtatttttcacggcaacgaggaagccctttactgtaactctcataacagcctggacttgaattatctgaacggaaccgtgacaaacggttcagtgtgtagtgtccactccgttaattcccttaactgcagccagagtttcatccaagcctcacccgtgtcttcaaacctctcaattccaggtagcgacattatgcgcgccgactacatcccaagtcaccgccacagcgccatcatcgttccttcctaccggcccacccccgactatgagaccgtcatgaggcagatgaaaagaggcatcctgcatactgattcgcaatcgcagagtctccggaaccttaatattataaatacacacgcctataatcagcccgaagatttggtgtattcacagcctgaaatgcgcgagcgtcacccatatactgtgccgtacggtccacagggagtctattcaaataaactggtcagtccaagtgaccagcgaaacccgaagaacaatgtcgtgccctctaaacccggcgctagcgccatctcacacactgtgtcaacgcctgagttggcaaacatgcaactgcaaggaagtcacaattatagtaccgcccacatgcttaagaactatctgttcaggccccccccaccgtatccccgtccacggcctgctaccagtacacccgatttggctagccatcgccataaatatgtgagcggtagctctcctgaccttgtcacaaggaaagttcagctcagtgtcaaaacatttcaggaggactccagccctgttgtgcaccagtcacttcaggaggtttccgagccattaacggcaaccaagcaccatggaactgtgaataagagacactcacttgaagtaatgaacagcatggtacgagggatggaggctatgaccctgaaaagcctgcacttgccaatggctaggaggaacaccttacgagagcaggggccacctgaggaaggtagtggatctcacgaggtgccccagctcccccagtatcaccacaagaagaccttttccgacgctaccatgttaatccactcttcagaatctgaggaggaggaggaggaagccccagagtcagtgccacagattccaatgttaagggagaagatggaatattctgcccagcttcaggctgctctcgctagaatccccaacaaaccccctcctgagtaccccggaccccgaaaaagcgtctccaacggtgctctgcgtcaggatcaggcatctctcccacccgcaatggcaagggcccgagtactgcgccacgggcccgctaaagcaattagtatgtctagaaccgatccccccgccgtcaacggcgcaagtttgggcccttctatttctgaaccagatttgacttccgtgaaggaacgcgtcaaaaaagagcccgtgaaagagaggccagtcagtgagatgtttagtctcgaagactctatcattgagcgcgagatgatgattagaaatcttgagaagcagaaaatggcaggattagaggcacagaagaggcctttgatgctggcggccctgaacgggttatctgtagcccgagtgtctggcagggaggagaaccgcgtcgacgcaacccgtgtgcctatggatgagagatttcggactctcaaaaaaaaactggaggagggaatggtgttcactgaatatgaacagatccccaagaagaaagcaaacgggatattttctaccgccgcactgcccgagaacgccgaacggagccggattagagaagtcgtgccatacgaggaaaacagagtagagttgattccaacaaaggagaacaacacaggttatattaatgcctctcatattaaggtcgtggtgggaggggccgagtggcattacatagcgacccaggggcccctgccacacacatgccacgacttttggcaaatggtctgggaacaaggagtcaacgtgattgcaatggttaccgcagaagaagaaggcggtagaactaagagtcaccggtactggcccaaactgggcagcaagcactcatctgcaacatacgggaagttcaaggttacaacgaagtttcgcaccgactcggtgtgctatgccaccacaggacttaaagtcaagcatctcctctctgggcaagagcgaaccgtctggcacctccagtatacggattggcccgaccacgggtgtcccgaggacgtgcagggtttcttatcttatctggaggaaattcaatcagtcaggcgacacacgaattcaatgcttgagggcacaaagaatcgtcatcctcctatcgtggtccactgcagcgctggcgtaggccgcaccggtgtcttgattctgagcgaattgatgatttactgtctcgagcacaatgagaaagtggaggtccctatgatgttaaggttattaagggagcagcggatgtttatgattcaaacgatcgctcagtataaatttgtgtatcaggtgctgattcagttcctccagaactcaagactgatctag

SEQ ID NO: 155686 - DNA, 636 bp, Artificial Sequence
  derived and/or modified sequence
atgcccttcggcctgaagctgcggcggacccggcggtacaacgtgttaagcaagaactgtttcgtgacgcgaatacggctacttgactccaatgtgatagagtgcactttgagcgtggaatcaactggacaggagtgtctggaggcagtggctcagaggctcgagctgagagagactcactactttggtctatggtttttgagtaagtctcagcaggcgcgctgggtcgaactggaaaagccactcaagaaacacctggataagtttgctaacgagccactgcttttctttggcgtcatgttctacgtgcccaacgtgtcatggcttcagcaagaagctactaggtaccagtactatttgcaggtgaagaaagatgtgttggaggggagactaaggtgcactctcgatcaggtgataagactcgcaggactggccgtccaggctgactttggggattataatcagtttgactcccaagacttcctcagggagtatgtcctatttcccatggaccttgccctggaggaagccgtattagaggaattgacccagaaagtagcccaagaacacaaggctcatcgtaccatcatggaaacggtctatacactggcgttctccttgtgggggttctcctag

SEQ ID NO: 155687 - DNA, 3564 bp, Artificial Sequence
  derived and/or modified sequence
atgcctttcgggctgaagcttcgtagaacacgcaggtacaacgtgttgtctaagaactgcttcgtaacacggattcggctactagacagcaacgtcatcgaatgtactctgtcagtagagtccacaggacaagagtgccttgaggctgtggcacaacgcctagagcttagagaaacacactattttggactgtggttcctaagcaagtcacagcaggctaggtgggttgaactagagaaaccccttaagaagcacctcgataagttcgcaaatgagccgttgctgttctttggcgtgatgttttacgttcccaacgtttcatggctacagcaggaggcaacaaggtatcagtattacttgcaagtaaagaaagatgtgctggagggcaggcttagatgtacactagatcaggtgatccggctagcagggctggccgtacaggcagactttggtgactataatcaatttgattcacaagacttcctccgggagtatgtactgtttccaatggacttagctctggaagaagctgtgctagaagagctcacgcagaaggtcgctcaagagcataaggctcacagcggcattctgcccgcagaagcggaattaatgtacattaacgaggtggaacggctcgatgggtttggacaggagattttccctgtgaaagacaatcatggcaactgcgtgcacttggggatatttttcatgggcatttttgttagaaataggatcgggcgacaagcggttatttaccgttggaacgatatggggaacatcacccacaataaatcaactatcctggttgaactgattaataaagaggaaacagccctctttcatacggacgacatcgagaatgctaagtacattagtagactcttcgcaacacggcataaattctataaacagaacaaaatatgtaccgagcagagtaattctcctcctccaatacgacgacagcccacatggagtcggagttctctgcccaggcagcagccatatattctgcccccagtccatgtgcagtgcggagagcactacagtgagactcacacttcccaggacagtattttccacggcaacgaagaagcgttgtattgtaatagccacaatagcctcgaccttaattacctcaatggaaccgtcactaacgggagtgtgtgttccgtgcatagtgttaacagcttgaactgttcccaaagctttattcaggccagcccagtctcatccaaccttagcatccctgggagcgatattatgagggctgattatattccatctcatcgccatagtgcaatcatcgtcccctcttatcggcctacgcccgattatgaaactgtcatgcgtcagatgaaaagggggattctgcacactgattcacagtcacaatcgctgcgaaacctgaacattatcaacactcacgcatacaaccagcccgaggaccttgtgtactcccaacctgagatgcgggagcggcacccttacacagttccttatggccctcagggcgtttacagtaacaaactagtgagccctagtgaccagcgaaatccaaaaaataacgtcgtgccttcaaaacccggagcaagcgccataagccacacagtatccacacctgaactggctaacatgcagttacaaggatctcacaactactctaccgctcacatgctgaagaactacctgttccgtcccccaccaccatatccacgtccacgcccagccacctctacgcctgatctggcctcacaccgccataaatatgtgtcaggcagctctccagacttggtgacaagaaaggtccagctttcagtgaagacctttcaggaggatagctctcctgtggtgcaccagtcgctgcaggaggtatctgagccgctcactgccaccaagcatcacggcaccgtcaacaagcggcattccttggaagttatgaactccatggtgagggggatggaggcaatgacactgaagagcctgcatctccccatggcaaggagaaatacactaagggaacaagggcctcccgaagaaggatcaggctcccacgaggtgccacagctcccccagtaccatcataagaagaccttttcagacgctaccatgctgatacactctagcgagtctgaggaggaggaggaagaggcccctgagtccgtgccacagattccgatgttaagggagaaaatggagtatagcgcacaactacaggctgcccttgctcggataccaaacaagcctccacctgaatatccgggaccacggaaaagcgtgagcaatggcgctttacggcaggatcaagcttccctgccgcctgccatggcacgtgccagagtcctgaggcatggcccagctaaagccatatccatgagtcgcactgacccaccagcggtcaatggggcaagtctggggccaagtatctctgaacccgacctcacatcagtcaaggaacgcgttaaaaaggaacctgtcaaggaacgacctgtgtccgaaatgttcagcttagaagatagcataatcgagcgtgaaatgatgatccgaaatttggaaaaacagaagatggccggtctggaagctcagaaaagacctctgatgttggctgccctgaatggactgagtgtggccagggtgagtggccgtgaggagaaccgagtcgatgctactcgggtccctatggatgaacgattcaggactctcaaaaaaaagctggaagaagggatggtgttcactgagtacgagcagatcccgaagaaaaaagccaacgggatattttccacagccgctctgcctgagaacgctgagaggtcaaggattagggaggtggtgccctacgaagagaatagagtggaactgatccctacaaaggagaacaacaccggctacattaatgcctcacatatcaaggttgtcgttggcggagcggaatggcattatattgcgacccagggacccttgccccatacatgccatgatttttggcaaatggtgtgggagcagggcgtcaacgtgattgctatggtgacggcggaggaggaggggggacgcacgaagtcacatcggtactggccgaaacttggctccaaacactctagcgcaacctacggaaaattcaaagtcaccaccaaattccggactgactcggtgtgctacgccacgaccgggctgaaagttaaacacctactctctggtcaagaaagaacagtgtggcatttacagtataccgattggcctgatcatggctgccctgaggacgtccaaggatttctctcatacttggaggagatccaatcagtgcgacgtcataccaatagcatgctcgaagggacaaagaataggcacccccctatagttgtgcattgttcagccggagttggacgcaccggggtcttgattctaagcgagctgatgatttactgtctggagcataatgagaaagtcgaggtcccaatgatgttgcgcttgttgcgggagcagcggatgttcatgatccagacgattgcacagtataagtttgtttaccaggtcctcattcaatttctgcagaactctcgcctgatatag

SEQ ID NO: 155688 - DNA, 636 bp, Artificial Sequence
  derived and/or modified sequence
atgccatttggtctgaaactacgaaggacccgccgatacaatgtgctaagtaagaactgtttcgtgaccaggatcagactgctagatagtaacgtcattgagtgcacactgtctgttgaaagtaccggtcaggaatgcctcgaagcagtggcgcagcggctcgagctgagggaaacacactattttggattatggttcctgtcaaagtcccagcaggcaagatgggtcgagctggaaaagcctctcaagaaacacctggataaattcgccaacgagccgctgctcttcttcggagtcatgttttatgtgcctaacgtgtcatggctccagcaggaggcgacccgctaccagtactatcttcaggttaaaaaagatgtgcttgagggaagactgcggtgtacactggatcaggtgattcgtttggctgggttggcggtgcaggcagattttggagactataatcagtttgattcacaggactttctgcgagagtacgtcctgttcccaatggaccttgccctagaagaagcagtcttggaggagctgactcagaaggtggcgcaagagcacaaagcacacaggacaatcatggagacagtgtacaccctggcattctccctgtggggtttctcttag

SEQ ID NO: 155689 - DNA, 4173 bp, Artificial Sequence
  derived and/or modified sequence
ccgcgcgggactccggggcgccacgggggccatgtaagcagctatcttccagagggccacactgggcatggacacccttttccctgcctggaggagcacaggtgatagtgtaattttccagtcacgaaactgctaaggccatctcaggggcgtgtgcgccaggataggcgggcggcgtccgaggaccacatagccatgccttttggtctgaagctccgccggacacggcgctacaacgtcctgagcaagaactgctttgtcacacggattcgcctgctggacagcaatgttatcgagtgcacgctgtcggtggaaagcacagggcaagaatgcctggaggctgtggcccagaggctggagctgcgagagacgcactactttggcctttggtttctcagcaagagccagcaagcacgatgggtggagctggagaaacctctgaagaaacatctggacaaattcgctaatgagcctttgcttttctttggagtcatgttctatgtgccaaatgtgtcatggcttcagcaagaggccacaagatatcagtattacctgcaagtcaaaaaagatgtgcttgaagggcgattacgatgtacattggaccaggtgattcggctagccggcctagctgtgcaagctgattttggagactataatcagtttgattctcaagatttcctcagagagtatgtgctatttcctatggatttggccctggaagaggctgttctggaggagctgacccagaaggtagcccaagaacacaaagcccacagtggaatcctgccagcagaagctgaactgatgtacatcaatgaagttgaacgtttggatggatttggacaggaaatcttccctgtaaaggacaatcatggaaactgtgtacaccttggcattttctttatggggattttcgtgaggaacagaattggaagacaagcggtaatatacaggtggaatgacatggggaatatcactcataacaagtcgaccattctagtggagctcatcaacaaagaagagactgccctctttcacacggatgatatcgaaaatgccaagtatatttctcggttgtttgccacacgacacaagttttacaaacaaaacaaaatctgcactgaacagtcaaattctccaccccccatcagacgccagcccacctggagccgatcctctctgcccaggcagcagccgtacatcctgcctcccgttcacgtccagtgtggtgagcactactcggaaacgcacacctcgcaagacagcatttttcatgggaatgaagaagccttgtattgcaactctcacaacagcctggacttaaattatttaaatggcactgtcaccaatggcagcgtgtgtagcgttcacagcgtcaactccctcaactgctcgcaaagtttcatccaggcctcccctgtatcctccaacctcagtatccctgggagtgacatcatgcgggccgactacatcccgagccaccggcacagcgcgatcatcgtgccctcgtacaggccaacccccgattatgagacagtcatgcgccagatgaagagggggatcctgcatacagacagccagagccagtctctgagaaacctcaacattatcaacacccatgcctacaaccagccagaggatctggtgtacagccaaccggagatgcgggagaggcacccctacactgtcccttatgggccacagggggtctacagcaacaaacttgtcagtccatctgaccagaggaacccaaagaataatgtggtaccaagcaagccgggggcaagcgccatctcgcacacggtgagcaccccagagctggccaacatgcagctgcagggcagccataactacagcacggcccacatgcttaagaactatctcttcaggccaccgcccccctacccacggccacgacctgccaccagcaccccagacctggccagccaccgccacaagtacgtcagcggcagcagcccggacctggtgacccggaaggtgcagctctcggtgaagaccttccaagaggacagctctccggtggttcatcagtctctccaggaggtgagcgagcccctcacggccaccaagcaccacggcactgtgaacaagcgccacagcctggaggtgatgaacagcatggtgcggggcatggaggccatgacgctcaagtcgctccacctccccatggctcgccgcaacacgctccgggagcagggaccgcccgaggaggggtcaggcagccacgaggtcccccagctccctcagtatcaccacaagaagaccttctctgatgccactatgctaatccacagcagcgagagtgaggaggaggaggaggaggctccagaatcggtgccccagatccccatgctccgggagaagatggagtacagtgcccagctgcaggcggccctggcccgcatccccaacaagcccccgcctgagtaccccggtccaaggaagagtgtgagcaatggggctctgaggcaggaccaagccagccttcctcccgccatggccagagccagggtgctgaggcatgggccagccaaggccatcagcatgtctcggactgacccgccggctgtcaacggggcctctctcggcccatccatctcggaacccgacctgactagtgtgaaggagcgggtcaaaaaagagcctgtgaaggagagacctgtgtctgaaatgttttccctggaagacagcattatagagagagagatgatgatcaggaatctagagaagcagaagatggcaggcctggaggcacagaagaggccgctgatgttggcagcattgaatgggctctcggtggctcgagtctcagggcgggaagagaatcgagttgatgccacccgggttcccatggacgagaggttcagaaccctgaagaagaaactagaagagggaatggtgttcacagaatatgagcaaattccaaagaaaaaggcgaatggcattttcagcacagcagctctgccagaaaacgccgagcgcagccgaatccgtgaagttgtcccctatgaggagaatcgagtagagctgataccaaccaaagaaaataacacaggatacattaatgcctcccacatcaaggtggtggttggcggggcagaatggcactacatagccacccaggggcccctgccacacacgtgccacgacttctggcagatggtgtgggagcagggagtgaatgtgattgccatggtcactgcagaggaggagggtggacgaaccaaaagccaccgatactggcccaaactaggttcaaagcacagctcagccacctatggcaagttcaaggtcaccacgaagtttcgaacggattctgtttgctatgcaaccacgggcttgaaggtcaagcaccttttgtctgggcaagaaaggacggtgtggcatttacaatatactgactggccagatcacggctgtccagaagatgtccaaggatttttatcctacttggaggagatccagtcggtccgtcgccataccaacagcatgctggaaggcaccaagaaccggcacccgcccatcgtggtccactgtagtgctggggtgggaaggaccggcgtgctcattctttctgagctgatgatctactgcttggaacataacgaaaaggtggaagtgcccatgatgctgaggctcctcagggagcagaggatgttcatgatccagactatcgctcagtacaagtttgtctaccaagtcctcatccagttcctccaaaactccagactcatttaatcaccccaatccagctcctggaggagggacccagctccatcgcgctggaggagagtcacctccagacaacatctgctccccccacaggggtgcaggtggctggcagcaaacaggctctctgaagacagtagccaagattattcacacataccatgtattattttatatgagataatttatttttttcccctttggaataacttttgtgaattattataatgcagtttccctagtaatatagtacttttcatttgaaccacatcttgactgatctgtattgtaatatatgtcagcaggtaaggttgcctgctggatcattttgaggacagaggcatgagggagcacatctcttgtgaagttgcagccagatttgtaaccaaccctgaaattcatcagcttaattcatttatcagc

SEQ ID NO: 155690 - DNA, 3473 bp, Artificial Sequence
  derived and/or modified sequence
atgccttttggtctgaagctccgccggacacggcgctacaacgtcctgagcaagaactgctttgtcacacggattcgcctgctggacagcaatgttatcgagtgcacgctgtcggtggaaagcacagggcaagaatgcctggaggctgtggcccagaggctggagctgcgagagacgcactactttggcctttggtttctcagcaagagccagcaagcacgatgggtggagctggagaaacctctgaagaaacatctggacaaattcgctaatgagcctttgcttttctttggagtcatgttctatgtgccaaatgtgtcatggcttcagcaagaggccacaagatatcagtattacctgcaagtcaaaaaagatgtgcttgaagggcgattacgatgtacattggaccaggtgattcggctagccggcctagctgtgcaagctgattttggagactataatcagtttgattctcaagatttcctcagagagtatgtgctatttcctatggatttggccctggaagaggctgttctggaggagctgacccagaaggtagcccaagaacacaaagcccacaggacaatcatggaaactgtgtacaccttggcattttctttatggggattttcgtgaggaacagaattggaagacaagcggtaatatacaggtggaatgacatggggaatatcactcataacaagtcgaccattctagtggagctcatcaacaaagaagagactgccctctttcacacggatgatatcgaaaatgccaagtatatttctcggttgtttgccacacgacacaagttttacaaacaaaacaaaatctgcactgaacagtcaaattctccaccccccatcagacgccagcccacctggagccgatcctctctgcccaggcagcagccgtacatcctgcctcccgttcacgtccagtgtggtgagcactactcggaaacgcacacctcgcaagacagcatttttcatgggaatgaagaagccttgtattgcaactctcacaacagcctggacttaaattatttaaatggcactgtcaccaatggcagcgtgtgtagcgttcacagcgtcaactccctcaactgctcgcaaagtttcatccaggcctcccctgtatcctccaacctcagtatccctgggagtgacatcatgcgggccgactacatcccgagccaccggcacagcgcgatcatcgtgccctcgtacaggccaacccccgattatgagacagtcatgcgccagatgaagagggggatcctgcatacagacagccagagccagtctctgagaaacctcaacattatcaacacccatgcctacaaccagccagaggatctggtgtacagccaaccggagatgcgggagaggcacccctacactgtcccttatgggccacagggggtctacagcaacaaacttgtcagtccatctgaccagaggaacccaaagaataatgtggtaccaagcaagccgggggcaagcgccatctcgcacacggtgagcaccccagagctggccaacatgcagctgcagggcagccataactacagcacggcccacatgcttaagaactatctcttcaggccaccgcccccctacccacggccacgacctgccaccagcaccccagacctggccagccaccgccacaagtacgtcagcggcagcagcccggacctggtgacccggaaggtgcagctctcggtgaagaccttccaagaggacagctctccggtggttcatcagtctctccaggaggtgagcgagcccctcacggccaccaagcaccacggcactgtgaacaagcgccacagcctggaggtgatgaacagcatggtgcggggcatggaggccatgacgctcaagtcgctccacctccccatggctcgccgcaacacgctccgggagcagggaccgcccgaggaggggtcaggcagccacgaggtcccccagctccctcagtatcaccacaagaagaccttctctgatgccactatgctaatccacagcagcgagagtgaggaggaggaggaggaggctccagaatcggtgccccagatccccatgctccgggagaagatggagtacagtgcccagctgcaggcggccctggcccgcatccccaacaagcccccgcctgagtaccccggtccaaggaagagtgtgagcaatggggctctgaggcaggaccaagccagccttcctcccgccatggccagagccagggtgctgaggcatgggccagccaaggccatcagcatgtctcggactgacccgccggctgtcaacggggcctctctcggcccatccatctcggaacccgacctgactagtgtgaaggagcgggtcaaaaaagagcctgtgaaggagagacctgtgtctgaaatgttttccctggaagacagcattatagagagagagatgatgatcaggaatctagagaagcagaagatggcaggcctggaggcacagaagaggccgctgatgttggcagcattgaatgggctctcggtggctcgagtctcagggcgggaagagaatcgagttgatgccacccgggttcccatggacgagaggttcagaaccctgaagaagaaactagaagagggaatggtgttcacagaatatgagcaaattccaaagaaaaaggcgaatggcattttcagcacagcagctctgccagaaaacgccgagcgcagccgaatccgtgaagttgtcccctatgaggagaatcgagtagagctgataccaaccaaagaaaataacacaggatacattaatgcctcccacatcaaggtggtggttggcggggcagaatggcactacatagccacccaggggcccctgccacacacgtgccacgacttctggcagatggtgtgggagcagggagtgaatgtgattgccatggtcactgcagaggaggagggtggacgaaccaaaagccaccgatactggcccaaactaggttcaaagcacagctcagccacctatggcaagttcaaggtcaccacgaagtttcgaacggattctgtttgctatgcaaccacgggcttgaaggtcaagcaccttttgtctgggcaagaaaggacggtgtggcatttacaatatactgactggccagatcacggctgtccagaagatgtccaaggatttttatcctacttggaggagatccagtcggtccgtcgccataccaacagcatgctggaaggcaccaagaaccggcacccgcccatcgtggtccactgtagtgctggggtgggaaggaccggcgtgctcattctttctgagctgatgatctactgcttggaacataacgaaaaggtggaagtgcccatgatgctgaggctcctcagggagcagaggatgttcatgatccagactatcgctcagtacaagtttgtctaccaagtcctcatccagttcctccaaaactccagactcatt

SEQ ID NO: 155691 - DNA, 3564 bp, Artificial Sequence
  derived and/or modified sequence
atgcccttcggcctgaagctgagaagaaccagaagatacaacgtgctgagcaagaactgcttcgtgaccagaatcagactgctggacagcaacgtgatcgagtgcaccctgagcgtggagagcaccggccaggagtgcctggaggccgtggcccagagactggagctgagagagacccactacttcggcctgtggttcctgagcaagagccagcaggccagatgggtggagctggagaagcccctgaagaagcacctggacaagttcgccaacgagcccctgctgttcttcggcgtgatgttctacgtgcccaacgtgagctggctgcagcaggaggccaccagataccagtactacctgcaggtgaagaaggacgtgctggagggcagactgagatgcaccctggaccaggtgatcagactggccggcctggccgtgcaggccgacttcggcgactacaaccagttcgacagccaggacttcctgagagagtacgtgctgttccccatggacctggccctggaggaggccgtgctggaggagctgacccagaaggtggcccaggagcacaaggcccacagcggcatcctgcccgccgaggccgagctgatgtacatcaacgaggtggagagactggacggcttcggccaggagatcttccccgtgaaggacaaccacggcaactgcgtgcacctgggcatcttcttcatgggcatcttcgtgagaaacagaatcggcagacaggccgtgatctacagatggaacgacatgggcaacatcacccacaacaagagcaccatcctggtggagctgatcaacaaggaggagaccgccctgttccacaccgacgacatcgagaacgccaagtacatcagcagactgttcgccaccagacacaagttctacaagcagaacaagatctgcaccgagcagagcaacagccccccccccatcagaagacagcccacctggagcagaagcagcctgcccagacagcagccctacatcctgccccccgtgcacgtgcagtgcggcgagcactacagcgagacccacaccagccaggacagcatcttccacggcaacgaggaggccctgtactgcaacagccacaacagcctggacctgaactacctgaacggcaccgtgaccaacggcagcgtgtgcagcgtgcacagcgtgaacagcctgaactgcagccagagcttcatccaggccagccccgtgagcagcaacctgagcatccccggcagcgacatcatgagagccgactacatccccagccacagacacagcgccatcatcgtgcccagctacagacccacccccgactacgagaccgtgatgagacagatgaagagaggcatcctgcacaccgacagccagagccagagcctgagaaacctgaacatcatcaacacccacgcctacaaccagcccgaggacctggtgtacagccagcccgagatgagagagagacacccctacaccgtgccctacggcccccagggcgtgtacagcaacaagctggtgagccccagcgaccagagaaaccccaagaacaacgtggtgcccagcaagcccggcgccagcgccatcagccacaccgtgagcacccccgagctggccaacatgcagctgcagggcagccacaactacagcaccgcccacatgctgaagaactacctgttcagacccccccccccctaccccagacccagacccgccaccagcacccccgacctggccagccacagacacaagtacgtgagcggcagcagccccgacctggtgaccagaaaggtgcagctgagcgtgaagaccttccaggaggacagcagccccgtggtgcaccagagcctgcaggaggtgagcgagcccctgaccgccaccaagcaccacggcaccgtgaacaagagacacagcctggaggtgatgaacagcatggtgagaggcatggaggccatgaccctgaagagcctgcacctgcccatggccagaagaaacaccctgagagagcagggcccccccgaggagggcagcggcagccacgaggtgccccagctgccccagtaccaccacaagaagaccttcagcgacgccaccatgctgatccacagcagcgagagcgaggaggaggaggaggaggcccccgagagcgtgccccagatccccatgctgagagagaagatggagtacagcgcccagctgcaggccgccctggccagaatccccaacaagcccccccccgagtaccccggccccagaaagagcgtgagcaacggcgccctgagacaggaccaggccagcctgccccccgccatggccagagccagagtgctgagacacggccccgccaaggccatcagcatgagcagaaccgacccccccgccgtgaacggcgccagcctgggccccagcatcagcgagcccgacctgaccagcgtgaaggagagagtgaagaaggagcccgtgaaggagagacccgtgagcgagatgttcagcctggaggacagcatcatcgagagagagatgatgatcagaaacctggagaagcagaagatggccggcctggaggcccagaagagacccctgatgctggccgccctgaacggcctgagcgtggccagagtgagcggcagagaggagaacagagtggacgccaccagagtgcccatggacgagagattcagaaccctgaagaagaagctggaggagggcatggtgttcaccgagtacgagcagatccccaagaagaaggccaacggcatcttcagcaccgccgccctgcccgagaacgccgagagaagcagaatcagagaggtggtgccctacgaggagaacagagtggagctgatccccaccaaggagaacaacaccggctacatcaacgccagccacatcaaggtggtggtgggcggcgccgagtggcactacatcgccacccagggccccctgccccacacctgccacgacttctggcagatggtgtgggagcagggcgtgaacgtgatcgccatggtgaccgccgaggaggagggcggcagaaccaagagccacagatactggcccaagctgggcagcaagcacagcagcgccacctacggcaagttcaaggtgaccaccaagttcagaaccgacagcgtgtgctacgccaccaccggcctgaaggtgaagcacctgctgagcggccaggagagaaccgtgtggcacctgcagtacaccgactggcccgaccacggctgccccgaggacgtgcagggcttcctgagctacctggaggagatccagagcgtgagaagacacaccaacagcatgctggagggcaccaagaacagacacccccccatcgtggtgcactgcagcgccggcgtgggcagaaccggcgtgctgatcctgagcgagctgatgatctactgcctggagcacaacgagaaggtggaggtgcccatgatgctgagactgctgagagagcagagaatgttcatgatccagaccatcgcccagtacaagttcgtgtaccaggtgctgatccagttcctgcagaacagcagactgatctag

SEQ ID NO: 155692 - DNA, 636 bp, Artificial Sequence
  derived and/or modified sequence
atgcccttcggcctgaagctgagaagaaccagaagatacaacgtgctgagcaagaactgcttcgtgaccagaatcagactgctggacagcaacgtgatcgagtgcaccctgagcgtggagagcaccggccaggagtgcctggaggccgtggcccagagactggagctgagagagacccactacttcggcctgtggttcctgagcaagagccagcaggccagatgggtggagctggagaagcccctgaagaagcacctggacaagttcgccaacgagcccctgctgttcttcggcgtgatgttctacgtgcccaacgtgagctggctgcagcaggaggccaccagataccagtactacctgcaggtgaagaaggacgtgctggagggcagactgagatgcaccctggaccaggtgatcagactggccggcctggccgtgcaggccgacttcggcgactacaaccagttcgacagccaggacttcctgagagagtacgtgctgttccccatggacctggccctggaggaggccgtgctggaggagctgacccagaaggtggcccaggagcacaaggcccacagaaccatcatggagaccgtgtacaccctggccttcagcctgtggggcttcagctag

SEQ ID NO: 155693 - protein, 1354 aa, Artificial Sequence
  derived and/or modified sequence
MSTGDSFETRFEKMDNLLRDPKSEVNSDCLLDGLDALVYDLDFPALRKNKNIDNFLSRYKDTINKIRDLRMKAEDYEVVKVIGRGAFGEVQLVRHKSTRKVYAMKLLSKFEMIKRSDSAFFWEERDIMAFANSPWVVQLFYAFQDDRYLYMVMEYMPGGDLVNLMSNYDVPEKWARFYTAEVVLALDAIHSMGFIHRDVKPDNMLLDKSGHLKLADFGTCMKMNKEGMVRCDTAVGTPDYISPEVLKSQGGDGYYGRECDWWSVGVFLYEMLVGDTPFYADSLVGTYSKIMNHKNSLTFPDDNDISKEAKNLICAFLTDREVRLGRNGVEEIKRHLFFKNDQWAWETLRDTVAPVVPDLSSDIDTSNFDDLEEDKGEEETFPIPKAFVGNQLPFVGFTYYSNRRYLSSANPNDNRTSSNADKSLQESLQKTIYKLEEQLHNEMQLKDEMEQKCRTSNIKLDKIMKELDEEGNQRRNLESTVSQIEKEKMLLQHRINEYQRKAEQENEKRRNVENEVSTLKDQLEDLKKVSQNSQLANEKLSQLQKQLEEANDLLRTESDTAVRLRKSHTEMSKSISQLESLNRELQERNRILENSKSQTDKDYYQLQAILEAERRDRGHDSEMIGDLQARITSLQEEVKHLKHNLEKVEGERKEAQDMLNHSEKEKNNLEIDLNYKLKSLQQRLEQEVNEHKVTKARLTDKHQSIEEAKSVAMCEMEKKLKEEREAREKAENRVVQIEKQCSMLDVDLKQSQQKLEHLTGNKERMEDEVKNLTLQLEQESNKRLLLQNELKTQAFEADNLKGLEKQMKQEINTLLEAKRLLEFELAQLTKQYRGNEGQMRELQDQLEAEQYFSTLYKTQVKELKEEIEEKNRENLKKIQELQNEKETLATQLDLAETKAESEQLARGLLEEQYFELTQESKKAASRNRQEITDKDHTVSRLEEANSMLTKDIEILRRENEELTEKMKKAEEEYKLEKEEEISNLKAAFEKNINTERTLKTQAVNKLAEIMNRKDFKIDRKKANTQDLRKKEKENRKLQLELNQEREKFNQMVVKHQKELNDMQAQLVEECAHRNELQMQLASKESDIEQLRAKLLDLSDSTSVASFPSADETDGNLPESRIEGWLSVPNRGNIKRYGWKKQYVVVSSKKILFYNDEQDKEQSNPSMVLDIDKLFHVRPVTQGDVYRAETEEIPKIFQILYANEGECRKDVEMEPVQQAEKTNFQNHKGHEFIPTLYHFPANCDACAKPLWHVFKPPPALECRRCHVKCHRDHLDKKEDLICPCKVSYDVTSARDMLLLACSQDEQKKWVTHLVKKIPKNPPSGFVRASPRTLSTRSTANQSFRKVVKNTSGKTS

SEQ ID NO: 155694 - DNA, 4065 bp, Artificial Sequence
  derived and/or modified sequence
atgagcaccggcgacagcttcgagaccagattcgagaagatggacaacctgctgagagaccccaagagcgaggtgaacagcgactgcctgctggacggcctggacgccctggtgtacgacctggacttccccgccctgagaaagaacaagaacatcgacaacttcctgagcagatacaaggacaccatcaacaagatcagagacctgagaatgaaggccgaggactacgaggtggtgaaggtgatcggcagaggcgccttcggcgaggtgcagctggtgagacacaagagcaccagaaaggtgtacgccatgaagctgctgagcaagttcgagatgatcaagagaagcgacagcgccttcttctgggaggagagagacatcatggccttcgccaacagcccctgggtggtgcagctgttctacgccttccaggacgacagatacctgtacatggtgatggagtacatgcccggcggcgacctggtgaacctgatgagcaactacgacgtgcccgagaagtgggccagattctacaccgccgaggtggtgctggccctggacgccatccacagcatgggcttcatccacagagacgtgaagcccgacaacatgctgctggacaagagcggccacctgaagctggccgacttcggcacctgcatgaagatgaacaaggagggcatggtgagatgcgacaccgccgtgggcacccccgactacatcagccccgaggtgctgaagagccagggcggcgacggctactacggcagagagtgcgactggtggagcgtgggcgtgttcctgtacgagatgctggtgggcgacacccccttctacgccgacagcctggtgggcacctacagcaagatcatgaaccacaagaacagcctgaccttccccgacgacaacgacatcagcaaggaggccaagaacctgatctgcgccttcctgaccgacagagaggtgagactgggcagaaacggcgtggaggagatcaagagacacctgttcttcaagaacgaccagtgggcctgggagaccctgagagacaccgtggcccccgtggtgcccgacctgagcagcgacatcgacaccagcaacttcgacgacctggaggaggacaagggcgaggaggagaccttccccatccccaaggccttcgtgggcaaccagctgcccttcgtgggcttcacctactacagcaacagaagatacctgagcagcgccaaccccaacgacaacagaaccagcagcaacgccgacaagagcctgcaggagagcctgcagaagaccatctacaagctggaggagcagctgcacaacgagatgcagctgaaggacgagatggagcagaagtgcagaaccagcaacatcaagctggacaagatcatgaaggagctggacgaggagggcaaccagagaagaaacctggagagcaccgtgagccagatcgagaaggagaagatgctgctgcagcacagaatcaacgagtaccagagaaaggccgagcaggagaacgagaagagaagaaacgtggagaacgaggtgagcaccctgaaggaccagctggaggacctgaagaaggtgagccagaacagccagctggccaacgagaagctgagccagctgcagaagcagctggaggaggccaacgacctgctgagaaccgagagcgacaccgccgtgagactgagaaagagccacaccgagatgagcaagagcatcagccagctggagagcctgaacagagagctgcaggagagaaacagaatcctggagaacagcaagagccagaccgacaaggactactaccagctgcaggccatcctggaggccgagagaagagacagaggccacgacagcgagatgatcggcgacctgcaggccagaatcaccagcctgcaggaggaggtgaagcacctgaagcacaacctggagaaggtggagggcgagagaaaggaggcccaggacatgctgaaccacagcgagaaggagaagaacaacctggagatcgacctgaactacaagctgaagagcctgcagcagagactggagcaggaggtgaacgagcacaaggtgaccaaggccagactgaccgacaagcaccagagcatcgaggaggccaagagcgtggccatgtgcgagatggagaagaagctgaaggaggagagagaggccagagagaaggccgagaacagagtggtgcagatcgagaagcagtgcagcatgctggacgtggacctgaagcagagccagcagaagctggagcacctgaccggcaacaaggagagaatggaggacgaggtgaagaacctgaccctgcagctggagcaggagagcaacaagagactgctgctgcagaacgagctgaagacccaggccttcgaggccgacaacctgaagggcctggagaagcagatgaagcaggagatcaacaccctgctggaggccaagagactgctggagttcgagctggcccagctgaccaagcagtacagaggcaacgagggccagatgagagagctgcaggaccagctggaggccgagcagtacttcagcaccctgtacaagacccaggtgaaggagctgaaggaggagatcgaggagaagaacagagagaacctgaagaagatccaggagctgcagaacgagaaggagaccctggccacccagctggacctggccgagaccaaggccgagagcgagcagctggccagaggcctgctggaggagcagtacttcgagctgacccaggagagcaagaaggccgccagcagaaacagacaggagatcaccgacaaggaccacaccgtgagcagactggaggaggccaacagcatgctgaccaaggacatcgagatcctgagaagagagaacgaggagctgaccgagaagatgaagaaggccgaggaggagtacaagctggagaaggaggaggagatcagcaacctgaaggccgccttcgagaagaacatcaacaccgagagaaccctgaagacccaggccgtgaacaagctggccgagatcatgaacagaaaggacttcaagatcgacagaaagaaggccaacacccaggacctgagaaagaaggagaaggagaacagaaagctgcagctggagctgaaccaggagagagagaagttcaaccagatggtggtgaagcaccagaaggagctgaacgacatgcaggcccagctggtggaggagtgcgcccacagaaacgagctgcagatgcagctggccagcaaggagagcgacatcgagcagctgagagccaagctgctggacctgagcgacagcaccagcgtggccagcttccccagcgccgacgagaccgacggcaacctgcccgagagcagaatcgagggctggctgagcgtgcccaacagaggcaacatcaagagatacggctggaagaagcagtacgtggtggtgagcagcaagaagatcctgttctacaacgacgagcaggacaaggagcagagcaaccccagcatggtgctggacatcgacaagctgttccacgtgagacccgtgacccagggcgacgtgtacagagccgagaccgaggagatccccaagatcttccagatcctgtacgccaacgagggcgagtgcagaaaggacgtggagatggagcccgtgcagcaggccgagaagaccaacttccagaaccacaagggccacgagttcatccccaccctgtaccacttccccgccaactgcgacgcctgcgccaagcccctgtggcacgtgttcaagcccccccccgccctggagtgcagaagatgccacgtgaagtgccacagagaccacctggacaagaaggaggacctgatctgcccctgcaaggtgagctacgacgtgaccagcgccagagacatgctgctgctggcctgcagccaggacgagcagaagaagtgggtgacccacctggtgaagaagatccccaagaacccccccagcggcttcgtgagagccagccccagaaccctgagcaccagaagcaccgccaaccagagcttcagaaaggtggtgaagaacaccagcggcaagaccagctag

SEQ ID NO: 155695 - DNA, 4065 bp, Artificial Sequence
  derived and/or modified sequence
atgagcactggagattcatttgaaacaaggtttgaaaaaatggacaacctactgcgggacccaaaatccgaggtcaactccgattgtctgcttgacggcctagacgcactggtatacgacctcgatttccccgcactgcgcaagaacaaaaatatcgacaacttcctgtctcggtataaggatacgattaacaaaataagggatcttcggatgaaagcggaagactatgaagtagtgaaggtgatcggtaggggggcattcggagaggttcaactggtgcgtcacaaaagtactagaaaagtgtacgccatgaagttgctctcgaagttcgaaatgataaagaggagtgactcagccttcttctgggaagagagggatattatggccttcgccaactctccttgggtcgtgcagctcttctatgcctttcaggacgacagatatttatacatggtgatggagtatatgccaggaggtgacctggttaatcttatgtctaactacgacgtgcctgagaaatgggcccggttctacacagccgaggtggttttggcgctcgatgcgatccactctatgggattcatccatagagacgtgaagcctgacaacatgctgctggacaagtccgggcatctgaaacttgccgactttgggacgtgtatgaaaatgaataaagaaggcatggtcaggtgcgataccgcagtggggacaccagattacattagccctgaggtccttaagagccagggaggggatgggtattatggaagggagtgcgactggtggtccgtgggggtgttcctgtatgaaatgctggtcggcgacactcccttttatgcagattcactagtagggacatacagtaagatcatgaatcacaaaaattcactcacgttccctgacgataacgacatcagcaaagaagcgaagaatcttatctgcgcctttttgacagacagagaggtgaggcttggccggaacggcgtggaggagataaaacggcatctgttttttaaaaacgaccaatgggcatgggagactctgcgggatacagtggcacccgtggtgccagacctgtcatccgacatcgatacttctaactttgacgatctcgaagaggataaaggggaggaagagacctttccaatccccaaagcattcgtgggcaaccagctcccatttgtcggtttcacctactactctaaccgcaggtatctctcgtcagcaaacccgaacgacaataggactagcagcaacgctgataagagtctgcaggaaagcctccagaagaccatttacaaacttgaggaacaactgcacaatgagatgcaactgaaggacgaaatggaacaaaagtgccggacttctaacatcaaactggacaagatcatgaaggaactggatgaagagggtaaccagcgaagaaacctggagtctaccgtgagccaaatcgaaaaagaaaagatgctgttacagcatagaattaacgagtaccaaaggaaagccgagcaggaaaacgagaagaggcggaatgtggaaaacgaggtgagtacgctgaaggaccagctggaggacctgaaaaaggtatctcagaacagtcagctggcgaatgaaaagctgagtcagttgcagaaacagctggaggaggcaaatgacctgctccgcactgaaagtgacacagctgtgagactgcggaaaagccacaccgagatgtcaaagtctattagtcagttggaaagcttgaatcgcgagctgcaggaaagaaatcggatcttggagaatagcaagtcccagaccgacaaagattactaccaactacaggccatcctcgaggcagagcggcgggatcgggggcatgactccgaaatgattggggatctgcaggcaaggatcacctcgctgcaggaagaagtaaaacacctcaagcacaatcttgagaaggtagaaggggaacgtaaggaggcccaggatatgctaaatcactctgagaaggagaagaacaatctcgagatagatctgaattataaacttaagtctctgcagcagcggctggagcaggaagtgaatgagcataaagtgaccaaagcgaggcttaccgataaacaccaatcaattgaagaggctaaaagtgttgccatgtgtgagatggagaaaaagctgaaggaagaacgagaggcccgcgagaaagccgaaaatcgcgtcgttcagattgagaagcaatgttcaatgctggatgttgaccttaagcagagtcagcagaaattggagcacctgaccggaaacaaagagcgaatggaggacgaagtgaagaacctcactcttcagcttgaacaagagtcaaataaaaggctgctccttcaaaatgagctcaaaacccaagcttttgaagcagacaacctaaagggtctggagaaacagatgaaacaggaaataaacaccctgctcgaggccaaaaggctcctggaattcgaattggctcagctcactaaacagtatagggggaatgaagggcaaatgagagagctgcaggatcagctcgaggccgaacaatatttcagcacactttataaaactcaggtgaaagaactcaaggaggagattgaggaaaagaaccgggagaatctcaaaaaaattcaggaactccaaaatgagaaggagacactagctacccagcttgatctcgcggagaccaaggccgagtcagaacagttggctaggggactgttggaggagcagtactttgaacttacccaagagtccaaaaaggctgcttcccggaaccgccaggagatcaccgataaagatcacaccgtgtctcgcctggaggaggcgaattctatgttgacaaaagacattgaaattttgagacgtgaaaacgaggaactcacagagaagatgaaaaaggccgaggaagaatacaagcttgagaaagaggaggaaatcagcaatttaaaagcagccttcgagaagaatataaatacagagcgtaccctcaaaacgcaggccgtgaacaaacttgccgagattatgaataggaaggacttcaagatcgaccgaaagaaggcaaacacccaagaccttcgaaaaaaagagaaggagaaccgaaaactccaactggagctgaatcaggaaagggaaaagtttaatcagatggtagtcaaacaccagaaagaactgaatgatatgcaggcccagttggtggaggaatgtgcccatcgcaatgaactccagatgcagctggcaagcaaagagagcgacattgagcagctccgggccaagttgctggacctgtccgattccacgagtgttgcttccttcccctccgctgatgaaaccgacggtaatctccccgaatcaagaatagaaggctggctttccgtgcctaataggggcaacatcaaacgctacggatggaagaagcagtacgtcgtagtgtcctctaagaagatcctcttctacaacgacgagcaagacaaggagcagagcaacccgtccatggtcctggacatcgacaagctgtttcacgtccggccagtgactcagggcgacgtgtaccgcgcagagactgaggagattcccaagatctttcagattctgtatgccaacgagggcgaatgcaggaaggacgtcgaaatggagcctgtgcagcaagccgaaaaaacaaatttccagaatcacaaaggccatgaattcattccgacactctatcattttccagctaattgtgatgcatgtgctaagccactgtggcatgtgttcaaacctccccctgccctcgaatgccggagatgtcatgtgaagtgtcacagagaccacctggataaaaaggaagaccttatctgtccatgcaaggtttcatatgatgtcaccagtgccagggatatgctcctgctcgcttgttctcaggacgagcagaagaaatgggtgacccacctggtgaaaaaaataccaaagaacccccctagcggtttcgtccgcgcctccccgagaacactgtcgactcggtcgacagctaaccagagtttccgtaaggtcgtgaaaaatacctctgggaagacaagctag

SEQ ID NO: 155696 - DNA, 4065 bp, Artificial Sequence
  derived and/or modified sequence
atgagcactggagacagctttgagaccaggtttgagaagatggacaacctgctgcgggaccccaagtctgaggtgaacagcgactgcctgctggatggcctggatgccctggtgtatgacctggacttccctgccctgaggaagaacaagaacatcgacaacttcctgagccgctacaaggacaccatcaacaagatccgggacctgaggatgaaggccgaggactatgaggtggtgaaggtgattggccgcggggcctttggagaggtgcagctggtgcgccacaagagcaccaggaaggtgtatgccatgaagctgctgagcaagtttgagatgatcaagagaagtgacagcgccttcttctgggaggagcgggacatcatggcctttgccaacagcccctgggtggtgcagctgttctacgccttccaggatgaccgctacctgtacatggtgatggagtacatgcctggaggagacctggtgaacctgatgagcaactatgatgtgcctgagaagtgggcccgcttctacacagctgaggtggtgctggccctggatgccatccacagcatgggcttcatccacagagatgtgaagccagacaacatgctgctggacaagagcggccacctgaagctggccgactttggcacctgcatgaagatgaacaaggagggcatggtgcgctgtgacacagctgtgggcaccccagactacatcagccctgaggtgctgaagagccagggcggagatggctactacggccgggagtgtgactggtggagcgtgggcgtcttcctgtatgagatgctggtgggggacacccccttctacgccgacagcctggtgggcacctacagcaagatcatgaaccacaagaacagcctgaccttcccagatgacaatgacatcagcaaggaggccaagaacctgatctgtgccttcctgacagaccgggaggtgcggctgggcagaaatggagtggaggagatcaagaggcacctgttcttcaagaatgaccagtgggcctgggagaccctgcgggacacagtggcccctgtggtgcctgacctgagcagtgacatcgacaccagcaactttgatgacctggaggaggacaagggggaggaggagaccttccccatccccaaggcctttgtgggcaaccagctgccctttgtgggcttcacctactacagcaacagacgctacctgagcagcgccaaccccaatgacaacagaaccagcagcaatgctgacaagagcctgcaggagagcctgcagaagaccatctacaagctggaggagcagctgcacaatgagatgcagctgaaggatgagatggagcagaagtgcaggaccagcaacatcaagctggacaagatcatgaaggagctggatgaggagggcaaccagaggaggaacctggagagcacagtgtcccagatcgagaaggagaagatgctgctgcagcaccgcatcaatgagtaccagaggaaggccgagcaggagaatgagaagagaagaaatgtggagaatgaggtgtccaccctgaaggaccagctggaggacctgaagaaggtgtcccagaacagccagctggccaatgagaagctgagccagctgcagaagcagctggaggaggccaatgacctgctgaggacagaaagtgacacagctgtgcggctgaggaagagccacacagagatgagcaagagcatcagccagctggagagcctgaaccgggagctgcaggagaggaaccgcatcctggagaacagcaagagccagacagacaaggactactaccagctgcaggccatcctggaggccgagcggcgggaccggggccatgattctgagatgattggagacctgcaggcccgcatcaccagcctgcaggaggaggtgaagcacctgaagcacaacctggagaaggtggagggggagaggaaggaggcccaggacatgctgaaccacagcgagaaggagaagaacaacctggagattgacctgaactacaagctgaagagcctgcagcagaggctggagcaggaggtgaatgagcacaaggtgaccaaggcccggctgacagacaagcaccagagcattgaggaggccaagtctgtggccatgtgtgagatggagaagaagctgaaggaggagcgggaggcccgggagaaggcagaaaatagagtggtgcagatcgagaagcagtgcagcatgctggatgtggacctgaagcagagccagcagaagctggagcacctgactggaaacaaggagaggatggaggatgaggtgaagaacctgaccctgcagctggagcaggagagcaacaagaggctgctgctgcagaatgagctgaagacccaggcctttgaagctgacaacctgaagggcctggagaagcagatgaagcaggagatcaacaccctgctggaggccaagaggctgctggagtttgagctggcccagctgaccaagcagtacagaggaaatgaaggccagatgagggagctgcaggaccagctggaggccgagcagtacttcagcaccctgtacaagacccaggtgaaggagctgaaggaggagattgaggagaagaaccgggagaacctgaagaagatccaggagctgcagaatgagaaggagaccctggccacccagctggacctggccgagaccaaggccgagagcgagcagctggcccggggcctgctggaggagcagtactttgagctgacccaggagagcaagaaggccgccagcaggaaccggcaggagatcacagacaaggaccacacagtgtcccggctggaggaggccaacagcatgctgaccaaggacatcgagatcctgcggcgggagaatgaggagctgacagagaagatgaagaaggccgaggaggagtacaagctggagaaggaggaggagatcagcaacctgaaggccgcctttgagaagaacatcaacacagagaggaccctgaagacccaggccgtgaacaagctggccgagatcatgaacaggaaggacttcaagattgacaggaagaaggccaacacccaggacctgaggaagaaggagaaggaaaataggaagctgcagctggagctgaaccaggagcgggagaagttcaaccagatggtggtgaagcaccagaaggagctgaatgacatgcaggcccagctggtggaggagtgtgcccacagaaatgagctgcagatgcagctggccagcaaggagagtgacatcgagcagctgcgggccaagctgctggacctgagtgacagcacctctgtggccagcttccccagcgcagatgaaacagatggcaacctgcctgagagcagaattgagggctggctgtctgtgcccaacagaggcaacatcaagagatatggctggaagaagcagtatgtggtggtgagcagcaagaagatcctcttctacaatgatgagcaggacaaggagcagagcaaccccagcatggtgctggacatcgacaagctgttccacgtgcggcctgtgacccagggagatgtgtacagagctgagacagaggagatccccaagatcttccagatcctgtatgccaatgaaggagaatgtaggaaggatgtggagatggagcctgtgcagcaggccgagaagaccaacttccagaaccacaagggccacgagttcatccccaccctgtaccacttccctgccaactgtgatgcctgtgccaagcccctgtggcacgtgttcaagcccccaccagccctggagtgccgccgctgccacgtgaagtgccaccgggaccacctggacaagaaggaggacctgatctgcccctgcaaggtgtcctatgatgtgaccagcgcccgggacatgctgctgctggcctgcagccaggatgagcagaagaagtgggtgacccacctggtgaagaagatccccaagaacccccccagcggctttgtgcgggccagccccaggaccctgagcaccaggagcacagccaaccagagcttcaggaaggtggtgaagaacaccagcggcaagaccagctag

SEQ ID NO: 155697 - DNA, 4065 bp, Artificial Sequence
  derived and/or modified sequence
atgagcaccggcgacagcttcgagacccggttcgagaagatggacaacctgttacgagatccgaagagtgaggtcaactcagactgtttgttagatgggctagatgcgctggtgtacgatcttgactttcctgctctgaggaagaataagaatatagataacttcttgagtaggtataaggatactattaataagatccgggatctgagaatgaaagcagaggattacgaggtggtgaaggttatcgggcgcggcgcctttggggaagtgcagctggtcaggcacaagagtacgcggaaggtctacgctatgaagctcctcagtaagtttgagatgattaagcgtagtgactccgcctttttttgggaagaaagagacattatggcttttgctaactccccatgggtcgtgcagctattttatgccttccaggacgaccgctacctgtacatggtgatggaatatatgccaggcggagacctggttaacctaatgtctaactatgacgtgccagagaagtgggcaaggttttacacagctgaagtagtcttggcgttggacgctatacactccatgggcttcatccatagagacgttaagccagataatatgctgttggacaagtcaggtcatcttaagctagctgatttcgggacatgcatgaaaatgaataaggagggcatggtaaggtgcgatactgccgttggaacgccagactacatatctcccgaagtgctgaagtcccagggtggagatggatactacggccgagaatgtgattggtggtccgttggcgtttttctctatgagatgttggtgggagacacaccattctacgctgactctctggtgggtacatatagtaaaatcatgaaccataaaaacagcctgacctttccagacgacaacgacatttccaaggaggcgaagaacctgatctgtgcttttctcacagacagagaggtgagactcggtcgtaatggcgttgaggagattaagcgccacctttttttcaagaacgatcaatgggcctgggaaacgcttagggacaccgtggcccctgtggttcctgatttgagtagtgacattgatacctctaacttcgacgacctggaagaagacaagggggaggaagaaacgttccctattccgaaggccttcgttggaaaccagctgccatttgtgggcttcacatactactcaaatcgccggtacctgtcatctgcgaaccccaatgataaccgtacctcaagcaatgccgacaagtccctgcaggaaagcctacagaagactatctacaagctggaagaacagctccacaacgaaatgcaactgaaagatgaaatggagcagaagtgtcggaccagcaatatcaagctggacaagattatgaaggagctggacgaggaaggtaaccaacggcgaaatctcgagagcacagtgtcacaaattgaaaaagaaaaaatgctgctgcagcacagaattaacgagtatcagcgcaaagccgaacaggagaatgagaagcggaggaacgtggaaaacgaggtgtcaactctgaaggaccagctagaagatctgaaaaaagtgagccagaactctcaattagctaacgaaaagctaagtcagctgcagaagcagctggaggaagccaatgaccttctacgaactgagagcgatacagctgtgcgactgcggaagtcgcatactgaaatgtctaaatccatttctcagctagagtcactaaatcgtgagttgcaggagaggaaccggattttggaaaactctaagtcccagacggataaggactattaccaactccaggccattctcgaggcggagagacgcgataggggacatgatagcgagatgatcggagacttgcaggctcgcattaccagtctacaggaagaggtgaaacacctgaaacacaacctggaaaaggtcgaaggcgagcgcaaggaggcccaagacatgctgaaccattccgagaaagagaagaacaatctggagatcgacttgaattacaaactgaagagcctgcagcagcgactggaacaggaggtgaatgagcacaaggtgaccaaggcccgattaaccgacaagcaccagtctattgaagaagctaagtccgtcgccatgtgtgagatggagaagaaattaaaggaggagagagaggcaagggagaaggctgaaaacagggttgtgcaaattgagaagcaatgtagcatgctggatgtggaccttaaacaatcacagcagaaactcgaacacctgaccggaaataaagagcgtatggaggacgaagtgaaaaatttgacattacagctggaacaagagtctaacaagcgactcctacttcaaaacgaactgaagacacaggcctttgaggccgacaacctcaagggtctcgaaaagcaaatgaagcaggaaattaacacacttctagaagccaagcgcctgctggagttcgagctggctcagctcacaaagcagtaccggggaaacgaggggcagatgagagaattacaggatcagttagaggctgagcaatatttcagtaccttatataaaactcaagtgaaagagctaaaggaagagatcgaggaaaaaaatcgggagaatctcaaaaagattcaggagctgcagaatgagaaagaaactttagcaacccaattggacctggcggagactaaagccgagtctgaacagctggcacggggactgctagaggagcaatacttcgaactgacacaggaatctaagaaggccgcctctagaaatcgtcaagaaatcaccgataaagaccacacagtgtcaaggctggaagaagccaactccatgttaacaaaggacatcgagatactgcgccgagagaacgaagagctcacagaaaaaatgaaaaaggcagaagaggaatataagcttgagaaggaagaagaaatttccaatctcaaggcggccttcgagaaaaatattaacactgagagaaccctgaaaacccaagcagtgaacaaactggccgaaatcatgaacaggaaagatttcaagatcgaccggaagaaagctaacacacaggacctccgcaaaaaggagaaagagaatcgtaagctgcagcttgaactgaaccaggagcgcgaaaagttcaatcaaatggtcgtgaaacaccaaaaggaattgaatgacatgcaggctcagctagttgaggaatgtgcacacagaaatgagttgcaaatgcagttggcaagcaaggaatccgacatcgagcaacttcgtgccaaactgcttgacctatcagactccaccagtgtggccagcttcccatccgcagatgaaacagacggcaatcttcctgaatctcgcattgagggctggttgtccgtgcccaacagaggaaatatcaaacgctacggttggaaaaagcagtacgtagtggtcagcagcaagaaaatcctcttttacaatgatgaacaggataaggagcaatctaacccttctatggtcttagacatcgataagctgtttcacgtacggccagttacgcagggggatgtctaccgggccgaaacagaagagattccaaagatctttcagatcttatacgctaatgaaggggagtgccggaaggatgttgaaatggagcctgtccagcaggcggaaaagaccaactttcagaatcacaaagggcatgagtttatccctacactctaccacttccccgctaactgcgatgcatgtgcaaagcctctatggcatgttttcaaaccgccacctgccctggagtgtcgccgctgccacgttaagtgccaccgggaccacctggataagaaagaggatctgatttgcccttgtaaggtatcctacgatgtgacatctgctagagacatgctgctactggcgtgctctcaggatgagcagaagaagtgggtcacacatctggtaaaaaaaattccaaaaaaccccccctctggttttgtgcgagccagcccccggactctttccacccgctctaccgccaaccagtccttcaggaaagtcgttaaaaacacaagtggcaagacctcatag

SEQ ID NO: 155698 - DNA, 4065 bp, Artificial Sequence
  derived and/or modified sequence
atgagcactggagatagtttcgagaccaggttcgagaagatggataacttgctccgcgacccaaagagcgaggtgaatagtgattgtctccttgatggactcgacgcgctggtgtatgatctggatttccctgctcttaggaagaataagaacattgacaattttctatctcgatataaagacactatcaacaagatccgcgacctgcggatgaaagctgaggattacgaagtcgttaaagtcatcgggaggggcgcttttggcgaggtacaattagtaagacacaagagcactcgcaaggtgtatgcaatgaagttgctctcaaaatttgaaatgatcaagcggtccgactcagccttcttttgggaagagcgcgacatcatggccttcgcaaatagcccgtgggtagttcagttgttctacgccttccaggatgaccgctacctgtacatggttatggagtatatgcccggtggggacctggtgaatctgatgagtaactatgacgtcccagagaaatgggcgcgattttacaccgccgaggtggttctggcactggacgccatccattctatgggcttcattcatagagatgtgaagcctgacaatatgctgcttgataagtcagggcacctcaagctggccgactttggcacgtgcatgaaaatgaacaaggaagggatggttagatgcgatacagccgtcgggacacccgactacatttctcctgaggtgttgaagagccagggcggagacggatattatggaagagaatgcgattggtggagcgtgggcgtcttcctgtacgaaatgcttgtgggcgatacccccttctacgcagattccctggtaggcacatacagcaaaatcatgaaccacaagaactccttaacctttcccgacgacaatgatatttctaaggaggccaaaaaccttatttgtgcttttttgactgatcgagaagtgcgactaggccgtaatggggtagaagagattaagaggcatctgttctttaaaaatgatcaatgggcctgggaaaccttgagggacacggtggccccagtagtgcctgatttatcaagtgacattgacacttccaactttgatgatttagaggaggataaaggagaagaggagacttttcccatccccaaggcgttcgtcggtaaccagctaccatttgtgggcttcacctactatagcaatcgccgatatctgtcttcagctaatccaaatgataaccggacaagctccaacgctgacaagtcactccaggaatcactccagaagaccatctacaaattggaggagcagctgcacaatgagatgcagctcaaggacgagatggagcagaagtgtagaactagcaacatcaagctggacaaaattatgaaggagctggacgaagaagggaatcagcgcaggaatttggaatctacggtgtcccagatagaaaaggagaagatgcttcttcaacaccgcatcaacgagtatcagagaaaagctgagcaggagaatgagaagcgcaggaatgtcgagaacgaggtcagcacacttaaggatcagctagaggatctgaagaaggtttcgcagaattcacagctggcaaacgagaagctctctcagctgcaaaagcaattggaagaagcaaatgacttgctgagaaccgagagcgacacagctgttcgtctgcggaagtcgcacactgagatgagtaagtctatcagtcaactggagtcccttaatagggagctgcaggagaggaatcggattctcgagaactcaaagtctcagacagacaaggattactaccaactgcaggcgatcttagaggcagagaggcgggaccgagggcacgacagcgagatgatcggggatctgcaggctcgcattacatccttgcaggaagaagtgaagcaccttaaacacaacctcgagaaagtcgaaggcgagagaaaagaggcacaggacatgcttaatcactcagaaaaggagaaaaacaacctggagatcgacttgaactacaagttgaagagcctgcagcagaggctggaacaggaagttaatgaacacaaggttaccaaggctaggttgactgacaagcaccaaagtatagaagaagctaagtctgtggcaatgtgcgagatggaaaagaaactcaaagaggaaagagaggccagagagaaagctgagaaccgcgtcgtgcagatcgagaagcagtgtagtatgctggacgtggatttaaagcagagccaacaaaagttggagcaccttacaggaaataaggaacgcatggaggacgaggtcaagaacttgacccttcaactggagcaagaatcaaacaaacggctgctcctccaaaacgagcttaagacccaggcgttcgaagctgataatctgaagggtcttgagaagcagatgaagcaggagatcaacacactgttagaagccaagcgtctcctggagtttgagctggcgcagttaacgaagcagtacaggggcaatgagggccaaatgcgcgagttacaggatcaactggaggccgaacagtatttctccacgctctacaaaacccaggttaaggagttgaaagaggagatagaagagaaaaacagggagaatctgaaaaagatacaagaactgcaaaatgaaaaggaaactttggcaactcagctcgatctggccgagaccaaagccgaatcagaacagctggcccgaggccttctcgaggaacagtactttgagctcacccaggagagcaagaaggccgcatcccggaatagacaagagataaccgacaaggatcacacagtgagccggctggaagaggcaaactcaatgttaacaaaagacattgagatcctgcgacgagaaaacgaggaactcaccgagaaaatgaaaaaagcagaagaggagtacaagctggagaaggaagaggaaatctcaaaccttaaagccgctttcgagaagaacattaataccgagagaacgttgaagacccaagcggtgaacaaactggccgagattatgaaccgaaaagattttaagatcgacaggaaaaaagccaacacacaggacttgagaaagaaggaaaaggagaatcgaaagctgcagctggagcttaatcaggagagggagaagtttaaccagatggttgtgaaacatcagaaagaactgaacgatatgcaggcccagttggtggaggaatgcgcccatagaaacgagctgcagatgcagctcgcttccaaagagagtgacatagagcaactcagagcgaaacttcttgatctgtcagattctacctctgtcgcctcttttcccagtgccgacgaaaccgatggtaacctgcccgagtcccgcatcgaaggatggctatctgtgcccaatagagggaacatcaaaagatatggttggaaaaagcaatacgtggtcgtgtcttccaaaaagatcttgttttataatgacgaacaggacaaggaacagtcaaatcctagcatggtcctagatatagataagctgttccacgtcagaccagtgacacagggtgatgtgtaccgcgctgagactgaggagatcccaaagattttccagatcctgtacgcgaacgaaggcgagtgcagaaaggacgtggagatggagccagtccagcaagcagagaaaacaaattttcagaaccataaaggacatgagtttataccgacactttatcactttcctgcaaattgcgatgcttgtgccaagcccctttggcatgtgtttaagcctcctcccgcattggagtgccgcagatgccacgtcaaatgtcatcgggatcacctagacaaaaaggaagacttgatctgtccctgtaaggtgtcatatgacgtgacttctgctagggacatgctgctccttgcttgctcccaggacgagcagaaaaagtgggtgacccaccttgtgaagaagattccaaaaaatcccccatcagggtttgtccgcgcttctcctcgcacactgagcacacgctcaaccgcaaatcagtcgttcaggaaggtcgttaagaatacctctgggaagacctcatag

SEQ ID NO: 155699 - DNA, 6650 bp, Artificial Sequence
  derived and/or modified sequence
gctggttccccttccgagcgtccgcgccccgcatgcgcagtctgccccggcggtctccgtttgtttgaacaggaaggcggacatattagtccctctcagcccccctcgccccaccccccaggcattcgccgccgcgactcgccctttccccggctgggaccgcagcccctcccagaagctcccccatcagcagccgccgggacccaactatcgtcttcctcttcgcccgctctccagcctttcctctgctaagtctccatcgggcatcgacctcgccctgccccaccggacaccgtagcagcagccccagcagcgacgggacaaaatgggagagtgaggctgtcctgcgtggaccagctcgtggccgagactgatcggtgcgtcgggccgggccgagtagagccggggacgcggggctagaccgtctacagcgcctctgagcggagcgggcccggcccgtggcccgagcggcggccgcagctggcacagctcctcacccgccctttgctttcgcctttcctcttctccctcccttgttgcccggagggagtctccaccctgcttctctttctctacccgctcctgcccatctcgggacggggacccctccatggcgacggcggccggggcccgctagactgaagcacctcgccggagcgacgaggctggtggcgacggcgctgtcggctgtcgtgaggggctgccgggtgggatgcgactttgggcgtccgagcggctgtgggtcgctgttgcccccggcccggggtctggagagcggaggtcccctcagtgaggggaagacgggggaaccgggcgcacctggtgaccctgaggttccggctcctccgccccgcggctgcgaacccaccgcggaggaagttggttgaaattgctttccgctgctggtgctggtaagagggcattgtcacagcagcagcaacatgtcgactggggacagttttgagactcgatttgaaaaaatggacaacctgctgcgggatcccaaatcggaagtgaattcggattgtttgctggatggattggatgctttggtatatgatttggattttcctgccttaagaaaaaacaaaaatattgacaactttttaagcagatataaagacacaataaataaaatcagagatttacgaatgaaagctgaagattatgaagtagtgaaggtgattggtagaggtgcatttggagaagttcaattggtaaggcataaatccaccaggaaggtatatgctatgaagcttctcagcaaatttgaaatgataaagagatctgattctgcttttttctgggaagaaagggacatcatggcttttgccaacagtccttgggttgttcagcttttttatgcattccaagatgatcgttatctctacatggtgatggaatacatgcctggtggagatcttgtaaacttaatgagcaactatgatgtgcctgaaaaatgggcacgattctatactgcagaagtagttcttgcattggatgcaatccattccatgggttttattcacagagatgtgaagcctgataacatgctgctggataaatctggacatttgaagttagcagattttggtacttgtatgaagatgaataaggaaggcatggtacgatgtgatacagcggttggaacacctgattatatttcccctgaagtattaaaatcccaaggtggtgatggttattatggaagagaatgtgactggtggtcggttggggtatttttatacgaaatgcttgtaggtgatacacctttttatgcagattctttggttggaacttacagtaaaattatgaaccataaaaattcacttacctttcctgatgataatgacatatcaaaagaagcaaaaaaccttatttgtgccttccttactgacagggaagtgaggttagggcgaaatggtgtagaagaaatcaaacgacatctcttcttcaaaaatgaccagtgggcttgggaaacgctccgagacactgtagcaccagttgtacccgatttaagtagtgacattgatactagtaattttgatgacttggaagaagataaaggagaggaagaaacattccctattcctaaagctttcgttggcaatcaactaccttttgtaggatttacatattatagcaatcgtagatacttatcttcagcaaatcctaatgataacagaactagctccaatgcagataaaagcttgcaggaaagtttgcaaaaaacaatctataagctggaagaacagctgcataatgaaatgcagttaaaagatgaaatggagcagaagtgcagaacctcaaacataaaactagacaagataatgaaagaattggatgaagagggaaatcaaagaagaaatctagaatctacagtgtctcagattgagaaggagaaaatgttgctacagcatagaattaatgagtaccaaagaaaagctgaacaggaaaatgagaagagaagaaatgtagaaaatgaagtttctacattaaaggatcagttggaagacttaaagaaagtcagtcagaattcacagcttgctaatgagaagctgtcccagttacaaaagcagctagaagaagccaatgacttacttaggacagaatcggacacagctgtaagattgaggaagagtcacacagagatgagcaagtcaattagtcagttagagtccctgaacagagagttgcaagagagaaatcgaattttagagaattctaagtcacaaacagacaaagattattaccagctgcaagctatattagaagctgaacgaagagacagaggtcatgattctgagatgattggagaccttcaagctcgaattacatctttacaagaggaggtgaagcatctcaaacataatctcgaaaaagtggaaggagaaagaaaagaggctcaagacatgcttaatcactcagaaaaggaaaagaataatttagagatagatttaaactacaaacttaaatcattacaacaacggttagaacaagaggtaaatgaacacaaagtaaccaaagctcgtttaactgacaaacatcaatctattgaagaggcaaagtctgtggcaatgtgtgagatggaaaaaaagctgaaagaagaaagagaagctcgagagaaggctgaaaatcgggttgttcagattgagaaacagtgttccatgctagacgttgatctgaagcaatctcagcagaaactagaacatttgactggaaataaagaaaggatggaggatgaagttaagaatctaaccctgcaactggagcaggaatcaaataagcggctgttgttacaaaatgaattgaagactcaagcatttgaggcagacaatttaaaaggtttagaaaagcagatgaaacaggaaataaatactttattggaagcaaagagattattagaatttgagttagctcagcttacgaaacagtatagaggaaatgaaggacagatgcgggagctacaagatcagcttgaagctgagcaatatttctcgacactttataaaacccaggtaaaggaacttaaagaagaaattgaagaaaaaaacagagaaaatttaaagaaaatacaggaactacaaaatgaaaaagaaactcttgctactcagttggatctagcagaaacaaaagctgagtctgagcagttggcgcgaggccttctggaagaacagtattttgaattgacgcaagaaagcaagaaagctgcttcaagaaatagacaagagattacagataaagatcacactgttagtcggcttgaagaagcaaacagcatgctaaccaaagatattgaaatattaagaagagagaatgaagagctaacagagaaaatgaagaaggcagaggaagaatataaactggagaaggaggaggagatcagtaatcttaaggctgcctttgaaaagaatatcaacactgaacgaacccttaaaacacaggctgttaacaaattggcagaaataatgaatcgaaaagattttaaaattgatagaaagaaagctaatacacaagatttgagaaagaaagaaaaggaaaatcgaaagctgcaactggaactcaaccaagaaagagagaaattcaaccagatggtagtgaaacatcagaaggaactgaatgacatgcaagcgcaattggtagaagaatgtgcacataggaatgagcttcagatgcagttggccagcaaagagagtgatattgagcaattgcgtgctaaacttttggacctctcggattctacaagtgttgctagttttcctagtgctgatgaaactgatggtaacctcccagagtcaagaattgaaggttggctttcagtaccaaatagaggaaatatcaaacgatatggctggaagaaacagtatgttgtggtaagcagcaaaaaaattttgttctataatgacgaacaagataaggagcaatccaatccatctatggtattggacatagataaactgtttcacgttagacctgtaacccaaggagatgtgtatagagctgaaactgaagaaattcctaaaatattccagatactatatgcaaatgaaggtgaatgtagaaaagatgtagagatggaaccagtacaacaagctgaaaaaactaatttccaaaatcacaaaggccatgagtttattcctacactctaccactttcctgccaattgtgatgcctgtgccaaacctctctggcatgtttttaagccaccccctgccctagagtgtcgaagatgccatgttaagtgccacagagatcacttagataagaaagaggacttaatttgtccatgtaaagtaagttatgatgtaacatcagcaagagatatgctgctgttagcatgttctcaggatgaacaaaaaaaatgggtaactcatttagtaaagaaaatccctaagaatccaccatctggttttgttcgtgcttcccctcgaacgctttctacaagatccactgcaaatcagtctttccggaaagtggtcaaaaatacatctggaaaaactagttaaccatgtgactgagtgccctgtggaatcgtgtgggatgctacctgataaaccaggcttctttaaccatgcagagcagacaggctgtttctttgacacaaatatcacaggcttcagggttaagattgctgtttttctgtccttgctttggcacaacacactgagggttttttttattgcgggtttgcctacaggtagattagattaattattactatgtaatgcaagtacagttgggggaaagcttaggtagatatattttttttaaaaggtgctgcctttttggatttataagaaaatgcctgtcagtcgtgatagaacagagttttcctcatatgagtaagaggaagggactttcactttcaagtggaacagccatcactatcaagatcagctcatggaaggagtaaagaaaatatctcaaaatgagacaaactgaagttttgttttttttttaatgacttaagtttttgtgctcttgcaagactatacaaaactattttaagaaagcagtgatatcacttgaacttcagtgccctcactgtagaatttaaaagccttactgttgattgcccatgttggacttgatggagaaattaaatatctttcattatgctttacaaaatactgtatatgtttcagcaagtttggggaatgggagaggacaaaaaaaagttacatttaatctatgcatttttgccaagccatattgagttattttactactagagacattaggaaactaactgtacaaaagaaccaagtttaaaagcattttgtggggtacatcatttctataattgtataatgtatttctttgtggttttaaatgataaagacattaagttaacaaacatataagaaatgtatgcactgtttgaaatgtaaattattcttagaacactttcaatgggggttgcattgtccttttagtgccttaatttgagataattattttactgccatgagtaagtatagaaatttcaaaaaatgtattttcaaaaaattatgtgtgtcagtgagtttttcattgataattggtttaatttaaaatatttagaggtttgttggactttcataaattgagtacaatctttgcatcaaactacctgctacaataatgactttataaaactgcaaaaaatgtagaaggttgcaccaacataaaaaggaaatatggcaatacatccatgatgttttccagttaacataggaattaccagataaatactgttaaactcttgtccagtaacaagagttgattcatatggacagtatgatttattgtttatttttttaaccaaatacctcctcagtaatttataatggctttgcagtaatgtgtatcagataagaagcactggaaaaccgatcgtctctaggatgatatgcatgtttcaagtggtattgaaagccgcactgatggatatgtaataataaacatatctgttattaatatactaatgactctgtgctcatttaatgagaaataaaagtaatttatggatgggtatctttaatttttactgcaatgtgttttctcatggctgaaatgaatggaaaacatacttcaaattagtctctgattgtatataaatgtttgtgaaattccatggttagattaaagtgtatttttaaaagataaaa

SEQ ID NO: 155700 - protein, 1007 aa, Artificial Sequence
  derived and/or modified sequence
MSRRKQRKPQQLISDCEGPSASENGDASEEDHPQVCAKCCAQFTDPTEFLAHQNACSTDPPVMVIIGGQENPNNSSASSEPRPEGHNNPQVMDTEHSNPPDSGSSVPTDPTWGPERRGEESPGHFLVAATGTAAGGGGGLILASPKLGATPLPPESTPAPPPPPPPPPPPGVGSGHLNIPLILEELRVLQQRQIHQMQMTEQICRQVLLLGSLGQTVGAPASPSELPGTGTASSTKPLLPLFSPIKPVQTSKTLASSSSSSSSSSGAETPKQAFFHLYHPLGSQHPFSAGGVGRSHKPTPAPSPALPGSTDQLIASPHLAFPSTTGLLAAQCLGAARGLEATASPGLLKPKNGSGELSYGEVMGPLEKPGGRHKCRFCAKVFGSDSALQIHLRSHTGERPYKCNVCGNRFTTRGNLKVHFHRHREKYPHVQMNPHPVPEHLDYVITSSGLPYGMSVPPEKAEEEAATPGGGVERKPLVASTTALSATESLTLLSTSAGTATAPGLPAFNKFVLMKAVEPKNKADENTPPGSEGSAISGVAESSTATRMQLSKLVTSLPSWALLTNHFKSTGSFPFPYVLEPLGASPSETSKLQQLVEKIDRQGAVAVTSAASGAPTTSAPAPSSSASSGPNQCVICLRVLSCPRALRLHYGQHGGERPFKCKVCGRAFSTRGNLRAHFVGHKASPAARAQNSCPICQKKFTNAVTLQQHVRMHLGGQIPNGGTALPEGGGAAQENGSEQSTVSGAGSFPQQQSQQPSPEEELSEEEEEEDEEEEEDVTDEDSLAGRGSESGGEKAISVRGDSEEASGAEEEVGTVAAAATAGKEMDSNEKTTQQSSLPPPPPPDSLDQPQPMEQGSSGVLGGKEEGGKPERSSSPASALTPEGEATSVTLVEELSLQEAMRKEPGESSSRKACEVCGQAFPSQAALEEHQKTHPKEGPLFTCVFCRQGFLERATLKKHMLLAHHQVQPFAPHGPQNIAALSLVPGCSPSITSTGLSPFPRKDDPTIP

SEQ ID NO: 155701 - protein, 608 aa, Artificial Sequence
  derived and/or modified sequence
MSRRKQRKPQQLISDCEGPSASENGDASEEDHPQVCAKCCAQFTDPTEFLAHQNACSTDPPVMVIIGGQENPNNSSASSEPRPEGHNNPQVMDTEHSNPPDSGSSVPTDPTWGPERRGEESPGHFLVAATGTAAGGGGGLILASPKLGATPLPPESTPAPPPPPPPPPPPGVGSGHLNIPLILEELRVLQQRQIHQMQMTEQICRQVLLLGSLGQTVGAPASPSELPGTGTASSTKPLLPLFSPIKPVQTSKTLASSSSSSSSSSGAETPKQAFFHLYHPLGSQHPFSAGGVGRSHKPTPAPSPALPGSTDQLIASPHLAFPSTTGLLAAQCLGAARGLEATASPGLLKPKNGSGELSYGEVMGPLEKPGGRHKCRFCAKVFGSDSALQIHLRSHTGERPYKCNVCGNRFTTRGNLKVHFHRHREKYPHVQMNPHPVPEHLDYVITSSGLPYGMSVPPEKAEEEAATPGGGVERKPLVASTTALSATESLTLLSTSAGTATAPGLPAFNKFVLMKAVEPKNKADENTPPGSEGSAISGVAESSTATRMQLSKLVTSLPSWALLTNHFKSTGSFPFPYVPEEVHQCCHSAAACPDAPGGPDPQRWYCTP

SEQ ID NO: 155702 - DNA, 4910 bp, Artificial Sequence
  derived and/or modified sequence
gagctgcagaagcgtagggaagaagctgaagaaaaaaagggggcgtctcccctttaaagacttgcaaagattgagagagaaagagagagagtcaagaacagagaatcagagagagagagagagtctgtgtctctgggaaagaagaacatctctgcttcacagtgatttgcgctgggggagaggcatcaattggcttcggacccaagggggagacgagaccaggtcaccccggttaagaccaagtgagcgttgcccctccctctcccaactctctacccgggaatgtctcggcgaaagcagcggaaaccccaacagttaatctcggactgcgaaggtcccagcgcgtctgagaacggtgatgctagcgaggaggatcacccccaagtctgtgccaagtgctgcgcacaattcactgacccaactgaattcctcgcccaccagaacgcatgttctactgaccctcctgtaatggtgataattgggggccaggagaaccccaacaactcttcggcctcctctgaaccccggcctgagggtcacaataatcctcaggtcatggacacagagcatagcaaccccccagattctgggtcctccgtgcccacggatcccacctggggcccagagaggagaggagaggagtcttcagggcatttcctggtcgctgccacaggtacagcggctgggggaggcgggggcctgatcttggccagtcccaagctgggagcaaccccattacctccagaatcgacccctgcaccccctcctcctccaccaccccctccgcccccaggggtaggcagtggccacttgaatatccccctgatcttggaagagctacgggtgctgcagcagcggcagatccatcagatgcagatgactgagcaaatctgcaggcaggtgctgttgcttggctccttaggccagacggtgggtgcccctgccagtccctcagagctacctgggacagggactgcctcttccaccaagcccctactacccctcttcagccccatcaagcctgtccaaaccagcaagacactggcatcttcctcctcctcctcctcttcctcttcaggggcagaaacgcccaagcaggccttcttccacctttaccacccactggggtcacagcatcctttctctgctggaggggttgggcgaagccacaaacccacccctgccccttccccagccttgccaggcagcacagatcagctgattgcctcgcctcatctggcattcccaagcaccacgggactactggcagcacagtgtcttggggcagcccgaggccttgaggccactgcctccccagggctcctgaagccaaagaatggaagtggtgagctgagctacggagaagtgatgggtcccttggagaagcctggtggaaggcacaaatgccgcttctgtgccaaagtatttggcagtgacagtgccctgcagatccaccttcgttcccacacgggtgagaggccctataagtgcaatgtctgtggaaaccgttttaccacccgtggcaacctcaaagtgcatttccaccggcatcgtgagaagtacccacatgtgcagatgaacccacacccagtaccagagcacctagactatgtcattaccagcagtggcttgccttatggtatgtccgtgccaccagagaaggccgaggaggaggcagccactccaggtggaggggttgagcgcaagcctctggtggcctccacaacagcactcagtgccacagagagcctgactctgctctccaccagtgcaggcacagccacggctccaggactccctgctttcaataagtttgtgctcatgaaagcagtggaacccaagaataaagctgatgaaaacacccccccagggagtgagggctcagccatcagtggagtggcagaaagtagcacggcaactcgcatgcaactaagtaagttggtgacttcactaccaagctgggcactgcttaccaaccacttcaagtccactggcagcttccccttcccctatgtgctagagcccttgggggcctcaccctctgagacatcaaagctgcagcaactggtagaaaagattgaccggcaaggagctgtggcggtgacctcagctgcctcaggagcccccaccacctctgcccctgcaccttcatcctcagcctcttctggacctaaccagtgtgtcatctgtctccgagtgcttagctgtcctcgggccctacgccttcattatggccaacatggaggtgagaggcccttcaaatgcaaagtgtgtggcagagccttctccaccaggggtaatctgcgtgcacatttcgtgggccacaaggccagtccagctgcccgggcacagaattcctgccccatctgccagaagaagttcaccaatgctgtcactctgcagcagcatgtccggatgcacctggggggccagatccccaacggtggtactgcactccctgaaggtggaggagctgctcaggagaatggctccgagcaatctacagtctccggggcagggagtttcccccagcagcagtcccagcagccatcaccggaagaggagttgtctgaggaggaggaagaggaggatgaggaagaagaggaagatgtgactgatgaagattccctggcagggagaggctcagagagtggaggtgagaaggcaatatcagtgagaggtgattcagaagaggcatctggggcagaggaggaggtggggacagtggcggcagcagccacagctgggaaggagatggacagtaatgagaaaactactcaacagtcttctttgccaccaccaccaccacctgacagcctggatcagcctcagccaatggagcagggaagcagtggtgttttaggaggcaaggaagaggggggcaaaccggagagaagctcaagtccggcatcagcactcaccccagaaggggaagccaccagcgtgaccttggtagaggagctgagcctgcaggaggcaatgagaaaggagccaggagagagcagcagcagaaaggcctgcgaagtgtgtggccaggcctttccctcccaggcagctctggaggagcatcagaagacccaccccaaggaggggccgctcttcacttgtgttttctgcaggcagggctttcttgagcgggctaccctcaagaagcatatgctcctggcacaccaccaggtacagccctttgccccccatggccctcagaatattgctgctctttctctagtccctggctgttcgccttccatcacctccacagggctctccccctttccccgaaaagatgaccccacgatcccatgagcctgtttttctgtacctgctgctctttgtcccacagagcagaaacagcttcacaaaaggacctcccagagttatgagccctgattttgtctttttctctaagttcttaacatgttatgtccctagtggcttttctgtagtccctgagcttggaaattactgtgcttacaaggggatggccccctaaggaatttttcttccctcctcattctttgtacctgaggaacatagattctctgcagctttctcaaggggaaccctctccagcttccctggtgtgacccttcttccccctcctctctcctctccctttccctttggtaggtgcacctgagcacctacatttggcattgcagcctagccaaaaagggctggcagctgtctctggagggcccagtgccactcctctggggtgacctttctgctcagctggtgggtatgggtcccctatctttctagaaccagtatgtggcattcctgtcaaatggcctgcccatgaagccctggaattccagctccacctccactaccactccaagcctggccccaccagtgctgtttggcctaggaactgtggctgggaaggtgcctccaacaatgggatccagggaagccaaggagaagacagcccccctcctatttcagcctcctgcacccaaggcagtgcctgagaagcccatcatagacaagaagtagcaaactgtacattccttcttcctccccctgctccagaaggtgccggtactgaagatgctccagtaattggtgacccaaccctaggaagtagggagaaatgaaggaagggcataggaaaattttcccagtaaatcccctgatggtcacattaaggtaaaggttttggctggtcagtgtgccaagacctctccagcttctcattcatgatgacctctcaaagttgggaaacaagctgatttcttgccaagaggtctcccaggagatatttgggaaatgtgaagttcgtatctttaaggagcatttttggtcagcatggttgatgaactaatgatgagagagttaaggaatgttgctagaacatagggcttgctggtacctatgtgactaagaaagggacatgatgtaagggaaaaggcctcaaattcttgtgaatgtggacattctcgttaatattcttttgggctaatagtgacatagtgtgcagaggtgtaccagggatcatgggggatttcctagcactagtatgcttctagttttagataactccctcctttattccctggccccttgtattttccttatcttcctctttcaagacccctacccattttgcctatccgtaggctggggcttgtgtctttgtcattgtctggttcttaagagtcccagctccaggtggcgtcctccctgcctctccgtcttgtaatgagttgtagtatttactcttaacataggatcatttggaacaggagttctgaggaggagagagtgagggttttgctattgactgacttgaacgatggcttctcctcaagctgtaggctccagagcttcctaacctagtaaaatgtcaagaacagacgggagatattagtgtctttccctctatcattaaaggtgttttaacc

SEQ ID NO: 155703 - DNA, 3024 bp, Artificial Sequence
  derived and/or modified sequence
atgtcacgcagaaagcagagaaagcctcaacagctgatctccgattgtgagggcccgagtgcgtccgaaaatggagatgctagcgaggaggaccatccccaggtgtgcgccaaatgttgtgcgcagttcaccgatcctacagagttcttggctcaccagaacgcctgctcaacagacccgcccgtgatggttatcattggcggacaggaaaacccaaacaattccagcgcttcttccgagccgaggcctgagggacacaacaacccccaggtcatggatacagagcactcaaatccacccgacagtgggagttctgtcccgacggatccgacgtgggggcctgagcgccgcggcgaagagagtcccgggcactttctagtggccgctacagggacggccgctggcgggggaggagggctgattctcgccagtccaaaattaggggcgaccccattgcctccggagtctacacccgcaccacccccaccccccccaccaccgcctcctcctggcgtgggcagcggccatttgaacataccactgattctcgaagagctgcgcgttcttcagcagcggcaaattcaccaaatgcagatgactgagcagatttgtaggcaagttttactgctgggatctcttggacagacagttggggcacctgcttccccttcggagttgccaggcacggggacagcatctagcacaaagccgctcttgcctcttttttcgcccatcaagcctgtccagaccagcaaaactctcgcctccagcagctcgtcaagctctagctcgtccggagccgagacacccaagcaggctttcttccacctgtaccaccctctgggaagccagcaccccttcagtgccggtggggttggcaggagtcacaagccgacccccgctcccagtccagcacttcccgggtctactgatcaactgattgcgtcccctcaccttgcgtttccatcaaccaccggcctgctggcagcacagtgcctcggagcggcgagggggcttgaagccactgcttctccaggactgctcaagcccaaaaacggaagcggcgaactctcctatggtgaggttatgggcccactcgaaaagccagggggtcggcacaagtgcagattttgtgccaaggtctttggtagcgattccgccctccagatccatctgcggtcccacactggagaacgcccatacaagtgtaatgtctgtggcaacaggttcaccacccgagggaacctcaaagtacatttccaccggcaccgagaaaaatatccccatgtgcagatgaacccgcaccccgtgcctgaacacttggactacgtgattacgagctcgggcctcccatacggaatgtctgtgcctccagagaaagccgaggaggaagctgccaccccaggagggggagtcgaacgcaaacctcttgtggcctctacgacagctctcagcgcgacagaatctctgacccttctgtctacttctgctggcacagctaccgccccagggctccccgccttcaacaagtttgtgctgatgaaggctgtagagcccaagaacaaggccgatgaaaacacaccccctggaagtgaagggagcgctattagcggagtggctgagtcctccactgccacaagaatgcaactgtcaaaactagttacttcactccccagctgggctctgctgaccaaccatttcaagtcaactggcagttttccattcccttacgtcctggagccgttaggcgcttccccctccgagacatctaagctgcaacagctcgttgaaaaaattgaccgacaaggggccgtcgccgtcacctccgccgcaagcggcgcccccaccacgtccgcaccggcaccctcgagctcggcatcatctggacctaatcagtgcgtaatttgcctgcgcgttctttcatgtccgcgtgcattaagacttcactacgggcagcacggcggagagcgcccctttaagtgtaaggtgtgtggaagagcattctccactcgaggcaatctccgcgcccacttcgtgggccacaaggcatcacccgctgctagggcacaaaattcatgcccgatctgccaaaaaaagttcacgaatgccgtcacactgcaacaacacgtgcgcatgcacttgggcgggcagatccccaatggagggacggctctgccagagggcggaggagcagcccaagaaaatggcagcgaacagagtacagtcagcggcgcagggtcttttccacaacagcaatcacagcagccatccccagaggaagaactgtccgaggaagaagaggaggaagatgaagaagaggaagaggatgtcacagacgaagatagtttggccgggagggggagtgagagtggtggggagaaggcgattagcgtgcgcggcgactctgaggaagcatctggcgctgaggaggaggtcgggacggtggcggctgccgcaaccgccggcaaagagatggattcaaatgagaagaccacccagcagagctcactgccccctccacctccccctgactctctggatcaacctcagcctatggaacagggttcctcaggcgtactgggcggaaaggaggaaggcggtaagcccgagagatcatcatctcccgcttccgcgctgacccctgagggcgaggcaacatctgtaaccttggtggaggagctctccctgcaggaagctatgagaaaggagccaggggagtcaagttcgagaaaagcgtgcgaagtgtgtggccaggccttcccaagccaggcggcactcgaagaacatcagaagactcatccaaaggaaggccctctctttacgtgcgttttttgcaggcagggttttctggagagggcgaccttaaaaaaacacatgcttttggcacatcatcaagtgcaaccctttgcccctcacggcccacaaaacatcgctgctctttctctcgtgccaggatgctcaccctctatcacgtccactggtctgtcccctttcccacggaaagatgatccaaccatcccctag

SEQ ID NO: 155704 - DNA, 3024 bp, Artificial Sequence
  derived and/or modified sequence
atgagcaggaggaagcagaggaagccccagcagctgatcagtgactgtgagggccccagcgcctctgaaaatggagatgccagcgaggaggaccacccccaggtgtgtgccaagtgctgtgcccagttcacagaccccacagagttcctggcccaccagaatgcctgcagcacagacccccctgtgatggtgatcatcggcggccaggagaaccccaacaacagcagcgccagcagcgagcccaggcctgagggccacaacaacccccaggtgatggacacagagcacagcaaccccccagacagcggcagctctgtgcccacagaccccacctggggccctgagcggcggggggaggagagccctggccacttcctggtggccgccaccggcacagctgctgggggcggcggcggcctcatcctggccagccccaagctgggcgccacccccctgcccccagagagcaccccagcccctcctcctcctcctcctcctcctcctcctcctggggtgggcagcggccacctgaacatccccctcatcctggaggagctgcgggtgctgcagcagaggcagatccaccagatgcagatgacagagcagatctgccggcaggtgctgctgctgggcagcctgggccagacagtgggcgccccagccagccccagcgagctgcccggcactggaacagccagcagcaccaagcccctgctgcccctcttcagccccatcaagcctgtgcagaccagcaagaccctggccagcagcagcagcagcagcagcagcagcagtggagctgagacccccaagcaggccttcttccacctgtaccaccccctgggcagccagcaccccttctctgctggaggagtgggccgcagccacaagcccaccccagcccccagccctgccctgcccggcagcacagaccagctgattgccagcccccacctggccttccccagcaccaccggcctgctggccgcccagtgcctgggcgccgcccggggcctggaggccacagccagccctggcctgctgaagcccaagaatggcagcggggagctgtcctatggagaggtgatgggccccctggagaagccaggcggccgccacaagtgccgcttctgtgccaaggtgtttggaagtgacagcgccctgcagatccacctgcggagccacactggagagcggccctacaagtgcaatgtgtgtggcaaccgcttcaccacccggggcaacctgaaggtgcacttccaccgccaccgggagaagtacccccacgtgcagatgaacccccaccctgtgcctgagcacctggactatgtgatcaccagcagcggcctgccctacggcatgtctgtgcccccagagaaggccgaggaggaggccgccacccctgggggcggcgtggagaggaagcccctggtggccagcaccacagccctgagcgccacagagagcctgaccctgctgagcaccagcgctggaacagccacagcccctggcctgcctgccttcaacaagtttgtgctgatgaaggctgtggagcccaagaacaaggcagatgagaacaccccacctggcagcgagggcagcgccatctctggagtggccgagagcagcacagccaccaggatgcagctgagcaagctggtgaccagcctgcccagctgggccctgctgaccaaccacttcaagagcacaggcagcttccccttcccctacgtgctggagcccctgggcgccagccccagcgagaccagcaagctgcagcagctggtggagaagattgaccggcagggcgctgtggccgtgaccagcgctgccagcggggcccccaccaccagcgccccagcccccagcagcagcgccagcagcggccccaaccagtgtgtgatctgcctgcgggtgctgagctgcccccgggccctgcggctgcactacggccagcacggcggggagcggcccttcaagtgcaaggtgtgtggccgggccttcagcacccggggcaacctgcgggcccactttgtgggccacaaggccagccctgctgcccgggcccagaacagctgccccatctgccagaagaagttcaccaatgctgtgaccctgcagcagcacgtgaggatgcacctgggcggccagatccccaacggcggcacagccctgcctgagggcggcggggccgcccaggagaatggaagtgagcagagcacagtgtctggagctggcagcttcccccagcagcagagccagcagcccagccctgaggaggagctgtctgaggaggaggaggaggaggatgaggaggaggaggaggatgtgacagatgaggacagcctggccggccggggcagcgagagcggcggggagaaggccatctctgtgcggggggacagcgaggaggccagcggggctgaggaggaggtgggcaccgtggccgccgccgccacagctgggaaggagatggacagcaatgagaagaccacccagcagagcagcctgcccccacctcctcctccagacagcctggaccagccccagcccatggagcagggcagcagtggagtgctgggcggcaaggaggagggcggcaagccagagaggagcagcagccctgccagcgccctgaccccagagggggaggccacctctgtgaccctggtggaggagctgagcctgcaggaggccatgaggaaggagcccggggagagcagcagcaggaaggcctgtgaggtgtgtggccaggccttccccagccaggccgccctggaggagcaccagaagacccaccccaaggagggccccctcttcacctgtgtgttctgccggcagggcttcctggagcgggccaccctgaagaagcacatgctgctggcccaccaccaggtgcagccctttgccccccacggcccccagaacattgctgccctgagcctggtgcccggctgcagccccagcatcaccagcacaggcctgagccccttccccaggaaggatgaccccaccatcccctag

SEQ ID NO: 155705 - DNA, 3024 bp, Artificial Sequence
  derived and/or modified sequence
atgagccggcggaagcagcggaagccccagcagctgatcagcgactgcgagggcccctctgccagtgagaacggagatgctagcgaggaggaccacccccaggtctgcgccaagtgttgcgcccagttcacagatccaaccgagttcctcgcccaccagaacgcgtgtagtacagatccccccgtgatggtcatcatagggggccaagaaaatccgaacaattcatctgcctcgagcgaaccccgccctgagggccacaacaatccacaggtgatggacactgagcacagtaaccctccagacagcggatcgtcagtgccgacggaccctacatggggtcccgagcgtcgaggcgaagagtcgcctgggcacttcctggtcgcagctactggtacagctgccggcggtggagggggcttgatcctagctagcccaaagctgggggcaacacccttgcctccggagtcaacccctgcccctcctcctccccctccgccacccccgccccccggggtcgggtccggtcacttgaacatcccactgatattagaggagctgcgggtactacagcagcgccaaattcaccaaatgcaaatgacagaacaaatctgtcgccaggtgctgctcctggggtctctaggacaaaccgtcggagcaccagcctctccttctgagttaccaggtactgggacagcatcctcgactaagccactgctgcctctcttctcacccatcaagcccgtgcaaacgagcaaaacactcgctagttctagcagcagcagctcaagctccagcggcgcagagaccccgaaacaggcctttttccatctgtaccatcctctgggctctcagcaccctttttctgcggggggagttggccgtagccacaagccaacacctgcccctagccctgccctgcccgggagcacggatcaactgattgctagcccgcatcttgctttcccatcgaccaccggtctgcttgccgcccagtgcctcggcgctgctcggggcttggaagcaaccgcctcccccggactcctgaagccaaagaatggttcgggagaactgagctatggggaggttatgggcccccttgaaaagccagggggccgacacaaatgccgattttgtgccaaggtgttcggctcggactcagcattacagatccacctgagaagtcacacaggagaaagaccttataagtgcaacgtatgcgggaaccgcttcacgacccgaggcaatctaaaggtccacttccaccgacaccgcgaaaaataccctcatgtccaaatgaaccctcatcctgttccagagcaccttgattacgtgattactagctccggcctcccctacgggatgtcggtgcccccggagaaggccgaggaagaagctgccactccaggtggcggtgtagaaaggaagcctctcgtagccagcaccactgcactgtctgcaacagagtccttgactctcctttccacttctgcgggtacggccactgctcccgggctgccagcattcaacaaatttgttctgatgaaggccgtggaaccaaagaacaaggcagatgaaaataccccccccggatccgaggggtccgctattagcggggtagctgaatcttccactgccacccgaatgcaattatcaaaactcgtaactagcctgcccagctgggcacttctgaccaatcattttaaaagcacaggtagcttcccttttccctacgtactggagccgctgggggccagtcctagtgagacttccaagttacagcaactcgtggaaaaaatcgatcgccagggtgccgttgcagtcacaagcgctgcctccggggcgcccactacaagcgccccggccccgtcttcctctgcatcatctggacccaatcagtgcgtgatctgcttgcgtgtgctgagttgccccagggccctcaggctccactacgggcagcacggaggagagcgacccttcaagtgcaaagtgtgcggcagagccttcagcacccgcggcaacctccgggcacatttcgtgggtcacaaggcatccccggctgctagggcccaaaatagttgccccatctgtcagaagaagttcacaaacgctgtcacattacagcaacacgtgcggatgcatctgggagggcaaattcctaatgggggaactgccctgccagagggtggtggggccgctcaggaaaacggcagcgagcaaagcacggtgtctggcgctggcagcttcccccagcagcagtcacagcagccatcgcccgaagaggaactgtccgaggaagaggaggaggaggatgaggaggaggaagaagacgtaacagacgaggacagcttagctggacgaggaagcgaaagcggaggagaaaaagccatctctgtgaggggcgattccgaagaggcaagcggggccgaggaggaggttggaactgtggcggccgcagcaaccgctggaaaagagatggattcaaacgaaaaaaccacacaacagtcctcgttgccacccccccctcctccagatagcctggaccagcctcaacctatggaacaggggtcgtccggcgtcctgggaggcaaggaagaaggaggtaagcccgagcgcagctcctctccagcctcagcactcaccccagagggagaggccacctccgtgaccctggtggaggagctatctctgcaagaagctatgcgcaaggagccaggcgagagcagctcccgtaaggcatgcgaagtgtgcggccaggcgttcccgtcgcaggctgctctggaagaacatcaaaagacacaccctaaggagggcccgctcttcacctgcgtgttctgtcggcaaggctttctggaaagggcaactctcaaaaagcatatgctgcttgcccatcatcaggtgcagcctttcgccccccatggaccccagaacattgccgcattgtctttggtgccaggttgtagtccttcgattacctccaccggactgagcccctttcctaggaaggatgatccaacaataccttag

SEQ ID NO: 155706 - DNA, 3024 bp, Artificial Sequence
  derived and/or modified sequence
atgagtcggcgtaaacagcgaaagcctcagcagctcatctcagactgcgagggaccttcagccagcgagaatggcgacgcttccgaagaagaccatccacaggtgtgcgcaaagtgttgtgctcagtttaccgaccctaccgaatttctggcgcatcagaacgcctgctcaaccgaccctccggtcatggtgatcattggaggacaggagaacccgaacaactccagtgcctcaagtgagccccgaccggagggccacaataatcctcaggttatggacaccgaacacagcaatcccccagacagtggcagctctgtgcctactgacccaacttggggccctgagagaaggggcgaggaatccccgggacactttctggtggccgctaccgggacagctgccggaggcggagggggattaatactggcaagtcctaagctcggggctactcccctgccccctgaatctaccccagctccacctccacccccacctcctccccctccaccgggagtgggcagcggccacctgaatattcccctaatcctagaggagctgagggtattacagcagagacagatccaccagatgcagatgactgaacagatttgccgccaagtactgcttctgggcagtctcggccaaacggttggcgcacctgcttccccatcggaactccccggtaccggcactgcatcgagcacaaaaccactgttgcccctcttttcaccgatcaagcccgttcagacctctaaaacactcgcatcatcctcttccagttccagctcctcttctggcgctgaaacccccaaacaggctttctttcacctgtatcatcccctaggatcccaacacccattctccgctggaggtgttggcagatcccacaaacccactcccgcaccatccccagccctacccggtagcactgaccagctcatcgcgagcccacacctcgcttttcccagtactacggggctcctggccgctcaatgtctgggggctgcacggggtctggaggctaccgccagccccggactcctcaaaccaaaaaacggttcaggcgaattgtcatacggggaagttatgggccctctggaaaagccaggcggacgccacaagtgccggttttgtgctaaagtctttgggtctgatagtgctctgcagatacatctgcgctctcacaccggcgaacggccttataaatgtaatgtatgcggcaaccgatttactacccgaggtaatcttaaagtgcattttcaccggcaccgagagaagtacccacatgtgcagatgaatccccatcccgtgccagagcacctggattacgtgattacaagtagtggtctcccctacggcatgtctgtgcccccagaaaaggcagaagaggaggcggcaaccccaggaggtggagttgagcgaaagcccctcgtggccagcactacggccctgagcgccactgagtctctgactctgttatcaacctcggccggaacagctaccgcccctggtctcccagcttttaataaatttgttcttatgaaagccgtggagcctaaaaataaagccgacgagaacacacccccagggtcagagggttctgctatttctggagtggctgagtctagcacagcgaccaggatgcaactgtcgaaactggtaacatctttgccttcgtgggccctactcactaatcattttaagtccacaggaagcttcccctttccttatgtcctggagcctctaggagccagcccttctgagacctcaaaactacagcaactcgtagagaaaatcgacagacagggggcagtggccgtgacctccgccgcatctggcgcaccaaccactagcgccccagcacctagcagcagcgccagctcaggaccaaatcagtgcgtgatctgcctccgcgtactgtcatgtccgagagcgttgcgacttcactatggccaacacggcggagagagacctttcaaatgtaaagtatgtgggcgtgcgtttagtactaggggcaatctgcgtgcccacttcgtgggtcataaggccagccctgccgcacgtgcgcagaactcctgccccatatgccagaagaaattcaccaatgcagtcacattgcagcaacacgtgcgaatgcacctgggcggtcagattccgaatgggggaactgctctgccagaagggggaggagcagctcaggagaatggaagcgaacagagtacggtttcaggcgctggaagcttccctcagcaacagagtcagcagccgtctcccgaggaagaactctctgaagaagaggaagaggaagatgaagaagaagaagaggatgtcactgatgaagactccctcgctggcaggggtagcgagtcaggaggcgaaaaggccatctcggtgcgtggggacagcgaggaggcatctggggcagaggaagaagtagggaccgtggccgcagctgccaccgcaggtaaggagatggactctaatgaaaagaccacgcagcaatcttcgctgcctccaccccctccaccagattccctagatcagccccaaccaatggagcagggtagctcaggagtgctcggcggaaaggaagaaggcggaaaaccagagcggtcaagcagtccggcaagcgctctaacacccgagggggaagctacttccgttactctggtggaagaactatctttacaggaggcaatgcgaaaggaaccaggcgagtcaagctctaggaaagcttgtgaagtgtgtggccaggcgttcccctctcaggctgccttggaggagcaccagaagacacacccaaaggaggggccactgttcacatgtgttttctgccgacaagggttcttagaacgggctactctgaagaagcatatgctccttgcccatcaccaagtgcaaccttttgccccacatggccctcagaacattgccgctctgagcctcgtgcccggatgtagccctagcatcacctccactggtttgtctccatttcctaggaaagatgatcccactattccatag

SEQ ID NO: 155707 - DNA, 4925 bp, Artificial Sequence
  derived and/or modified sequence
gcttttacaatgggagctgcagaagcgtagggaagaagctgaagaaaaaaagggggcgtctcccctttaaagacttgcaaagattgagagagaaagagagagagtcaagaacagagaatcagagagagagagagagtctgtgtctctgggaaagaagaacatctctgcttcacagtgatttgcgctgggggagaggcatcaattggcttcggacccaagggggagacgagaccaggtcaccccggttaagaccaagtgagcgttgcccctccctctcccaactctctacccgggaatgtctcggcgaaagcagcggaaaccccaacagttaatctcggactgcgaaggtcccagcgcgtctgagaacggtgatgctagcgaggaggatcacccccaagtctgtgccaagtgctgcgcacaattcactgacccaactgaattcctcgcccaccagaacgcatgttctactgaccctcctgtaatggtgataattgggggccaggagaaccccaacaactcttcggcctcctctgaaccccggcctgagggtcacaataatcctcaggtcatggacacagagcatagcaaccccccagattctgggtcctccgtgcccacggatcccacctggggcccagagaggagaggagaggagtctccagggcatttcctggtcgctgccacaggtacagcggctgggggaggcgggggcctgatcttggccagtcccaagctgggagcaaccccattacctccagaatcgacccctgcaccccctcctcctccaccaccccctccgcccccaggggtaggcagtggccacttgaatatccccctgatcttggaagagctacgggtgctgcagcagcggcagatccatcagatgcagatgactgagcaaatctgcaggcaggtgctgttgcttggctccttaggccagacggtgggtgcccctgccagtccctcagagctacctgggacagggactgcctcttccaccaagcccctactacccctcttcagccccatcaagcctgtccaaaccagcaagacactggcatcttcctcctcctcctcctcttcctcttcaggggcagaaacgcccaagcaggccttcttccacctttaccacccactggggtcacagcatcctttctctgctggaggggttgggcgaagccacaaacccacccctgccccttccccagccttgccaggcagcacagatcagctgattgcctcgcctcatctggcattcccaagcaccacgggactactggcagcacagtgtcttggggcagcccgaggccttgaggccactgcctccccagggctcctgaagccaaagaatggaagtggtgagctgagctacggagaagtgatgggtcccttggagaagcctggtggaaggcacaaatgccgcttctgtgccaaagtatttggcagtgacagtgccctgcagatccaccttcgttcccacacgggtgagaggccctataagtgcaatgtctgtggaaaccgttttaccacccgtggcaacctcaaagtgcatttccaccggcatcgtgagaagtacccacatgtgcagatgaacccacacccagtaccagagcacctagactatgtcattaccagcagtggcttgccttatggtatgtccgtgccaccagagaaggccgaggaggaggcagccactccaggtggaggggttgagcgcaagcctctggtggcctccacaacagcactcagtgccacagagagcctgactctgctctccaccagtgcaggcacagccacggctccaggactccctgctttcaataagtttgtgctcatgaaagcagtggaacccaagaataaagctgatgaaaacacccccccagggagtgagggctcagccatcagtggagtggcagaaagtagcacggcaactcgcatgcaactaagtaagttggtgacttcactaccaagctgggcactgcttaccaaccacttcaagtccactggcagcttccccttcccctatgtgctagagcccttgggggcctcaccctctgagacatcaaagctgcagcaactggtagaaaagattgaccggcaaggagctgtggcggtgacctcagctgcctcaggagcccccaccacctctgcccctgcaccttcatcctcagcctcttctggacctaaccagtgtgtcatctgtctccgagtgcttagctgtcctcgggccctacgccttcattatggccaacatggaggtgagaggcccttcaaatgcaaagtgtgtggcagagccttctccaccaggggtaatctgcgtgcacatttcgtgggccacaaggccagtccagctgcccgggcacagaattcctgccccatctgccagaagaagttcaccaatgctgtcactctgcagcagcatgtccggatgcacctggggggccagatccccaacggtggtactgcactccctgaaggtggaggagctgctcaggagaatggctccgagcaatctacagtctccggggcagggagtttcccccagcagcagtcccagcagccatcaccggaagaggagttgtctgaggaggaggaagaggaggatgaggaagaagaggaagatgtgactgatgaagattccctggcagggagaggctcagagagtggaggtgagaaggcaatatcagtgagaggtgattcagaagaggcatctggggcagaggaggaggtggggacagtggcggcagcagccacagctgggaaggagatggacagtaatgagaaaactactcaacagtcttctttgccaccaccaccaccacctgacagcctggatcagcctcagccaatggagcagggaagcagtggtgttttaggaggcaaggaagaggggggcaaaccggagagaagctcaagtccggcatcagcactcaccccagaaggggaagccaccagcgtgaccttggtagaggagctgagcctgcaggaggcaatgagaaaggagccaggagagagcagcagcagaaaggcctgcgaagtgtgtggccaggcctttccctcccaggcagctctggaggagcatcagaagacccaccccaaggaggggccgctcttcacttgtgttttctgcaggcagggctttcttgagcgggctaccctcaagaagcatatgctcctggcacaccaccaggtacagccctttgccccccatggccctcagaatattgctgctctttctctagtccctggctgttcgccttccatcacctccacagggctctccccctttccccgaaaagatgaccccacgatcccatgagcctgtttttctgtacctgctgctctttgtcccacagagcagaaacagcttcacaaaaggacctcccagagttatgagccctgattttgtctttttctctaagttcttaacatgttatgtccctagtggcttttctgtagtccctgagcttggaaattactgtgcttacaaggggatggccccctaaggaatttttcttccctcctcattctttgtacctgaggaacatagattctctgcagctttctcaaggggaaccctctccagcttccctggtgtgacccttcttccccctcctctctcctctccctttccctttggtaggtgcacctgagcacctacatttggcattgcagcctagccaaaaagggctggcagctgtctctggagggcccagtgccactcctctggggtgacctttctgctcagctggtgggtatgggtcccctatctttctagaaccagtatgtggcattcctgtcaaatggcctgcccatgaagccctggaattccagctccacctccactaccactccaagcctggccccaccagtgctgtttggcctaggaactgtggctgggaaggtgcctccaacaatgggatccagggaagccaaggagaagacagcccccctcctatttcagcctcctgcacccaaggcagtgcctgagaagcccatcatagacaagaagtagcaaactgtacattccttcttcctccccctgctccagaaggtgccggtactgaagatgctccagtaattggtgacccaaccctaggaagtagggagaaatgaaggaagggcataggaaaattttcccagtaaatcccctgatggtcacattaaggtaaaggttttggctggtcagtgtgccaagacctctccagcttctcattcatgatgacctctcaaagttgggaaacaagctgatttcttgccaagaggtctcccaggagatatttgggaaatgtgaagttcgtatctttaaggagcatttttggtcagcatggttgatgaactaatgatgagagagttaaggaatgttgctagaacatagggcttgctggtacctatgtgactaagaaagggacatgatgtaagggaaaaggcctcaaattcttgtgaatgtggacattctcgttaatattcttttgggctaatagtgacatagtgtgcagaggtgtaccagggatcatgggggatttcctagcactagtatgcttctagttttagataactccctcctttattccctggccccttgtattttccttatcttcctctttcaagacccctacccattttgcctatccgtaggctggggcttgtgtctttgtcattgtctggttcttaagagtcccagctccaggtggcgtcctccctgcctctccgtcttgtaatgagttgtagtatttactcttaacataggatcatttggaacaggagttctgaggaggagagagtgagggttttgctattgactgacttgaacgatggcttctcctcaagctgtaggctccagagcttcctaacctagtaaaatgtcaagaacagacgggagatattagtgtctttccctctatcattaaaggtgttttaaccaa

SEQ ID NO: 155708 - DNA, 3024 bp, Artificial Sequence
  derived and/or modified sequence
atgagcagaagaaagcagagaaagccccagcagctgatcagcgactgcgagggccccagcgccagcgagaacggcgacgccagcgaggaggaccacccccaggtgtgcgccaagtgctgcgcccagttcaccgaccccaccgagttcctggcccaccagaacgcctgcagcaccgacccccccgtgatggtgatcatcggcggccaggagaaccccaacaacagcagcgccagcagcgagcccagacccgagggccacaacaacccccaggtgatggacaccgagcacagcaacccccccgacagcggcagcagcgtgcccaccgaccccacctggggccccgagagaagaggcgaggagagccccggccacttcctggtggccgccaccggcaccgccgccggcggcggcggcggcctgatcctggccagccccaagctgggcgccacccccctgccccccgagagcacccccgcccccccccccccccccccccccccccccccccccggcgtgggcagcggccacctgaacatccccctgatcctggaggagctgagagtgctgcagcagagacagatccaccagatgcagatgaccgagcagatctgcagacaggtgctgctgctgggcagcctgggccagaccgtgggcgcccccgccagccccagcgagctgcccggcaccggcaccgccagcagcaccaagcccctgctgcccctgttcagccccatcaagcccgtgcagaccagcaagaccctggccagcagcagcagcagcagcagcagcagcagcggcgccgagacccccaagcaggccttcttccacctgtaccaccccctgggcagccagcaccccttcagcgccggcggcgtgggcagaagccacaagcccacccccgcccccagccccgccctgcccggcagcaccgaccagctgatcgccagcccccacctggccttccccagcaccaccggcctgctggccgcccagtgcctgggcgccgccagaggcctggaggccaccgccagccccggcctgctgaagcccaagaacggcagcggcgagctgagctacggcgaggtgatgggccccctggagaagcccggcggcagacacaagtgcagattctgcgccaaggtgttcggcagcgacagcgccctgcagatccacctgagaagccacaccggcgagagaccctacaagtgcaacgtgtgcggcaacagattcaccaccagaggcaacctgaaggtgcacttccacagacacagagagaagtacccccacgtgcagatgaacccccaccccgtgcccgagcacctggactacgtgatcaccagcagcggcctgccctacggcatgagcgtgccccccgagaaggccgaggaggaggccgccacccccggcggcggcgtggagagaaagcccctggtggccagcaccaccgccctgagcgccaccgagagcctgaccctgctgagcaccagcgccggcaccgccaccgcccccggcctgcccgccttcaacaagttcgtgctgatgaaggccgtggagcccaagaacaaggccgacgagaacaccccccccggcagcgagggcagcgccatcagcggcgtggccgagagcagcaccgccaccagaatgcagctgagcaagctggtgaccagcctgcccagctgggccctgctgaccaaccacttcaagagcaccggcagcttccccttcccctacgtgctggagcccctgggcgccagccccagcgagaccagcaagctgcagcagctggtggagaagatcgacagacagggcgccgtggccgtgaccagcgccgccagcggcgcccccaccaccagcgcccccgcccccagcagcagcgccagcagcggccccaaccagtgcgtgatctgcctgagagtgctgagctgccccagagccctgagactgcactacggccagcacggcggcgagagacccttcaagtgcaaggtgtgcggcagagccttcagcaccagaggcaacctgagagcccacttcgtgggccacaaggccagccccgccgccagagcccagaacagctgccccatctgccagaagaagttcaccaacgccgtgaccctgcagcagcacgtgagaatgcacctgggcggccagatccccaacggcggcaccgccctgcccgagggcggcggcgccgcccaggagaacggcagcgagcagagcaccgtgagcggcgccggcagcttcccccagcagcagagccagcagcccagccccgaggaggagctgagcgaggaggaggaggaggaggacgaggaggaggaggaggacgtgaccgacgaggacagcctggccggcagaggcagcgagagcggcggcgagaaggccatcagcgtgagaggcgacagcgaggaggccagcggcgccgaggaggaggtgggcaccgtggccgccgccgccaccgccggcaaggagatggacagcaacgagaagaccacccagcagagcagcctgccccccccccccccccccgacagcctggaccagccccagcccatggagcagggcagcagcggcgtgctgggcggcaaggaggagggcggcaagcccgagagaagcagcagccccgccagcgccctgacccccgagggcgaggccaccagcgtgaccctggtggaggagctgagcctgcaggaggccatgagaaaggagcccggcgagagcagcagcagaaaggcctgcgaggtgtgcggccaggccttccccagccaggccgccctggaggagcaccagaagacccaccccaaggagggccccctgttcacctgcgtgttctgcagacagggcttcctggagagagccaccctgaagaagcacatgctgctggcccaccaccaggtgcagcccttcgccccccacggcccccagaacatcgccgccctgagcctggtgcccggctgcagccccagcatcaccagcaccggcctgagccccttccccagaaaggacgaccccaccatcccctag

SEQ ID NO: 155709 - protein, 91 aa, Artificial Sequence
  derived and/or modified sequence
MWKPMPSPSNMKASAALLCLLLTAAAFSPQGLAQPERPRTHPQWTFLLVVSLQLGLILQLPAATDLSIRKSLSRGWRATEGPPVATVPGKL

SEQ ID NO: 155710 - protein, 57 aa, Artificial Sequence
  derived and/or modified sequence
MWKPMPSPSNMKASAALLCLLLTAAAFSPQGLAQPASRPNWTRRSVLTPHRSGSRTL

SEQ ID NO: 155711 - protein, 98 aa, Artificial Sequence
  derived and/or modified sequence
MKVSAVLLCLLLMTAAFNPQGLAQPDALNVPSTCCFTFSSKKISLQRLKSYVITTSRCPQKAVIFRTKLGKEICADPKEKWVQNYMKHLGRKAHTLKT

SEQ ID NO: 155712 - DNA, 297 bp, Artificial Sequence
  derived and/or modified sequence
atgaaggtgagcgccgtgctgctgtgcctgctgctgatgaccgccgccttcaacccccagggcctggcccagcccgacgccctgaacgtgcccagcacctgctgcttcaccttcagcagcaagaagatcagcctgcagagactgaagagctacgtgatcaccaccagcagatgcccccagaaggccgtgatcttcagaaccaagctgggcaaggagatctgcgccgaccccaaggagaagtgggtgcagaactacatgaagcacctgggcagaaaggcccacaccctgaagacctag

SEQ ID NO: 155713 - DNA, 297 bp, Artificial Sequence
  derived and/or modified sequence
atgaaggtcagtgcagtgctcctgtgtctgctcctgatgactgcggctttcaacccccagggccttgcacagccagatgccctgaatgtgcctagcacatgttgttttacattcagctcaaagaaaataagcctccagcggcttaaatcctatgtgatcaccaccagccggtgtccccaaaaagcagtgatcttccgcaccaagctcggtaaagaaatctgcgcggaccctaaggagaaatgggtgcaaaactacatgaagcatctcgggagaaaggctcacactctgaaaacatag

SEQ ID NO: 155714 - DNA, 297 bp, Artificial Sequence
  derived and/or modified sequence
atgaaggtgtctgctgtgctgctgtgcctgctgctgatgacagctgccttcaacccccagggcctggcccagccagatgccctgaatgtgcccagcacctgctgcttcaccttcagcagcaagaagatcagcctgcagaggctgaagagctatgtgatcaccaccagccgctgcccccagaaggccgtcatcttccgcaccaagctgggcaaggagatctgtgccgaccccaaggagaagtgggtgcagaactacatgaagcacctgggcaggaaggcccacaccctgaagacctag

SEQ ID NO: 155715 - DNA, 297 bp, Artificial Sequence
  derived and/or modified sequence
atgaaggtgagcgccgtgctgctgtgcctgctgctgatgaccgccgcctttaaccctcagggcctcgctcaacccgacgccctgaatgtgccttccacctgctgtttcacattttcttctaaaaaaatctcgctgcagaggctgaaatcttatgtgatcactactagtcgatgtccacagaaggcagtcatcttcaggacaaaactgggaaaagagatatgtgctgatcctaaggagaaatgggtgcagaattacatgaagcacttagggaggaaggctcatacactcaagacctag

SEQ ID NO: 155716 - DNA, 297 bp, Artificial Sequence
  derived and/or modified sequence
atgaaagtgagtgccgtccttctgtgccttctattaatgaccgcagcttttaacccacaaggtctcgctcagcccgatgccctaaatgttccaagcacttgctgcttcactttttctagcaaaaagatttccctgcagcgtctgaaatcctatgtgatcaccacatctcgttgcccccaaaaagcagtgatctttagaacaaagttggggaaagagatctgcgcagacccaaaggagaagtgggtgcagaattatatgaaacatctgggcaggaaagctcatacactgaagacatag

SEQ ID NO: 155717 - DNA, 851 bp, Artificial Sequence
  derived and/or modified sequence
aaaaggccggcggaacagccagaggagcagagaggcaaagaaacattgtgaaatctccaactcttaaccttcaacatgaaagtctctgcagtgcttctgtgcctgctgctcatgacagcagctttcaacccccagggacttgctcagccagatgcactcaacgtcccatctacttgctgcttcacatttagcagtaagaagatctccttgcagaggctgaagagctatgtgatcaccaccagcaggtgtccccagaaggctgtcatcttcagaaccaaactgggcaaggagatctgtgctgacccaaaggagaagtgggtccagaattatatgaaacacctgggccggaaagctcacaccctgaagacttgaactctgctacccctactgaaatcaagctggagtacgtgaaatgacttttccattctcctctggcctcctcttctatgctttggaatacttctaccataattttcaaataggatgcattcggttttgtgattcaaaatgtactatgtgttaagtaatattggctattatttgacttgttgctggtttggagtttatttgagtattgctgatcttttctaaagcaaggccttgagcaagtaggttgctgtctctaagcccccttcccttccactatgagctgctggcagtgggtttgtattcggttcccaggggttgagagcatgcctgtgggagtcatggacatgaagggatgctgcaatgtaggaaggagagctctttgtgaatgtgaggtgttgctaaatatgttattgtggaaagatgaatgcaatagtaggactgctgacattttgcagaaaatacattttatttaaaatctccta

SEQ ID NO: 155718 - protein, 94 aa, Artificial Sequence
  derived and/or modified sequence
MSVKGMAIALAVILCATVVQGFPMFKRGRCLCIGPGVKAVKVADIEKASIMYPSNNCDKIEVIITLKENKGQRCLNPKSKQARLIIKKVERKNF

SEQ ID NO: 155719 - DNA, 285 bp, Artificial Sequence
  derived and/or modified sequence
atgtcagtcaaaggaatggcaatcgcattagccgttatactttgtgcgaccgtggttcagggttttcctatgttcaagcgagggaggtgtctgtgtataggcccaggcgtgaaggccgtaaaggttgctgatattgagaaggcatccattatgtatccctcaaataattgtgacaagattgaagtaattataacactgaaggaaaacaagggccagcggtgcctaaaccctaaatcgaagcaggcgcgactaattatcaaaaaagtggagcggaaaaacttctag

SEQ ID NO: 155720 - DNA, 285 bp, Artificial Sequence
  derived and/or modified sequence
atgtcagtcaagggtatggctatcgcgttagcggtcattctttgcgcaactgttgtgcaggggttccccatgttcaagcgcggccgctgtctgtgtatcggacctggagtcaaagctgtcaaggtggctgatatcgaaaaggcttctatcatgtacccctcaaacaattgtgacaaaattgaagttatcattaccctcaaagaaaacaagggccaaaggtgtttgaatcccaaatccaagcaggcgcgtctcattatcaagaaggttgaaaggaagaatttttag

SEQ ID NO: 155721 - DNA, 285 bp, Artificial Sequence
  derived and/or modified sequence
atgtctgtgaagggcatggccatcgccctggccgtcatcctgtgtgccaccgtggtgcagggcttccccatgttcaagaggggccgctgcctgtgcatcggccctggggtgaaggctgtgaaggtggccgacatcgagaaggccagcatcatgtaccccagcaacaactgtgacaagattgaggtgatcatcaccctgaaggagaacaagggccagcgctgcctgaaccccaagagcaagcaggcccggctcatcatcaagaaggtggagaggaagaacttctag

SEQ ID NO: 155722 - DNA, 285 bp, Artificial Sequence
  derived and/or modified sequence
atgagcgtgaagggcatggccatcgccctggccgtgatcctgtgcgcaaccgtcgtgcagggttttcccatgttcaagaggggacgatgcttgtgtatcggccctggcgtgaaggccgtaaaagtggctgatatcgaaaaggctagtataatgtatcctagtaataattgtgacaagattgaagtcattattacccttaaggagaacaaaggccagcgctgtctcaatcctaagagcaaacaggccagactgataattaagaaagtcgaaagaaaaaacttctag

SEQ ID NO: 155723 - DNA, 285 bp, Artificial Sequence
  derived and/or modified sequence
atgagcgtgaagggcatggccatcgccctggccgtgatcctgtgcgctaccgtggtccaggggttccccatgttcaagcggggaaggtgcctgtgcatcggtcccggcgttaaggccgttaaggtggccgacatcgaaaaagccagcattatgtatcctagcaacaattgtgataagatagaagtgattatcaccctgaaggagaacaagggtcagagatgcctgaatcctaagtccaagcaggcaaggctgattatcaagaaagtggaaagaaaaaacttttag

SEQ ID NO: 155724 - DNA, 285 bp, Artificial Sequence
  derived and/or modified sequence
atgtctgtcaaggggatggctatcgcgctggctgttatcctctgtgcaacggtcgttcagggtttccccatgtttaagagggggaggtgcctttgcattggacctggtgtgaaagctgtgaaggtcgcagacatcgaaaaagctagtattatgtatccatcaaataactgtgataagatagaggtgataatcacactaaaagaaaataaggggcagcgatgcttgaaccccaagagcaaacaggctagactaatcatcaaaaaagtggagcgaaagaacttctag

SEQ ID NO: 155725 - DNA, 285 bp, Artificial Sequence
  derived and/or modified sequence
atgagtgtgaagggcatggcgattgctttagccgtgattttgtgcgctaccgtcgttcaggggttccccatgttcaaaagagggaggtgcctctgtatcggacccggagtcaaggcagtcaaggtggctgatatcgagaaagccagcattatgtacccatccaacaattgcgacaagatagaagttattattacattgaaagaaaacaaggggcagcgctgtctgaatccaaagagcaaacaggccagattaatcatcaaaaaggtggaacggaagaatttttag

SEQ ID NO: 155726 - DNA, 285 bp, Artificial Sequence
  derived and/or modified sequence
atgtctgtaaagggcatggcgatcgcattggcggtaatcttgtgcgctactgtcgttcaagggttccctatgttcaaacggggaaggtgcctctgtatcggaccaggcgtaaaggctgtgaaggtggcagatatcgagaaggctagcatcatgtacccgtccaataactgcgataaaattgaggtgataatcacattgaaggaaaataaaggacaaagatgcttaaatcctaaatccaaacaggcccggcttataattaagaaggttgagcgcaagaatttttag

SEQ ID NO: 155727 - DNA, 285 bp, Artificial Sequence
  derived and/or modified sequence
atgagcgtgaagggaatggccatcgccctcgccgtcatcctgtgtgctaccgtggtccaaggatttcccatgtttaaaagaggacgctgcctgtgcatcggtccaggagtaaaagctgtgaaagtggcagacatcgaaaaggcttccataatgtacccatcaaataattgtgacaaaatcgaggtcatcatcacacttaaggaaaataaggggcaaagatgcctgaaccccaagagcaagcaagccagactcattattaagaaggtggagagaaaaaacttctag

SEQ ID NO: 155728 - DNA, 1606 bp, Artificial Sequence
  derived and/or modified sequence
agagaacaaaacagaaactcttggaagcaggaaaggtgcatgactcaaagagggaaattcctgtgccataaaaggattgctggtgtataaaatgctctatatatgccaattatcaatttcctttcatgttcagcatttctactccttccaagaagagcagcaaagctgaagtagcagcagcagcaccagcagcaacagcaaaaaacaaacatgagtgtgaagggcatggctatagccttggctgtgatattgtgtgctacagttgttcaaggcttccccatgttcaaaagaggacgctgtctttgcataggccctggggtaaaagcagtgaaagtggcagatattgagaaagcctccataatgtacccaagtaacaactgtgacaaaatagaagtgattattaccctgaaagaaaataaaggacaacgatgcctaaatcccaaatcgaagcaagcaaggcttataatcaaaaaagttgaaagaaagaatttttaaaaatatcaaaacatatgaagtcctggaaaagagcatctgaaaaacctagaacaagtttaactgtgactactgaaatgacaagaattctacagtaggaaactgagacttttctatggttttgtgactttcaacttttgtacagttatgtgaaggatgaaaggtgggtgaaaggaccaaaaacagaaatacagtcttcctgaatgaatgacaatcagaattccactgcccaaaggagtccaacaattaaatggatttctaggaaaagctaccttaagaaaggctggttaccatcggagtttacaaagtgctttcacgttcttacttgttgcattatacattcatgcatttctaggctagagaaccttctagatttgatgcttacaactattctgttgtgactatgagaacatttctgtctctagaagtcatctgtctgtattgatctttatgctatattactatctgtggttacggtggagacattgacattattactggagtcaagcccttataagtcaaaagcatctatgtgtcgtaaaacattcctcaaacattttttcatgcaaatacacacttctttccccaaacatcatgtagcacatcaatatgtagggagacattcttatgcatcatttggtttgttttataaccaattcattaaatgtaattcataaaatgtactatgaaaaaaattatacgctatgggatactggcaaaagtgcacatatttcataaccaaattagtagcaccagtcttaatttgatgtttttcaacttttattcattgagatgttttgaagcaattaggatatgtgtgtttactgtactttttgttttgatccgtttgtataaatgatagcaatatcttggacacatctgaaatacaaaatgtttttgtctaccaaagaaaaatgttgaaaaataagcaaatgtatacctagcaatcacttttactttttgtaattctgtctcttagaaaaatacataatctaatcaatttctttgttcatgcctatatactgtaaaatttaggtatactcaagactagtttaaagaatcaaagtcatttttttctctaataaactaccacaacctttcttttttaaaaaaa

SEQ ID NO: 155729 - DNA, 767 bp, Artificial Sequence
  derived and/or modified sequence
aagacatcaagacttaaacgaaggaaaggattcaaaagaggagaggaaagtgcattttcatgctagaaaaaccatattatacaaatataaaaaatagggatctctcaggctcaccagatgaggggatgctgtgaaagaaggtaatcttcctcatgtgatgtcagagagtatagagccagaacaagtcacaatcctgaagacacgtctgaccccacacatctacaaagccagcagaaatcaggcagactaacttctacaataaggcagaaagtttgaaatttggaacacacggaaaggacttgcatttctactccttccaagaagagcagcaaagctgaagtagcagcagcagcaccagcagcaacagcaaaaaacaaacatgagtgtgaagggcatggctatagccttggctgtgatattgtgtgctacagttgttcaaggcttccccatgttcaaaagaggacgctgtctttgcataggccctggggtaaaagcagtgaaagtggcagatattgagaaagcctccataatgtacccaagtaacaactgtgacaaaatagaagtgattattaccctgaaagaaaataaaggacaacgatgcctaaatcccaaatcgaagcaagcaaggcttataatcaaaaaagttgaaagaaagaatttttaaaaatatcaaaacatatgaagtcctggaaaagagcatctgaaaaacctagaacaagtttaactgtgactactgaaatgacaagaattctacagtaggaaactga

SEQ ID NO: 155730 - DNA, 285 bp, Artificial Sequence
  derived and/or modified sequence
atgagcgtgaagggcatggccatcgccctggccgtgatcctgtgcgccaccgtggtgcagggcttccccatgttcaagagaggcagatgcctgtgcatcggccccggcgtgaaggccgtgaaggtggccgacatcgagaaggccagcatcatgtaccccagcaacaactgcgacaagatcgaggtgatcatcaccctgaaggagaacaagggccagagatgcctgaaccccaagagcaagcaggccagactgatcatcaagaaggtggagagaaagaacttctag

SEQ ID NO: 155731 - RNA, 285 nt, Artificial Sequence
  derived and/or modified sequence
augucuguaaagggcauggcgaucgcauuggcgguaaucuugugcgcuacugucguucaaggguucccuauguucaaacggggaaggugccucuguaucggaccaggcguaaaggcugugaagguggcagauaucgagaaggcuagcaucauguacccguccaauaacugcgauaaaauugaggugauaaucacauugaaggaaaauaaaggacaaagaugcuuaaauccuaaauccaaacaggcccggcuuauaauuaagaagguugagcgcaagaauuuuuag

SEQ ID NO: 155732 - RNA, 285 nt, Artificial Sequence
  derived and/or modified sequence
augagcgugaagggaauggccaucgcccucgccgucauccugugugcuaccgugguccaaggauuucccauguuuaaaagaggacgcugccugugcaucgguccaggaguaaaagcugugaaaguggcagacaucgaaaaggcuuccauaauguacccaucaaauaauugugacaaaaucgaggucaucaucacacuuaaggaaaauaaggggcaaagaugccugaaccccaagagcaagcaagccagacucauuauuaagaagguggagagaaaaaacuucuag

SEQ ID NO: 155733 - DNA, 219 bp, Artificial Sequence
  derived and/or modified sequence
atgtcatatcagcagcagcagtgcaaacaaccttgccagccccctcccgtatgtccgacgcctaagtgtcctgagccctgtcccccacccaaatgccccgagccttgcccgtcccccaaatgtccacaaccatgtcccccacagcaatgtcagcaaaagtatccacccgttacccctagtcctccctgtcagccgaaatgtcctcccaaaagcaagtag

SEQ ID NO: 155734 - DNA, 1146 bp, Artificial Sequence
  derived and/or modified sequence
atgtggaggagcctcggccttgcgctggctctatgcttgttgccgtcaggcggcaccgagagccaggaccagagtagtctgtgcaaacagcccccagcatggtccattcgcgaccaagatcccatgctgaatagtaatggttctgtgacagtggtggcccttctgcaggcaagttgatacctatgcatattgcaagcatccaagctggaggatcttcgcgttaaactcaagaaggaaggttacagtaacatatcttacattgttgtgaatcaccaaggaatcagcagcaggctgaagtatacccacctaaagaacaaggtctctgagcacatccctgtgtaccagcaggaggagaatcaaaccgacgtgtggacactgctcaatggctcaaaagatgacttcctgatctacgacagatgcggacgacttgtctatcatctgggcctccccttcagcttcctaacattcccttacgtggaggaggccataaaaatcgcttactgtgagaaaaaatgcgggaattgctcactcacaactttaaaagacgaggatttttgcaaacgcgtctcacttgctactgtagataagacggtggaaaccccctctccacactaccaccatgaacatcaccacaatcacggccaccaacatctggggagtagcgagctctcagagaaccagcagcccggcgctccgaacgcccctacacaccccgcgcctcccggtctgcaccaccatcacaagcataaaggacagcaccgtcaaggacaccccgagaaccgcgacatgccggctagtgaggacctgcaggatctccagaaaaagctctgccgcaaacggtgtatcaatcaacttctctgtaaactcccgaccgattcagagctggcccctcgctcttgatgttgtcattgcagacacctcatctttgaaaagaccggttccgccatcacttgacagtgcaaagagaacctgcctagcctctgtagctgacaaggacttagggctgaagagaacattactgagagctgccagtgacgcctccctccggctgcatgacagatctcccagcagctcataccaactgaggcatccgcatcctgaagatgaaagaatcaggccaagaaatgagagtgaccctccaattag

SEQ ID NO: 155735 - DNA, 630 bp, Artificial Sequence
  derived and/or modified sequence
atgtggagaagcttgggtctggctctagcgctgtgcctgctcccatcaggaggcacagagtctcaagaccaatcaagcctttgcaaacaaccccccgcgtggtcaatcagggaccaggacccaatgctaaatagtaatgggtcagttacagtggtggcacttctgcaggcctcgtgatacctgtgcattctgcaagccagtaagcttgaggatctccgtgtcaagcttaagaaggaaggctactccaacatatcttacatagtggtcaatcaccagggcatctccagtcgcctgaagtacacgcacttgaagaacaaggtgagcgaacacattcctgtctatcagcaggaggagaatcaaactgatgtctggacactgctgaatggctctaaggatgacttcctgatctatgacaggtgcggccgtctcgtgtaccatttgggtctcccattctctttcctcacatttccctacgtggaagaagccatcaaaatcgcctattgcgaaaagaaatgtggcaactgctcattgactacactaaaggatgaagatttttgcaagcgcgtgagcctcgcgacggtggataagactgtggagacccccagccctcactaccaccatgagcactag

SEQ ID NO: 155736 - DNA, 1146 bp, Artificial Sequence
  derived and/or modified sequence
atgtggaggagcttgggtctggcactggctctctgcctgttaccctccggcggaactgagagccaggatcaatcaagcctgtgcaaacagcccccagcatggtccatcagggaccaggatcctatgctgaatagcaatgggagcgtaaccgttgttgcccttttgcaggccagctgatacctttgtattttgcaagcctccaaactggaagatctgagagtgaagctgaagaaggagggatacagcaacatttcttacatcgtcgtaaatcaccaaggtatctcgagccgcctgaagtatacccatcttaaaaataaggtgtccgaacacattccagtgtatcagcaggaggagaaccagactgatgtgtggactttgctcaacgggtctaaggacgatttcctcatctacgaccgttgtgggaggctggtgtaccacttaggcctacccttttccttcttaactttcccatacgtggaagaggctatcaaaatcgcctattgtgaaaaaaaatgtggcaactgctctcttaccacattaaaagacgaggatttttgcaaacgggtctcccttgcaacggtcgataaaactgtcgaaactcccagcccacattaccatcacgaacaccaccacaaccatggccatcagcacctgggatcttcagaactgagcgaaaaccagcaaccaggggctcccaatgcacccacccaccccgcacccccgggcctgcatcatcaccacaagcataagggtcagcacagacagggtcatcctgaaaatagagatatgcctgccagcgaggacctacaagacctgcagaagaaactctgccggaaacgctgtattaaccagcttctatgcaaattacccaccgactccgagttagccccccgcagttgatgctgtcattgtcgccatcttatattcgagaagacaggaagcgccattacctgacagtgcaaagagaatctgccttctctctgttcttgacaggggttgagggctgaggagaatattactgagagctgccagtgacggcttcctccagccgcctgacaaatctcacaacagctgataccaaccgaagcttccgccagttgaaggtgaaagaaccaagctaaaaagtgagagtgaccctctaattag

SEQ ID NO: 155737 - DNA, 933 bp, Artificial Sequence
  derived and/or modified sequence
atgtggagatccctagggctcgcccttgccctatgtctgttgcctagcggcggcacagaatctcaggaccaaagttccctgtgcaagcaacctccagcttggtcgattcgtgatcaggaccccatgttgaacagcaatggaagtgtgactgtggtggccttgttgcaggcctcatgatacctctgcatactccaggccagcaagctagaagacctacgagtcaaactgaagaaggaaggctacagcaacatatcctacatcgtggtgaaccaccaaggaatatcatctcggctgaaatacacccacctgaagaataaggtcagcgaacacattcctgtgtaccagcaggaagaaaatcagactgatgtgtggaccctgttgaatggcagtaaggacgatttcctcatttacgatcggtgtgggcgactagtttaccacctgggcctaccattttcattcctgaccttcccatatgtcgaagaggccattaagattgcctattgtgagaagaaatgcggtaactgctccttgactactttgaaggacgaggacttctgtaagcgggtcagcctcgcaaccgtcgacaagacagtagaaacaccatccccccactatcaccacgaacaccatcacaatcatggccatcagcacctgggttcctctgagttatccgagaatcagcagcctggtgcccctaatgccccaacacacccagctcctccaggattgcatcatcatcataagcataaagggcagcataggcagggacatccagagaatagagacatgcctgcgagcgaagaccttcaggacctccagaagaagttgtgtaggaaaagatgcattaatcaactactgtgtaagctgccaaccgattcagagctggctccaagatcttgatgctgtcactgtcgccatctcattttcgaatag

SEQ ID NO: 155738 - DNA, 1146 bp, Artificial Sequence
  derived and/or modified sequence
atgtggagatcactaggcctggctctggcgctttgcctgttaccatctggtggcaccgagtcccaggaccagagtagcctgtgcaaacagcccccggcatggagcattagagaccaggaccccatgttgaacagcaatggaagcgtgactgtcgttgcccttctgcaagcctcttgatacctgtgtatcttacaggccagtaagttggaagacttaagagtgaagctgaagaaggagggatattcaaacataagttacatcgtcgtaaatcaccagggaattagctctaggcttaagtatacccacctcaaaaataaagtgtccgagcacattcctgtctaccaacaggaagagaatcagactgatgtttggaccctgctgaacgggtccaaggacgattttctgatctacgaccgctgcgggcggctcgtctatcacctcggactgcccttttctttcttgacattcccctacgtggaggaggccattaaaattgcttactgtgagaaaaagtgcggaaactgcagtttgactacccttaaggatgaggatttttgtaagagagtaagcctcgctacggtggacaagacggtggagacaccttccccccactaccaccacgaacaccatcataatcacgggcaccagcacctcggttctagcgaactgtcagaaaaccagcagccgggagcaccaaatgcgcctacacatcctgccccacctggacttcaccatcatcataaacacaagggccagcaccggcaggggcaccccgagaaccgagatatgccagcttctgaagatctacaggatctgcagaaaaagctttgtaggaaaagatgcatcaatcagctgctgtgtaaactgccaacggacagcgaactggcgcctcggtcatgatgttgccactgcaggcacctcattttcgagaagacaggctctgccataacctgacagtgtaaggaaaacctccccagcctgtgcagttgacaggggttgcgggcagaggagaatataaccgagtcctgtcagtgacgtctgccccccgctgcctgacaaatcagccaacagctcattcctactgaggcgagcgccagttgacgttgaaagaaccaagctaaaaaatgagaatgacccagcaattag

SEQ ID NO: 155739 - DNA, 1086 bp, Artificial Sequence
  derived and/or modified sequence
atgtggaggagcctgggcctggccctggccctgtgcctgctgcccagcggcggcacagagagccaggaccagagcagcctgtgcaagcagcccccagcctggagcatccgggaccaggaccccatgctgaacagcaatggatctgtgacagtggtggccctgctgcaggccagcctgtgcatcctgcaggccagcaagctggaggacctgcgggtgaagctgaagaaggagggctacagcaacatctcctacatcgtggtgaaccaccagggcatcagcagccggctgaagtacacccacctgaagaacaaggtgtctgagcacatccctgtgtaccagcaggaggagaaccagacagatgtgtggaccctgctgaatggcagcaaggatgacttcctgatctatgacagatgtggccgcctggtgtaccacctgggcctgcccttctccttcctgaccttcccctacgtggaggaggccatcaagatcgcctactgtgagaagaagtgtggcaactgcagcctgaccaccctgaaggatgaggacttctgcaagagggtgtccctggccaccgtggacaagacagtggagacccccagcccccactaccaccacgagcaccaccacaaccacggccaccagcacctgggcagcagcgagctgtctgagaaccagcagcccggggccccaaatgcccccacccacccagcccctcctggcctgcaccaccaccacaagcacaagggccagcaccggcagggccacccagaaaatagagacatgcctgccagcgaggacctgcaggacctgcagaagaagctgtgcaggaagcgctgcatcaaccagctgctgtgcaagctgcccacagattctgagctggccccccgctgctgccactgccgccacctgatctttgagaagacaggcagcgccatccagtgcaaggagaacctgcccagcctgtgccagggcctgcgggcagaggagaacatcacagagagctgccagctgcccccagcccagatcagccagcagctgatccccacagaggccagcgccagcaaccaggccaagcccagcaactag

SEQ ID NO: 155740 - DNA, 624 bp, Artificial Sequence
  derived and/or modified sequence
atgtggaggagcctgggcctggccctggccctgtgcctgctgcccagcggcggcacagagagccaggaccagagcagcctgtgcaagcagcccccagcctggagcatccgggaccaggaccccatgctgaacagcaatggatctgtgacagtggtggccctgctgcaggccagcctgtgcatcctgcaggccagcaagctggaggacctgcgggtgaagctgaagaaggagggctacagcaacatctcctacatcgtggtgaaccaccagggcatcagcagccggctgaagtacacccacctgaagaacaaggtgtctgagcacatccctgtgtaccagcaggaggagaaccagacagatgtgtggaccctgctgaatggcagcaaggatgacttcctgatctatgacagatgtggccgcctggtgtaccacctgggcctgcccttctccttcctgaccttcccctacgtggaggaggccatcaagatcgcctactgtgagaagaagtgtggcaactgcagcctgaccaccctgaaggatgaggacttctgcaagagggtgtccctggccaccgtggacaagacagtggagacccccagcccccactaccaccacgagcactag

SEQ ID NO: 155741 - DNA, 921 bp, Artificial Sequence
  derived and/or modified sequence
atgtggaggagcctgggcctggccctggccctgtgcctgctgcccagcggcggcacagagagccaggaccagagcagcctgtgcaagcagcccccagcctggagcatccgggaccaggaccccatgctgaacagcaatggatctgtgacagtggtggccctgctgcaggccagcctgtgcatcctgcaggccagcaagctggaggacctgcgggtgaagctgaagaaggagggctacagcaacatctcctacatcgtggtgaaccaccagggcatcagcagccggctgaagtacacccacctgaagaacaaggtgtctgagcacatccctgtgtaccagcaggaggagaaccagacagatgtgtggaccctgctgaatggcagcaaggatgacttcctgatctatgacagatgtggccgcctggtgtaccacctgggcctgcccttctccttcctgaccttcccctacgtggaggaggccatcaagatcgcctactgtgagaagaagtgtggcaactgcagcctgaccaccctgaaggatgaggacttctgcaagagggtgtccctggccaccgtggacaagacagtggagacccccagcccccactaccaccacgagcaccaccacaaccacggccaccagcacctgggcagcagcgagctgtctgagaaccagcagcccggggccccaaatgcccccacccacccagcccctcctggcctgcaccaccaccacaagcacaagggccagcaccggcagggccacccagaaaatagagacatgcctgccagcgaggacctgcaggacctgcagaagaagctgtgcaggaagcgctgcatcaaccagctgctgtgcaagctgcccacagattctgagctggccccccgctgctgccactgccgccacctgatctttgaatag

SEQ ID NO: 155742 - DNA, 1146 bp, Artificial Sequence
  derived and/or modified sequence
atgtggcggagcctgggcctggccctggccctgtgcctgctgccctctgggggcaccgagtcccaggaccagtctagcttatgcaagcagcctcccgcctggagcatacgggatcaggaccccatgttaaattccaatgggtccgtcacagtggtcgccctgctccaggcttcatgatatttgtgtattctccaggcctctaagttagaggatctgagagtcaaactcaagaaggagggctactccaatatctcatatatagtcgttaaccaccaaggcatcagcagccgcctgaagtatacccacctgaaaaacaaggtgagcgaacacatacccgtgtaccagcaggaggaaaatcagactgacgtctggacattgttaaacggatctaaagatgactttcttatctacgaccgatgtggccgtctggtgtaccacctggggctaccattctccttcctgactttcccatatgtggaagaggccatcaagatcgcgtactgcgagaagaagtgcgggaactgcagccttacaaccctgaaggatgaagacttttgcaagcgcgtgtctttggccactgtcgataagacagtagaaacaccatccccccactatcatcacgaacaccatcacaatcacgggcatcagcatctaggatcaagtgagctgtcagaaaaccaacagcccggggcccccaacgctcccactcatcccgcaccccccgggctacatcaccaccataagcacaaaggtcagcatagacagggacatcctgaaaatagggatatgccagccagcgaagatctccaggacttgcaaaagaagctttgtagaaaaaggtgcattaaccaactgttgtgcaagctgcctaccgatagtgagttagctcccaggagttgatgctgtcattgtcgtcacctcatctttgagaagacgggttcagcaatcacatgacaatgcaaagagaaccttccttcactgtgttcttgacagggcctgagagccgaggaaaacatcaccgagagttgccaatgaaggttgcctcctgccgcatgacagatctcacagcagttaattcctaccgaggcttctgcgtcatgacgatgaaagaaccaagcaaagaagtgagagtgaccttcaaattag

SEQ ID NO: 155743 - DNA, 630 bp, Artificial Sequence
  derived and/or modified sequence
atgtggcggagcctgggcctggccctggccctgtgcctgctgccctccggcggaaccgaatcgcaggatcagagctccttatgtaagcagccgcctgcctggtccattagagaccaggacccaatgcttaacagtaatgggagcgtgaccgttgtcgccctcttgcaagcatcatgatatttatgcattctccaggccagcaaactcgaggaccttcgcgtcaaattgaaaaaggagggatattctaacatttcctacatagtcgtcaatcaccaggggatttcatctcgcttgaagtacactcatcttaaaaacaaggtaagcgaacacattcctgtgtatcagcaggaagagaaccaaaccgatgtctggacccttttgaacggatccaaggatgatttcctcatctacgaccgatgcggcaggctggtgtatcacttaggcttacccttctccttcttgacctttccttatgtggaagaggccattaagattgcctattgtgagaaaaaatgcggaaactgttctctgaccactctcaaagacgaagacttctgtaaacgagtgtccctcgccactgtggacaaaacggtcgaaaccccttccccacactaccaccacgagcattag

SEQ ID NO: 155744 - DNA, 1146 bp, Artificial Sequence
  derived and/or modified sequence
atgtggcggagcctgggcctggccctggccctgtgcctgctgccctcaggtggaacggaatcacaagatcagagtagcctatgtaaacagcctcccgcatggagcataagggatcaagatccaatgctgaacagtaatggttccgtaacggtcgtcgcactgctgcaagcgtcgtgatatctgtgtattctccaggcctctaagctggaagacctgagagtgaaactgaagaaggagggctattctaatataagctatatcgtagtcaaccatcagggaatcagtagtagactcaagtacactcatctcaaaaacaaggtctcggagcacattcctgtatatcaacaggaggaaaaccagactgacgtgtggacactgttgaatggaagcaaagatgactttcttatttacgatcgctgtggaagattagtgtaccatctggggttgccgttttccttcctgacctttccctacgtagaggaagcaattaagattgcttattgcgaaaagaaatgcggcaactgttctctgaccacactgaaggacgaagacttctgcaagcgggtgagtctggccaccgtcgacaaaacagtggaaaccccaagcccccattaccatcatgaacaccatcataatcacggccaccagcacctgggaagctctgagctcagtgagaatcaacaacctggagcaccaaacgcgccgacgcaccccgctcccccgggccttcaccaccatcataaacacaagggccaacatcgccaaggtcatcctgagaatcgcgacatgcccgcatccgaggacctgcaggacctgcaaaaaaaactctgtagaaaacgctgcattaaccagctgttatgcaaactcccaacggatagcgagcttgcacccaggagctgatgctgtcattgccgacatctaatttttgagaaaaccggctccgcgattacatgacagtgtaaggaaaaccttccctccctctgtagttgacagggtttacgggctgaggagaatataacagagagctgtcagtgaagattgccgccagcggcctgacagattagccagcaacttatacccacggaagcatctgcttcgtgaagatgaaagaaccaggccaagaagtgagagtgaccctccaattag

SEQ ID NO: 155745 - DNA, 933 bp, Artificial Sequence
  derived and/or modified sequence
atgtggcggagcctgggcctggccctggccctgtgcctgctgcccagcggagggacagagtctcaggaccagtcgtctctttgtaagcaacctcctgcatggtccatcagggatcaggatccaatgcttaacagtaacgggtcagttaccgttgtggcattgttgcaggccagctgatacctttgcattctgcaagcctcgaagctcgaggatctcagggtgaagctcaagaaggaaggatatagcaacatttcctatatcgtggtcaaccaccaaggcatctcctctaggctgaaatatactcacctgaagaacaaggtctcggagcatattcccgtgtatcagcaggaggagaaccaaacagatgtgtggacgctcctcaatggatcaaaggatgactttctcatttacgatcgatgcggaaggctggtataccatctaggcttaccattcagctttctgacttttccctatgtggaggaggcaatcaagattgcttactgtgaaaagaaatgcggaaattgtagtcttacaacactgaaagatgaggatttctgcaagcgggttagcctcgctaccgttgataagaccgtagagactcccagcccccactatcaccatgagcaccaccacaaccatggacatcagcatctggggtcgagcgagctgagcgagaaccaacagcccggggcccccaatgccccgacgcatccagcccctccagggttacaccaccatcataaacacaaaggacagcaccggcagggccatccggagaacagggacatgccagcctccgaggatctccaggatctgcagaagaagttgtgcaggaagcgctgtataaatcagctcctgtgtaagcttccaaccgattccgagctggctcctagatcctgatgttgccattgcaggcacttaatctttgagtag

SEQ ID NO: 155746 - DNA, 1146 bp, Artificial Sequence
  derived and/or modified sequence
atgtggcggagcctgggcctggccctggccctgtgcctgctgcccagcggcggaacagaatcccaggaccagtcatccctttgcaaacaacccccagcctggagtatacgggatcaggatcctatgctgaactcaaatggcagcgtcactgtcgtcgctcttcttcaggccagttgatacttgtgcatcctgcaggcgagtaagttggaggatctccgcgtcaagctcaagaaggaggggtatagcaacatctcctatatagtcgtgaatcaccaaggcatttcatctcggttaaagtatacacacctcaagaataaggtgagtgagcacataccagtctaccagcaggaggagaaccagacagacgtttggacattgttaaatggatcgaaagacgatttcttgatttacgatcggtgcggaagacttgtgtaccacctcggcttgccattcagtttcctgactttcccctatgtggaggaggctattaaaatagcctattgtgagaaaaagtgcggtaactgcagtctgactacgttgaaagatgaagacttctgcaagcgagtgtcactagctactgtggacaagaccgtagaaacaccctccccacactatcaccacgagcaccaccacaatcatggccaccagcatctgggctctagtgagctttcagaaaaccaacagcccggggcccctaacgctcctactcatcccgctccccccggactgcatcaccaccacaaacataagggccagcaccgacagggtcatcccgagaatcgtgacatgcccgcatcagaagacctgcaggacctgcagaagaaactatgtcgaaaacgatgcatcaaccaactcctgtgcaaactccccaccgatagtgaactggcacctcgctcatgatgttgccactgtcgacatctgatctttgagaagaccggaagcgctattacttgacagtgtaaagaaaatctgccttcattatgcagctgacaaggcctgcgggcagaggagaatatcacagaatcatgccaatgaaggctgcccccggccgcctgacagatcagccagcaactgatacccaccgaggcatcggccagttgacgctgaaagaatcaagctaagaaatgagagtgacctagtaactag

SEQ ID NO: 155747 - DNA, 1146 bp, Artificial Sequence
  derived and/or modified sequence
atgtggcggtccctcggtctcgccctggctctctgtctcctcccctctgggggaaccgaaagccaggaccagtccagcctgtgtaagcagccgcctgcttggtctattcgggatcaggatcctatgctgaatagcaatgggagcgtcaccgtggtggccctgctgcaggccagttgatatctgtgcattctgcaggcgtccaagttggaagacctacgtgtgaaactgaaaaaggagggctatagcaacatctcctacattgtcgtaaaccaccagggtatcagttctcgcttgaagtacacgcaccttaaaaataaagtcagcgagcacatcccagtgtaccagcaggaagaaaaccagacggatgtgtggactctgctgaacggttccaaagacgattttctgatctatgacaggtgcggccgacttgtgtatcatctgggcttgccattctccttcctgacgttcccctacgtagaagaggcgattaagattgcctattgcgagaagaaatgtggaaattgctccctgacgacacttaaagacgaggatttttgtaaacgcgtgagccttgcaacagttgacaagacagtagaaacccctagcccgcactatcatcacgaacatcaccacaatcacggacatcagcatttaggatctagtgaattgtccgagaatcagcagccaggagcgcctaacgcacccacacaccccgctccacccggtctgcaccaccaccacaagcacaagggacagcaccgacagggacatcctgagaatcgcgatatgcctgcctcagaggatctgcaggatttacagaagaagctgtgccgaaagcggtgcataaatcaactgctgtgcaagcttccaaccgactccgaactcgcccctagaagttgatgttgtcattgcagacatctgatctttgagaaaaccggcagcgccatcacttgacagtgtaaggagaaccttccatccctgtgttcctgacaggggcttagggcagaagagaacatcaccgagtcctgccagtgacgtctgccgcctgctgcctgacagatcagccagcaactgatccccacagaggccagcgcatcatgacgctgaaagaaccaggccaaaaagtgagaatgaccgagtaactag

SEQ ID NO: 155748 - DNA, 630 bp, Artificial Sequence
  derived and/or modified sequence
atgtggagatccctcggccttgcgttggcgctgtgtctgttacctagcggcggaacagagtcgcaggatcagagctccctctgcaaacagccccctgcttggtccatccgggaccaggaccccatgctgaattcaaatggttctgtgaccgtggtggctctgctgcaggccagttgatacctgtgtattcttcaagcgtctaagctagaggatctgagagtgaagttaaagaaggagggatacagtaatatctcctacatcgtggttaaccatcagggaatcagctccagactgaaatatacccacctgaagaacaaggtgtcagagcatatcccagtgtaccagcaggaagagaatcagacagacgtgtggactctgctgaacggcagtaaagacgactttttaatttatgatcgttgtggacgactcgtctaccatttgggcctccccttcagtttcctgacctttccatacgtggaggaggcaataaagatagcctactgcgaaaagaagtgcgggaactgctccctcacaacactaaaggatgaggatttttgtaaaagagtaagcctggctaccgttgacaaaaccgtagaaaccccaagtccccattaccaccacgagcattag

SEQ ID NO: 155749 - DNA, 1146 bp, Artificial Sequence
  derived and/or modified sequence
atgtggaggtcacttggattagccctggccctctgtctcctgccctcaggcggaaccgagtcacaggatcagagctccttgtgtaagcagccccctgcttggtcaatccgggatcaggatcctatgctgaactccaatggatccgtgactgtggtagccctgttgcaggctagctgatatctctgcatcctgcaggctagtaaactagaagatcttcgagtgaagctgaaaaaggagggttattccaatatatcttacattgtcgtgaatcaccagggaattagttctcggctgaagtacacacatctcaaaaataaagtctccgagcatattcccgtgtaccagcaagaggagaaccagactgacgtctggacactgctgaacgggtctaaggacgatttccttatctacgacaggtgtgggaggttggtctaccacctagggctgccattcagcttcctaacttttccctatgtggaggaggcaataaagattgcctactgcgagaaaaaatgtggaaactgctctctaacgaccctaaaagacgaagacttttgtaaacgcgtctctctggccactgtcgacaaaaccgtggagaccccatccccccattaccatcatgagcaccatcataaccatggccaccaacatctggggagctctgagctctccgagaatcagcagcccggtgctccaaatgcccctacccacccagctcctcccggactgcaccatcaccacaaacataaaggacagcataggcaaggtcacccagaaaatagggatatgcctgcctctgaagatctacaggatctgcaaaagaagctttgccgcaaacggtgcatcaatcagctgctgtgcaagctgccaaccgactcagagctggccccaagatcgtgatgttgccattgcaggcacctgattttcgagaagacaggctctgcgatcacttgacagtgcaaagaaaacctgccatcactgtgtagttgacaggggttgcgggcagaagagaatatcaccgagtcgtgccagtgacggttgcccccagcggcatgacaaatctcgcagcaactgattcctactgaggcctcagccagctgacgttgaaagaatcaagctaaaaagtgagagtgacccagtaactag

SEQ ID NO: 155750 - DNA, 933 bp, Artificial Sequence
  derived and/or modified sequence
atgtggagaagtcttggcttagctctggccttgtgtttgttacctagtggcggtaccgaatcgcaggatcaatcaagcctgtgtaagcagcccccagcttggtctatccgagatcaggatcctatgttgaatagcaatggttcggtgaccgtcgtggcactcctccaggcatcgtgatatctgtgcatcctgcaggcgagtaagctggaagacctgagggtcaagctgaagaaagaagggtacagtaatatttcttacattgtagtcaatcatcagggcattagctcgcggctcaaatatacccacctcaaaaataaggtgtccgagcacattcccgtgtatcagcaggaggaaaaccaaacagatgtttggaccttgctgaatgggagtaaggacgattttctaatctacgataggtgtggaagactcgtgtaccatctcgggcttcctttctctttcctgaccttcccttacgtggaggaagccattaagatcgcatattgcgaaaagaagtgcggcaactgttctttaaccaccctgaaggacgaggacttctgcaagagggtgtctctggcaactgtggacaaaacggtggagaccccctctccgcactaccatcacgaacatcatcacaaccacggacaccaacatctggggtcatccgaactcagcgagaaccaacagcccggtgctccgaacgccccaacccatcccgcacctccaggcttacatcaccaccacaaacataagggccagcaccgccaaggtcatcccgaaaatcgcgatatgccagcatccgaagacctgcaggacctgcagaagaagctatgtcgtaaaaggtgtattaatcaactgctttgcaaactcccaaccgactccgaacttgcgccaagaagctgatgctgtcattgtcggcacctcatattcgagtag

SEQ ID NO: 155751 - DNA, 1146 bp, Artificial Sequence
  derived and/or modified sequence
atgtggaggtccctcggtctggccctggctctctgcctccttcccagcggagggactgaatcacaggatcaaagttcgctgtgtaagcaacccccagcttggtccatcagggatcaagacccaatgctcaactcgaatggcagtgtgacagtagtagctttgcttcaggcttcgtgatatctgtgtattctccaggcaagcaagcttgaagacttacgggtgaagcttaagaaagagggatactcaaacatctcatacatcgtcgttaaccaccaaggcatttcaagcaggctgaaatacacgcatctgaagaataaggtgagcgagcacatcccagtttaccagcaagaagagaaccagaccgatgtctggacactgttgaacggctctaaagacgatttcctgatatatgacagatgcggaagattggtgtaccacttgggacttcctttctcttttcttacctttccgtatgtggaggaggcaatcaaaatcgcttattgcgagaagaaatgcggaaattgtagtctgaccacattgaaagacgaagacttctgcaaaagagtgagtctcgccactgtggacaagaccgtggaaacccccagcccccactaccaccatgagcaccaccacaaccacgggcatcagcacttagggtcgtccgagttgagcgaaaatcagcagccaggggctcccaatgccccaacacatccggcaccacccggacttcaccaccatcataagcacaagggccagcatcggcagggacaccctgagaatagggacatgcctgcatcggaagatctgcaggacctgcagaaaaagctgtgtcgaaaacgttgcatcaaccaattactgtgtaaactacctaccgatagcgagcttgccccaagatcttgatgttgccattgtcgccaccttatctttgagaagactgggagtgccatcacctgacagtgcaaggaaaatctgccctcactgtgcagctgacagggactgcgagcagaagaaaacattaccgaatcctgtcagtgacgcctgccgcctgccgcatgacagattagtcaacagttgattcccacagaggcgagcgcttcttgacgatgaaagaatcaggcaaagaagtgagagtgaccgtccaactag

SEQ ID NO: 155752 - DNA, 1146 bp, Artificial Sequence
  derived and/or modified sequence
atgtggagaagcctgggcctggccctggccctgtgcctgctgcccagcggcggcaccgagagccaggaccagagcagcctgtgcaagcagccccccgcctggagcatcagagaccaggaccccatgctgaacagcaacggcagcgtgaccgtggtggccctgctgcaggccagctgatacctgtgcatcctgcaggccagcaagctggaggacctgagagtgaagctgaagaaggagggctacagcaacatcagctacatcgtggtgaaccaccagggcatcagcagcagactgaagtacacccacctgaagaacaaggtgagcgagcacatccccgtgtaccagcaggaggagaaccagaccgacgtgtggaccctgctgaacggcagcaaggacgacttcctgatctacgacagatgcggcagactggtgtaccacctgggcctgcccttcagcttcctgaccttcccctacgtggaggaggccatcaagatcgcctactgcgagaagaagtgcggcaactgcagcctgaccaccctgaaggacgaggacttctgcaagagagtgagcctggccaccgtggacaagaccgtggagacccccagcccccactaccaccacgagcaccaccacaaccacggccaccagcacctgggcagcagcgagctgagcgagaaccagcagcccggcgcccccaacgcccccacccaccccgccccccccggcctgcaccaccaccacaagcacaagggccagcacagacagggccaccccgagaacagagacatgcccgccagcgaggacctgcaggacctgcagaagaagctgtgcagaaagagatgcatcaaccagctgctgtgcaagctgcccaccgacagcgagctggcccccagaagctgatgctgccactgcagacacctgatcttcgagaagaccggcagcgccatcacctgacagtgcaaggagaacctgcccagcctgtgcagctgacagggcctgagagccgaggagaacatcaccgagagctgccagtgaagactgccccccgccgcctgacagatcagccagcagctgatccccaccgaggccagcgccagctgaagatgaaagaaccaggccaagaagtgagagtgacccagcaactag

SEQ ID NO: 155753 - DNA, 630 bp, Artificial Sequence
  derived and/or modified sequence
atgtggagaagcctgggcctggccctggccctgtgcctgctgcccagcggcggcaccgagagccaggaccagagcagcctgtgcaagcagccccccgcctggagcatcagagaccaggaccccatgctgaacagcaacggcagcgtgaccgtggtggccctgctgcaggccagctgatacctgtgcatcctgcaggccagcaagctggaggacctgagagtgaagctgaagaaggagggctacagcaacatcagctacatcgtggtgaaccaccagggcatcagcagcagactgaagtacacccacctgaagaacaaggtgagcgagcacatccccgtgtaccagcaggaggagaaccagaccgacgtgtggaccctgctgaacggcagcaaggacgacttcctgatctacgacagatgcggcagactggtgtaccacctgggcctgcccttcagcttcctgaccttcccctacgtggaggaggccatcaagatcgcctactgcgagaagaagtgcggcaactgcagcctgaccaccctgaaggacgaggacttctgcaagagagtgagcctggccaccgtggacaagaccgtggagacccccagcccccactaccaccacgagcactag

SEQ ID NO: 155754 - DNA, 933 bp, Artificial Sequence
  derived and/or modified sequence
atgtggagaagcctgggcctggccctggccctgtgcctgctgcccagcggcggcaccgagagccaggaccagagcagcctgtgcaagcagccccccgcctggagcatcagagaccaggaccccatgctgaacagcaacggcagcgtgaccgtggtggccctgctgcaggccagctgatacctgtgcatcctgcaggccagcaagctggaggacctgagagtgaagctgaagaaggagggctacagcaacatcagctacatcgtggtgaaccaccagggcatcagcagcagactgaagtacacccacctgaagaacaaggtgagcgagcacatccccgtgtaccagcaggaggagaaccagaccgacgtgtggaccctgctgaacggcagcaaggacgacttcctgatctacgacagatgcggcagactggtgtaccacctgggcctgcccttcagcttcctgaccttcccctacgtggaggaggccatcaagatcgcctactgcgagaagaagtgcggcaactgcagcctgaccaccctgaaggacgaggacttctgcaagagagtgagcctggccaccgtggacaagaccgtggagacccccagcccccactaccaccacgagcaccaccacaaccacggccaccagcacctgggcagcagcgagctgagcgagaaccagcagcccggcgcccccaacgcccccacccaccccgccccccccggcctgcaccaccaccacaagcacaagggccagcacagacagggccaccccgagaacagagacatgcccgccagcgaggacctgcaggacctgcagaagaagctgtgcagaaagagatgcatcaaccagctgctgtgcaagctgcccaccgacagcgagctggcccccagaagctgatgctgccactgcagacacctgatcttcgagtag

SEQ ID NO: 155755 - protein, 504 aa, Artificial Sequence
  derived and/or modified sequence
MLYFSLFWAARPLQRCGQLVRMAIRAQHSNAAQTQTGEANRGWTGQESLSDSDPEMWELLQREKDRQCRGLELIASENFCSRAALEALGSCLNNKYSEGYPGKRYYGGAEVVDEIELLCQRRALEAFDLDPAQWGVNVQPYSGSPANLAVYTALLQPHDRIMGLDLPDGGHLTHGYMSDVKRISATSIFFESMPYKLNPKTGLIDYNQLALTARLFRPRLIIAGTSAYARLIDYARMREVCDEVKAHLLADMAHISGLVAAKVIPSPFKHADIVTTTTHKTLRGARSGLIFYRKGVKAVDPKTGREIPYTFEDRINFAVFPSLQGGPHNHAIAAVAVALKQACTPMFREYSLQVLKNARAMADALLERGYSLVSGGTDNHLVLVDLRPKGLDGARAERVLELVSITANKNTCPGDRSAITPGGLRLGAPALTSRQFREDDFRRVVDFIDEGVNIGLEVKSKTAKLQDFKSFLLKDSETSQRLANLRQRVEQFARAFPMPGFDEH

SEQ ID NO: 155756 - DNA, 1515 bp, Artificial Sequence
  derived and/or modified sequence
atgctgtatttcagcctgttctgggctgctagacccttgcagagatgtgggcaactcgtgcgcatggcaattcgagcccagcattctaacgctgctcaaacccagacaggagaagcaaataggggctggacaggacaagagtccttgtccgattcagatcccgaaatgtgggagctgctgcaacgagaaaaagacaggcagtgtagaggattggagcttattgctagtgagaatttttgctcccgagcagccctcgaagctctgggctcttgccttaataacaaatattctgagggctaccccggtaagcggtattacggcggggcggaggttgttgacgaaattgagctgttatgtcagcgacgagccctcgaggctttcgatttggatcctgctcagtggggggtgaacgttcagccgtattccggatcccctgccaaccttgcagtatacaccgcgttattacaacctcatgacagaatcatggggttggacctacctgatggcggccatcttacgcacggatacatgtccgatgtgaagagaatttctgctaccagcattttcttcgagagcatgccctataaacttaacccaaaaacggggctgattgactacaaccaattagcgttgactgcacggttgttcaggccgaggctaatcattgctggtacctccgcatacgcacgccttatagattacgcaagaatgcgtgaggtttgtgatgaggtgaaagctcacttattagccgatatggcacatatctctggcttggtggccgccaaggtaatcccttccccttttaaacacgccgatatcgtgaccacaactacccacaagacacttcgcggggccagatcaggactgatcttttaccggaagggcgtgaaagcggtggaccccaaaactggccgcgagatcccctacacttttgaagaccgaattaatttcgctgtgttcccctccctccagggcgggccccacaatcatgccattgccgccgtcgccgtggcacttaagcaggcctgcacccccatgttccgggaatattcactgcaggtactcaagaatgcccgggccatggccgacgcccttctggaacgcggctactctctagtgagtggggggacagataaccacctggttctggtggacctgcgacctaaggggctcgacggcgccagggcagaaagagtcctggaattagtctctatcacagccaataaaaatacttgtcccggagaccgaagtgcaatcacaccaggcgggctgcgtctcggggcacctgccctcaccagtcgccaatttagggaggatgatttcaggcgagtggtggattttatagacgagggagttaacatcgggctggaggtcaagtctaaaaccgccaaactgcaggattttaagagtttcctactcaaagatagcgagactagccagagactggccaacctccggcaaagagttgagcaatttgcccgtgctttccccatgccaggctttgatgagcactag

SEQ ID NO: 155757 - DNA, 1515 bp, Artificial Sequence
  derived and/or modified sequence
atgctgtacttcagcctcttctgggccgcccggcccctgcagagatgtggccagctggtgaggatggccatccgggcccagcacagcaatgctgcccagacccagacaggagaggccaacagaggctggacaggccaggagagcctgagtgacagcgaccctgagatgtgggagctgctgcagcgggagaaggaccggcagtgccggggcctggagctgattgccagcgagaacttctgcagcagagctgccctggaggccctgggcagctgcctgaacaacaagtacagcgagggctacccaggcaagcgctactacggcggcgctgaggtggtggatgaaattgagctgctgtgccagaggcgggccctggaggcctttgacctggaccctgcccagtggggcgtgaatgtgcagccctacagcggcagccctgccaacctggccgtgtacacagccctgctgcagccccatgaccgcatcatgggcctggacctgcctgatggcggccacctgacccacggctacatgtctgatgtgaagaggatcagcgccaccagcatcttctttgagagcatgccctacaagctgaaccccaagacaggcctgattgactacaaccagctggccctgacagcccggctcttccggcccaggctcatcatcgccggcaccagcgcctatgcccggctgattgattatgccaggatgagggaggtgtgtgatgaggtgaaggcccacctgctggccgacatggcccacatcagcggcctggtggccgccaaggtgatccccagccccttcaagcatgctgacatcgtgaccaccaccacccacaagaccctgcggggggcccggagcggcctcatcttctacaggaagggcgtgaaggctgtggaccccaagacaggccgggagatcccctacacctttgaggaccgcatcaactttgctgtgttccccagcctgcagggcggcccccacaaccacgccatcgctgctgtggccgtggccctgaagcaggcctgcacccccatgttccgggagtacagcctgcaggtgctgaagaatgcccgggccatggctgatgccctgctggagcggggctacagcctggtgtctgggggcacagacaaccacctggtgctggtggacctgcggcccaagggcctggatggagcccgggcagagcgggtgctggagctggtgtccatcacagccaacaagaacacctgccctggggacagaagtgccatcaccccaggcggcctgcggctgggcgccccagccctgaccagccggcagttccgggaggatgacttccggcgggtggtggacttcattgatgaaggagtgaacatcggcctggaggtgaagagcaagacagccaagctgcaggacttcaagagcttcctgctgaaggacagcgagaccagccagaggctggccaacctgcggcagagggtggagcagtttgcccgggccttccccatgcctggctttgatgagcactag

SEQ ID NO: 155758 - DNA, 1515 bp, Artificial Sequence
  derived and/or modified sequence
atgctgtacttcagcctgttctgggccgcccggcccctgcagcggtgcgggcaactggtcagaatggcaattagagcacaacactcgaacgcagcacagacccagaccggagaggcaaacaggggctggacaggccaggagtcactttcagatagtgatccagaaatgtgggagctgctgcagagggaaaaagatcggcaatgccggggactcgagctgatcgctagcgagaacttttgctcaagagccgcactagaggcgctgggctcatgtctgaataacaagtacagtgaaggctaccccggcaagagatattacggaggagccgaggtcgttgacgaaattgagctcctatgtcagagacgtgcgctggaggccttcgatctcgaccctgcccagtggggggttaacgtacaaccctattccggatccccagcaaatctcgctgtgtacaccgcgctgctgcagccgcacgaccggatcatgggactggatctgccagatgggggccacctgacccatgggtacatgtctgacgtgaaacgaatcagcgccaccagtattttcttcgagtccatgccttacaagttgaatccaaagactggactcatagattataaccagctggcgttaacagctcgcctcttcaggccacgccttatcatagcggggactagtgcgtacgccaggctcatcgactatgcacgcatgcgcgaggtgtgtgacgaagttaaagcacatctgctggcggacatggctcacataagcggtttggttgcagctaaggtcattcctagtcccttcaaacacgctgatatcgtgactacaaccactcacaaaaccttaaggggcgccagatcaggcctcattttctaccgcaagggagtgaaggccgtggatcctaagaccggcagggaaattccatacacattcgaggacagaatcaacttcgccgtttttccttccctgcagggtggaccccataaccacgcaatagccgcagtcgctgttgcattgaaacaggcttgcactcccatgttccgagaatattccctgcaagtgctgaaaaacgccagagccatggctgatgccctactggaacgaggttactctctggtcagtggaggtaccgataatcacctggtgctagtggatcttagaccaaaggggctggacggcgcccgtgcagaaagggtacttgaactggtatccatcaccgcaaataagaacacgtgcccaggcgacagaagcgccatcacacctggaggtttgaggctgggggccccagccctgacctcgcgtcagttcagagaggatgattttcgccgggtggtcgattttattgacgaaggtgtgaacatcgggctcgaggtgaagtccaagactgctaagctgcaggacttcaagagtttcttactgaaggatagcgagactagccaacgactcgccaatttacgacagcgggttgaacagttcgcacgtgctttcccgatgcccggctttgatgaacactag

SEQ ID NO: 155759 - DNA, 1515 bp, Artificial Sequence
  derived and/or modified sequence
atgctttattttagtctcttttgggccgcacgtcccctccaacggtgcgggcaactggtgagaatggccattcgggctcagcatagcaatgcggcacagacccagaccggtgaagccaataggggttggaccggccaggagtccctgtctgatagcgacccagagatgtgggagctcctgcagagagaaaaggacagacagtgcagagggctggagctgatcgcctcagaaaacttctgttctagagccgctctagaggcgctcgggtcgtgcttgaataataaatactccgagggctaccctggcaaaaggtattatggcggagctgaggtcgtggacgaaatcgagctgttgtgccagaggagagccctggaggcatttgaccttgacccagcacagtggggagttaacgtgcagccctactcaggtagtcctgccaacctggccgtgtatacggcccttctccaaccccacgacagaattatgggactcgatttgcccgacggtgggcacctgacccatggatacatgtcagatgtgaagaggatttccgctacaagtatctttttcgaatctatgccttataaactgaacccaaagaccggactgatagattataaccagctggcgctgacagcaaggctgtttcgcccacgattgataatcgccggaaccagcgcctacgcccgactgattgactacgcccgaatgagggaagtctgcgacgaagtgaaagctcatctgctggccgacatggcacacatctccggcctcgtggccgcaaaagtgattccatcgcctttcaaacacgccgatattgtgactaccacgacacataaaacgctgaggggcgctaggagcggtctgatcttctacagaaagggggttaaggctgtcgacccaaaaacgggtcgcgaaattccgtatacattcgaggaccgtattaatttcgccgtgtttccaagtctgcaggggggtccccacaaccatgcaatcgccgcagtagccgttgccctcaagcaggcatgcaccccgatgtttagggagtactcgctccaagtactgaagaacgctcgcgcaatggccgacgctctccttgagaggggatacagtctggtgtctgggggaaccgataatcatttggttctggtggaccttcgcccaaaagggctcgatggtgcaagggcagaacgcgtgttggagcttgtgagcattacggctaataagaacacttgtcccggagacagaagtgccatcaccccagggggattacgcttgggagccccagcactgacctcccgccagttcagagaagacgattttagaagagtggtggatttcatcgacgagggtgtgaatataggtctcgaagtcaaatcgaagaccgccaagctgcaggacttcaagtcattcctgctaaaagatagcgaaacctcgcagcggctagcaaacctacggcagcgcgtggaacagttcgcccgagcttttcccatgccaggtttcgacgagcactag

SEQ ID NO: 155760 - DNA, 2537 bp, Artificial Sequence
  derived and/or modified sequence
acggtgctttccagtgttccatagctctttatcttgtgtgggggtctagatctcctggagtctaataatgctagctagatattcagtaggcaccctataaacgtttgtcttgacaacaagcagagagaaaaccctgaaaagcttcaagatagtaaggagagggggcggcactggacctctgtttttgttttttgtttttttccccccaggcaagggcctctaaccctggggctacagacgggaatcataaagaaaaaagcggtgagtgggcgaactacaattcccaaaaggccacaaaggggccaccactacgcatgcgtagatccctcccgttagctttggcgcctcagcgagctcttctcgcgcatgcgttctccgaacggtcttcttccgacagcttgctgccctagaccagagttggtggctggacctcctgcgacttccgagttgcgatgctgtacttctctttgttttgggcggctcggcctctgcagagatgtgggcagctggtcaggatggccattcgggctcagcacagcaacgcagcccagactcagactggggaagcaaacaggggctggacaggccaggagagcctgtcggacagtgatcctgagatgtgggagttgctgcagagggagaaggacaggcagtgtcgtggcctggagctcattgcctcagagaacttctgcagccgagctgcgctggaggccctggggtcctgtctgaacaacaagtactcggagggttatcctggcaagagatactatgggggagcagaggtggtggatgaaattgagctgctgtgccagcgccgggccttggaagcctttgacctggatcctgcacagtggggagtcaatgtccagccctactccgggtccccagccaacctggccgtctacacagcccttctgcaacctcacgaccggatcatggggctggacctgcccgatgggggccatctcacccacggctacatgtctgacgtcaagcggatatcagccacgtccatcttcttcgagtctatgccctataagctcaaccccaaaactggcctcattgactacaaccagctggcactgactgctcgacttttccggccacggctcatcatagctggcaccagcgcctatgctcgcctcattgactacgcccgcatgagagaggtgtgtgatgaagtcaaagcacacctgctggcagacatggcccacatcagtggcctggtggctgccaaggtgattccctcgcctttcaagcacgcggacatcgtcaccaccactactcacaagactcttcgaggggccaggtcagggctcatcttctaccggaaaggggtgaaggctgtggaccccaagactggccgggagatcccttacacatttgaggaccgaatcaactttgccgtgttcccatccctgcaggggggcccccacaatcatgccattgctgcagtagctgtggccctaaagcaggcctgcacccccatgttccgggagtactccctgcaggttctgaagaatgctcgggccatggcagatgccctgctagagcgaggctactcactggtatcaggtggtactgacaaccacctggtgctggtggacctgcggcccaagggcctggatggagctcgggctgagcgggtgctagagcttgtatccatcactgccaacaagaacacctgtcctggagaccgaagtgccatcacaccgggcggcctgcggcttggggccccagccttaacttctcgacagttccgtgaggatgacttccggagagttgtggactttatagatgaaggggtcaacattggcttagaggtgaagagcaagactgccaagctccaggatttcaaatccttcctgcttaaggactcagaaacaagtcagcgtctggccaacctcaggcaacgggtggagcagtttgccagggccttccccatgcctggttttgatgagcattgaaggcacctgggaaatgaggcccacagactcaaagttactctccttccccctacctgggccagtgaaatagaaagcctttctattttttggtgcgggagggaagacctctcacttagggcaagagccaggtatagtctcccttcccagaatttgtaactgagaagatcttttctttttcctttttttggtaacaagacttagaaggagggcccaggcactttctgtttgaacccctgtcatgatcacagtgtcagagacgcgtcctctttcttggggaagttgaggagtgcccttcagagccagtagcaggcaggggtgggtaggcaccctccttcctgtttttatctaataaaatgctaacctgccctgagtttccattactgtgggtggggttcccctgggccaaacagtgatttgtctccctcaatgtgtacaccgctccgctcccaccaccgctaccacaaggacccccggggctgcagcctcctctttctgtctctgatcagagccgacaccagacgtgattagcaggcgcagcaaattcaatttgttaaatgaaattgtattttg

SEQ ID NO: 155761 - DNA, 2006 bp, Artificial Sequence
  derived and/or modified sequence
gcggacccggtgctggcaaatgagcggagttttcggcctggtctcacaagctgagcctttccggccagctctgagccctgcagatgatgcaaccgagcttcactgcttgcatcaggcaggggtcccggcggcagtgagggctggaaggaggtggaacggcctctgcagagatgtgggcagctggtcaggatggccattcgggctcagcacagcaacgcagcccagactcagactggggaagcaaacaggggctggacaggccaggagagcctgtcggacagtgatcctgagatgtgggagttgctgcagagggagaaggacaggcagtgtcgtggcctggagctcattgcctcagagaacttctgcagccgagctgcgctggaggccctggggtcctgtctgaacaacaagtactcggagggttatcctggcaagagatactatgggggagcagaggtggtggatgaaattgagctgctgtgccagcgccgggccttggaagcctttgacctggatcctgcacagtggggagtcaatgtccagccctactccgggtccccagccaacctggccgtctacacagcccttctgcaacctcacgaccggatcatggggctggacctgcccgatgggggccatctcacccacggctacatgtctgacgtcaagcggatatcagccacgtccatcttcttcgagtctatgccctataagctcaaccccaaaactggcctcattgactacaaccagctggcactgactgctcgacttttccggccacggctcatcatagctggcaccagcgcctatgctcgcctcattgactacgcccgcatgagagaggtgtgtgatgaagtcaaagcacacctgctggcagacatggcccacatcagtggcctggtggctgccaaggtgattccctcgcctttcaagcacgcggacatcgtcaccaccactactcacaagactcttcgaggggccaggtcagggctcatcttctaccggaaaggggtgaaggctgtggaccccaagactggccgggagatcccttacacatttgaggaccgaatcaactttgccgtgttcccatccctgcaggggggcccccacaatcatgccattgctgcagtagctgtggccctaaagcaggcctgcacccccatgttccgggagtactccctgcaggttctgaagaatgctcgggccatggcagatgccctgctagagcgaggctactcactggtatcaggtggtactgacaaccacctggtgctggtggacctgcggcccaagggcctggatggagctcgggctgagcgggtgctagagcttgtatccatcactgccaacaagaacacctgtcctggagaccgaagtgccatcacaccgggcggcctgcggcttggggccccagccttaacttctcgacagttccgtgaggatgacttccggagagttgtggactttatagatgaaggggtcaacattggcttagaggtgaagagcaagactgccaagctccaggatttcaaatccttcctgcttaaggactcagaaacaagtcagcgtctggccaacctcaggcaacgggtggagcagtttgccagggccttccccatgcctggttttgatgagcattgaaggcacctgggaaatgaggcccacagactcaaagttactctccttccccctacctgggccagtgaaatagaaagcctttctattttttggtgcgggagggaagacctctcacttagggcaagagccaggtatagtctcccttcccagaatttgtaactgagaagatcttttctttttcctttttttggtaacaagacttagaaggagggcccaggcactttctgtttgaacccctgtcatgatcacagtgtcagagacgcgtcctctttcttggggaagttgaggagtgcccttcagagccagtagcaggcaggggtgggtaggcaccctccttcctgtttttatctaataaaatgctaacctgc

SEQ ID NO: 155762 - DNA, 2121 bp, Artificial Sequence
  derived and/or modified sequence
attgctctacaatctgtggcctcagcccttgccaactctgcctcttcccccgctgactggggtatcagtttatggtgccctgcaggaagaccctcttgttcctgtgggtgggaaggttctggaatctcagttgccctctctggagttggggagacataggcttttggaggacaagctttgcagagtggttcatggagtgaggtggtgggagatttctgaggtgcggtgcggtgaatggagcaaatcagaaccaccccttggacgttgatctcaagcttggctccagaactggcttttgaagcctctgcagagatgtgggcagctggtcaggatggccattcgggctcagcacagcaacgcagcccagactcagactggggaagcaaacaggggctggacaggccaggagagcctgtcggacagtgatcctgagatgtgggagttgctgcagagggagaaggacaggcagtgtcgtggcctggagctcattgcctcagagaacttctgcagccgagctgcgctggaggccctggggtcctgtctgaacaacaagtactcggagggttatcctggcaagagatactatgggggagcagaggtggtggatgaaattgagctgctgtgccagcgccgggccttggaagcctttgacctggatcctgcacagtggggagtcaatgtccagccctactccgggtccccagccaacctggccgtctacacagcccttctgcaacctcacgaccggatcatggggctggacctgcccgatgggggccatctcacccacggctacatgtctgacgtcaagcggatatcagccacgtccatcttcttcgagtctatgccctataagctcaaccccaaaactggcctcattgactacaaccagctggcactgactgctcgacttttccggccacggctcatcatagctggcaccagcgcctatgctcgcctcattgactacgcccgcatgagagaggtgtgtgatgaagtcaaagcacacctgctggcagacatggcccacatcagtggcctggtggctgccaaggtgattccctcgcctttcaagcacgcggacatcgtcaccaccactactcacaagactcttcgaggggccaggtcagggctcatcttctaccggaaaggggtgaaggctgtggaccccaagactggccgggagatcccttacacatttgaggaccgaatcaactttgccgtgttcccatccctgcaggggggcccccacaatcatgccattgctgcagtagctgtggccctaaagcaggcctgcacccccatgttccgggagtactccctgcaggttctgaagaatgctcgggccatggcagatgccctgctagagcgaggctactcactggtatcaggtggtactgacaaccacctggtgctggtggacctgcggcccaagggcctggatggagctcgggctgagcgggtgctagagcttgtatccatcactgccaacaagaacacctgtcctggagaccgaagtgccatcacaccgggcggcctgcggcttggggccccagccttaacttctcgacagttccgtgaggatgacttccggagagttgtggactttatagatgaaggggtcaacattggcttagaggtgaagagcaagactgccaagctccaggatttcaaatccttcctgcttaaggactcagaaacaagtcagcgtctggccaacctcaggcaacgggtggagcagtttgccagggccttccccatgcctggttttgatgagcattgaaggcacctgggaaatgaggcccacagactcaaagttactctccttccccctacctgggccagtgaaatagaaagcctttctattttttggtgcgggagggaagacctctcacttagggcaagagccaggtatagtctcccttcccagaatttgtaactgagaagatcttttctttttcctttttttggtaacaagacttagaaggagggcccaggcactttctgtttgaacccctgtcatgatcacagtgtcagagacgcgtcctctttcttggggaagttgaggagtgcccttcagagccagtagcaggcaggggtgggtaggcaccctccttcctg

SEQ ID NO: 155763 - DNA, 1765 bp, Artificial Sequence
  derived and/or modified sequence
acggactgctaaaggtctcccctcccacctgcattgctctacaatctgtggcctcagcccttgccaactctgcctcttcccccgctgactgggcctctgcagagatgtgggcagctggtcaggatggccattcgggctcagcacagcaacgcagcccagactcagactggggaagcaaacaggggctggacaggccaggagagcctgtcggacagtgatcctgagatgtgggagttgctgcagagggagaaggacaggcagtgtcgtggcctggagctcattgcctcagagaacttctgcagccgagctgcgctggaggccctggggtcctgtctgaacaacaagtactcggagggttatcctggcaagagatactatgggggagcagaggtggtggatgaaattgagctgctgtgccagcgccgggccttggaagcctttgacctggatcctgcacagtggggagtcaatgtccagccctactccgggtccccagccaacctggccgtctacacagcccttctgcaacctcacgaccggatcatggggctggacctgcccgatgggggccatctcacccacggctacatgtctgacgtcaagcggatatcagccacgtccatcttcttcgagtctatgccctataagctcaaccccaaaactggcctcattgactacaaccagctggcactgactgctcgacttttccggccacggctcatcatagctggcaccagcgcctatgctcgcctcattgactacgcccgcatgagagaggtgtgtgatgaagtcaaagcacacctgctggcagacatggcccacatcagtggcctggtggctgccaaggtgattccctcgcctttcaagcacgcggacatcgtcaccaccactactcacaagactcttcgaggggccaggtcagggctcatcttctaccggaaaggggtgaaggctgtggaccccaagactggccgggagatcccttacacatttgaggaccgaatcaactttgccgtgttcccatccctgcaggggggcccccacaatcatgccattgctgcagtagctgtggccctaaagcaggcctgcacccccatgttccgggagtactccctgcaggttctgaagaatgctcgggccatggcagatgccctgctagagcgaggctactcactggtatcaggtggtactgacaaccacctggtgctggtggacctgcggcccaagggcctggatggagctcgggctgagcgggtgctagagcttgtatccatcactgccaacaagaacacctgtcctggagaccgaagtgccatcacaccgggcggcctgcggcttggggccccagccttaacttctcgacagttccgtgaggatgacttccggagagttgtggactttatagatgaaggggtcaacattggcttagaggtgaagagcaagactgccaagctccaggatttcaaatccttcctgcttaaggactcagaaacaagtcagcgtctggccaacctcaggcaacgggtggagcagtttgccagggccttccccatgcctggttttgatgagcattgaaggcacctgggaaatgaggcccacagactcaaagttactctccttccccctacctgggccagtgaaatagaaagcctttctattttttggtgcgggagggaagacctctcacttagggcaagagccaggtatagtctcccttcccagaatttgtaactgagaagatcttttctttttcctttttttggta

SEQ ID NO: 155764 - DNA, 1515 bp, Artificial Sequence
  derived and/or modified sequence
atgctgtacttcagcctgttctgggccgccagacccctgcagagatgcggccagctggtgagaatggccatcagagcccagcacagcaacgccgcccagacccagaccggcgaggccaacagaggctggaccggccaggagagcctgagcgacagcgaccccgagatgtgggagctgctgcagagagagaaggacagacagtgcagaggcctggagctgatcgccagcgagaacttctgcagcagagccgccctggaggccctgggcagctgcctgaacaacaagtacagcgagggctaccccggcaagagatactacggcggcgccgaggtggtggacgagatcgagctgctgtgccagagaagagccctggaggccttcgacctggaccccgcccagtggggcgtgaacgtgcagccctacagcggcagccccgccaacctggccgtgtacaccgccctgctgcagccccacgacagaatcatgggcctggacctgcccgacggcggccacctgacccacggctacatgagcgacgtgaagagaatcagcgccaccagcatcttcttcgagagcatgccctacaagctgaaccccaagaccggcctgatcgactacaaccagctggccctgaccgccagactgttcagacccagactgatcatcgccggcaccagcgcctacgccagactgatcgactacgccagaatgagagaggtgtgcgacgaggtgaaggcccacctgctggccgacatggcccacatcagcggcctggtggccgccaaggtgatccccagccccttcaagcacgccgacatcgtgaccaccaccacccacaagaccctgagaggcgccagaagcggcctgatcttctacagaaagggcgtgaaggccgtggaccccaagaccggcagagagatcccctacaccttcgaggacagaatcaacttcgccgtgttccccagcctgcagggcggcccccacaaccacgccatcgccgccgtggccgtggccctgaagcaggcctgcacccccatgttcagagagtacagcctgcaggtgctgaagaacgccagagccatggccgacgccctgctggagagaggctacagcctggtgagcggcggcaccgacaaccacctggtgctggtggacctgagacccaagggcctggacggcgccagagccgagagagtgctggagctggtgagcatcaccgccaacaagaacacctgccccggcgacagaagcgccatcacccccggcggcctgagactgggcgcccccgccctgaccagcagacagttcagagaggacgacttcagaagagtggtggacttcatcgacgagggcgtgaacatcggcctggaggtgaagagcaagaccgccaagctgcaggacttcaagagcttcctgctgaaggacagcgagaccagccagagactggccaacctgagacagagagtggagcagttcgccagagccttccccatgcccggcttcgacgagcactag

SEQ ID NO: 155765 - protein, 332 aa, Artificial Sequence
  derived and/or modified sequence
MVFRSPLDLYSSHFLLPNFADSHHRSILLASSGGGNGAGGGGGAGGGSGGGNGAGGGGAGGAGGGGGGGSRAPPEELSMFQLPTLNFSPEQVASVCETLEETGDIERLGRFLWSLPVAPGACEAINKHESILRARAVVAFHTGNFRDLYHILENHKFTKESHGKLQAMWLEAHYQEAEKLRGRPLGPVDKYRVRKKFPLPRTIWDGEQKTHCFKERTRSLLREWYLQDPYPNPSKKRELAQATGLTPTQVGNWFKNRRQRDRAAAAKNRLQHQAIGPSGMRSLAEPGCPTHGSAESPSTAASPTTSVSSLTERADTGTSILSVTSSDSECDV

SEQ ID NO: 155766 - DNA, 2533 bp, Artificial Sequence
  derived and/or modified sequence
gcgggtgtgtgtgtgtgtggatgtgtgtggggtgtgggtgtcccttacgcccttcctcctctccctcctcctcctgctcccccctcctttccttctcctcctcccccctctcctctccctcctcctggtcctcatcgcccctctcctcctcttcctcccctctctcttcctctccctgaattttctcctctcctctcaggtcagtccatggtattccgctcccccctagacctctattcctcccacttcttgttgccaaacttcgccgattctcaccaccgctccatacttctggcgagtagcggcggcgggaacggtgcgggaggcggcggcggcgcgggaggcggcagcggcggcgggaacggtgcgggaggcggcggtgctggcggagcaggcggcggcggcggcggcggctccagggcccccccggaagagttgtccatgttccagctgcccaccctcaacttctcgccggagcaggtggccagcgtctgtgagacgctggaggagacgggcgacatcgagcggctgggccgcttcctctggtcgctgcccgtggcccccggggcgtgcgaggccatcaacaaacacgagtcgatcctgcgcgcgcgcgccgtggtcgccttccacacgggcaacttccgcgacctctaccacatccttgagaaccacaagttcaccaaggagtctcacggcaagctgcaggccatgtggctcgaggcgcactaccaggaggccgagaagctgcgcggccgcccactcggcccggtggacaagtaccgcgtgcgcaagaagttcccgctgccacgcaccatctgggacggcgagcagaagacgcattgcttcaaggagcggactcggagcctgttgcgggagtggtacctacaggacccctaccccaaccccagcaagaaacgcgaactggcgcaggccaccggcctcactcccacacaagtaggcaactggtttaagaaccggcggcagcgcgaccgcgccgcggcggccaagaacaggctccagcaccaggccattggaccgagcggcatgcgctcgctggccgagcccggctgccccacgcacggctcggcagagtcgccgtccacggcggccagcccgaccaccagcgtgtccagcctgacggagcgcgcagacaccggcacctccatcctctcggtaacctccagcgactcggaatgtgatgtatgatagccaaggccgccctcctccctctccttcccctcctcccccactccttcccctccgcctcctagccctcctcctcttcctcctcttccttctcctcctccatccccagaacaaaccgaaatcaggatacccaaccatacacacatacaagtccacacacactcccaccccagccaaaaatatataaaaaacaagaaaataacaaattaaccgcaaactatcaacaacccccaaccaccatctaccactacggccaccccaaaggaccccgacgccaacagacagtcaaacgctgatgttgcgggcagaaaacataaaagaggtgacaattgtatactttctaggacaagcacggcttctcctttcggttcccatggacccggcaccccacctgcatgacgatttatttgtatctgggaaaatattctctctagttaaaaatgatttaaagagtcgactatacaaaaatcaatcaccaccacgaggacaagagggcaaaagcaaaacagacaaaaagaaaaaaaatcgccgtctccgttccgaatttgttaaaaaaaaaaaaaaaaaaaaaaaaaaggacagggggaaaaaaaaaaaaaaagaactcctggagagggaaatagcaaatgtgtcttgccttttgttgctctctctctctttttttttctctcgctctctttctttctcttcttctctctgtttttaagtcaagtattggtcaaaaaaatgcaatcttctgttttttgttcagcagacaatcattttcttcgtaagcacctttttctctccactctgtcactgcctgtgtgggtactggttataaatgtggaaaaagaatagttatgactgtaacagatttttatttttatttcaaaattttatatgaattatgtatatcttaatgatcggtcattttcccagtttgtaatatatgtgtagaaattgcctgtatatgatattgctttttctcctctccctttctctttctctcctctccctctctctgtctttctccccgctcaactgtctcttttctttttggggttctcctcccactcggtgctcctggtgtcgacttggcagtcaaggagaggcatggtggcctgggttaggaagagggaccctgtcgctagcaaaagcggagagtgagattgtagtattcttatgcaaaagctatttccagtatttcttagcagcttcagaggtatctctcactccctgtagggcgcttttactgttatcttaaactgcgtgtttatctatatgtaaaaactttctaaagcaaatacagtattctccattttcttatcactcccaaaaaaaaaaa

SEQ ID NO: 155767 - DNA, 999 bp, Artificial Sequence
  derived and/or modified sequence
atggtcttccggagtcctttggacctctattctagccatttcctgctgccaaatttcgcagactcacaccaccgatccatactcctggctagcagcggcggaggaaacggagctgggggtggcggcggcgcgggcggtggcagcggagggggaaatggggcgggaggtgggggcgctggtggcgcaggcggggggggtggcggcggctctagggctccacctgaggaactttctatgtttcaactccctaccctaaatttctctcccgagcaggtggcttcggtgtgcgagacgctggaagaaactggagacatcgagcggctgggacggttcttgtggagccttccagttgctccaggagcttgcgaggccatcaataaacacgaatctattttaagggctagagcggtggtggctttccacacaggtaactttagggacttataccatatcctggagaaccacaaatttaccaaggagtcccatggtaagctgcaagcaatgtggctggaagctcactatcaggaggccgagaagttgagaggccgccccttggggccagtagacaagtatagagtccggaagaagttccccctgcccaggaccatctgggacggagagcagaagactcactgtttcaaggagcggacacgttctctgcttcgggaatggtacctccaggacccttacccaaacccaagtaagaagcgcgagctagcccaagccactggcttaacccccactcaggtcggaaactggttcaagaatcggagacagagagatagggccgctgccgctaagaacaggcttcagcaccaggcaatcggcccatccggtatgagatccctcgccgagcccggttgcccaacacatggcagtgccgaatcaccctccaccgctgcttccccaacaacctccgtgtccagccttacagaaagggccgatactggcacctccatcctctccgtcactagttccgacagcgagtgcgacgtatag

SEQ ID NO: 155768 - DNA, 999 bp, Artificial Sequence
  derived and/or modified sequence
atggtgttccgcagccccctggacctgtacagcagccacttcctgctgcccaactttgctgacagccaccacaggagcatcctgctggccagcagcggcggcggcaatggagctgggggcggcggcggggccggcggcggcagcggcggcggcaatggagctgggggcggcggggccggcggggccggcggcggcggcggcggcggcagccgggcccctcctgaggagctgtccatgttccagctgcccaccctgaacttcagccctgagcaggtggcctctgtgtgtgagaccctggaggagaccggggacatcgagcggctgggccgcttcctgtggagcctgcctgtggcccctggggcctgtgaggccatcaacaagcatgagagcatcctgcgggcccgggctgtggtggccttccacacaggcaacttccgggacctgtaccacatcctggagaaccacaagttcaccaaggagagccacggcaagctgcaggccatgtggctggaggcccactaccaggaggccgagaagctgcggggccggcccctgggccctgtggacaagtacagagtgaggaagaagttccccctgcccaggaccatctgggatggagagcagaagacccactgcttcaaggagaggaccaggagcctgctgcgggagtggtacctgcaggacccctaccccaaccccagcaagaagcgggagctggcccaggccaccggcctgacccccacccaggtgggcaactggttcaagaacagacggcagagggacagagctgctgctgccaagaaccggctgcagcaccaggccatcggccccagcggcatgaggagcctggccgagcccggctgccccacccacggcagcgctgagagccccagcacagctgccagccccaccacctctgtgagcagcctgacagaaagagctgacaccggcaccagcatcctgtctgtgaccagcagtgacagtgaatgtgatgtgtag

SEQ ID NO: 155769 - DNA, 999 bp, Artificial Sequence
  derived and/or modified sequence
atggtgttccggagccccctggacctgtacagcagccacttcctgctccccaacttcgctgactcgcaccataggagcatcctattagctagttccggcggtgggaatggggctggtgggggtggcggagctggcggaggtagcggtggaggaaatggcgctgggggaggcggagccggcggagcagggggcggcggcggcggcggcagcagagcccctcccgaggaattgagcatgttccagctgccaacgctgaatttctccccagagcaggtggcatccgtgtgtgaaactcttgaggagacaggtgatatcgaaagactgggccggttcctgtggagcctgcctgttgccccgggggcatgtgaggctatcaataaacacgagtccattttacgagctcgggccgtcgttgcttttcatacaggcaacttcagggatttgtatcacattcttgaaaaccataagtttaccaaggagagccatggaaaactgcaggccatgtggctcgaggctcattatcaggaagctgaaaaactccggggcaggcccctgggacctgtcgacaagtacagggtccgcaagaaattccctctgccccgaactatatgggacggtgaacaaaagacacactgcttcaaagagcggactaggagtctgctgagagagtggtacctgcaggacccttaccctaatccttctaaaaaacgggaacttgctcaggctaccggcctcacaccaacccaggttgggaattggtttaagaatcgcagacagcgggaccgtgccgccgcggcaaaaaaccgtctccagcaccaagccattggaccgtcagggatgagatctttagcggagcctggatgccctacccacggctccgctgagtcaccctctactgcagcttcgccaacaacaagcgtctcaagtctgacggaacgggcagacacgggtacctcaatattatccgtaacaagcagcgactcagagtgcgatgtgtag

SEQ ID NO: 155770 - DNA, 999 bp, Artificial Sequence
  derived and/or modified sequence
atggtgttccgctcacccctggatctgtattcttctcactttctgctgcccaactttgccgactctcaccataggtcaatactgctcgcttcgtcagggggtggcaatggtgccggaggaggaggaggagcaggaggcggttccgggggaggaaacggagccggtgggggaggggctggcggtgctggaggtggtgggggaggaggctcccgcgctcctcccgaagagctctcaatgtttcagttacccacattaaatttttctcctgaacaagtcgccagcgtctgtgaaaccttggaggagactggcgatattgaacgtctgggcaggtttctctggtctctccctgtggctccaggagcttgtgaggcgatcaacaagcatgagtccatcctcagagctcgggcagtcgtcgcttttcatacagggaactttcgggatttataccacatactggagaatcacaaatttacaaaggagtcccacgggaagcttcaggctatgtggctggaggcacactaccaagaagctgagaagctccgcggtcgccctcttggtccggtggacaaatatcgggtccggaagaaattccccttgcccaggacaatatgggacggcgagcagaagacacattgctttaaagaaagaactcgatcgttactgagagagtggtatctgcaagatccctaccccaatccgagcaagaagagggagctggctcaggcaacaggtctgactcccacccaggttggcaattggtttaagaaccggagacagcgggacagagccgctgccgcaaagaaccggttgcagcatcaggcgatcggcccttccggaatgagatcgctggccgagcctggatgtcctactcatgggtcggcagagagcccttccacagccgcatcccctaccaccagcgtcagttcactgacggagcgcgctgacactggtacgtctattttatcagtgactagctcagattcagaatgcgatgtgtag

SEQ ID NO: 155771 - DNA, 2658 bp, Artificial Sequence
  derived and/or modified sequence
gaatcgctgaatcttgactcggcggtggttggctctccctctcctctctccctctccctctccctctctgtctcgggttctctctctgcgcgcgcgcaccgggccgctctcctacctccctctctatgtggctgcgcgggtgtgtgtgtgtgtggatgtgtgtggggtgtgggtgtcccttacgcccttcctcctctccctcctcctcctgctcccccctcctttccttctcctcctcccccctctcctctccctcctcctggtcctcatcgcccctctcctcctcttcctcccctctctcttcctctccctgaattttctcctctcctctcaggtcagtccatggtattccgctcccccctagacctctattcctcccacttcttgttgccaaacttcgccgattctcaccaccgctccatacttctggcgagtagcggcggcgggaacggtgcgggaggcggcggcggcgcgggaggcggcagcggcggcgggaacggtgcgggaggcggcggtgctggcggagcaggcggcggcggcggcggcggctccagggcccccccggaagagttgtccatgttccagctgcccaccctcaacttctcgccggagcaggtggccagcgtctgtgagacgctggaggagacgggcgacatcgagcggctgggccgcttcctctggtcgctgcccgtggcccccggggcgtgcgaggccatcaacaaacacgagtcgatcctgcgcgcgcgcgccgtggtcgccttccacacgggcaacttccgcgacctctaccacatccttgagaaccacaagttcaccaaggagtctcacggcaagctgcaggccatgtggctcgaggcgcactaccaggaggccgagaagctgcgcggccgcccactcggcccggtggacaagtaccgcgtgcgcaagaagttcccgctgccacgcaccatctgggacggcgagcagaagacgcattgcttcaaggagcggactcggagcctgttgcgggagtggtacctacaggacccctaccccaaccccagcaagaaacgcgaactggcgcaggccaccggcctcactcccacacaagtaggcaactggtttaagaaccggcggcagcgcgaccgcgccgcggcggccaagaacaggctccagcaccaggccattggaccgagcggcatgcgctcgctggccgagcccggctgccccacgcacggctcggcagagtcgccgtccacggcggccagcccgaccaccagcgtgtccagcctgacggagcgcgcagacaccggcacctccatcctctcggtaacctccagcgactcggaatgtgatgtatgatagccaaggccgccctcctccctctccttcccctcctcccccactccttcccctccgcctcctagccctcctcctcttcctcctcttccttctcctcctccatccccagaacaaaccgaaatcaggatacccaaccatacacacatacaagtccacacacactcccaccccagccaaaaatatataaaaaacaagaaaataacaaattaaccgcaaactatcaacaacccccaaccaccatctaccactacggccaccccaaaggaccccgacgccaacagacagtcaaacgctgatgttgcgggcagaaaacataaaagaggtgacaattgtatactttctaggacaagcacggcttctcctttcggttcccatggacccggcaccccacctgcatgacgatttatttgtatctgggaaaatattctctctagttaaaaatgatttaaagagtcgactatacaaaaatcaatcaccaccacgaggacaagagggcaaaagcaaaacagacaaaaagaaaaaaaatcgccgtctccgttccgaatttgttaaaaaaaaaaaaaaaaaaaaaaaaaaggacagggggaaaaaaaaaaaaaaagaactcctggagagggaaatagcaaatgtgtcttgccttttgttgctctctctctctttttttttctctcgctctctttctttctcttcttctctctgtttttaagtcaagtattggtcaaaaaaatgcaatcttctgttttttgttcagcagacaatcattttcttcgtaagcacctttttctctccactctgtcactgcctgtgtgggtactggttataaatgtggaaaaagaatagttatgactgtaacagatttttatttttatttcaaaattttatatgaattatgtatatcttaatgatcggtcattttcccagtttgtaatatatgtgtagaaattgcctgtatatgatattgctttttctcctctccctttctctttctctcctctccctctctctgtctttctccccgctcaactgtctcttttctttttggggttctcctcccactcggtgctcctggtgtcgacttggcagtcaaggagaggcatggtggcctgggttaggaagagggaccctgtcgctagcaaaagcggagagtgagattgtagtattcttatgcaaaagctatttccagtatttcttagcagcttcagaggtatctctcactccctgtagggcgcttttactgttatcttaaactgcgtgtttatctatatgtaaaaactttctaaagcaaatacagtattctccattttcttatcactccca

SEQ ID NO: 155772 - DNA, 999 bp, Artificial Sequence
  derived and/or modified sequence
atggtgttcagaagccccctggacctgtacagcagccacttcctgctgcccaacttcgccgacagccaccacagaagcatcctgctggccagcagcggcggcggcaacggcgccggcggcggcggcggcgccggcggcggcagcggcggcggcaacggcgccggcggcggcggcgccggcggcgccggcggcggcggcggcggcggcagcagagccccccccgaggagctgagcatgttccagctgcccaccctgaacttcagccccgagcaggtggccagcgtgtgcgagaccctggaggagaccggcgacatcgagagactgggcagattcctgtggagcctgcccgtggcccccggcgcctgcgaggccatcaacaagcacgagagcatcctgagagccagagccgtggtggccttccacaccggcaacttcagagacctgtaccacatcctggagaaccacaagttcaccaaggagagccacggcaagctgcaggccatgtggctggaggcccactaccaggaggccgagaagctgagaggcagacccctgggccccgtggacaagtacagagtgagaaagaagttccccctgcccagaaccatctgggacggcgagcagaagacccactgcttcaaggagagaaccagaagcctgctgagagagtggtacctgcaggacccctaccccaaccccagcaagaagagagagctggcccaggccaccggcctgacccccacccaggtgggcaactggttcaagaacagaagacagagagacagagccgccgccgccaagaacagactgcagcaccaggccatcggccccagcggcatgagaagcctggccgagcccggctgccccacccacggcagcgccgagagccccagcaccgccgccagccccaccaccagcgtgagcagcctgaccgagagagccgacaccggcaccagcatcctgagcgtgaccagcagcgacagcgagtgcgacgtgtag

SEQ ID NO: 155773 - protein, 679 aa, Artificial Sequence
  derived and/or modified sequence
MATLITSTTAATAASGPLVDYLWMLILGFIIAFVLAFSVGANDVANSFGTAVGSGVVTLKQACILASIFETVGSVLLGAKVSETIRKGLIDVEMYNSTQGLLMAGSVSAMFGSAVWQLVASFLKLPISGTHCIVGATIGFSLVAKGQEGVKWSELIKIVMSWFVSPLLSGIMSGILFFLVRAFILHKADPVPNGLRALPVFYACTVGINLFSIMYTGAPLLGFDKLPLWGTILISVGCAVFCALIVWFFVCPRMKRKIEREIKCSPSESPLMEKKNSLKEDHEETKLSVGDIENKHPVSEVGPATVPLQAVVEERTVSFKLGDLEEAPERERLPSVDLKEETSIDSTVNGAVQLPNGNLVQFSQAVSNQINSSGHYQYHTVHKDSGLYKELLHKLHLAKVGDCMGDSGDKPLRRNNSYTSYTMAICGMPLDSFRAKEGEQKGEEMEKLTWPNADSKKRIRMDSYTSYCNAVSDLHSASEIDMSVKAEMGLGDRKGSNGSLEEWYDQDKPEVSLLFQFLQILTACFGSFAHGGNDVSNAIGPLVALYLVYDTGDVSSKVATPIWLLLYGGVGICVGLWVWGRRVIQTMGKDLTPITPSSGFSIELASALTVVIASNIGLPISTTHCKVGSVVSVGWLRSKKAVDWRLFRNIFMAWFVTVPISGVISAAIMAIFRYVILRM

SEQ ID NO: 155774 - protein, 378 aa, Artificial Sequence [sequence omitted]

SEQ ID NO: 155775 - DNA, 2040 bp, Artificial Sequence
  derived and/or modified sequence
atggccaccttgatcacatctaccacagcggcaaccgctgcgtccggtcctctagttgattatctatggatgctcattctaggattcatcatagcctttgttctagcatttagcgtcggcgccaatgatgtggccaacagttttggcactgccgtaggtagtggtgtggtgacattgaagcaggcatgcatcctggcttcaatttttgaaacagtcggcagtgtcctattgggggctaaagtgtccgagacaatacgtaaaggcctgatagacgtggagatgtacaactccacacaggggctgctcatggcgggttcagtgagcgcaatgttcggctcagcagtttggcagttggtggcttccttcctgaagttacctatttctggaacccactgtatagttggggccacaattggcttttcccttgtggccaaaggccaggagggcgtcaaatggagtgaactgatcaagatcgtgatgtcctggtttgtatcacccctactttccggaatcatgagtggcatccttttcttcttggtgagagccttcatcctacataaggccgatcccgtgcccaatgggctgagagcgttgcctgtattctacgcatgtaccgttggcataaatctgttctcaatcatgtatacaggcgccccgctgttgggatttgataaactgcccctttgggggacaatcctgatctctgtcggttgtgctgtcttttgcgccttaatagtgtggttcttcgtgtgcccacgcatgaagcgcaaaattgagcgagagattaaatgttccccatccgagtcccctctcatggaaaagaagaattccctgaaagaggaccatgaagaaacaaagctcagtgtcggcgatattgagaataagcaccccgtgtctgaggtagggccagctacagtgcccttgcaggccgtggtggaagaaaggactgtctcatttaagctgggggacttggaggaggctccagaaagggaaaggctgccctctgtagacctgaaggaagaaacatccatagactcaacagtcaatggggctgtgcagcttccgaacggaaacttggtgcagtttagtcaggccgtgtcaaaccagatcaactctagcggacattatcaataccatactgtgcataaagactcggggctttataaagagctcctgcataaactgcatttggccaaagtgggagattgcatgggggattccggggacaaaccgctcaggcggaacaactcatatacctcttacacaatggcgatttgcgggatgcccctcgattccttccgagccaaggaaggggaacagaagggcgaggagatggagaaactgacttggccaaatgcggacagcaagaaacgaatccggatggattcctacactagttactgtaatgcagtaagtgatctgcattccgcatcggagattgatatgtccgtaaaggccgagatgggactcggcgatagaaagggctccaatgggtcattggaagagtggtatgaccaggataaacctgaagtgagcctgctgtttcagttcctacaaattctcacagcatgtttcggttcattcgcccacggcggtaatgacgtgagtaatgccatcgggccactggtcgccttatacttggtttacgacacaggggacgtcagctcaaaggtggccacccccatctggctactcctatatgggggtgtcggtatctgtgttggcctctgggtttggggccgccgtgtcatccagactatgggaaaggacctgaccccaatcacaccttcatctggcttctctatcgagctggctagcgcccttactgtggtaattgcatcaaacatagggctgcctatctccactactcattgcaaggttgggagtgtcgtgagcgttggatggctgagaagtaagaaggctgttgattggcgcctgttcagaaatatttttatggcctggtttgtgactgtgcccatttcaggagtgatctccgccgcgattatggcaattttccgatacgtgattctacgtatgtag

SEQ ID NO: 155776 - DNA, 2040 bp, Artificial Sequence
  derived and/or modified sequence
atggccaccctcatcaccagcaccacagctgccacagctgccagcggccccctggtggactacctgtggatgctgatcctgggcttcatcatcgcctttgtgctggccttctctgtgggcgccaatgatgtggccaacagctttggaacagctgtgggcagcggcgtggtgaccctgaagcaggcctgcatcctggccagcatctttgaaacagtgggctctgtgctgctgggcgccaaggtgtctgagaccatcaggaagggcctgattgatgtggagatgtacaacagcacccagggcctgctgatggccggctctgtgtctgccatgtttggatctgctgtgtggcagctggtggccagcttcctgaagctgcccatcagcggcacccactgcatcgtgggcgccaccatcggcttcagcctggtggccaagggccaggagggcgtgaagtggagcgagctgatcaagatcgtgatgtcctggtttgtgagccccctgctgagcggcatcatgagcggcatcctcttcttcctggtgcgggccttcatcctgcacaaggctgaccctgtgcccaacggcctgcgggccctgcctgtgttctacgcctgcaccgtgggcatcaacctcttcagcatcatgtacaccggggcccccctgctgggctttgacaagctgcccctgtggggcaccatcctgatctctgtgggctgtgctgtgttctgtgccctgattgtgtggttctttgtgtgccccaggatgaagaggaagattgaaagagagatcaagtgcagccccagcgagagccccctgatggagaagaagaacagcctgaaggaggaccacgaggagaccaagctgtctgtgggggacatcgagaacaagcaccctgtgtctgaggtgggccctgccaccgtgcccctgcaggccgtggtggaggagaggacagtgtccttcaagctgggggacctggaggaggcccctgagcgggagcggctgcccagcgtggacctgaaggaggagaccagcattgacagcacagtgaatggagctgtgcagctgcccaacggcaacctggtgcagttcagccaggccgtgagcaaccagatcaacagcagcggccactaccagtaccacacagtgcacaaggacagcggcctgtacaaggagctgctgcacaagctgcacctggccaaggtgggggactgcatgggagacagcggggacaagcccctgcggaggaacaacagctacaccagctacaccatggccatctgtggcatgcccctggacagcttccgggccaaggagggggagcagaagggggaggagatggagaagctgacctggcccaatgctgacagcaagaagaggatccgcatggacagctacaccagctactgcaatgctgtgtctgacctgcacagcgccagcgagattgacatgtctgtgaaggccgagatgggcctgggggacaggaagggcagcaatggcagcctggaggagtggtatgaccaggacaagccagaggtgtccctgctcttccagttcctgcagatcctgacagcctgcttcggcagctttgcccacggcggcaatgatgtgtccaatgccatcggccccctggtggccctgtacctggtgtatgacacaggagatgtgagcagcaaggtggccacccccatctggctgctgctgtatggaggagtgggcatctgtgtgggcctgtgggtgtggggcagaagagtcatccagaccatgggcaaggacctgacccccatcacccccagcagcggcttcagcattgagctggccagcgccctgactgtggtgattgccagcaacatcggcctgcccatcagcaccacccactgcaaggtgggctctgtggtgtctgtgggctggctgcggagcaagaaggctgtggactggaggctcttcaggaacatcttcatggcctggtttgtgacagtgcccatctctggagtcatctctgctgccatcatggccatcttccgctacgtgatcctgaggatgtag

SEQ ID NO: 155777 - DNA, 2040 bp, Artificial Sequence
  derived and/or modified sequence
atggccaccctgatcaccagcaccaccgccgccaccgccgccagcggacctctggtggactacctgtggatgctgatcttaggatttattattgcgtttgttctggccttcagcgtgggcgctaacgatgtggccaactctttcggcacagctgtcggctcaggagtggtgacactgaaacaggcctgcattctggcgtcaatcttcgagacagtgggctctgtgctgctaggggccaaggtgagtgaaacaatcaggaagggattaattgatgttgagatgtataactccactcaaggcctgctgatggcagggagcgtttccgccatgttcggctcagccgtctggcagctggtagccagctttctgaaactgcccataagcggcacacactgtatcgtcggtgcgactataggattttcgctggtggctaaaggccaggagggcgtgaaatggtctgaattgatcaagattgtgatgtcctggttcgtcagtcctctcctttctggcattatgagtggcatccttttttttctggtgagagcctttatcctgcacaaggccgatcctgttcctaacgggcttcgggctcttcctgtgttctatgcatgtacggtcgggatcaacctgttctcaataatgtacaccggcgcccccctgctgggtttcgataaattacccctgtggggtactattctgatttccgttggttgtgcggtgttctgcgcactgatcgtttggttttttgtgtgtccgcggatgaagaggaagatcgaacgcgagatcaaatgctcaccgagtgaatctccattgatggagaagaagaattctctaaaggaggaccacgaggagactaagttgtccgtcggggatatcgaaaataaacaccccgtgtctgaagtgggcccagcaactgttcccctgcaggcggttgtcgaagagcgcacagtctcttttaagctcggagacctcgaggaagcgcctgaacgcgaaaggctcccttctgtagaccttaaggaagagaccagtattgactccactgtgaacggcgcagtccagctccctaatggaaacctggtacagttttcccaggccgtttccaatcagattaacagctctggtcattaccagtaccatacagttcataaggacagcggactctacaaagaactcctccacaaactccatttggcgaaggtgggggactgcatgggggactccggcgacaaacctctgcggcgcaataattcctacacatcatatacaatggcgatttgcgggatgcccctggactctttccgcgccaaagagggagaacagaaaggcgaagagatggaaaaactgacctggccaaacgccgactccaagaagaggattcgcatggacagttatacatcctactgtaacgccgtttctgacctacactccgcttccgagatcgatatgtccgtgaaagccgaaatggggctgggagaccggaagggcagcaacggctccctggaagagtggtatgaccaagataagcccgaagttagtttgttgttccagttcctgcaaatactgactgcctgctttggctccttcgcgcacgggggtaatgatgtgagtaatgccattggtccgctggtggccttgtacctcgtctacgacacgggtgatgtttcatcaaaagtagcgacacccatatggctccttttgtacgggggcgtcgggatatgtgtgggtctatgggtctggggacgccgggtcatccagaccatgggcaaggacctcacgcctattacaccctcttcaggtttcagcatcgagcttgccagtgctcttaccgtggtaattgcatccaatatcggtttgccaatttctacgacccattgcaaggttggctcagtcgtgagcgtggggtggctcaggtcaaaaaaagctgtcgactggagattgtttcggaacattttcatggcttggttcgtgacagtgccgataagcggcgtcatatctgccgcaataatggccatattcaggtatgtgattctgagaatgtag

SEQ ID NO: 155778 - DNA, 2040 bp, Artificial Sequence
  derived and/or modified sequence
atggcaactctcattactagcacaacagctgccaccgcagcatctggaccactggtggattacttgtggatgctcattttggggttcattatcgccttcgtattggccttctctgttggagctaacgacgttgccaacagctttggcacggctgtaggcagcggagtcgtgacgctgaaacaggcttgcattctggcctccatcttcgagaccgttgggtcagtccttctaggggctaaagttagtgagaccattagaaagggactcatcgatgttgagatgtataattctacacagggtttgctgatggcgggatccgtgtctgccatgttcggatctgctgtgtggcagctcgtggcctcgttcctcaaactgcctatcagcgggacacactgcatcgtgggggctaccattggattttcacttgtcgcgaaaggccaagaaggcgttaagtggagtgaactcatcaaaatcgtaatgtcctggtttgtaagcccacttctgagcggcataatgtccggcatactctttttcctggtgagagcatttatattgcacaaagccgaccccgtgccaaacggcctcagagcactacccgtcttttatgcatgtacagtgggtataaatctttttagtatcatgtacactggcgctcccctactgggtttcgataagctacctctgtgggggacgattctcatttcagtcggatgtgcagtgttttgcgctcttatcgtgtggttcttcgtttgccctcggatgaaacgcaagatcgaaagggaaatcaaatgctcaccgagcgaatctcctttaatggaaaaaaaaaactcgttgaaggaggatcatgaggaaaccaagttgtctgtgggagacatagagaataagcatcctgtgtctgaggtgggcccagccaccgtaccgttgcaggcagtggtcgaagagaggacagtgtcatttaagttgggggatctggaggaagcacccgagcgagagagactgcccagcgtcgacctcaaggaggaaacatccattgattccaccgtgaatggagccgtgcaattaccaaatggtaacctcgttcagttttcccaggccgtttcaaatcagataaattcttcggggcactatcagtaccacaccgttcacaaggattccggcctctacaaagagctcctgcataaactccatttggcaaaggtgggcgactgcatgggagactcgggcgacaaaccattgcgtagaaacaacagttacacgtcttacactatggcaatctgcggaatgccgctggactcctttcgggcaaaagagggtgagcagaagggagaagaaatggagaagctaacgtggccgaacgccgactcgaagaagcggattcggatggattcatacacgtcatactgcaatgctgtgagtgacctgcactccgcgagtgagatcgacatgtcagtgaaagccgaaatgggcttgggcgaccggaaaggaagcaatgggtctctcgaagaatggtatgatcaggacaagcccgaggtgtcccttctctttcagtttctacaaattttgacagcctgctttggttcattcgctcatggcggaaatgacgtgagtaatgccataggcccattagttgcactctatctagtttacgacacaggggatgtgtcgagcaaagtcgccacccccatttggctcctgctgtatggaggggtggggatttgtgtgggcttgtgggtgtggggtcggagagtgatccagacaatgggtaaggatctcaccccaattaccccctccagcggcttctccatcgagctggccagtgccctgacagttgtaatcgccagtaatataggactcccaattagtaccacgcactgtaaagtggggtcagtggtctcagtaggctggctgcgcagcaagaaggccgtggattggcgtctgttcaggaacatcttcatggcttggttcgtgacagtccctatttccggggtgatttctgctgccatcatggctatttttcggtacgttattctcaggatgtag

SEQ ID NO: 155779 - DNA, 3381 bp, Artificial Sequence
  derived and/or modified sequence
gcttcggggccggcgcgaggcgcggcggggtcacgcgggtcgctgcgcgggctataagtaggggccggcggggtgctccgctggagtgatggctgccggcgctctctgcgtggttcttcttctcggccgctgaaacccccgcggctgcttcctgggaaggtcgtgagtcccgctgagctgtccccggtgccgccgacccgggccgtgtgcccgtggctccagccgctgtcgcctcgatctcctcgtctcccgctccgccctcccttttccctggatgaacttgcgtcctttctcttctccgccatggaattctgctccgtgcttttagccctcctgagccaaagaaaccccagacaacagatgcccatacgcagcgtatagcagtaactccccagctcggtttctgtgccgtagtttacagtatttaattttatataatatatattatttattatagcatttttgatacctcatattctgtttacacatcttgaaaggcgctcagtagttctcttactaaacaaccactactccagagaatggcaacgctgattaccagtactacagctgctaccgccgcttctggtcctttggtggactacctatggatgctcatcctgggcttcattattgcatttgtcttggcattctccgtgggagccaatgatgtagcaaattcttttggtacagctgtgggctcaggtgtagtgaccctgaagcaagcctgcatcctagctagcatctttgaaacagtgggctctgtcttactgggggccaaagtgagcgaaaccatccggaagggcttgattgacgtggagatgtacaactcgactcaagggctgctgatggccggctcagtcagtgctatgtttggttctgctgtgtggcaactcgtggcttcgtttttgaagctccctatttctggaacccattgtattgttggtgcaactattggtttctccctcgtggcaaaggggcaggagggtgtcaagtggtctgaactgataaaaattgtgatgtcttggttcgtgtccccactgctttctggaattatgtctggaattttattcttcctggttcgtgcattcatcctccataaggcagatccagttcctaatggtttgcgagctttgccagttttctatgcctgcacagttggaataaacctcttttccatcatgtatactggagcaccgttgctgggctttgacaaacttcctctgtggggtaccatcctcatctcggtgggatgtgcagttttctgtgcccttatcgtctggttctttgtatgtcccaggatgaagagaaaaattgaacgagaaataaagtgtagtccttctgaaagccccttaatggaaaaaaagaatagcttgaaagaagaccatgaagaaacaaagttgtctgttggtgatattgaaaacaagcatcctgtttctgaggtagggcctgccactgtgcccctccaggctgtggtggaggagagaacagtctcattcaaacttggagatttggaggaagctccagagagagagaggcttcccagcgtggacttgaaagaggaaaccagcatagatagcaccgtgaatggtgcagtgcagttgcctaatgggaaccttgtccagttcagtcaagccgtcagcaaccaaataaactccagtggccactaccagtatcacaccgtgcataaggattccggcctgtacaaagagctactccataaattacatcttgccaaggtgggagattgcatgggagactccggtgacaaacccttaaggcgcaataatagctatacttcctataccatggcaatatgtggcatgcctctggattcattccgtgccaaagaaggtgaacagaagggcgaagaaatggagaagctgacatggcctaatgcagactccaagaagcgaattcgaatggacagttacaccagttactgcaatgctgtgtctgaccttcactcagcatctgagatagacatgagtgtcaaggcagagatgggtctaggtgacagaaaaggaagtaatggctctctagaagaatggtatgaccaggataagcctgaagtctctctcctcttccagttcctgcagatccttacagcctgctttgggtcattcgcccatggtggcaatgacgtaagcaatgccattgggcctctggttgctttatatttggtttatgacacaggagatgtttcttcaaaagtggcaacaccaatatggcttctactctatggtggtgttggtatctgtgttggtctgtgggtttggggaagaagagttatccagaccatggggaaggatctgacaccgatcacaccctctagtggcttcagtattgaactggcatctgccctcactgtggtgattgcatcaaatattggccttcccatcagtacaacacattgtaaagtgggctctgttgtgtctgttggctggctccggtccaagaaggctgttgactggcgtctctttcgtaacatttttatggcctggtttgtcacagtccccatttctggagttatcagtgctgccatcatggcaatcttcagatatgtcatcctcagaatgtgaagctgtttgagattaaaatttgtgtcaatgtttgggaccatcttaggtattcctgctcccctgaagaatgattacagtgttaacagaagactgacaagagtctttttatttgggagccagaggagggaagtgttacttgtgctataactgcttttgtgctaaatatgaattgtctcaaaattagctgtgtaaaatagcccgggttccactggctcctgctgaggtcccctttccttctgggctgtgaattcctgtacatatttctctactttttgtatcaggcttcaattccattatgttttaatgttgtctctgaagatgacttgtgatttttttttcttttttttaaaccatgaagagccgtttgacagagcatgctctgcgttgttggtttcaccagcttctgccctcacatgcacagggatttaacaacaaaaatataactacaacttcccttgtagtctcttatataagtagagtccttggtactctgccctcctgtcagtagtggcaggatctattggcatattcgggagcttcttagagggatgaggttctttgaacacagtgaaaatttaaattagtaacttttttgcaagcagtttattgactgttattgctaagaagaagtaagaaagaaaaagcctgttggcaatcttggttatttctttaagatttctggcagtgtgggatggatgaatgaagtggaatgtgaactttgggcaagttaagtgggacagccttccatgttcatttgtctacctcttaactgaataaaaaagcctacagtttttagaaaatt

SEQ ID NO: 155780 - DNA, 2040 bp, Artificial Sequence
  derived and/or modified sequence
atggccaccctgatcaccagcaccaccgccgccaccgccgccagcggccccctggtggactacctgtggatgctgatcctgggcttcatcatcgccttcgtgctggccttcagcgtgggcgccaacgacgtggccaacagcttcggcaccgccgtgggcagcggcgtggtgaccctgaagcaggcctgcatcctggccagcatcttcgagaccgtgggcagcgtgctgctgggcgccaaggtgagcgagaccatcagaaagggcctgatcgacgtggagatgtacaacagcacccagggcctgctgatggccggcagcgtgagcgccatgttcggcagcgccgtgtggcagctggtggccagcttcctgaagctgcccatcagcggcacccactgcatcgtgggcgccaccatcggcttcagcctggtggccaagggccaggagggcgtgaagtggagcgagctgatcaagatcgtgatgagctggttcgtgagccccctgctgagcggcatcatgagcggcatcctgttcttcctggtgagagccttcatcctgcacaaggccgaccccgtgcccaacggcctgagagccctgcccgtgttctacgcctgcaccgtgggcatcaacctgttcagcatcatgtacaccggcgcccccctgctgggcttcgacaagctgcccctgtggggcaccatcctgatcagcgtgggctgcgccgtgttctgcgccctgatcgtgtggttcttcgtgtgccccagaatgaagagaaagatcgagagagagatcaagtgcagccccagcgagagccccctgatggagaagaagaacagcctgaaggaggaccacgaggagaccaagctgagcgtgggcgacatcgagaacaagcaccccgtgagcgaggtgggccccgccaccgtgcccctgcaggccgtggtggaggagagaaccgtgagcttcaagctgggcgacctggaggaggcccccgagagagagagactgcccagcgtggacctgaaggaggagaccagcatcgacagcaccgtgaacggcgccgtgcagctgcccaacggcaacctggtgcagttcagccaggccgtgagcaaccagatcaacagcagcggccactaccagtaccacaccgtgcacaaggacagcggcctgtacaaggagctgctgcacaagctgcacctggccaaggtgggcgactgcatgggcgacagcggcgacaagcccctgagaagaaacaacagctacaccagctacaccatggccatctgcggcatgcccctggacagcttcagagccaaggagggcgagcagaagggcgaggagatggagaagctgacctggcccaacgccgacagcaagaagagaatcagaatggacagctacaccagctactgcaacgccgtgagcgacctgcacagcgccagcgagatcgacatgagcgtgaaggccgagatgggcctgggcgacagaaagggcagcaacggcagcctggaggagtggtacgaccaggacaagcccgaggtgagcctgctgttccagttcctgcagatcctgaccgcctgcttcggcagcttcgcccacggcggcaacgacgtgagcaacgccatcggccccctggtggccctgtacctggtgtacgacaccggcgacgtgagcagcaaggtggccacccccatctggctgctgctgtacggcggcgtgggcatctgcgtgggcctgtgggtgtggggcagaagagtgatccagaccatgggcaaggacctgacccccatcacccccagcagcggcttcagcatcgagctggccagcgccctgaccgtggtgatcgccagcaacatcggcctgcccatcagcaccacccactgcaaggtgggcagcgtggtgagcgtgggctggctgagaagcaagaaggccgtggactggagactgttcagaaacatcttcatggcctggttcgtgaccgtgcccatcagcggcgtgatcagcgccgccatcatggccatcttcagatacgtgatcctgagaatgtag

SEQ ID NO: 155781 - protein, 536 aa, Artificial Sequence
  derived and/or modified sequence
MGSNKSKPKDASQRRRSLEPAENVHGAGGGAFPASQTPSKPASADGHRGPSAAFAPAAAEPKLFGGFNSSDTVTSPQRAGPLAGGVTTFVALYDYESRTETDLSFKKGERLQIVNNTEGDWWLAHSLSTGQTGYIPSNYVAPSDSIQAEEWYFGKITRRESERLLLNAENPRGTFLVRESETTKGAYCLSVSDFDNAKGLNVKHYKIRKLDSGGFYITSRTQFNSLQQLVAYYSKHADGLCHRLTTVCPTSKPQTQGLAKDAWEIPRESLRLEVKLGQGCFGEVWMGTWNGTTRVAIKTLKPGTMSPEAFLQEAQVMKKLRHEKLVQLYAVVSEEPIYIVTEYMSKGSLLDFLKGETGKYLRLPQLVDMAAQIASGMAYVERMNYVHRDLRAANILVGENLVCKVADFGLARLIEDNEYTARQGAKFPIKWTAPEAALYGRFTIKSDVWSFGILLTELTTKGRVPYPGMVNREVLDQVERGYRMPCPPECPESLHDLMCQCWRKEPEERPTFEYLQAFLEDYFTSTEPQYQPGENL

SEQ ID NO: 155782 - protein, 542 aa, Artificial Sequence
  derived and/or modified sequence
MGSNKSKPKDASQRRRSLEPAENVHGAGGGAFPASQTPSKPASADGHRGPSAAFAPAAAEPKLFGGFNSSDTVTSPQRAGPLAGGVTTFVALYDYESRTETDLSFKKGERLQIVNNTRKVDVREGDWWLAHSLSTGQTGYIPSNYVAPSDSIQAEEWYFGKITRRESERLLLNAENPRGTFLVRESETTKGAYCLSVSDFDNAKGLNVKHYKIRKLDSGGFYITSRTQFNSLQQLVAYYSKHADGLCHRLTTVCPTSKPQTQGLAKDAWEIPRESLRLEVKLGQGCFGEVWMGTWNGTTRVAIKTLKPGTMSPEAFLQEAQVMKKLRHEKLVQLYAVVSEEPIYIVTEYMSKGSLLDFLKGETGKYLRLPQLVDMAAQIASGMAYVERMNYVHRDLRAANILVGENLVCKVADFGLARLIEDNEYTARQGAKFPIKWTAPEAALYGRFTIKSDVWSFGILLTELTTKGRVPYPGMVNREVLDQVERGYRMPCPPECPESLHDLMCQCWRKEPEERPTFEYLQAFLEDYFTSTEPQYQPGENL

SEQ ID NO: 155783 - DNA, 1611 bp, Artificial Sequence
  derived and/or modified sequence
atgggcagcaacaagagcaagcccaaggacgccagccagagaagaagaagcctggagcccgccgagaacgtgcacggcgccggcggcggcgccttccccgccagccagacccccagcaagcccgccagcgccgacggccacagaggccccagcgccgccttcgcccccgccgccgccgagcccaagctgttcggcggcttcaacagcagcgacaccgtgaccagcccccagagagccggccccctggccggcggcgtgaccaccttcgtggccctgtacgactacgagagcagaaccgagaccgacctgagcttcaagaagggcgagagactgcagatcgtgaacaacaccgagggcgactggtggctggcccacagcctgagcaccggccagaccggctacatccccagcaactacgtggcccccagcgacagcatccaggccgaggagtggtacttcggcaagatcaccagaagagagagcgagagactgctgctgaacgccgagaaccccagaggcaccttcctggtgagagagagcgagaccaccaagggcgcctactgcctgagcgtgagcgacttcgacaacgccaagggcctgaacgtgaagcactacaagatcagaaagctggacagcggcggcttctacatcaccagcagaacccagttcaacagcctgcagcagctggtggcctactacagcaagcacgccgacggcctgtgccacagactgaccaccgtgtgccccaccagcaagccccagacccagggcctggccaaggacgcctgggagatccccagagagagcctgagactggaggtgaagctgggccagggctgcttcggcgaggtgtggatgggcacctggaacggcaccaccagagtggccatcaagaccctgaagcccggcaccatgagccccgaggccttcctgcaggaggcccaggtgatgaagaagctgagacacgagaagctggtgcagctgtacgccgtggtgagcgaggagcccatctacatcgtgaccgagtacatgagcaagggcagcctgctggacttcctgaagggcgagaccggcaagtacctgagactgccccagctggtggacatggccgcccagatcgccagcggcatggcctacgtggagagaatgaactacgtgcacagagacctgagagccgccaacatcctggtgggcgagaacctggtgtgcaaggtggccgacttcggcctggccagactgatcgaggacaacgagtacaccgccagacagggcgccaagttccccatcaagtggaccgcccccgaggccgccctgtacggcagattcaccatcaagagcgacgtgtggagcttcggcatcctgctgaccgagctgaccaccaagggcagagtgccctaccccggcatggtgaacagagaggtgctggaccaggtggagagaggctacagaatgccctgcccccccgagtgccccgagagcctgcacgacctgatgtgccagtgctggagaaaggagcccgaggagagacccaccttcgagtacctgcaggccttcctggaggactacttcaccagcaccgagccccagtaccagcccggcgagaacctgtag

SEQ ID NO: 155784 - DNA, 1629 bp, Artificial Sequence
  derived and/or modified sequence
atgggcagcaacaagagcaagcccaaggacgccagccagagaagaagaagcctggagcccgccgagaacgtgcacggcgccggcggcggcgccttccccgccagccagacccccagcaagcccgccagcgccgacggccacagaggccccagcgccgccttcgcccccgccgccgccgagcccaagctgttcggcggcttcaacagcagcgacaccgtgaccagcccccagagagccggccccctggccggcggcgtgaccaccttcgtggccctgtacgactacgagagcagaaccgagaccgacctgagcttcaagaagggcgagagactgcagatcgtgaacaacaccagaaaggtggacgtgagagagggcgactggtggctggcccacagcctgagcaccggccagaccggctacatccccagcaactacgtggcccccagcgacagcatccaggccgaggagtggtacttcggcaagatcaccagaagagagagcgagagactgctgctgaacgccgagaaccccagaggcaccttcctggtgagagagagcgagaccaccaagggcgcctactgcctgagcgtgagcgacttcgacaacgccaagggcctgaacgtgaagcactacaagatcagaaagctggacagcggcggcttctacatcaccagcagaacccagttcaacagcctgcagcagctggtggcctactacagcaagcacgccgacggcctgtgccacagactgaccaccgtgtgccccaccagcaagccccagacccagggcctggccaaggacgcctgggagatccccagagagagcctgagactggaggtgaagctgggccagggctgcttcggcgaggtgtggatgggcacctggaacggcaccaccagagtggccatcaagaccctgaagcccggcaccatgagccccgaggccttcctgcaggaggcccaggtgatgaagaagctgagacacgagaagctggtgcagctgtacgccgtggtgagcgaggagcccatctacatcgtgaccgagtacatgagcaagggcagcctgctggacttcctgaagggcgagaccggcaagtacctgagactgccccagctggtggacatggccgcccagatcgccagcggcatggcctacgtggagagaatgaactacgtgcacagagacctgagagccgccaacatcctggtgggcgagaacctggtgtgcaaggtggccgacttcggcctggccagactgatcgaggacaacgagtacaccgccagacagggcgccaagttccccatcaagtggaccgcccccgaggccgccctgtacggcagattcaccatcaagagcgacgtgtggagcttcggcatcctgctgaccgagctgaccaccaagggcagagtgccctaccccggcatggtgaacagagaggtgctggaccaggtggagagaggctacagaatgccctgcccccccgagtgccccgagagcctgcacgacctgatgtgccagtgctggagaaaggagcccgaggagagacccaccttcgagtacctgcaggccttcctggaggactacttcaccagcaccgagccccagtaccagcccggcgagaacctgtag

SEQ ID NO: 155785 - DNA, 1611 bp, Artificial Sequence
  derived and/or modified sequence
atgggttctaacaagagtaaacctaaggatgcctcgcagagacgacggtccttggagccagccgaaaacgtccacggggctggagggggagcctttcctgcgtctcagacccccagtaaacccgcctcggctgatgggcaccgcggaccctccgcagcttttgctcccgccgctgcggagcctaaactgttcggtgggttcaattcaagcgatacagtcacaagcccacagagggctggaccgctcgctggaggagtaacaacctttgttgcattgtatgactatgaaagtcggacagaaacagacttgagctttaagaaaggagaacggctgcaaattgtgaacaatactgagggcgattggtggcttgcgcacagcctgagcacaggacaaacaggatacattccgtccaactacgtggccccctctgattctatccaagccgaagagtggtactttggtaagattacccgacgggagtccgaaagactgcttctcaacgcagagaaccctaggggaacatttctggtgagggaatctgaaacaacaaaaggcgcctattgcctgtctgttagtgatttcgacaacgccaaggggcttaatgtaaagcattataagatccgaaagttggatagtggaggcttttatatcacgtctagaactcagtttaattcactccagcaattggtggcttactattcaaaacacgcagacggtctatgccaccgcctgaccacggtatgtcccacgtcaaagccgcagacgcaaggcctggccaaagacgcatgggagatcccacgggagtcactccgtctagaagttaaactaggacaaggctgcttcggggaggtgtggatggggacgtggaatggaaccaccagggttgccattaagacactcaaaccagggaccatgtcgccggaggcctttctgcaggaagctcaggtgatgaaaaagttgcggcatgagaaactggtgcaactttacgccgtggtctcagaagagccaatttacattgttaccgagtacatgagcaagggctccctcctcgacttcctgaagggcgaaacaggcaagtatctgaggctgcctcaactagtggatatggctgcacaaattgccagcggcatggcatacgtcgagaggatgaattacgtgcaccgagacctgagagcagccaatatcctggtaggagaaaacctagtctgcaaggtcgccgacttcggactcgctcgtctgatagaggataatgaatataccgcccggcagggcgccaagtttccaatcaagtggactgcaccggaggctgccttatacgggcggtttaccatcaaaagcgatgtgtggtcctttggcatcctcctcacagaactgacaacaaaaggcagggtgccctatcccggcatggttaacagagaggtactcgaccaggtggagaggggatatagaatgccttgcccccctgaatgtcccgaatctctgcatgatctcatgtgtcaatgctggaggaaagagcctgaggagcgcccaacattcgagtatctgcaagcatttcttgaagattatttcacatctaccgagccacagtaccagccaggggaaaatctgtag

SEQ ID NO: 155786 - DNA, 1629 bp, Artificial Sequence
  derived and/or modified sequence
atgggaagcaataagtcaaaacccaaagacgcctcacagcggagacgtagtcttgaaccggcagagaacgtccacggggcaggtgggggtgcctttccagcttcccagacgccctccaagcctgcctcagccgacggtcatagaggaccctcagcggctttcgcccctgcggctgctgaacccaaactgtttggtggcttcaattcgagcgatacagttacaagtccccaaagggctggcccactggccgggggagtgacaactttcgttgcactgtatgattacgaatccaggacagaaaccgatctgtctttcaagaagggggagaggctgcagattgtgaacaacacacgcaaggtggatgtccgggaaggagattggtggctggcacattcactctccaccggccagaccggatacattcctagtaattatgtggccccctccgactctatacaggccgaagagtggtacttcgggaaaatcactcgccgagaatctgaacgattgctgctaaatgctgagaatcctcggggcacgttcctggtccgagaatcagagacgacaaaaggcgcctactgcctctccgttagtgacttcgataacgccaagggactcaacgtcaaacactataaaatacggaagctagattcaggggggttctacatcactagccggacccagtttaacagcctgcagcaattagtggcgtactactccaagcatgcagacggcctgtgccatagactgacgacagtctgtcccaccagcaaacctcaaacccaagggttggctaaggacgcttgggagatcccccgggaatctcttcgactggaagtgaaattaggacaagggtgctttggtgaggtttggatgggcacctggaacggcaccactagagtggccattaagacactgaagccggggacgatgagcccagaagctttcctgcaggaggcccaggtgatgaagaaactgaggcatgagaagctggtacagctgtacgcggtggtctccgaagagcccatctacattgtcaccgagtacatgtctaaaggcagcttgctggactttttgaagggcgaaacagggaaatacttaaggttgccccaattagtggacatggccgctcagatcgcatccggtatggcgtatgtcgagcgtatgaactacgttcatagggacctgcgcgctgctaacattcttgtcggagagaacttggtgtgtaaggtggctgatttcggcctcgcacgcctcatagaggacaacgagtataccgcacgtcagggcgccaaatttccaatcaagtggaccgctcccgaggctgctctgtatggtcgattcacgattaagagcgacgtgtggagtttcggaattctgttgactgagctgacaacaaaaggaagggtaccttatcccggtatggtgaacagggaggtactggaccaagtggaaaggggttatcgcatgccgtgccctcccgaatgcccagaaagcctccatgatctgatgtgccaatgttggcgcaaggaacctgaagaaaggcctacatttgaatacctccaagcgtttctagaagattactttactagtacagagccgcagtaccagcccggtgagaacctttag

SEQ ID NO: 155787 - DNA, 1611 bp, Artificial Sequence
  derived and/or modified sequence
atggggtctaataagtcgaagccaaaggatgccagccaaagacgcaggtccctggagcccgcggaaaacgtgcacggtgccggcggaggggcgttccccgcatcgcagaccccatccaagccagcgtccgcagacggccaccgagggcccagtgcagcgtttgcccccgccgctgccgaacccaaactattcggaggtttcaattcatcagatactgtgacgtctccccagagagcaggcccccttgctggaggcgtaaccacatttgtggccctgtatgattacgaaagtcggacagagactgacctgagcttcaagaagggtgagcggctgcaaatcgtcaacaacactgaaggggattggtggctcgctcattcgctgagcacaggacagacaggctacattccctccaactacgtggcccccagtgattctattcaagccgaagaatggtactttggaaagataaccaggcgcgaatccgaaagactactgttaaacgctgagaatcctagagggactttcctggtgagagaatcagaaacaaccaagggcgcttactgcctctcagtgtccgattttgacaacgccaaaggcctcaatgttaaacattacaaaatcaggaagctggattcaggaggtttctatatcacatcacgcacccaattcaactctctgcagcagctggtcgcttattattcaaagcacgcggacggcttgtgccaccggttgacaactgtctgccccacttccaagccgcaaacccaggggctcgcaaaagatgcctgggagatcccaagagaatcactgcgactggaggtcaagctgggccagggctgttttggagaggtgtggatgggaacttggaacggaactactcgcgtggccataaaaacattgaagcccggtacgatgagcccagaggctttcctgcaggaagcgcaggtgatgaagaaactgagacatgagaaactggtccaactgtacgctgtcgtgagtgaggagccaatttacatagtcactgagtacatgtcaaaggggtctctgttggactttttgaagggagagacgggcaagtacttgaggctgccgcagcttgtcgatatggctgctcagatcgcctccggcatggcatacgtggagaggatgaactatgtccacagggatctgcgagcggctaacatactggtgggggaaaacttagtttgtaaggtcgcggacttcggactcgctagactgatcgaggataacgagtacacagctcgacagggggcgaagtttcctatcaaatggactgccccagaggctgccctctacgggcggtttactataaaatctgacgtgtggagcttcggcatactccttactgagttaacaaccaagggacgagtgccctatcccgggatggtaaatagagaagtgttagaccaggtagagagggggtatcgaatgccatgcccccctgaatgtcccgaaagtttgcacgatttgatgtgtcagtgttggcggaaggagccagaggaacgccctaccttcgagtacttgcaggccttcttggaggattactttacgagtacagaaccacaataccagccgggagagaacctgtag

SEQ ID NO: 155788 - DNA, 1611 bp, Artificial Sequence
  derived and/or modified sequence
atgggatccaacaagtcgaagcccaaggacgccagtcagagaaggcgttcacttgagccagcagaaaatgtccatggcgcagggggtggcgcctttcctgcttcacaaaccccaagcaagccagcgtcagccgacggccatcgggggccttccgccgcttttgctccagccgctgcagaacctaaactgttcggcggatttaattcaagtgacacggttactagtcctcagagagccggacctctggccggtggggtaactacattcgttgctttgtatgattatgagagcagaacggaaactgacttatcctttaagaaaggcgaacggcttcagatagtgaacaacacggagggagactggtggctggcccattcgctatccactgggcaaactggctacatcccgagtaattatgtagctccaagcgactccattcaggccgaggagtggtattttggaaaaattactcgcagggaaagcgaaaggttgctgctcaacgcggaaaatccacgtggaacttttctcgtgcgcgagtccgaaacaacgaaaggtgcctattgcctttctgtcagtgactttgataacgccaagggactgaacgtaaaacactataagattagaaaactggactctggagggttttacattacatcccggacccagttcaattctttacagcaacttgtggcctactatagcaagcacgctgatggactctgccatcggctcactaccgtgtgtcctacatccaagccgcagacacaagggctggccaaagatgcatgggaaataccgagagagagcctgcgcctggaagtgaagcttggccaggggtgctttggcgaagtctggatggggacttggaacggcactactcgcgtggcaatcaagactctgaagcccggcacaatgtcccctgaggccttcctacaggaagctcaagtaatgaaaaaactgcggcatgagaaattggtgcagctgtatgctgtcgtgtctgaagagccaatatatattgtgaccgagtacatgtctaagggctcattgctggatttcctgaagggcgaaaccgggaagtatctacgtctgccacagctcgtcgatatggcagcccagatcgccagtgggatggcctatgtagaaaggatgaattacgtacatcgcgacctgcgggctgcaaatattctggtgggcgagaatttggtctgtaaagtggccgacttcggcctggccaggctgatcgaggacaatgaatacacagctagacagggagcgaagttccccatcaaatggactgccccagaggccgccctgtacgggaggttcaccatcaagagcgacgtctggtcctttggaatcctgcttacggaactcactactaagggccgggttccctacccaggaatggttaatcgcgaggttctggaccaggtggaaagaggctacaggatgccatgccctccagaatgcccagagtcgctacatgacctgatgtgtcagtgctggaggaaggagcccgaggagaggcctaccttcgagtacttgcaagcctttctggaagattactttacttccacggaaccgcagtaccaaccgggggaaaatttatag

SEQ ID NO: 155789 - DNA, 1611 bp, Artificial Sequence
  derived and/or modified sequence
atgggctcaaacaagtcaaaaccaaaggatgctagccagcggcgacgtagcctcgagccagcagaaaacgtccacggagctggcggcggggccttccccgcgtctcagacacccagcaagccagctagcgcagatggacatagggggccgtccgccgcctttgccccagccgccgctgagccaaaacttttcggcggcttcaatagttcggatacggtgaccagcccacaaagggctggacccctggccggaggcgttaccacattcgtggccttgtacgactatgagtcaagaactgagacagacttgagcttcaagaagggcgagcgcttgcagatcgttaacaataccgaaggggactggtggctggctcactctttgtcaacagggcagactggttatattcctagcaactatgtcgcaccgtcagattcaattcaggcagaggaatggtatttcggcaaaattactagacgcgagtctgaacgactactcttaaatgccgagaatccacgagggacatttctggtcagggagtctgaaaccactaagggcgcctattgcctgagcgtcagtgatttcgacaatgctaagggactcaatgtcaagcattataagatacgtaagctggacagcggtggattctacatcacctctaggactcagtttaatagcttgcagcagcttgtggcctactattctaagcacgccgacggcctctgtcataggctgactaccgtatgccctacgtctaaacctcaaacacagggtctcgctaaggatgcttgggaaatccctcgcgaaagcctcaggctggaggtcaaactggggcagggatgttttggggaggtctggatgggtacctggaatgggacgacacgggtggcaataaagactctcaaacccggcaccatgagccccgaagcctttcttcaggaggcccaggtcatgaaaaaactccggcatgagaaactggtgcagctgtatgccgtggtgtccgaggaacccatttacatcgtcaccgagtatatgagtaagggttcactcctcgatttcctgaagggagagaccgggaaatacttacgactcccacagctcgtggatatggcggcccagatcgcaagcggcatggcttatgtggaacgcatgaattacgtacacagagatttaagggcggcaaacatcttggtaggcgaaaacttggtttgtaaagtggccgactttggattggcccggctgatcgaagataatgagtatacagccaggcagggcgcaaaattcccaatcaagtggacagcaccagaagcagcactgtacggccgattcactattaagagcgatgtctggagctttgggatcctgctgactgaactaacaacaaaaggaagagtgccctaccccgggatggtaaatagggaagtcctcgatcaggtggaaaggggctaccgcatgccctgtcctcctgaatgtcccgagtccctgcacgacttgatgtgccagtgctggaggaaggagccagaagagcggcctacatttgagtaccttcaggcctttcttgaggattatttcacatccaccgaacctcaatatcagccaggagagaacctatag

SEQ ID NO: 155790 - DNA, 1611 bp, Artificial Sequence
  derived and/or modified sequence
atgggcagcaacaagagcaagcccaaggatgccagccagaggagaagaagcctggagccagcagaaaatgtgcatggagctgggggcggggccttccctgccagccagacccccagcaagccagccagcgcagatggccaccggggccccagcgctgcctttgccccagctgctgctgagcccaagctgtttggaggcttcaacagcagtgacacagtgaccagcccccagagagctggccccctggccggcggcgtgaccacctttgtggccctgtatgactatgagagcaggacagaaacagacctgtccttcaagaagggggagcggctgcagatcgtgaacaacacagaaggagactggtggctggcccacagcctgagcacaggccagacaggctacatccccagcaactacgtggcccccagcgacagcatccaggccgaggagtggtactttgggaagatcacccggcgggagagcgagcggctgctgctgaatgctgagaacccccggggcaccttcctggtgcgggagagcgagaccaccaagggggcctactgcctgtctgtgtctgactttgacaatgccaagggcctgaatgtgaagcactacaagatcaggaagctggacagcggcggcttctacatcaccagcaggacccagttcaacagcctgcagcagctggtggcctactacagcaagcatgctgatggcctgtgccaccggctgaccaccgtgtgccccaccagcaagccccagacccagggcctggccaaggatgcctgggagatcccccgggagagcctgcggctggaggtgaagctgggccagggctgctttggagaggtgtggatgggcacctggaatggcaccaccagggtggccatcaagaccctgaagccaggcaccatgagccctgaggccttcctgcaggaggcccaggtgatgaagaagctgcggcatgagaagctggtgcagctgtatgctgtggtgtctgaggagcccatctacatcgtgacagagtacatgagcaagggcagcctgctggacttcctgaagggggagaccgggaagtacctgcggctgccccagctggtggacatggccgcccagatcgccagcggcatggcctacgtggagaggatgaactacgtgcaccgggacctgcgggccgccaacatcctggtgggggagaacctggtgtgcaaggtggccgactttggcctggcccggctgattgaagataatgagtacacagcccggcagggcgccaagttccccatcaagtggacagcccctgaggccgccctgtatggccgcttcaccatcaagagtgatgtgtggagctttggcatcctgctgacagagctgaccaccaagggccgggtgccctacccaggcatggtgaaccgggaggtgctggaccaggtggagcggggctacaggatgccctgccccccagaatgtcctgagagcctgcatgacctgatgtgccagtgctggaggaaggagcctgaggagcggcccacctttgagtacctgcaggccttcctggaggactacttcaccagcacagagccccagtaccagcccggggagaacctgtag

SEQ ID NO: 155791 - DNA, 1629 bp, Artificial Sequence
  derived and/or modified sequence
atgggcagcaacaagagcaagcccaaggatgccagccagaggagaagaagcctggagccagcagaaaatgtgcatggagctgggggcggggccttccctgccagccagacccccagcaagccagccagcgcagatggccaccggggccccagcgctgcctttgccccagctgctgctgagcccaagctgtttggaggcttcaacagcagtgacacagtgaccagcccccagagagctggccccctggccggcggcgtgaccacctttgtggccctgtatgactatgagagcaggacagaaacagacctgtccttcaagaagggggagcggctgcagatcgtgaacaacaccaggaaggtggatgtgcgggagggggactggtggctggcccacagcctgagcacaggccagacaggctacatccccagcaactacgtggcccccagcgacagcatccaggccgaggagtggtactttgggaagatcacccggcgggagagcgagcggctgctgctgaatgctgagaacccccggggcaccttcctggtgcgggagagcgagaccaccaagggggcctactgcctgtctgtgtctgactttgacaatgccaagggcctgaatgtgaagcactacaagatcaggaagctggacagcggcggcttctacatcaccagcaggacccagttcaacagcctgcagcagctggtggcctactacagcaagcatgctgatggcctgtgccaccggctgaccaccgtgtgccccaccagcaagccccagacccagggcctggccaaggatgcctgggagatcccccgggagagcctgcggctggaggtgaagctgggccagggctgctttggagaggtgtggatgggcacctggaatggcaccaccagggtggccatcaagaccctgaagccaggcaccatgagccctgaggccttcctgcaggaggcccaggtgatgaagaagctgcggcatgagaagctggtgcagctgtatgctgtggtgtctgaggagcccatctacatcgtgacagagtacatgagcaagggcagcctgctggacttcctgaagggggagaccgggaagtacctgcggctgccccagctggtggacatggccgcccagatcgccagcggcatggcctacgtggagaggatgaactacgtgcaccgggacctgcgggccgccaacatcctggtgggggagaacctggtgtgcaaggtggccgactttggcctggcccggctgattgaagataatgagtacacagcccggcagggcgccaagttccccatcaagtggacagcccctgaggccgccctgtatggccgcttcaccatcaagagtgatgtgtggagctttggcatcctgctgacagagctgaccaccaagggccgggtgccctacccaggcatggtgaaccgggaggtgctggaccaggtggagcggggctacaggatgccctgccccccagaatgtcctgagagcctgcatgacctgatgtgccagtgctggaggaaggagcctgaggagcggcccacctttgagtacctgcaggccttcctggaggactacttcaccagcacagagccccagtaccagcccggggagaacctgtag

SEQ ID NO: 155792 - DNA, 1611 bp, Artificial Sequence
  derived and/or modified sequence
atgggcagcaacaagagcaagcccaaggacgccagccagcggcggcgctctctcgagcccgccgaaaacgtgcacggcgctggtgggggtgcttttccggcctcacaaacccccagcaagccagcttccgcggacggacacagaggaccatcggctgccttcgctccggccgctgctgagcctaaactttttggcggcttcaactccagcgataccgtaacctcccctcagcgcgccgggccccttgcaggtggagttacaacctttgtggccttgtacgattatgagtcccgcaccgagacggacttatccttcaaaaaaggcgagcgcctgcagatagtgaacaatacagagggggactggtggcttgcccattcattgtctacaggccagacagggtacattccaagtaactacgtcgcaccctccgattctatacaggcagaagaatggtattttggaaagattacccggcgggagtcagagcgtctgctgctgaacgctgaaaaccctaggggcacattcttggtgcgggagtcagaaaccactaagggagcttattgcctgtccgttagcgactttgataatgcaaagggcctgaatgtcaaacattataagattagaaaactcgactccggggggttttacatcaccagtcgaacccagttcaattcgctccagcagctggtggcatactactctaaacatgctgatggcctgtgccacaggctgacgaccgtgtgccctacgagcaagccccagacacaggggctggcaaaggacgcttgggagataccccgcgagagcctgcggctggaggtgaaactgggccaaggctgcttcggagaggtgtggatgggaacatggaatggaacaacccgagttgcaatcaagaccctgaaaccgggaaccatgtcaccagaagcctttctgcaggaggcgcaagtgatgaaaaaactgaggcacgagaagctggtacagctgtacgctgtagtgtctgaagaacccatctacatagtcaccgaatacatgtccaaaggatcgctcctggatttcttgaagggcgaaaccggcaaatacctgcgcctgccgcagctggtcgacatggctgctcagatcgcttctggcatggcatacgtggaaagaatgaattatgtgcatcgagaccttcgggctgccaacatcttggtcggcgaaaatctggtgtgtaaagtggccgactttggtctggctcgcctgatcgaagacaatgagtataccgcccgccagggagccaagttccctatcaaatggacagctcccgaagcagcgctgtacggcaggtttactattaagagcgatgtgtggtcctttggaatacttctgacggaattgacaaccaaaggccgtgtcccatacccaggcatggtcaaccgcgaagtgcttgatcaggtcgagcggggttatcggatgccatgcccaccagagtgccccgagtctttgcacgacctgatgtgccaatgttggcgtaaggaaccagaagaaaggccgacattcgagtacctgcaggctttcctcgaagactactttacctcaaccgagcctcaatatcaaccaggcgagaacctttag

SEQ ID NO: 155793 - DNA, 1629 bp, Artificial Sequence
  derived and/or modified sequence
atgggcagcaacaagagcaagcccaaggacgccagccagcggcggaggagtctggagcccgcagagaacgtccacggagccggagggggcgcattcccggcctcacaaactccatccaagcccgctagcgccgacggccaccgaggtccatcagccgcctttgcacccgctgctgcagaacccaaactgtttgggggatttaacagcagcgatacagttacatctcctcaacgggccgggccacttgccggcggagttactacgttcgtggctttgtacgattacgagtcacggacagaaaccgacctctcgttcaagaagggggagagactgcagatcgtgaataatacccggaaggtcgatgtgagagagggggattggtggttagcccattcactgtcgactggacaaaccggctatattcccagtaattatgtggcgccgagtgactctattcaggccgaggaatggtatttcggaaaaatcaccagaagagagtctgagagattattgttgaatgcggagaacccgagaggcacctttcttgtaagggagtccgagactacgaaaggtgcctactgccttagcgtgagtgacttcgataacgcaaaaggcctgaatgtcaagcactataaaattcgcaagcttgactcgggcggtttctatattacatccagaacgcaattcaattcgctccaacaactggtggcttattactctaagcacgctgacgggctctgccatagactcactactgtgtgccctacatccaagccacaaacccagggcctggccaaagacgcctgggaaataccaagggagagcctgcggctcgaggtgaaactagggcaggggtgtttcggcgaggtatggatgggcacatggaatggcaccacgcgcgtggccattaaaacgctcaagcctggtactatgtcgcctgaggcatttttgcaggaggcgcaggtcatgaagaaactacggcacgaaaagctggtgcagctgtatgccgtcgtctccgaggaacccatttatatcgtaactgagtacatgtccaagggttcactgctcgacttcctaaagggcgaaacgggcaagtacctgagactcccacaacttgtcgatatggccgcccagattgcttctggtatggcatatgtggagcgcatgaactatgttcatcgagatctgcgcgcagctaatatattagttggcgagaaccttgtgtgcaaagttgctgacttcggactcgcccggctaatagaagacaatgaatatactgctaggcaaggggctaaattccccattaaatggactgctccggaggccgccctctatgggagatttactattaagagcgacgtctggagctttggcatactcctgactgagctcacaacaaaggggcgagtcccatatcctggaatggtcaatcgtgaggttctggaccaagtggaacgcgggtaccgcatgccctgcccaccagaatgcccggaaagtcttcatgatttgatgtgtcagtgctggcgtaaagagcccgaagagcggcctacctttgaatacttacaggcttttctggaggattatttcacttccacagagccccagtaccaacctggtgagaatctttag

SEQ ID NO: 155794 - DNA, 1611 bp, Artificial Sequence
  derived and/or modified sequence
atgggcagcaacaagagcaagcccaaggacgccagccagcggcggcggtcgctagaaccagcggagaacgtgcacggtgcaggaggaggcgccttccccgcctctcagactccctccaagccagcatctgctgacgggcatcggggaccgagtgctgctttcgccccggcggccgccgagccaaaactgttcggcggcttcaattcatcagacacggtgaccagcccacagcgggccggcccactggccggaggcgtgaccaccttcgttgcgctgtatgactacgaatctagaacagagaccgacctgagcttcaagaagggcgagagactacagatcgtaaataacaccgagggggactggtggcttgcccactccttgtccaccggccaaaccggatacataccctcaaactacgtggctccatctgactccattcaggcagaagagtggtatttcggaaaaatcactaggcgcgaatccgaacggttgctcctcaatgcagaaaacccccgcggcactttcctcgtgcgggaaagtgagacaacgaaaggcgcctattgcctcagtgtctcggactttgataatgctaagggtctaaacgtgaaacattataaaatccgcaaactcgactctggcggattctacatcacctcacgtacccaatttaattctcttcagcagctggttgcatactactccaagcatgccgatggtctgtgccaccgtctgactaccgtgtgtccaacgagcaaacctcagacacaagggctagccaaggatgcttgggagattccacgcgagtcccttagacttgaggttaagctgggacaagggtgcttcggcgaagtatggatggggacctggaacgggaccacacgagttgccatcaagacactaaagcctggaaccatgagtcctgaagcattcctgcaggaggctcaggtgatgaaaaaactgaggcatgaaaagctggtacagctgtacgcagtcgtaagcgaggagcctatctacatagtcactgaatatatgtcaaaggggagtttactggacttcctgaagggcgagaccgggaaatacctgagactaccgcagctcgtggatatggcggcccagatcgcttcagggatggcctacgtggagcggatgaactatgtgcatcgcgacctgcgggcggcaaatattttggtaggcgaaaatttggtgtgtaaggtggccgacttcggcctggctagactgattgaggacaatgaatacaccgcccgccagggcgctaagtttccaattaagtggactgctcccgaagccgctctctatggcagattcacaattaagagtgacgtgtggtcatttggtattctactgacagagctgacaaccaaaggccgcgtcccatacccaggcatggtcaacagggaggtactcgaccaggtggaaagaggatatcgcatgccatgtcctcctgagtgtcccgaaagtctccatgacctgatgtgtcaatgttggcggaaggagccagaggagaggcccacttttgagtacctgcaggcctttttggaggactactttacaagcactgagccgcaataccagcctggggagaacttgtag

SEQ ID NO: 155795 - DNA, 1611 bp, Artificial Sequence
  derived and/or modified sequence
atgggcagcaacaagagcaagcccaaggacgccagccagcggcggcgctctcttgaacctgccgaaaacgtgcatggggccggaggcggggccttcccggcaagccagacaccctctaaaccagcatcagcggacgggcacagggggccatccgctgctttcgctcccgctgcagcagaacccaaactatttggcggctttaactcatccgacacagtgaccagtccgcagagagccggcccactcgccggaggcgtaactacattcgttgctctctatgactacgagtcaagaaccgaaacggacctgagtttcaaaaagggggagcgcttgcagatcgtgaacaacaccgagggcgattggtggctggcccacagcctgtcaacaggccaaacagggtacatccccagcaattatgtggccccttctgatagcattcaggccgaagagtggtatttcggcaaaatcactcgcagggagtcagaacgtctgctgcttaacgccgaaaatcctaggggaacatttctcgtaagggagtctgagaccactaaaggagcctattgtttgtccgtgtctgatttcgacaacgccaagggcctgaatgtgaaacactacaagatacgaaaactggactccggcgggttttacataacatccagaacccagttcaatagccttcagcagctcgttgcgtattactcgaaacatgctgatggcctgtgccaccgcttgacaaccgtctgtccaacctccaaaccccagacccaaggtctggcaaaagatgcttgggagattcctagggagtctctccggctggaggtgaagctcggccagggctgcttcggcgaagtgtggatgggcacctggaatggtaccacccgcgtagctatcaaaacattgaaacctggaacaatgtctcctgaggcttttctgcaggaagctcaggttatgaaaaaactgcgtcacgaaaaattggttcaattgtacgcagtcgtgtccgaagaacctatatatattgtgacagaatacatgagcaagggctcgctgctggattttctgaaaggggaaacagggaagtacctcagattaccccagcttgtcgacatggctgcccagatcgcctcaggaatggcttatgtggaaagaatgaactacgtgcacagggatctgcgggccgctaacatcctcgttggtgaaaacttggtctgtaaagttgctgactttggccttgctcgattgatagaagacaatgaatacactgcccggcaaggagctaaatttccaatcaaatggactgcacccgaggctgccttatacgggcgatttactattaagtcagacgtgtggagttttggaattttgctgacagaactgaccacaaaggggagggtaccataccccgggatggtgaatagggaagtcctggatcaggtagaacgaggatataggatgccttgccccccagagtgtccagagagtctgcatgacctaatgtgtcagtgctggaggaaagagcctgaggagcgcccaacttttgaatatctgcaagccttcctggaggactatttcacatctaccgaacctcagtatcaacccggggaaaatttgtag

SEQ ID NO: 155796 - DNA, 1611 bp, Artificial Sequence
  derived and/or modified sequence
atgggcagcaacaagagcaagcccaaggacgccagccagcggcggaggagcctcgaacccgcagagaacgtgcacggcgctggaggcggtgcctttccagctagtcagacgccatccaagccagccagtgcggacgggcaccgggggccatctgctgcgtttgcacccgcagctgcggagcctaaactcttcggaggattcaactcctcagatactgtgaccagtccgcaaagagccgggcctcttgcaggtggcgtgaccacctttgtggcgctgtacgattacgagtcacggaccgagactgacttgtcttttaaaaagggcgaacgtctgcagatcgtgaataatacggaaggcgattggtggctagcacacagcctttctaccggacaaactggatacattccctccaactacgtggccccctctgatagcatacaggcggaggaatggtattttggcaagatcacacgcagggagtctgagcgccttctgctaaatgcggagaaccctcggggaacttttttagtgagggaatccgagactaccaaaggtgcctactgtctgagcgtgagtgactttgacaacgcaaagggactcaacgtcaagcactacaaaatccgaaagctagactctgggggcttctacataacaagccgcactcagtttaattcactgcaacagctcgtggcctattactccaagcacgcagacggtctttgccacagactgacaaccgtctgccccacttcaaagccacagacacaaggattggcaaaagatgcttgggaaattcccagagagagtcttcgactcgaggttaaactgggacaaggatgtttcggcgaggtttggatgggcacttggaatggcacaactcgggttgccatcaagaccttaaaacccggaaccatgtccccagaggccttcctccaggaggcccaggtgatgaagaagttaagacatgaaaagctcgtgcagttgtacgccgttgtcagcgaggagcccatttatatcgtaacggagtatatgtctaaggggtcacttttggattttcttaaaggagaaacaggcaaatacctaagattgccccaactggttgacatggccgcccagattgccagcggcatggcttacgtagaaagaatgaactacgtccatcgggatcttagggcggctaatatcttggttggcgaaaatttggtgtgtaaggtggctgatttcggtcttgctaggttgattgaggataacgaatacaccgccaggcagggcgctaagttccccatcaagtggaccgcacctgaagcagcattgtacggacggtttactataaagagcgatgtttggagcttcgggatcttactgacggagctgactacaaagggccgagtgccgtaccccggtatggtcaaccgcgaggtgctggatcaggtcgaacggggctaccgaatgccatgccctcctgaatgccctgagagtctgcatgatctgatgtgccaatgctggagaaaggaaccagaagagagaccaactttcgaatacttgcaggccttccttgaggattatttcactagtacagaaccgcagtaccaacccggggagaatctttag

SEQ ID NO: 155797 - DNA, 1611 bp, Artificial Sequence
  derived and/or modified sequence
atgggatcgaataagtctaagcccaaggacgcttcacagaggcgcagaagtctggaacctgcggagaacgttcacggagctgggggaggggctttcccagcttcacaaacaccgtcgaagcctgcgagcgcagacgggcacaggggtccctccgctgctttcgcaccagcagcagcggagcctaaattgttcggcggtttcaacagctccgacactgtaacatctcctcagcgcgctggtcctctggccggaggtgtcacaaccttcgtcgcactctatgactacgaaagccgaacggagactgacctgtcgtttaagaaaggtgagagactgcagatagtcaataacacagagggggactggtggctggctcacagcctttcaaccgggcaaacaggctacatacccagtaactacgtcgcgccatccgactcaatacaggcggaggagtggtattttggaaagattacacgacgtgagagtgagagactgctgctgaacgcagagaatcctcggggaactttcctggtcagagaatcagagacaactaagggcgcatattgtttaagtgtgtctgacttcgataacgcaaagggtctcaatgtgaaacactacaagatccgcaagctcgattctggaggcttttacatcacgtcacgaactcagttcaactcgttacaacagctggtcgcttactactccaagcatgccgatggcctttgccaccgtctcacaacagtttgccccacatccaaaccccaaacccagggcctagcgaaagacgcatgggagatacccagggagagcctccgtctggaagtgaagctagggcaaggttgttttggcgaagtttggatgggcacatggaacggaacaaccagagttgcaattaagactcttaaacccggaacaatgtctccggaggccttcctgcaagaggcgcaggttatgaaaaagctgcgacacgaaaagttggtgcagctgtacgctgttgtaagcgaggagcccatttacatagtaacggagtatatgagtaagggatcattactggacttcctcaagggagagacagggaagtacctccgactgccccaacttgtagacatggctgcccagattgcaagcgggatggcatatgttgaacgcatgaactacgtgcaccgagatctgcgcgcagccaacattcttgtcggcgaaaatttagtgtgtaaggtcgcagatttcggactggccaggctaatcgaagataacgagtataccgccagacagggggctaaatttccaatcaagtggaccgcacccgaggcagctctttacggcagattcactattaaaagcgacgtctggagcttcgggatcctcttaacagagctgacaacaaagggcagggtgccttacccgggaatggtgaaccgagaggtgctggaccaggtggaaaggggttacaggatgccatgtccccctgaatgccccgagagcttgcacgatctaatgtgtcaatgttggaggaaagagccagaggagagaccaacatttgagtacctgcaggcgttcttggaggattacttcacatcaactgaaccccaatatcagcctggcgagaacttgtag

SEQ ID NO: 155798 - DNA, 1629 bp, Artificial Sequence
  derived and/or modified sequence
atggggtctaataagagtaaacctaaagacgcaagccagcgccgacgatccttagaacccgcagagaacgtgcacggggcaggagggggagcctttccagccagccagactccatcaaagcccgcatcagcggatggtcaccgcggtccttccgcagcctttgcccctgccgctgcagaaccgaaactcttcggcggtttcaactcctcagacaccgtaacaagtccacaacgggcagggcctctcgccggtggcgtcacgacgttcgtggcactctatgattatgaatcccgtaccgaaaccgatctgtcttttaaaaaaggcgaacgcctgcagattgttaataatactcggaaagtcgacgtgcgcgaaggtgactggtggcttgcccattctctgtctactggccagacaggttacataccttctaattatgtcgcgccatcggatagcatccaggccgaggagtggtacttcggcaaaatcacccgcagggagtccgaacggcttctactgaatgccgagaacccccgtggcacttttctggttcgggagagcgaaactaccaagggtgcatactgtctgtcggtgtctgatttcgataatgcaaagggtctaaatgtgaagcactataagattcgcaaactcgatagcggaggattctacataacgagccgcactcagttcaacagtctgcagcagctcgtagcctactacagcaaacatgctgatgggctgtgccacaggctgaccacagtttgcccgactagtaaaccacaaactcaaggtctggctaaggacgcctgggaaatccctcgggaaagcttgcgcctggaagtgaagcttgggcagggttgctttggggaggtatggatgggtacttggaatgggaccaccagagtggcgataaaaacactgaaaccagggaccatgtcacctgaggcgttcctgcaagaggctcaggtaatgaaaaagctgcgccacgaaaagctggtacagttgtacgccgtagttagtgaagaaccaatctatatcgttacagagtacatgagcaagggctcactgctggatttcctcaaaggcgagaccgggaagtatctgagattaccacagctggtggatatggcagcacaaatcgcaagcggcatggcatatgttgagagaatgaattatgtgcaccgggatcttcgcgctgccaatattttggttggcgagaacctggtctgcaaggtggcagattttggattggccagactgatcgaggataatgagtacacagccaggcaaggcgcaaaattccccattaagtggacagcccctgaagccgcattgtatggacgtttcacgatcaagagcgacgtatggagcttcgggatacttctgaccgagcttacgactaaggggcgagtcccataccctgggatggtcaatagagaagtcctcgaccaagttgagcgagggtacagaatgccctgccctccagagtgtccagagtccttacacgatctcatgtgccagtgctggaggaaggagcctgaggaacgccctacatttgaatatctgcaggccttccttgaagattactttacatcgaccgagccacagtatcagccaggcgaaaacctttag

SEQ ID NO: 155799 - DNA, 1611 bp, Artificial Sequence
  derived and/or modified sequence
atgggatccaataagtccaaaccaaaggacgcaagccagcgacgcaggtctcttgaacctgccgagaacgtacatggcgcaggtggaggagcttttcctgcctcacagacaccctcaaaacctgctagcgctgatggtcacagaggaccttccgcggcatttgctcctgctgccgctgagccaaaattgtttggcggattcaacagctctgacactgtgaccagtccacagcgcgctggtccactggctggcggagttacaactttcgtagccttgtatgattacgagtcaaggactgagaccgacctgagtttcaaaaaaggggagcggcttcagattgtgaacaacacggagggggactggtggctggcccatagcctgagtacaggtcagaccgggtacatcccctccaattacgtagcccctagcgatagtattcaggctgaagaatggtattttgggaaaatcacacgcagagaaagcgaaaggttgctgttaaatgctgagaatccgagggggaccttccttgtcagggaaagcgaaaccactaagggggcttattgtctgtctgtgtctgacttcgacaatgcaaagggacttaatgtgaagcattataaaatcagaaagctggacagtggcggtttttatataacttcacgaacacaattcaactctctgcagcagctcgtcgcttactattccaagcacgccgatgggctgtgccaccgtctgaccacggtgtgtcctaccagcaaaccccagacccagggcctggcgaaggatgcatgggaaatcccaagagagtcactcaggttagaagtcaagcttggtcagggctgtttcggagaggtttggatgggtacatggaacggaaccacgcgagtggcgattaaaacgctcaagcccggtactatgtccccagaagctttcctgcaagaagctcaagtgatgaaaaagctgcgccacgagaaacttgtccaactttacgcggttgtctccgaggagccaatctacatcgtgactgagtacatgtcaaagggcagcctactggattttctgaagggggaaacgggaaaatacctgcgtctgccacagcttgtggacatggcagctcagatcgcatcaggcatggcatacgtggaacggatgaactacgttcatcgagatttgcgagccgctaacatcctcgtgggcgagaacctggtttgcaaagtggctgactttggccttgccagactaattgaggataatgaatacacagctaggcagggtgccaagttccccatcaagtggaccgctcccgaggcagccttgtatgggcgatttacaatcaagagcgatgtgtggtcttttgggatactgttgaccgagcttacaaccaagggacgcgtcccctaccccggtatggtgaaccgcgaagttctggatcaggtggagcgcggttaccggatgccctgcccccctgagtgccctgaatctctgcatgacctcatgtgccagtgctggagaaaggagcctgaggagcgtccaacatttgagtaccttcaggccttcttggaggattacttcacatcgacagaacctcagtatcagcctggagaaaacctttag

SEQ ID NO: 155800 - DNA, 1611 bp, Artificial Sequence
  derived and/or modified sequence
atggggtcaaacaaaagcaaacccaaagacgcttcacagcgcagaaggtctctcgaacccgctgagaacgtccacggtgctggaggcggtgcattccctgcttcacaaaccccgagcaaacccgcatcggccgacgggcatcgaggtccgtccgcggctttcgcacccgctgccgctgagcctaaattatttggcggattcaactcgtccgacacagtgaccagccctcagagagcaggtcccctggctggaggggtcaccacattcgtggcactgtatgactatgagagcagaacggagacggatctttccttcaaaaaaggcgaacgcctgcagattgtgaacaatacagaaggagactggtggctggctcacagtctatcaaccggccagaccgggtatataccatcaaactatgtggctccgagcgattcaatccaagccgaggaatggtacttcggtaagatcacgcggcgagagagcgagcggctgctgctcaacgccgaaaatcctaggggtacatttttggtcagggaatccgagaccactaaaggggcttactgtctgtctgtaagtgattttgacaatgctaaaggcctgaatgttaaacattacaagattcggaagctggactcaggcggattctatatcaccagtcggacacagttcaatagcctgcagcaactagtcgcatactactcaaagcacgctgacgggctttgtcacagacttactactgtctgccctacatccaagccgcagacccaggggcttgctaaggatgcttgggagatcccaagagaatccctccgtcttgaggtaaagctgggtcaggggtgttttggagaagtatggatgggaacctggaacgggactacaagggttgccataaagaccctgaaacccggaaccatgtctccagaggcatttttgcaagaggcacaggtgatgaaaaaactgaggcacgagaaactagtccaattgtacgctgtggtctccgaagaaccgatctacattgtgacggaatatatgtctaagggaagccttctggactttcttaaaggagagactggcaaatatttgaggctcccacaactggtggacatggctgcccaaattgcctctggcatggcttatgtcgaacggatgaactacgttcatcgagatctgcgcgctgccaacatcctggtgggagagaacctcgtgtgcaaagtcgccgactttgggctcgcccgactgattgaggataatgagtacaccgcgcgtcagggagccaagttccctatcaaatggactgctcctgaagccgcactttatgggagattcactattaagagcgatgtctggagctttggaatacttcttactgagctcacaactaaggggagagttccgtacccaggcatggtcaaccgcgaagtgctcgaccaggtggaacgcggatacaggatgccatgcccaccggaatgtcccgaaagtctccacgatttaatgtgccagtgctggcgaaaagagccagaggagcgaccaacatttgaatatttgcaggcttttctggaagattattttacttctaccgagccccagtatcagccaggcgagaatctgtag

SEQ ID NO: 155801 - DNA, 1611 bp, Artificial Sequence
  derived and/or modified sequence
atgggcagcaataagtccaaacccaaagatgcctcccagcggcgtcggagtctggaaccagctgaaaatgtccatggcgcaggcggaggggctttcccggcttctcagacaccctcaaaacctgcctccgcagatgggcatagagggccatccgctgcgtttgccccagcagcggctgaacctaaactattcggaggcttcaatagttcagacacagtcacttctccccagcgagctggccctcttgccggaggagtgactactttcgtcgctctttacgattacgagtccagaactgagacagacctgtcttttaaaaagggtgaacgtctgcagatcgttaacaataccgaaggcgactggtggcttgctcacagcctgagcacggggcagaccggttacatcccctctaattatgtcgccccatctgactccatacaggcagaggagtggtattttgggaagattacgcggagggagtctgagcgtctgctactgaacgctgagaacccaaggggtacgttcctcgtccgtgaatcggaaactaccaagggtgcctactgtctctccgtgagtgactttgacaacgccaaggggctgaacgttaagcactacaagatcaggaaattagatagcggaggattctacattacatcaaggacgcagttcaacagtcttcaacagctggtggcctactattccaaacacgctgacggactgtgtcatagactcaccactgtgtgtcctactagtaaaccacagacacagggtctcgctaaggatgcgtgggaaatccctcgggagtctctaaggttggaggtgaaacttgggcaggggtgtttcggagaggtatggatgggcacatggaatggaaccacaagggtagcaattaagaccctcaaaccaggtacaatgtcgcctgaggccttcctccaggaagctcaagtgatgaaaaaattgcggcacgaaaagctggtgcagctgtacgccgtggtgtctgaagaaccaatttatatcgtcactgaatatatgtccaagggcagcctcctggattttctgaaaggcgaaactggcaagtatctacgcctcccccagctcgtggacatggctgctcagatcgcctcaggaatggcctacgtggagcgcatgaactatgtccatcgtgacctgcgcgctgctaacatcctcgttggcgagaatctcgtctgtaaagtcgcggattttggcctggcaaggttgatcgaagacaacgagtatacagccagacagggagccaagtttccgatcaaatggacagccccagaggccgctctatacggacggttcacaataaagagcgacgtctggtcttttggaatccttcttacagaattgacaacaaagggcagagtgccgtatcctggcatggtgaaccgcgaagtgctggatcaggtggagaggggatacaggatgccatgtccccctgagtgtcctgagtccctgcatgacctgatgtgtcagtgctggcggaaagaacctgaggaaaggcccacgtttgagtacctgcaggcctttttggaagattacttcacgtccactgagccacagtaccagcctggagagaatttgtag

SEQ ID NO: 155802 - DNA, 3748 bp, Artificial Sequence
  derived and/or modified sequence
ggcctctatttcgagacccctgactccacacctggtgtttgtgccaagaccccaggctgcctcccaggtcctctgggacagcccctgccttctaccaggaccatgggtagcaacaagagcaagcccaaggatgccagccagcggcgccgcagcctggagcccgccgagaacgtgcacggcgctggcgggggcgctttccccgcctcgcagacccccagcaagccagcctcggccgacggccaccgcggccccagcgcggccttcgcccccgcggccgccgagcccaagctgttcggaggcttcaactcctcggacaccgtcacctccccgcagagggcgggcccgctggccggtggagtgaccacctttgtggccctctatgactatgagtctaggacggagacagacctgtccttcaagaaaggcgagcggctccagattgtcaacaacacagagggagactggtggctggcccactcgctcagcacaggacagacaggctacatccccagcaactacgtggcgccctccgactccatccaggctgaggagtggtattttggcaagatcaccagacgggagtcagagcggttactgctcaatgcagagaacccgagagggaccttcctcgtgcgagaaagtgagaccacgaaaggtgcctactgcctctcagtgtctgacttcgacaacgccaagggcctcaacgtgaagcactacaagatccgcaagctggacagcggcggcttctacatcacctcccgcacccagttcaacagcctgcagcagctggtggcctactactccaaacacgccgatggcctgtgccaccgcctcaccaccgtgtgccccacgtccaagccgcagactcagggcctggccaaggatgcctgggagatccctcgggagtcgctgcggctggaggtcaagctgggccagggctgctttggcgaggtgtggatggggacctggaacggtaccaccagggtggccatcaaaaccctgaagcctggcacgatgtctccagaggccttcctgcaggaggcccaggtcatgaagaagctgaggcatgagaagctggtgcagttgtatgctgtggtttcagaggagcccatttacatcgtcacggagtacatgagcaaggggagtttgctggactttctcaagggggagacaggcaagtacctgcggctgcctcagctggtggacatggctgctcagatcgcctcaggcatggcgtacgtggagcggatgaactacgtccaccgggaccttcgtgcagccaacatcctggtgggagagaacctggtgtgcaaagtggcggactttgggctggctcggctcattgaagacaatgagtacacggcgcggcaaggtgccaaattccccatcaagtggacggctccagaagctgccctctatggccgcttcaccatcaagtcggacgtgtggtccttcgggatcctgctgactgagctcaccacaaagggacgggtgccctaccctgggatggtgaaccgcgaggtgctggaccaggtggagcggggctaccggatgccctgcccgccggagtgtcccgagtccctgcacgacctcatgtgccagtgctggcggaaggagcctgaggagcggcccaccttcgagtacctgcaggccttcctggaggactacttcacgtccaccgagccccagtaccagcccggggagaacctctaggcacaggcgggcccagaccggcttctcggcttggatcctgggctgggtggcccctgtctcggggcttgccccactctgcctgcctgctgttggtcctctctctgtggggctgaattgccaggggcgaggcccttcctctttggtggcatggaaggggcttctggacctagggtggcctgagagggcggtgggtatgcgagaccagcacggtgactctgtccagctcccgctgtggccgcacgcctctccctgcactccctcctggagctctgtgggtctctggaagaggaaccaggagaagggctggggccggggctgagggtgcccttttccagcctcagcctactccgctcactgaactccttccccacttctgtgccacccccggtctatgtcgagagctggccaaagagcctttccaaagaggagcgatgggcccctggccccgcctgcctgccaccctgccccttgccatccattctggaaacacctgtaggcagaggctgccgagacagaccctctgccgctgcttccaggctgggcagcacaaggccttgcctggcctgatgatggtgggtgggtgggatgagtaccccctcaaaccctgccctccttagacctgagggacccttcgagatcatcacttccttgcccccatttcacccatggggagacagttgagagcggggatgtgacatgcccaaggccacggagcagttcagagtggaggcgggcttggaacccggtgctccctctgtcatcctcaggaaccaacaattcgtcggaggcatcatggaaagactgggacagcccaggaaacaaggggtctgaggatgcattcgagatggcagattcccactgccgctgcccgctcagcccagctgttgggaacagcatggaggcagatgtggggctgagctggggaatcagggtaaaaggtgcaggtgtggagagagaggcttcaatcggcttgtgggtgatgtttgaccttcagagccagccggctatgaaagggagcgagcccctcggctctggaggcaatcaagcagacatagaagagccaagagtccaggaggccctggtcctggcctccttccccgtactttgtcccgtggcatttcaattcctggccctgttctcctccccaagtcggcaccctttaactcatgaggagggaaaagagtgcctaagcgggggtgaaagaggacgtgttacccactgccatgcaccaggactggctgtgtaaccttgggtggcccctgctgtctctctgggctgcagagtctgccccacatgtggccatggcctctgcaactgctcagctctggtccaggccctgtggcaggacacacatggtgagcctagccctgggacatcaggagactgggctctggctctgttcggcctttgggtgtgtggtggattctccctgggcctcagtgtgcccatctgtaaaggggcagctgacagtttgtggcatcttgccaagggtccctgtgtgtgtgtatgtgtgtgcatgtgtgcgtgtctccatgtgcgtccatatttaacatgtaaaaatgtcccccccgctccgtcccccaaacatgttgtacatttcaccatggccccctcatcatagcaataacattcccactgccaggggttcttgagccagccaggccctgccagtggggaaggaggccaagcagtgcctgcctatgaaatttcaacttttcctttcatacgtctttattacccaagtcttctcccgtccattccagtcaaatctgggctcactcaccccagcgagctctcaaatccctctccaactgcctaaggccctttgtgtaaggtgtcttaatactgtcctttttttttttttaacagtgttttgtagatttcagatgactatgcagaggcctgggggacccctggctctgggccgggcctggggctccgaaattccaaggcccagacttgcggggggtgggggggtatccagaattggttgtaaatactttgcatattgtctgattaaacacaaacagacctc

SEQ ID NO: 155803 - DNA, 3766 bp, Artificial Sequence
  derived and/or modified sequence
ggcctctatttcgagacccctgactccacacctggtgtttgtgccaagaccccaggctgcctcccaggtcctctgggacagcccctgccttctaccaggaccatgggtagcaacaagagcaagcccaaggatgccagccagcggcgccgcagcctggagcccgccgagaacgtgcacggcgctggcgggggcgctttccccgcctcgcagacccccagcaagccagcctcggccgacggccaccgcggccccagcgcggccttcgcccccgcggccgccgagcccaagctgttcggaggcttcaactcctcggacaccgtcacctccccgcagagggcgggcccgctggccggtggagtgaccacctttgtggccctctatgactatgagtctaggacggagacagacctgtccttcaagaaaggcgagcggctccagattgtcaacaacacgaggaaggtggatgtcagagagggagactggtggctggcccactcgctcagcacaggacagacaggctacatccccagcaactacgtggcgccctccgactccatccaggctgaggagtggtattttggcaagatcaccagacgggagtcagagcggttactgctcaatgcagagaacccgagagggaccttcctcgtgcgagaaagtgagaccacgaaaggtgcctactgcctctcagtgtctgacttcgacaacgccaagggcctcaacgtgaagcactacaagatccgcaagctggacagcggcggcttctacatcacctcccgcacccagttcaacagcctgcagcagctggtggcctactactccaaacacgccgatggcctgtgccaccgcctcaccaccgtgtgccccacgtccaagccgcagactcagggcctggccaaggatgcctgggagatccctcgggagtcgctgcggctggaggtcaagctgggccagggctgctttggcgaggtgtggatggggacctggaacggtaccaccagggtggccatcaaaaccctgaagcctggcacgatgtctccagaggccttcctgcaggaggcccaggtcatgaagaagctgaggcatgagaagctggtgcagttgtatgctgtggtttcagaggagcccatttacatcgtcacggagtacatgagcaaggggagtttgctggactttctcaagggggagacaggcaagtacctgcggctgcctcagctggtggacatggctgctcagatcgcctcaggcatggcgtacgtggagcggatgaactacgtccaccgggaccttcgtgcagccaacatcctggtgggagagaacctggtgtgcaaagtggcggactttgggctggctcggctcattgaagacaatgagtacacggcgcggcaaggtgccaaattccccatcaagtggacggctccagaagctgccctctatggccgcttcaccatcaagtcggacgtgtggtccttcgggatcctgctgactgagctcaccacaaagggacgggtgccctaccctgggatggtgaaccgcgaggtgctggaccaggtggagcggggctaccggatgccctgcccgccggagtgtcccgagtccctgcacgacctcatgtgccagtgctggcggaaggagcctgaggagcggcccaccttcgagtacctgcaggccttcctggaggactacttcacgtccaccgagccccagtaccagcccggggagaacctctaggcacaggcgggcccagaccggcttctcggcttggatcctgggctgggtggcccctgtctcggggcttgccccactctgcctgcctgctgttggtcctctctctgtggggctgaattgccaggggcgaggcccttcctctttggtggcatggaaggggcttctggacctagggtggcctgagagggcggtgggtatgcgagaccagcacggtgactctgtccagctcccgctgtggccgcacgcctctccctgcactccctcctggagctctgtgggtctctggaagaggaaccaggagaagggctggggccggggctgagggtgcccttttccagcctcagcctactccgctcactgaactccttccccacttctgtgccacccccggtctatgtcgagagctggccaaagagcctttccaaagaggagcgatgggcccctggccccgcctgcctgccaccctgccccttgccatccattctggaaacacctgtaggcagaggctgccgagacagaccctctgccgctgcttccaggctgggcagcacaaggccttgcctggcctgatgatggtgggtgggtgggatgagtaccccctcaaaccctgccctccttagacctgagggacccttcgagatcatcacttccttgcccccatttcacccatggggagacagttgagagcggggatgtgacatgcccaaggccacggagcagttcagagtggaggcgggcttggaacccggtgctccctctgtcatcctcaggaaccaacaattcgtcggaggcatcatggaaagactgggacagcccaggaaacaaggggtctgaggatgcattcgagatggcagattcccactgccgctgcccgctcagcccagctgttgggaacagcatggaggcagatgtggggctgagctggggaatcagggtaaaaggtgcaggtgtggagagagaggcttcaatcggcttgtgggtgatgtttgaccttcagagccagccggctatgaaagggagcgagcccctcggctctggaggcaatcaagcagacatagaagagccaagagtccaggaggccctggtcctggcctccttccccgtactttgtcccgtggcatttcaattcctggccctgttctcctccccaagtcggcaccctttaactcatgaggagggaaaagagtgcctaagcgggggtgaaagaggacgtgttacccactgccatgcaccaggactggctgtgtaaccttgggtggcccctgctgtctctctgggctgcagagtctgccccacatgtggccatggcctctgcaactgctcagctctggtccaggccctgtggcaggacacacatggtgagcctagccctgggacatcaggagactgggctctggctctgttcggcctttgggtgtgtggtggattctccctgggcctcagtgtgcccatctgtaaaggggcagctgacagtttgtggcatcttgccaagggtccctgtgtgtgtgtatgtgtgtgcatgtgtgcgtgtctccatgtgcgtccatatttaacatgtaaaaatgtcccccccgctccgtcccccaaacatgttgtacatttcaccatggccccctcatcatagcaataacattcccactgccaggggttcttgagccagccaggccctgccagtggggaaggaggccaagcagtgcctgcctatgaaatttcaacttttcctttcatacgtctttattacccaagtcttctcccgtccattccagtcaaatctgggctcactcaccccagcgagctctcaaatccctctccaactgcctaaggccctttgtgtaaggtgtcttaatactgtcctttttttttttttaacagtgttttgtagatttcagatgactatgcagaggcctgggggacccctggctctgggccgggcctggggctccgaaattccaaggcccagacttgcggggggtgggggggtatccagaattggttgtaaatactttgcatattgtctgattaaacacaaacagacctc

SEQ ID NO: 155804 - DNA, 4321 bp, Artificial Sequence
  derived and/or modified sequence
catcgaggttttgagaggctaactctcccaaaaaggaccatgggtagcaacaagagcaagcccaaggatgccagccagcggcgccgcagcctggagcccgccgagaacgtgcacggcgctggcgggggcgctttccccgcctcgcagacccccagcaagccagcctcggccgacggccaccgcggccccagcgcggccttcgcccccgcggccgccgagcccaagctgttcggaggcttcaactcctcggacaccgtcacctccccgcagagggcgggcccgctggccggtggagtgaccacctttgtggccctctatgactatgagtctaggacggagacagacctgtccttcaagaaaggcgagcggctccagattgtcaacaacacagagggagactggtggctggcccactcgctcagcacaggacagacaggctacatccccagcaactacgtggcgccctccgactccatccaggctgaggagtggtattttggcaagatcaccagacgggagtcagagcggttactgctcaatgcagagaacccgagagggaccttcctcgtgcgagaaagtgagaccacgaaaggtgcctactgcctctcagtgtctgacttcgacaacgccaagggcctcaacgtgaagcactacaagatccgcaagctggacagcggcggcttctacatcacctcccgcacccagttcaacagcctgcagcagctggtggcctactactccaaacacgccgatggcctgtgccaccgcctcaccaccgtgtgccccacgtccaagccgcagactcagggcctggccaaggatgcctgggagatccctcgggagtcgctgcggctggaggtcaagctgggccagggctgctttggcgaggtgtggatggggacctggaacggtaccaccagggtggccatcaaaaccctgaagcctggcacgatgtctccagaggccttcctgcaggaggcccaggtcatgaagaagctgaggcatgagaagctggtgcagttgtatgctgtggtttcagaggagcccatttacatcgtcacggagtacatgagcaaggggagtttgctggactttctcaagggggagacaggcaagtacctgcggctgcctcagctggtggacatggctgctcagatcgcctcaggcatggcgtacgtggagcggatgaactacgtccaccgggaccttcgtgcagccaacatcctggtgggagagaacctggtgtgcaaagtggcggactttgggctggctcggctcattgaagacaatgagtacacggcgcggcaaggtgccaaattccccatcaagtggacggctccagaagctgccctctatggccgcttcaccatcaagtcggacgtgtggtccttcgggatcctgctgactgagctcaccacaaagggacgggtgccctaccctgggatggtgaaccgcgaggtgctggaccaggtggagcggggctaccggatgccctgcccgccggagtgtcccgagtccctgcacgacctcatgtgccagtgctggcggaaggagcctgaggagcggcccaccttcgagtacctgcaggccttcctggaggactacttcacgtccaccgagccccagtaccagcccggggagaacctctaggcacaggcgggcccagaccggcttctcggcttggatcctgggctgggtggcccctgtctcggggcttgccccactctgcctgcctgctgttggtcctctctctgtggggctgaattgccaggggcgaggcccttcctctttggtggcatggaaggggcttctggacctagggtggcctgagagggcggtgggtatgcgagaccagcacggtgactctgtccagctcccgctgtggccgcacgcctctccctgcactccctcctggagctctgtgggtctctggaagaggaaccaggagaagggctggggccggggctgagggtgcccttttccagcctcagcctactccgctcactgaactccttccccacttctgtgccacccccggtctatgtcgagagctggccaaagagcctttccaaagaggagcgatgggcccctggccccgcctgcctgccaccctgccccttgccatccattctggaaacacctgtaggcagaggctgccgagacagaccctctgccgctgcttccaggctgggcagcacaaggccttgcctggcctgatgatggtgggtgggtgggatgagtaccccctcaaaccctgccctccttagacctgagggacccttcgagatcatcacttccttgcccccatttcacccatggggagacagttgagagcggggatgtgacatgcccaaggccacggagcagttcagagtggaggcgggcttggaacccggtgctccctctgtcatcctcaggaaccaacaattcgtcggaggcatcatggaaagactgggacagcccaggaaacaaggggtctgaggatgcattcgagatggcagattcccactgccgctgcccgctcagcccagctgttgggaacagcatggaggcagatgtggggctgagctggggaatcagggtaaaaggtgcaggtgtggagagagaggcttcaatcggcttgtgggtgatgtttgaccttcagagccagccggctatgaaagggagcgagcccctcggctctggaggcaatcaagcagacatagaagagccaagagtccaggaggccctggtcctggcctccttccccgtactttgtcccgtggcatttcaattcctggccctgttctcctccccaagtcggcaccctttaactcatgaggagggaaaagagtgcctaagcgggggtgaaagaggacgtgttacccactgccatgcaccaggactggctgtgtaaccttgggtggcccctgctgtctctctgggctgcagagtctgccccacatgtggccatggcctctgcaactgctcagctctggtccaggccctgtggcaggacacacatggtgagcctagccctgggacatcaggagactgggctctggctctgttcggcctttgggtgtgtggtggattctccctgggcctcagtgtgcccatctgtaaaggggcagctgacagtttgtggcatcttgccaagggtccctgtgtgtgtgtatgtgtgtgcatgtgtgcgtgtctccatgtgcgtccatatttaacatgtaaaaatgtcccccccgctccgtcccccaaacatgttgtacatttcaccatggccccctcatcatagcaataacattcccactgccaggggttcttgagccagccaggccctgccagtggggaaggaggccaagcagtgcctgcctatgaaatttcaacttttcctttcatacgtctttattacccaagtcttctcccgtccattccagtcaaatctgggctcactcaccccagcgagctctcaaatccctctccaactgcctaaggccctttgtgtaaggtgtcttaatactgtcctttttttttttttaacagtgttttgtagatttcagatgactatgcagaggcctgggggacccctggctctgggccgggcctggggctccgaaattccaaggcccagacttgcggggggtgggggggtatccagaattggttgtaaatactttgcatattgtctgattaaacacaaacagacctcagaatctgatcaacagtttattgaacatctactgtgtgctggaaagcgagatggggcggaatgcgagaacaaactaccccttgaggggtctttgggcagcactagtagctggagggcttcaggccaaggcaggggtgacatcagattggagacagctacggcagaatgtggctgtttgtgaacatctgcacctgtgttagggggtgagcacctgggagaaggacaaggcacatcacaggacttccctgagcatgacaagttcaggactcaaatgtccgtggtggatggtagcagtgacattggggagtgggtggggctgtcaagcctgcctagaggagatcacaaatacacgacgagaataccgttgtgtgtgctcttcgtgtgtttcctaggagtgcagggcaggggtgctgggtcgatccacaaaagtcctgaaaacgctgaagaaaaatccaaagacccttcccctcctccctccttccccaccaccgaagcacacagtcttgaaggttgatttgcaaccgtctatacaaacacatttattttacacaaatatacatcagatcacacacctgtgcaccggagtcaactctggccacgacattgcttaattaaaaacaaatttcaaaaactgga

SEQ ID NO: 155805 - DNA, 4631 bp, Artificial Sequence
  derived and/or modified sequence
gccggagcggccaggccgccgtctgcccgtcccgctggacgtcccgcggtccgccctcccgtgcgtccgtctgccggtgagcccgcccgcccgccggcccagaacagagaacagaagctcagagaagtgaagcaacttgcccagctatgagagacagagccaggatttgaaaccagatgaggacgctgaggcccagagagggaaagccacttgcctagggacacacagcggggagaggtggagcagggcctctatttcgagacccctgactccacacctggtgtttgtgccaagaccccaggctgcctcccaggtcctctgggacagcccctgccttctaccagggaccatgggtagcaacaagagcaagcccaaggatgccagccagcggcgccgcagcctggagcccgccgagaacgtgcacggcgctggcgggggcgctttccccgcctcgcagacccccagcaagccagcctcggccgacggccaccgcggccccagcgcggccttcgcccccgcggccgccgagcccaagctgttcggaggcttcaactcctcggacaccgtcacctccccgcagagggcgggcccgctggccggtggagtgaccacctttgtggccctctatgactatgagtctaggacggagacagacctgtccttcaagaaaggcgagcggctccagattgtcaacaacacagagggagactggtggctggcccactcgctcagcacaggacagacaggctacatccccagcaactacgtggcgccctccgactccatccaggctgaggagtggtattttggcaagatcaccagacgggagtcagagcggttactgctcaatgcagagaacccgagagggaccttcctcgtgcgagaaagtgagaccacgaaaggtgcctactgcctctcagtgtctgacttcgacaacgccaagggcctcaacgtgaagcactacaagatccgcaagctggacagcggcggcttctacatcacctcccgcacccagttcaacagcctgcagcagctggtggcctactactccaaacacgccgatggcctgtgccaccgcctcaccaccgtgtgccccacgtccaagccgcagactcagggcctggccaaggatgcctgggagatccctcgggagtcgctgcggctggaggtcaagctgggccagggctgctttggcgaggtgtggatggggacctggaacggtaccaccagggtggccatcaaaaccctgaagcctggcacgatgtctccagaggccttcctgcaggaggcccaggtcatgaagaagctgaggcatgagaagctggtgcagttgtatgctgtggtttcagaggagcccatttacatcgtcacggagtacatgagcaaggggagtttgctggactttctcaagggggagacaggcaagtacctgcggctgcctcagctggtggacatggctgctcagatcgcctcaggcatggcgtacgtggagcggatgaactacgtccaccgggaccttcgtgcagccaacatcctggtgggagagaacctggtgtgcaaagtggcggactttgggctggctcggctcattgaagacaatgagtacacggcgcggcaaggtgccaaattccccatcaagtggacggctccagaagctgccctctatggccgcttcaccatcaagtcggacgtgtggtccttcgggatcctgctgactgagctcaccacaaagggacgggtgccctaccctgggatggtgaaccgcgaggtgctggaccaggtggagcggggctaccggatgccctgcccgccggagtgtcccgagtccctgcacgacctcatgtgccagtgctggcggaaggagcctgaggagcggcccaccttcgagtacctgcaggccttcctggaggactacttcacgtccaccgagccccagtaccagcccggggagaacctctaggcacaggcgggcccagaccggcttctcggcttggatcctgggctgggtggcccctgtctcggggcttgccccactctgcctgcctgctgttggtcctctctctgtggggctgaattgccaggggcgaggcccttcctctttggtggcatggaaggggcttctggacctagggtggcctgagagggcggtgggtatgcgagaccagcacggtgactctgtccagctcccgctgtggccgcacgcctctccctgcactccctcctggagctctgtgggtctctggaagaggaaccaggagaagggctggggccggggctgagggtgcccttttccagcctcagcctactccgctcactgaactccttccccacttctgtgccacccccggtctatgtcgagagctggccaaagagcctttccaaagaggagcgatgggcccctggccccgcctgcctgccaccctgccccttgccatccattctggaaacacctgtaggcagaggctgccgagacagaccctctgccgctgcttccaggctgggcagcacaaggccttgcctggcctgatgatggtgggtgggtgggatgagtaccccctcaaaccctgccctccttagacctgagggacccttcgagatcatcacttccttgcccccatttcacccatggggagacagttgagagcggggatgtgacatgcccaaggccacggagcagttcagagtggaggcgggcttggaacccggtgctccctctgtcatcctcaggaaccaacaattcgtcggaggcatcatggaaagactgggacagcccaggaaacaaggggtctgaggatgcattcgagatggcagattcccactgccgctgcccgctcagcccagctgttgggaacagcatggaggcagatgtggggctgagctggggaatcagggtaaaaggtgcaggtgtggagagagaggcttcaatcggcttgtgggtgatgtttgaccttcagagccagccggctatgaaagggagcgagcccctcggctctggaggcaatcaagcagacatagaagagccaagagtccaggaggccctggtcctggcctccttccccgtactttgtcccgtggcatttcaattcctggccctgttctcctccccaagtcggcaccctttaactcatgaggagggaaaagagtgcctaagcgggggtgaaagaggacgtgttacccactgccatgcaccaggactggctgtgtaaccttgggtggcccctgctgtctctctgggctgcagagtctgccccacatgtggccatggcctctgcaactgctcagctctggtccaggccctgtggcaggacacacatggtgagcctagccctgggacatcaggagactgggctctggctctgttcggcctttgggtgtgtggtggattctccctgggcctcagtgtgcccatctgtaaaggggcagctgacagtttgtggcatcttgccaagggtccctgtgtgtgtgtatgtgtgtgcatgtgtgcgtgtctccatgtgcgtccatatttaacatgtaaaaatgtcccccccgctccgtcccccaaacatgttgtacatttcaccatggccccctcatcatagcaataacattcccactgccaggggttcttgagccagccaggccctgccagtggggaaggaggccaagcagtgcctgcctatgaaatttcaacttttcctttcatacgtctttattacccaagtcttctcccgtccattccagtcaaatctgggctcactcaccccagcgagctctcaaatccctctccaactgcctaaggccctttgtgtaaggtgtcttaatactgtcctttttttttttttaacagtgttttgtagatttcagatgactatgcagaggcctgggggacccctggctctgggccgggcctggggctccgaaattccaaggcccagacttgcggggggtgggggggtatccagaattggttgtaaatactttgcatattgtctgattaaacacaaacagacctcagaatctgatcaacagtttattgaacatctactgtgtgctggaaagcgagatggggcggaatgcgagaacaaactaccccttgaggggtctttgggcagcactagtagctggagggcttcaggccaaggcaggggtgacatcagattggagacagctacggcagaatgtggctgtttgtgaacatctgcacctgtgttagggggtgagcacctgggagaaggacaaggcacatcacaggacttccctgagcatgacaagttcaggactcaaatgtccgtggtggatggtagcagtgacattggggagtgggtggggctgtcaagcctgcctagaggagatcacaaatacacgacgagaataccgttgtgtgtgctcttcgtgtgtttcctaggagtgcagggcaggggtgctgggtcgatccacaaaagtcctgaaaacgctgaagaaaaatccaaagacccttcccctcctccctccttccccaccaccgaagcacacagtcttgaaggttgatttgcaaccgtctatacaaacacatttattttacacaaatatacatcagatcacacacctgtgcaccggagtcaactctggccacgacattgcttaattaaaaacaaatttcaaaaactgga

SEQ ID NO: 155806 - DNA, 4099 bp, Artificial Sequence
  derived and/or modified sequence
caaacaagtgcggccatttcaccagcccaggctggcttctgctgttgactggctgtggcacctcaagcagcccctttcccctctagcctcagtttatcaccgcaagagctaccattcatctagcacaacctgaccatcctcacactggtcagttccaaccttcccaggaatcttctgtggccatgttcactccggttttacaggtgagggggctgggctgggaagctgatcgacttgtccaccccacagcagaggggcagctagcctagatgcgaacctagatgaggacgctgaggcccagagagggaaagccacttgcctagggacacacagcggggagaggtggagcagggcctctatttcgagacccctgactccacacctggtgtttgtgccaagaccccaggctgcctcccaggtcctctgggacagcccctgccttctaccaggaccatgggtagcaacaagagcaagcccaaggatgccagccagcggcgccgcagcctggagcccgccgagaacgtgcacggcgctggcgggggcgctttccccgcctcgcagacccccagcaagccagcctcggccgacggccaccgcggccccagcgcggccttcgcccccgcggccgccgagcccaagctgttcggaggcttcaactcctcggacaccgtcacctccccgcagagggcgggcccgctggccggtggagtgaccacctttgtggccctctatgactatgagtctaggacggagacagacctgtccttcaagaaaggcgagcggctccagattgtcaacaacacagagggagactggtggctggcccactcgctcagcacaggacagacaggctacatccccagcaactacgtggcgccctccgactccatccaggctgaggagtggtattttggcaagatcaccagacgggagtcagagcggttactgctcaatgcagagaacccgagagggaccttcctcgtgcgagaaagtgagaccacgaaaggtgcctactgcctctcagtgtctgacttcgacaacgccaagggcctcaacgtgaagcactacaagatccgcaagctggacagcggcggcttctacatcacctcccgcacccagttcaacagcctgcagcagctggtggcctactactccaaacacgccgatggcctgtgccaccgcctcaccaccgtgtgccccacgtccaagccgcagactcagggcctggccaaggatgcctgggagatccctcgggagtcgctgcggctggaggtcaagctgggccagggctgctttggcgaggtgtggatggggacctggaacggtaccaccagggtggccatcaaaaccctgaagcctggcacgatgtctccagaggccttcctgcaggaggcccaggtcatgaagaagctgaggcatgagaagctggtgcagttgtatgctgtggtttcagaggagcccatttacatcgtcacggagtacatgagcaaggggagtttgctggactttctcaagggggagacaggcaagtacctgcggctgcctcagctggtggacatggctgctcagatcgcctcaggcatggcgtacgtggagcggatgaactacgtccaccgggaccttcgtgcagccaacatcctggtgggagagaacctggtgtgcaaagtggcggactttgggctggctcggctcattgaagacaatgagtacacggcgcggcaaggtgccaaattccccatcaagtggacggctccagaagctgccctctatggccgcttcaccatcaagtcggacgtgtggtccttcgggatcctgctgactgagctcaccacaaagggacgggtgccctaccctgggatggtgaaccgcgaggtgctggaccaggtggagcggggctaccggatgccctgcccgccggagtgtcccgagtccctgcacgacctcatgtgccagtgctggcggaaggagcctgaggagcggcccaccttcgagtacctgcaggccttcctggaggactacttcacgtccaccgagccccagtaccagcccggggagaacctctaggcacaggcgggcccagaccggcttctcggcttggatcctgggctgggtggcccctgtctcggggcttgccccactctgcctgcctgctgttggtcctctctctgtggggctgaattgccaggggcgaggcccttcctctttggtggcatggaaggggcttctggacctagggtggcctgagagggcggtgggtatgcgagaccagcacggtgactctgtccagctcccgctgtggccgcacgcctctccctgcactccctcctggagctctgtgggtctctggaagaggaaccaggagaagggctggggccggggctgagggtgcccttttccagcctcagcctactccgctcactgaactccttccccacttctgtgccacccccggtctatgtcgagagctggccaaagagcctttccaaagaggagcgatgggcccctggccccgcctgcctgccaccctgccccttgccatccattctggaaacacctgtaggcagaggctgccgagacagaccctctgccgctgcttccaggctgggcagcacaaggccttgcctggcctgatgatggtgggtgggtgggatgagtaccccctcaaaccctgccctccttagacctgagggacccttcgagatcatcacttccttgcccccatttcacccatggggagacagttgagagcggggatgtgacatgcccaaggccacggagcagttcagagtggaggcgggcttggaacccggtgctccctctgtcatcctcaggaaccaacaattcgtcggaggcatcatggaaagactgggacagcccaggaaacaaggggtctgaggatgcattcgagatggcagattcccactgccgctgcccgctcagcccagctgttgggaacagcatggaggcagatgtggggctgagctggggaatcagggtaaaaggtgcaggtgtggagagagaggcttcaatcggcttgtgggtgatgtttgaccttcagagccagccggctatgaaagggagcgagcccctcggctctggaggcaatcaagcagacatagaagagccaagagtccaggaggccctggtcctggcctccttccccgtactttgtcccgtggcatttcaattcctggccctgttctcctccccaagtcggcaccctttaactcatgaggagggaaaagagtgcctaagcgggggtgaaagaggacgtgttacccactgccatgcaccaggactggctgtgtaaccttgggtggcccctgctgtctctctgggctgcagagtctgccccacatgtggccatggcctctgcaactgctcagctctggtccaggccctgtggcaggacacacatggtgagcctagccctgggacatcaggagactgggctctggctctgttcggcctttgggtgtgtggtggattctccctgggcctcagtgtgcccatctgtaaaggggcagctgacagtttgtggcatcttgccaagggtccctgtgtgtgtgtatgtgtgtgcatgtgtgcgtgtctccatgtgcgtccatatttaacatgtaaaaatgtcccccccgctccgtcccccaaacatgttgtacatttcaccatggccccctcatcatagcaataacattcccactgccaggggttcttgagccagccaggccctgccagtggggaaggaggccaagcagtgcctgcctatgaaatttcaacttttcctttcatacgtctttattacccaagtcttctcccgtccattccagtcaaatctgggctcactcaccccagcgagctctcaaatccctctccaactgcctaaggccctttgtgtaaggtgtcttaatactgtcctttttttttttttaacagtgttttgtagatttcagatgactatgcagaggcctgggggacccctggctctgggccgggcctggggctccgaaattccaaggcccagacttgcggggggtgggggggtatccagaattggttgtaaatactttgcatattgtctgattaaacacaaacagacctc

SEQ ID NO: 155807 - protein, 1137 aa, Artificial Sequence
  derived and/or modified sequence
MTMTANKNSSITHGAGGTKAPRGTLSRSQSVSPPPVLSPPRSPIYPLSDSETSACRYPSHSSSRVLLKDRHPPAPSPQNPQDPSPDTSPPTCPFKTASFGYLDRSPSACKRDAQKESVQGAAQDVAGVAACLPLAQSTPFPGPAAGPRGVLLTRTGTRAHSLGIREKISAWEGRREASPRMSMCGEKREGSGSEWAASEGCPSLGCPSVVPSPCSSEKTFDFKGLRRMSRTFSECSYPETEEEGEALPVRDSFYRLEKRLGRSEPSAFLRGHGSRKESSAVLSRIQKIEQVLKEQPGRGLPQLPSSCYSVDRGKRKTGTLGSLEEPAGGASVSAGSRAVGVAGVAGEAGPPPEREGSGSTKPGTPGNSPSSQRLPSKSSLDPAVNPVPKPKRTFEYEADKNPKSKPSNGLPPSPTPAAPPPLPSTPAPPVTRRPKKDMRGHRKSQSRKSFEFEDASSLQSLYPSSPTENGTENQPKFGSKSTLEENAYEDIVGDLPKENPYEDVDLKSRRAGRKSQQLSENSLDSLHRMWSPQDRKYNSPPTQLSLKPNSQSLRSGNWSERKSHRLPRLPKRHSHDDMLLLAQLSLPSSPSSLNEDSLSTTSELLSSRRARRIPKLVQRINSIYNAKRGKKRLKKLSMSSIETASLRDENSESESDSDDRFKAHTQRLVHIQSMLKRAPSYRTLELELLEWQERELFEYFVVVSLKKKPSRNTYLPEVSYQFPKLDRPTKQMREAEERLKAIPQFCFPDAKDWLPVSEYSSETFSFMLTGEDGSRRFGYCRRLLPSGKGPRLPEVYCVISRLGCFGLFSKVLDEVERRRGISAALVYPFMRSLMESPFPAPGKTIKVKTFLPGAGNEVLELRRPMDSRLEHVDFECLFTCLSVRQLIRIFASLLLERRVIFVADKLSTLSSCSHAVVALLYPFSWQHTFIPVLPASMIDIVCCPTPFLVGLLSSSLPKLKELPVEEALMVNLGSDRFIRQMDDEDTLLPRKLQAALEQALERKNELISQDSDSDSDDECNTLNGLVSEVFIRFFVETVGHYSLFLTQSEKGERAFQREAFRKSVASKSIRRFLEVFMESQMFAGFIQDRELRKCRAKGLFEQRVEQYLEELPDTEQSGMNKFLRGLGNKMKFLHKKN

SEQ ID NO: 155808 - protein, 609 aa, Artificial Sequence
  derived and/or modified sequence
MWSPQDRKYNSPPTQLSLKPNSQSLRSGNWSERKSHRLPRLPKRHSHDDMLLLAQLSLPSSPSSLNEDSLSTTSELLSSRRARRIPKLVQRINSIYNAKRGKKRLKKLSMSSIETASLRDENSESESDSDDRFKAHTQRLVHIQSMLKRAPSYRTLELELLEWQERELFEYFVVVSLKKKPSRNTYLPEVSYQFPKLDRPTKQMREAEERLKAIPQFCFPDAKDWLPVSEYSSETFSFMLTGEDGSRRFGYCRRLLPSGKGPRLPEVYCVISRLGCFGLFSKVLDEVERRRGISAALVYPFMRSLMESPFPAPGKTIKVKTFLPGAGNEVLELRRPMDSRLEHVDFECLFTCLSVRQLIRIFASLLLERRVIFVADKLSTLSSCSHAVVALLYPFSWQHTFIPVLPASMIDIVCCPTPFLVGLLSSSLPKLKELPVEEALMVNLGSDRFIRQMDDEDTLLPRKLQAALEQALERKNELISQDSDSDSDDECNTLNGLVSEVFIRFFVETVGHYSLFLTQSEKGERAFQREAFRKSVASKSIRRFLEVFMESQMFAGFIQDRELRKCRAKGLFEQRVEQYLEELPDTEQSGMNKFLRGLGNKMKFLHKKN

SEQ ID NO: 155809 - DNA, 3414 bp, Artificial Sequence
  derived and/or modified sequence
atgaccatgaccgccaacaagaacagcagcatcacccacggcgccggcggcaccaaggcccccagaggcaccctgagcagaagccagagcgtgagccccccccccgtgctgagcccccccagaagccccatctaccccctgagcgacagcgagaccagcgcctgcagataccccagccacagcagcagcagagtgctgctgaaggacagacacccccccgcccccagcccccagaacccccaggaccccagccccgacaccagcccccccacctgccccttcaagaccgccagcttcggctacctggacagaagccccagcgcctgcaagagagacgcccagaaggagagcgtgcagggcgccgcccaggacgtggccggcgtggccgcctgcctgcccctggcccagagcacccccttccccggccccgccgccggccccagaggcgtgctgctgaccagaaccggcaccagagcccacagcctgggcatcagagagaagatcagcgcctgggagggcagaagagaggccagccccagaatgagcatgtgcggcgagaagagagagggcagcggcagcgagtgggccgccagcgagggctgccccagcctgggctgccccagcgtggtgcccagcccctgcagcagcgagaagaccttcgacttcaagggcctgagaagaatgagcagaaccttcagcgagtgcagctaccccgagaccgaggaggagggcgaggccctgcccgtgagagacagcttctacagactggagaagagactgggcagaagcgagcccagcgccttcctgagaggccacggcagcagaaaggagagcagcgccgtgctgagcagaatccagaagatcgagcaggtgctgaaggagcagcccggcagaggcctgccccagctgcccagcagctgctacagcgtggacagaggcaagagaaagaccggcaccctgggcagcctggaggagcccgccggcggcgccagcgtgagcgccggcagcagagccgtgggcgtggccggcgtggccggcgaggccggccccccccccgagagagagggcagcggcagcaccaagcccggcacccccggcaacagccccagcagccagagactgcccagcaagagcagcctggaccccgccgtgaaccccgtgcccaagcccaagagaaccttcgagtacgaggccgacaagaaccccaagagcaagcccagcaacggcctgccccccagccccacccccgccgcccccccccccctgcccagcacccccgccccccccgtgaccagaagacccaagaaggacatgagaggccacagaaagagccagagcagaaagagcttcgagttcgaggacgccagcagcctgcagagcctgtaccccagcagccccaccgagaacggcaccgagaaccagcccaagttcggcagcaagagcaccctggaggagaacgcctacgaggacatcgtgggcgacctgcccaaggagaacccctacgaggacgtggacctgaagagcagaagagccggcagaaagagccagcagctgagcgagaacagcctggacagcctgcacagaatgtggagcccccaggacagaaagtacaacagcccccccacccagctgagcctgaagcccaacagccagagcctgagaagcggcaactggagcgagagaaagagccacagactgcccagactgcccaagagacacagccacgacgacatgctgctgctggcccagctgagcctgcccagcagccccagcagcctgaacgaggacagcctgagcaccaccagcgagctgctgagcagcagaagagccagaagaatccccaagctggtgcagagaatcaacagcatctacaacgccaagagaggcaagaagagactgaagaagctgagcatgagcagcatcgagaccgccagcctgagagacgagaacagcgagagcgagagcgacagcgacgacagattcaaggcccacacccagagactggtgcacatccagagcatgctgaagagagcccccagctacagaaccctggagctggagctgctggagtggcaggagagagagctgttcgagtacttcgtggtggtgagcctgaagaagaagcccagcagaaacacctacctgcccgaggtgagctaccagttccccaagctggacagacccaccaagcagatgagagaggccgaggagagactgaaggccatcccccagttctgcttccccgacgccaaggactggctgcccgtgagcgagtacagcagcgagaccttcagcttcatgctgaccggcgaggacggcagcagaagattcggctactgcagaagactgctgcccagcggcaagggccccagactgcccgaggtgtactgcgtgatcagcagactgggctgcttcggcctgttcagcaaggtgctggacgaggtggagagaagaagaggcatcagcgccgccctggtgtaccccttcatgagaagcctgatggagagccccttccccgcccccggcaagaccatcaaggtgaagaccttcctgcccggcgccggcaacgaggtgctggagctgagaagacccatggacagcagactggagcacgtggacttcgagtgcctgttcacctgcctgagcgtgagacagctgatcagaatcttcgccagcctgctgctggagagaagagtgatcttcgtggccgacaagctgagcaccctgagcagctgcagccacgccgtggtggccctgctgtaccccttcagctggcagcacaccttcatccccgtgctgcccgccagcatgatcgacatcgtgtgctgccccacccccttcctggtgggcctgctgagcagcagcctgcccaagctgaaggagctgcccgtggaggaggccctgatggtgaacctgggcagcgacagattcatcagacagatggacgacgaggacaccctgctgcccagaaagctgcaggccgccctggagcaggccctggagagaaagaacgagctgatcagccaggacagcgacagcgacagcgacgacgagtgcaacaccctgaacggcctggtgagcgaggtgttcatcagattcttcgtggagaccgtgggccactacagcctgttcctgacccagagcgagaagggcgagagagccttccagagagaggccttcagaaagagcgtggccagcaagagcatcagaagattcctggaggtgttcatggagagccagatgttcgccggcttcatccaggacagagagctgagaaagtgcagagccaagggcctgttcgagcagagagtggagcagtacctggaggagctgcccgacaccgagcagagcggcatgaacaagttcctgagaggcctgggcaacaagatgaagttcctgcacaagaagaactag

SEQ ID NO: 155810 - DNA, 1830 bp, Artificial Sequence
  derived and/or modified sequence
atgtggagcccccaggacagaaagtacaacagcccccccacccagctgagcctgaagcccaacagccagagcctgagaagcggcaactggagcgagagaaagagccacagactgcccagactgcccaagagacacagccacgacgacatgctgctgctggcccagctgagcctgcccagcagccccagcagcctgaacgaggacagcctgagcaccaccagcgagctgctgagcagcagaagagccagaagaatccccaagctggtgcagagaatcaacagcatctacaacgccaagagaggcaagaagagactgaagaagctgagcatgagcagcatcgagaccgccagcctgagagacgagaacagcgagagcgagagcgacagcgacgacagattcaaggcccacacccagagactggtgcacatccagagcatgctgaagagagcccccagctacagaaccctggagctggagctgctggagtggcaggagagagagctgttcgagtacttcgtggtggtgagcctgaagaagaagcccagcagaaacacctacctgcccgaggtgagctaccagttccccaagctggacagacccaccaagcagatgagagaggccgaggagagactgaaggccatcccccagttctgcttccccgacgccaaggactggctgcccgtgagcgagtacagcagcgagaccttcagcttcatgctgaccggcgaggacggcagcagaagattcggctactgcagaagactgctgcccagcggcaagggccccagactgcccgaggtgtactgcgtgatcagcagactgggctgcttcggcctgttcagcaaggtgctggacgaggtggagagaagaagaggcatcagcgccgccctggtgtaccccttcatgagaagcctgatggagagccccttccccgcccccggcaagaccatcaaggtgaagaccttcctgcccggcgccggcaacgaggtgctggagctgagaagacccatggacagcagactggagcacgtggacttcgagtgcctgttcacctgcctgagcgtgagacagctgatcagaatcttcgccagcctgctgctggagagaagagtgatcttcgtggccgacaagctgagcaccctgagcagctgcagccacgccgtggtggccctgctgtaccccttcagctggcagcacaccttcatccccgtgctgcccgccagcatgatcgacatcgtgtgctgccccacccccttcctggtgggcctgctgagcagcagcctgcccaagctgaaggagctgcccgtggaggaggccctgatggtgaacctgggcagcgacagattcatcagacagatggacgacgaggacaccctgctgcccagaaagctgcaggccgccctggagcaggccctggagagaaagaacgagctgatcagccaggacagcgacagcgacagcgacgacgagtgcaacaccctgaacggcctggtgagcgaggtgttcatcagattcttcgtggagaccgtgggccactacagcctgttcctgacccagagcgagaagggcgagagagccttccagagagaggccttcagaaagagcgtggccagcaagagcatcagaagattcctggaggtgttcatggagagccagatgttcgccggcttcatccaggacagagagctgagaaagtgcagagccaagggcctgttcgagcagagagtggagcagtacctggaggagctgcccgacaccgagcagagcggcatgaacaagttcctgagaggcctgggcaacaagatgaagttcctgcacaagaagaactag

SEQ ID NO: 155811 - DNA, 3414 bp, Artificial Sequence
  derived and/or modified sequence
atgaccatgaccgctaataaaaattcctccatcacgcatggcgccggaggcactaaggcgccaagaggcaccctttctaggtcccaatcagtctctcccccgcctgtactatcacctcctagaagccccatatatccattgagcgattctgaaacttcggcttgtcggtacccctctcactcctcctctcgagttttactgaaggatcgacaccccccggccccatctccccaaaacccccaagatccgtctccagacacctctccacccacttgcccttttaagaccgcctcgtttggatacctcgacaggagtccatcagcgtgcaagcgagacgctcagaaagagagcgttcagggggcggcccaggatgttgccggtgtcgccgcctgcttgcctctggcccaaagtacaccatttccaggtccagctgccggaccacgcggggtgttattgacacggacagggactcgcgctcattcccttgggatacgtgaaaaaatatctgcctgggaggggcgtagagaggcttctcccaggatgagtatgtgtggggaaaagcgggagggatcaggaagcgagtgggccgcctcagagggctgtccatccttggggtgccccagcgttgtgccatccccatgtagctccgagaagaccttcgacttcaagggcctgaggaggatgtccagaacattttccgagtgttcttaccccgaaaccgaggaggagggcgaggctctgccagtgcgcgactcattttaccggcttgagaagcgtctggggaggagcgagccatcagcctttcttcgaggccacggaagcagaaaggagtcttctgctgttctgagtcgcatccaaaagattgagcaggttctgaaggagcagccaggccgggggctccctcaattgccaagttcatgttattccgtagatcgcggcaagagaaagaccggcacactgggtagcctcgaggaacccgccggtggagcttcagtgtccgctggaagcagggcagtaggagtggccggtgtggcaggcgaagctggaccccctcctgagcgggagggatcaggttccacaaaaccaggcaccccagggaattcaccttcctcccaaaggctgccatctaagtcaagcctggatccggctgtcaaccctgtgccgaaacccaagcgcacttttgaatacgaggctgacaaaaatcctaagagcaagccctcaaacggcttacctccttcacctactccagccgctcctcctcctttaccttctactccagctcctccagtcacaagacggcccaagaaagacatgagggggcataggaagtctcagagcaggaagagtttcgagttcgaggatgcttcctccttacagagcctctatcctagctctcccacagaaaatgggacggaaaatcaacccaaattcgggtcaaaatcgaccttggaggagaatgcttatgaagatattgtgggagatctgcctaaggagaatccttatgaagatgttgatttgaagtctcgcagagctgggagaaagagtcagcagctgtctgagaactcactcgactcccttcatcgcatgtggagtccccaggacagaaagtataattcccctcctacacagctgagcctaaaaccaaattcacagtcactgcgctctggcaactggagtgaacgaaagagtcaccgcctgccgcggttacccaaaaggcatagccatgacgacatgctgctgctagctcagctttctctgccatcgtctcctagcagcctgaatgaggattctctgtccaccacatctgagcttctgagttctcgtcgtgccagaaggatcccaaagctagtgcagcgcattaactccatctacaatgctaagcgggggaaaaagcggctcaagaaactcagcatgtcatccattgaaacggcgagcctcagggacgagaactctgagtctgaatctgacagtgatgatcggttcaaagctcacacccagcggctagtccatatccagtctatgttgaaaagggcccccagttacaggactcttgaactcgaacttctggagtggcaagaacgcgagttgtttgaatatttcgtggttgtgtctctgaagaagaaaccatctcggaacacgtatctgccagaggtcagctatcagttccctaagctggaccgaccaactaagcaaatgagggaggctgaagagcggctaaaggccatcccgcagttctgctttccagatgccaaggactggctgcccgtctctgaatacagctcagagacattctccttcatgttgacgggcgaggatggatctcgcaggtttggatactgcagacggcttttgccctctgggaaaggcccgcgcttgccagaagtctattgcgtcatcagtaggctgggctgtttcggcctttttagtaaagtgctggatgaagtagagcgcaggcggggaatctccgccgcactggtttaccccttcatgagatccctgatggagagccccttccctgcccccggaaaaacaattaaggtgaaaactttcttgccaggagcaggaaatgaggtgctagagttaaggcgtcctatggatagtaggcttgagcacgttgatttcgagtgtttgttcacttgcttgtcagtgcgccaattgattcggatcttcgcctcattacttcttgagcggagggtgatctttgtcgccgataagctcagcaccctgagctcatgttcccacgctgtcgtggcattactgtatccattttcctggcaacataccttcattccggtcctgcccgccagcatgatcgatattgtgtgctgtccaaccccgttcctcgtcggcctcctgtcctcgtccctgcctaaactcaaagaactaccagtggaggaagccctgatggtcaaccttggctcagatcgtttcatcaggcagatggacgacgaggacactctgctccctagaaagctgcaagccgccttggagcaggcgttagagagaaagaacgagctgattagccaagactctgatagtgatagcgatgatgagtgtaatacactgaatggactggtgtcagaggtgttcatccgttttttcgtggagactgtgggtcactatagcctgtttttgacacaatcagagaagggcgaaagggcattccaaagagaggcttttcgcaaatctgtcgcatccaagagcatccgccgcttcctcgaggtgttcatggaatcacagatgtttgccggcttcatccaagaccgggagctgcggaaatgccgtgccaagggactgtttgaacagcgcgtggaacagtacctggaagagctgcccgataccgaacagagtggcatgaataaattcctcaggggtttgggtaataaaatgaaattcctccacaagaagaattag

SEQ ID NO: 155812 - DNA, 3414 bp, Artificial Sequence
  derived and/or modified sequence
atgaccatgacagcgaacaaaaattcctccataacacatggcgctggaggaactaaggcccctcggggtactttgagccggagccagagcgtgtcccctccaccagtgctgtctccccccaggtccccgatatacccgctgagcgatagtgagacaagtgcgtgtagataccccagtcattcctcttcccgcgttcttttgaaagacaggcaccccccagccccgtccccccagaaccctcaggatcccagccccgatacctccccacccacctgtccttttaagacagcctccttcggctatctggataggtcgccgtcagcctgcaagcgcgatgcgcaaaaagagagcgttcagggtgccgcccaggacgttgccggggtggcggcttgtcttcccctagcccagagcacgccctttcccggacctgcagccggcccacgcggtgtgctgctcacgcgaacgggcacccgagctcacagtctgggaattcgcgaaaaaatatcagcctgggaggggcgccgcgaagcatccccacgcatgtcaatgtgtggtgaaaagcgcgaagggtctggaagtgagtgggctgctagcgagggatgccccagcttgggctgcccctctgtggtccctagcccttgttcttccgagaaaacctttgacttcaaggggctgaggagaatgagccgcacgttcagcgaatgttcctaccctgaaaccgaagaggaaggagaggccttgcctgtgagggacagcttctataggctggaaaagagactcggaaggagtgaaccaagtgcatttctgcggggacatggcagcagaaaggagtcctccgctgtcctatctcgcatccagaagatcgagcaggtgctcaaggaacagcccggaagaggactcccacagctcccctcatcctgttactcagtggacaggggcaagcgaaaaaccgggactttgggtagtctcgaagagccagcgggaggagcaagtgtctccgccggatctcgcgccgtgggcgtggccggtgtggctggggaggctgggccacccccagaacgagaggggagcggcagcacaaaaccggggaccccaggcaatagccctagttcccagaggctgccaagcaagagctcacttgatccggctgtgaaccccgttcccaagcccaaacgtacctttgaatatgaagccgataaaaacccaaagtcaaaaccttctaacgggctcccccctagccctacccccgctgcaccacccccgctgccaagtaccccggccccccccgttacccgccgacctaagaaagatatgaggggacatcgcaagtctcagagccggaaaagttttgaattcgaggatgcctcgagcctccaaagtctgtatcccagctcacctactgaaaacggaaccgaaaaccaaccaaagttcggatccaagtcaaccctggaggaaaatgcttacgaagacattgtgggcgatttgccaaaggagaacccatacgaggacgtggacttaaagtccagaagggccggcagaaaaagtcagcaactctcagaaaactccttggacagcctccatcgaatgtggtctcctcaggacagaaaatataattctccccctacccaactctctttgaaacccaactcacagagtctacggagcgggaactggagtgagcgcaaatcccatcgactgccccggctcccaaagagacactcgcacgacgacatgctgctgctggcacagctgtctctcccgtcctccccttcatccctgaacgaagatagtttgtcaaccacctccgaactgttgtcctctagacgggctaggaggatacccaaactggtccaacggattaattcaatatacaacgccaaaagaggcaagaagcggttgaaaaaactgtctatgtccagtatcgagaccgcaagcctgcgcgatgagaactccgagtcagagtctgactctgatgatcgctttaaggctcacacccaacggcttgtgcacattcagtctatgctaaaacgggcaccgtcctaccggacacttgagctcgagctgttggaatggcaagaacgagagctatttgagtatttcgtggtggtgtccttaaaaaaaaagccatctcggaacacatacctgcccgaggttagctaccagttccccaaactcgaccgtcccaccaaacagatgagagaggctgaggagcgcctaaaggccatcccgcagttctgtttcccagacgcaaaggattggctgccagtgtctgagtactcttccgagaccttttcttttatgctcacaggagaagacggcagtcggcgtttcggttattgcagaagactcctcccaagcggcaagggcccaagactaccagaagtttattgtgtaatctctcgcttgggatgctttggcctgtttagcaaagttctggacgaagtggagcgcagaagaggcatcagcgctgccctggtttaccccttcatgaggagcttaatggagagtccttttcctgctcctggcaaaactataaaagtaaaaacttttctgccaggtgctggaaacgaggtgctcgaattgcggaggcctatggattccagactagagcacgttgattttgagtgtctgttcacctgcctgagtgtgagacagttgattcggatttttgccagccttttgctcgaaagacgcgtaatctttgttgctgacaagctctcaactttaagcagctgttcacacgctgtggtggcactgctgtaccctttttcttggcagcacacatttatacccgtgttgcctgcatcaatgattgatattgtgtgctgtcccacaccgttcctggtgggcctgcttagttccagcttgccaaaacttaaggagttaccagtcgaagaagctctgatggttaatttgggctctgaccgctttattaggcagatggatgatgaagacaccctcctgccccgcaagctgcaggcagctctggaacaggcattggaaagaaaaaacgagctaatctcacaggactcagattccgatagcgacgacgagtgcaatacgctcaatgggctggtgtctgaggtgttcatacggttcttcgtcgagacagttggccactacagcctgtttcttacccagtctgaaaagggcgagcgagcctttcagagggaggcttttcgcaagtctgtcgccagcaaatctatccgtagatttctcgaggtttttatggagtcccagatgtttgcgggcttcatccaggatcgggaattgcgaaagtgtagggccaagggactctttgaacagcgggtggaacagtacctggaagaattacccgacactgaacagtcaggtatgaataagttcttgagaggccttggtaacaagatgaagtttctccataagaagaattag

SEQ ID NO: 155813 - DNA, 1830 bp, Artificial Sequence
  derived and/or modified sequence
atgtggagcccccaggacaggaaatataactcccctcccactcagctgtccctgaaaccgaacagtcagtccctacggagcggaaattggtccgaacgaaaatctcaccggctcccccgcctgcccaagagacacagccacgatgacatgttactgctggcgcagctgtctctcccttcctccccatcttccctcaacgaagattcgttgtcgacaacctccgagcttttatctagcaggcgggcgcggaggatcccaaagctggtccagcggattaattcaatctataatgccaagcgcggtaaaaaaagactaaagaagctcagtatgtcttcgattgaaacagcaagcctgagggatgagaacagcgagagcgagtctgactccgatgaccgttttaaagcacatacacaacgactggtgcatatccaaagcatgctcaagcgcgccccgagctatcgaaccctggaactggagcttctggaatggcaggagcgagagctttttgagtacttcgtggtggtgtctctgaaaaagaagccgagtaggaatacctacctacctgaggtcagctaccagtttcctaagttggacagaccaacgaaacagatgagggaggccgaggaaaggctcaaggctatccctcagttctgcttccctgatgctaaggactggttacccgtgtctgaatactctagcgagactttttccttcatgttgaccggcgaggacgggtctcgccggttcgggtattgtagacggcttttgccatccggaaagggccctaggttaccagaggtgtactgtgttatctccagactggggtgttttgggctctttagtaaggtgttagatgaggtggagcgcagacgcggcatcagtgccgcactggtctatccatttatgcggtctctaatggagtccccttttccagccccaggaaaaactattaaggtcaaaactttcctccctggggctggaaatgaggtgcttgagttgcgtcgaccaatggatagtaggctagaacacgtggatttcgaatgtctatttacttgtctcagcgtgcggcagcttataagaatctttgcatctctgctgcttgaaaggagggtaatctttgtagccgataagctgagcaccctgtccagttgttcacatgccgtcgtcgctcttctatatccattctcgtggcagcacacattcattccggtactaccagcttccatgatagacattgtatgctgccctacacccttcctggtcggcctgcttagctcaagcctgccaaaactaaaggagctgcccgttgaagaggcactgatggttaacttagggtcagacaggtttatccgccaaatggatgatgaggatactctcttaccgaggaaactgcaggccgctctggaacaagctctcgagagaaagaacgaattaatctcacaggattccgactctgactcggacgacgagtgcaatactctgaatgggctggtgtctgaggtcttcatccggtttttcgtagaaaccgtgggccactatagtttgtttttaacacagagcgagaagggggaaagggcttttcagagagaagcttttcgaaagtcggtggcctcaaaatctataagacgattcctggaggtgttcatggaatcccagatgttcgccggctttattcaggaccgcgaactgcggaaatgtagggcgaagggtctcttcgagcaacgagtggaacagtacctggaagaactgccagacaccgaacaaagcggaatgaataagtttttgcgaggactcggaaacaagatgaaatttctgcataagaagaactag

SEQ ID NO: 155814 - DNA, 3414 bp, Artificial Sequence
  derived and/or modified sequence
atgactatgactgccaataaaaattcgtctatcacacacggcgccggcgggactaaggcaccaaggggtacccttagccgtagtcagtccgtctctccacctccagtgctctcacccccgcggagtcctatctacccgctcagcgattcagaaacctcggcctgccggtacccgagtcatagcagttcccgagtgctgctgaaggatcgccaccctcccgctccttcgccacagaacccccaggacccctccccagacacctctccacccacttgcccatttaaaactgcatcttttggatatctcgatcgatcacctagcgcgtgtaagagagatgcgcagaaagagtctgtgcagggcgctgcccaagatgttgccggggtggctgcctgtctgcccttagcccagagcacccctttccccggtcccgccgccgggcctcgcggtgtcttgctaacaagaaccggtacacgcgcccacagtctcggaatacgcgaaaagataagtgcctgggagggacgcagagaggcctctcctcgcatgtccatgtgcggcgagaagcgagaggggtccgggagtgaatgggccgcctccgagggctgtcccagcttgggatgccccagtgtggtgccttctccttgttcctctgagaagacatttgacttcaaagggctgaggcggatgagtagaacctttagtgagtgctcgtaccccgagacagaagaggagggcgaggccttgcccgtgagggatagcttttatagactggagaagagactgggacgttcagaaccatcagcctttcttcgcggccacggaagccgcaaggagagttcagcagtacttagtagaatccaaaagatcgagcaggttctgaaagagcaaccaggaagagggctgccacagctcccaagttcctgttacagcgtcgaccggggcaagcggaagaccggtacattgggttccctggaagagccggctggtggcgctagtgtctcagcaggcagtcgagccgttggggtagccggagtggctggggaggccggacccccacccgaaagggaaggtagcggaagtactaagcctgggactcctggcaattcaccttcttcacagcggctcccctctaagagtagcttggaccccgctgtcaatcctgtgccaaagcccaaaaggacattcgagtatgaggccgataagaacccaaaatccaagccttctaacggtctgccaccttcccccactcccgccgccccaccacctctgccatcgacgcctgctccccctgttacacgtcggccaaagaaggacatgagaggccatcgtaagagccagagcaggaaaagctttgagtttgaagatgccagctcattgcagtccctatatcctagttcccccaccgaaaacggtactgagaaccagcccaaattcgggtcaaagagcactctggaggagaatgcttacgaagatattgttggcgaccttcccaaggaaaacccctacgaggatgtcgatcttaaatctagacgcgccggtcgaaaatcccagcagctgtcggaaaactctctggattcattgcaccgtatgtggtccccacaagaccgtaagtacaacagtccgcccactcagctgtctctgaaaccaaattctcaaagcttgcggtctggcaattggtccgagaggaaatcccaccgtctgcccaggttacctaaacgacattcccatgacgacatgctgctgctcgcccagctgtccctcccctcaagccctagttccttgaatgaagatagcctgagcaccacttccgagctgctgagtagccggcgtgccaggcgtatcccaaagctagttcagcggataaactccatttataatgccaagcgcgggaaaaagcggctgaaaaagttaagtatgtcctctattgagacagcctcattgcgggacgaaaactctgaaagtgagagcgacagcgacgaccgattcaaggcacatactcagagacttgttcatattcaaagcatgctgaaaagagccccatcctatcgcacacttgagttggagctgttggaatggcaggaacgcgaactgtttgagtatttcgttgtggtttccctcaagaaaaaaccgtcaaggaacacctatcttccagaagtgagttaccagttccctaagctcgacaggcctaccaaacagatgagggaagccgaagagaggttgaaagccattccacaattctgttttcctgacgccaaggattggctgcccgtttcagagtactccagtgagaccttttcatttatgctcacaggagaagatggtagtagaaggttcggttattgcaggcggctgttaccatccgggaagggcccgagactccccgaggtgtactgtgtgatcagccgtctgggctgctttggcctcttttcaaaggtgttggatgaggtggaaagacgtagggggatcagcgcggcactggtttacccatttatgcgctctcttatggaatcgccattccctgcacccggcaagaccataaaagtgaagacgtttctgccaggggcaggaaatgaggttctcgaactgcgccgcccaatggatagccggctcgagcatgtggatttcgagtgtctcttcacatgtctttcagtccgtcagctgatcagaatttttgcctctctcctgctggaacggagagtgatatttgtcgcagataagctgtctaccctgagcagctgctctcatgccgtggtagcattgttgtaccccttctcctggcaacacaccttcatacccgtgctcccggcttctatgatagatatcgtctgttgtccaacacccttcttagtagggctccttagttccagcctgccgaagctgaaagaactgccggtggaagaggccctgatggttaatctgggttccgacaggtttatccggcagatggatgacgaggataccctgttgccccgcaagttacaggcggccttagaacaggccctggaacggaaaaatgagctgatctcacaggactctgacagtgattccgatgatgaatgtaatacactaaatggcctagttagcgaagtgttcataaggttctttgtcgaaaccgtcggccattacagcctcttcctgacccagagcgagaaaggcgaacgggcttttcaaagggaggccttccgaaagagcgtcgcatcaaagagcattaggcgctttttggaagtttttatggaaagccagatgttcgccggcttcatccaggatagagaactgaggaaatgtcgcgctaaaggactgttcgagcagagggtggaacagtatctggaggagcttcctgatacagaacagtcgggcatgaacaagtttttacgaggcctcggcaacaaaatgaagtttctccacaagaaaaattag

SEQ ID NO: 155815 - DNA, 3414 bp, Artificial Sequence
  derived and/or modified sequence
atgaccatgacagccaacaagaacagcagcatcacccatggagctgggggcaccaaggccccccggggcaccctgagccgcagccagagcgtgtccccacctcctgtgctgagccccccaagaagccccatctaccccctgagtgacagcgagaccagcgcctgccgctaccccagccacagcagcagccgggtgctgctgaaggacagacaccccccagcccccagcccccagaacccccaggaccccagcccagacaccagcccccccacctgccccttcaagacagccagctttggctacctggacaggagccccagcgcctgcaagagagatgcccagaaggagagcgtgcagggcgccgcccaggatgtggccggcgtggccgcctgcctgcccctggcccagagcacccccttccctggccctgctgctggcccccggggcgtgctgctgaccaggacaggcacccgggcccacagcctgggcatccgggagaagatcagcgcctgggagggccggcgggaggccagccccaggatgtccatgtgtggggagaagcgggagggcagcggcagcgagtgggccgccagcgagggctgccccagcctgggctgccccagcgtggtgcccagcccctgcagcagcgagaagacctttgacttcaagggcctgcggaggatgagcaggaccttcagcgagtgcagctacccagagacagaggaggagggggaggccctgcctgtgcgggacagcttctaccgcctggagaagaggctgggccgctctgagcccagcgccttcctgcggggccacggcagcaggaaggagagcagcgctgtgctgagccgcatccagaagattgagcaggtgctgaaggagcagcccggccggggcctgccccagctgcccagcagctgctacagcgtggaccggggcaagaggaagacaggcaccctgggcagcctggaggagcctgctggaggagcctctgtgtctgctggcagcagagctgtgggcgtggccggcgtggccggggaggccggccccccacctgagcgggagggcagcggcagcaccaagccaggcaccccaggcaacagccccagcagccagaggctgcccagcaagagcagcctggaccctgctgtgaaccctgtgcccaagcccaagaggacctttgaatatgaggccgacaagaaccccaagagcaagcccagcaatggcctgccccccagccccaccccagctgcccccccacccctgcccagcaccccagcccctcctgtgacccggcggcccaagaaggacatgaggggccacaggaagagccagagcaggaagagctttgaatttgaagatgccagcagcctgcagagcctgtaccccagcagccccacagaaaatggaacagagaaccagcccaagtttggcagcaagagcaccctggaggagaatgcctatgaagatattgtgggggacctgcccaaggagaacccctatgaagatgtggacctgaagagcagaagagctggcaggaagagccagcagctgtctgagaacagcctggacagcctgcacaggatgtggagcccccaggacaggaagtacaacagcccccccacccagctgagcctgaagcccaacagccagagcctgcggagcggcaactggagcgagaggaagagccaccggctgccccggctgcccaagaggcacagccatgatgacatgctgctgctggcccagctgagcctgcccagcagccccagcagcctgaatgaagacagcctgagcaccaccagcgagctgctgagcagccggcgggcccggcgcatccccaagctggtgcagaggatcaacagcatctacaatgccaagaggggcaagaagaggctgaagaagctgtccatgagcagcattgaaacagccagcctgagagatgaaaattctgagagcgagagtgacagtgatgaccgcttcaaggcccacacccagaggctggtgcacatccagagcatgctgaagagggcccccagctaccgcaccctggagctggagctgctggagtggcaggagcgggagctgtttgagtactttgtggtggtgtccctgaagaagaagcccagcaggaacacctacctgcctgaggtgtcctaccagttccccaagctggaccggcccaccaagcagatgagggaggccgaggagcggctgaaggccatcccccagttctgcttcccagatgccaaggactggctgcctgtgtctgagtacagcagcgagaccttctccttcatgctgactggagaagatggcagcagaagatttggctactgccggcggctgctgcccagcggcaagggcccccggctgcctgaggtgtactgtgtgatcagccggctgggctgcttcggcctcttcagcaaggtgctggatgaggtggagcggcggcggggcatctctgctgccctggtgtaccccttcatgaggagcctgatggagagccccttccctgcccctgggaagaccatcaaggtgaagaccttcctgcccggggctggaaatgaggtgctggagctgcggcggcccatggacagccggctggagcacgtggactttgaatgtctcttcacctgcctgtctgtgcggcagctgatccgcatctttgccagcctgctgctggagaggagggtcatctttgtggccgacaagctgagcaccctgagcagctgcagccatgctgtggtggccctgctgtaccccttctcctggcagcacaccttcatccctgtgctgcctgcctccatgattgacatcgtgtgctgccccacccccttcctggtgggcctgctgagcagcagcctgcccaagctgaaggagctgcctgtggaggaggccctgatggtgaacctgggcagtgaccgcttcatccggcagatggatgatgaggacaccctgctgcccaggaagctgcaggccgccctggagcaggccctggagaggaagaatgagctgatcagccaggacagcgacagcgacagtgatgatgagtgcaacaccctgaatggcctggtgtctgaggtgttcatccgcttctttgtggagaccgtgggccactacagcctcttcctgacccagagcgagaagggggagcgggccttccagcgggaggccttcaggaagtctgtggccagcaagagcatccgccgcttcctggaggtgttcatggagagccagatgtttgctggcttcatccaggaccgggagctgaggaaatgtcgggccaagggcctgtttgagcagagggtggagcagtacctggaggagctgcctgacacagagcagagcggcatgaacaagttcctgcggggcctgggcaacaagatgaagttcctgcacaagaagaactag

SEQ ID NO: 155816 - DNA, 1830 bp, Artificial Sequence
  derived and/or modified sequence
atgtggagcccccaggacaggaagtacaacagcccccccacccagctgagcctgaagcccaacagccagagcctgcggagcggcaactggagcgagaggaagagccaccggctgccccggctgcccaagaggcacagccatgatgacatgctgctgctggcccagctgagcctgcccagcagccccagcagcctgaatgaagacagcctgagcaccaccagcgagctgctgagcagccggcgggcccggcgcatccccaagctggtgcagaggatcaacagcatctacaatgccaagaggggcaagaagaggctgaagaagctgtccatgagcagcattgaaacagccagcctgagagatgaaaattctgagagcgagagtgacagtgatgaccgcttcaaggcccacacccagaggctggtgcacatccagagcatgctgaagagggcccccagctaccgcaccctggagctggagctgctggagtggcaggagcgggagctgtttgagtactttgtggtggtgtccctgaagaagaagcccagcaggaacacctacctgcctgaggtgtcctaccagttccccaagctggaccggcccaccaagcagatgagggaggccgaggagcggctgaaggccatcccccagttctgcttcccagatgccaaggactggctgcctgtgtctgagtacagcagcgagaccttctccttcatgctgactggagaagatggcagcagaagatttggctactgccggcggctgctgcccagcggcaagggcccccggctgcctgaggtgtactgtgtgatcagccggctgggctgcttcggcctcttcagcaaggtgctggatgaggtggagcggcggcggggcatctctgctgccctggtgtaccccttcatgaggagcctgatggagagccccttccctgcccctgggaagaccatcaaggtgaagaccttcctgcccggggctggaaatgaggtgctggagctgcggcggcccatggacagccggctggagcacgtggactttgaatgtctcttcacctgcctgtctgtgcggcagctgatccgcatctttgccagcctgctgctggagaggagggtcatctttgtggccgacaagctgagcaccctgagcagctgcagccatgctgtggtggccctgctgtaccccttctcctggcagcacaccttcatccctgtgctgcctgcctccatgattgacatcgtgtgctgccccacccccttcctggtgggcctgctgagcagcagcctgcccaagctgaaggagctgcctgtggaggaggccctgatggtgaacctgggcagtgaccgcttcatccggcagatggatgatgaggacaccctgctgcccaggaagctgcaggccgccctggagcaggccctggagaggaagaatgagctgatcagccaggacagcgacagcgacagtgatgatgagtgcaacaccctgaatggcctggtgtctgaggtgttcatccgcttctttgtggagaccgtgggccactacagcctcttcctgacccagagcgagaagggggagcgggccttccagcgggaggccttcaggaagtctgtggccagcaagagcatccgccgcttcctggaggtgttcatggagagccagatgtttgctggcttcatccaggaccgggagctgaggaaatgtcgggccaagggcctgtttgagcagagggtggagcagtacctggaggagctgcctgacacagagcagagcggcatgaacaagttcctgcggggcctgggcaacaagatgaagttcctgcacaagaagaactag

SEQ ID NO: 155817 - DNA, 3414 bp, Artificial Sequence
  derived and/or modified sequence
atgaccatgaccgccaacaagaacagcagcatcacccacggcgccgggggcacaaaagcccctagagggacattgagtagatctcagagcgtgtctccgccccccgtactatctccaccccgctcccctatataccctctcagcgatagcgagacttccgcctgcaggtatcctagccattccagtagtcgagtcctcttgaaggatcgtcacccaccagcaccttcccctcagaaccctcaggatccatcccccgacacatccccccctacttgcccatttaagactgccagctttggttacttagacagatcgccgtcagcctgcaagcgtgacgctcaaaaggagtccgtgcagggtgctgcccaggatgtggctggtgtggctgcctgtttgccactggctcagtcaaccccgtttcccggcccagcagcagggccacggggcgtcctgctgactaggacagggacacgtgcacactcactggggatacgcgaaaaaatctccgcttgggaaggaagacgggaggcttccccacggatgtctatgtgtggcgagaagcgggaagggtcaggctcggagtgggccgcatctgagggatgtccttctttggggtgtcccagcgtggtcccgagcccctgtagtagtgagaaaacctttgacttcaagggtctgcgcagaatgtcaagaaccttctccgagtgtagctaccctgagaccgaagaagaaggcgaggcgcttcccgtaagagattcattttaccgccttgaaaagagattgggaagaagtgaaccgtcagctttcctgcgtggacatggttccagaaaagaatcttctgctgtgcttagccggatccagaagatcgagcaggtgctgaaagaacagccaggccgtggcctccctcagttgccctcaagctgttattcagtcgaccgaggcaaacgaaaaacaggtacacttggatcattggaggagcccgcgggtggagctagcgtgtccgcggggtcccgagctgtaggcgtcgccggagtggcgggtgaagccgggccacctccagagagagaaggcagtggctccaccaagccaggcacgccaggaaactcacctagcagtcagaggctgccctctaagtcttctctggatccggctgtcaaccctgtgcccaaacctaaaaggacatttgagtatgaggcggacaaaaatcccaagtccaagccctccaatggcttaccgccatcaccgacaccagcagcccctccaccactgccatcaacacccgctccacctgtaaccaggagaccgaagaaagatatgcgcggccatcggaaatctcagtccaggaaaagtttcgaatttgaggacgcctcctctctgcaaagcctgtacccttccagccctactgaaaatgggaccgagaaccaaccaaagttcggatccaaatcaaccctggaagagaacgcttacgaagatatagtaggcgacttaccaaaggagaacccgtacgaggatgtggaccttaaaagccgtagagcaggccggaagagtcagcagctcagcgaaaactccctcgatagtttacatcgcatgtggtcaccccaggaccgcaagtacaacagccctcctactcagctgagcctgaagccaaatagccaaagcctcagatccggcaactggtcggagcgaaaatctcatcgcttaccccgtctgccgaagaggcactcacacgacgatatgttgttgcttgcacaactatcgcttccaagtagcccctcatccctgaatgaagacagcctttcaacaacatccgaacttctttcatccagacgagcccggcgcatccccaagctggttcagcgaatcaactcgatttacaatgccaaaaggggtaagaaacgcttgaaaaaactgtccatgagctcaattgaaactgcctcccttcgcgatgagaacagtgagtccgaatctgatagcgacgatcgctttaaagcccatacccaaaggctggtgcacattcagagcatgctgaaaagggccccctcatataggactctggagctggagctgctcgagtggcaggagcgcgagctgttcgagtacttcgttgtggtgagccttaagaagaagccctcccggaacacctacctgccagaagtgagttatcaattcccaaaacttgaccgacccaccaaacagatgagggaagctgaggagagactgaaggcaattcctcagttctgtttccccgatgccaaggactggcttcctgtgagcgagtactccagtgagaccttttctttcatgttaaccggggaagacggatcacgccggttcggctactgtcgccgtctgctcccatctggcaaaggccctcggttacccgaagtgtactgcgtgatttcgagactgggttgcttcggcctgttcagtaaggtgctcgatgaagtggagaggcggagaggtataagcgccgcccttgtgtaccccttcatgaggtccttgatggaaagccctttcccagcccccggcaaaaccattaaggtgaaaaccttcctaccaggggcaggaaatgaggttctcgagctgcgccggccgatggactccaggctcgagcacgtcgattttgaatgtctgttcacttgcctgtccgtgcggcaactgatcaggatcttcgccagcctgctacttgagcgaagagtgatattcgtcgccgacaagctgtccactctgagcagctgctctcatgcagtcgtggctctcttatatcctttcagttggcagcacacttttatacccgttctgccagcaagtatgatcgacatcgtgtgttgtcccaccccatttttggtcggcctattgagcagctccctccctaaacttaaagagctgccagtggaggaagcactgatggtaaacctcgggtctgataggtttatccgccaaatggacgacgaggatacccttctgccacggaagctccaggccgccctggaacaggccctagagcgcaaaaacgagctcatctctcaagactcagacagcgattcggatgacgaatgcaacaccttgaacggactagtgtcagaggtcttcatcagattcttcgtggagacggtcgggcattatagtttatttttgacacagtccgagaaaggtgagcgtgccttccagcgggaagcctttagaaaaagcgtggcgtccaaatctattcgaaggttcctggaggtgtttatggaatcccagatgttcgccggattcatccaggatagggagctgcgcaagtgcagagccaaggggctgtttgaacaaagggttgagcagtatctagaagaactgccggataccgagcagagcggcatgaacaagttcttgcgggggttgggcaacaaaatgaagtttcttcacaagaaaaactag

SEQ ID NO: 155818 - DNA, 3414 bp, Artificial Sequence
  derived and/or modified sequence
atgaccatgaccgccaacaagaacagcagcatcacccacggcgccggtggaactaaagctccccgcgggacgctgtcgcggagtcagtctgtatccccaccccctgtgcttagtccgccgaggtcccccatttatcccctgtccgattcagagacttctgcttgcagatacccctcacacagtagttcccgtgtcctcctgaaggatcggcacccccctgcgcccagcccccagaaccctcaggacccttcccctgacaccagcccaccaacgtgtccttttaagaccgcatcattcggctacttagacagatccccatctgcatgtaaacgagatgcgcaaaaagagtccgtacagggcgctgcccaggacgtggctggggtggctgcctgcctccctctggctcagagtacaccattcccaggccccgccgccggccctagaggggttttgctgacccggacgggcacccgagcacatagtctgggcattcgcgaaaagataagcgcatgggaggggcgaagggaagcgtctcccaggatgagcatgtgtggggagaaacgggagggctcgggatcagaatgggcagccagtgaggggtgtccatccctcggttgcccttccgttgtacccagcccgtgtagtagtgagaagactttcgattttaaggggctgaggcgtatgtctcgcacattcagcgaatgctcttaccccgagaccgaggaagagggcgaagctctgcctgtccgagatagcttctaccgattggaaaaaaggctcggaaggtccgagccatccgcctttcttaggggccacggatctcgtaaggagagttccgctgtgctgtctagaattcagaaaattgaacaggtgctgaaagagcagcctgggcgcggcctgccgcaactgccttcctcttgctactccgtggatagaggaaagagaaagacaggcacactgggatcactcgaagagcctgctgggggtgcttccgtgagtgctggaagtagagctgtcggggtggctggagtcgcgggcgaggccggcccacctcccgaaagggaaggcagcggcagcactaagcccggtactcctgggaattctccgtccagtcaaaggctaccatctaaaagctcgctggatccggccgtgaaccctgtgcctaaacccaagcgtacattcgagtacgaagcagataaaaaccccaagtccaagcccagtaacggactacctccgtcacctacaccggctgctccaccgccactcccttcaacacccgccccgcccgtgacgcgccgacctaagaaagatatgaggggccacagaaagtcccagtcaagaaaatcttttgaattcgaggacgcatccagtctgcagagcctgtatcctagctcccccacagaaaacggtaccgaaaaccagccaaagttcggaagcaaaagtacattggaggagaatgcttacgaagatatagtgggcgatctgccaaaggagaatccttatgaggatgtcgacttgaagagccgccgggcaggtagaaaaagtcaacagctctccgagaactctttagactctcttcataggatgtggtcccctcaagaccgaaaatacaacagccccccaacacagttgtcattgaaaccaaacagtcagtcccttcggtctggaaactggtcggaaagaaagtcccaccgactgccccgtctgccgaagagacactcacacgacgacatgctgctcttggcacaactgtccctgccttcaagccccagttcactgaacgaagacagtctttcaactactagtgaactactgtcgtcacggagggccaggcgtatccctaaacttgtacagcggattaatagcatctataacgcgaagcggggaaagaaaaggttgaaaaagctatctatgagttccatcgagaccgccagcctgcgagatgagaatagtgagagcgaaagtgactctgatgatcgctttaaggcccacacacagaggttggtgcacatccaaagcatgcttaagagagctcccagctaccgcacgctggaactggaattactggagtggcaagagcgggagctgttcgaatactttgtcgtggtgtccttaaagaaaaaaccatctcgcaacacctacctcccagaggtatcttatcagtttccgaaactagataggccaaccaagcaaatgagggaagctgaagaaagactaaaggccatcccccagttttgcttccctgatgcaaaggactggctgcctgtgtcagaatattcgtctgagacattttcattcatgctgaccggtgaggacggctcccgccgattcggctattgccgtcgacttttgcctagtggcaagggaccaagactgcccgaagtgtactgcgtaatatccagacttggatgtttcggcctcttctccaaggtcctcgatgaggttgaacggagaagggggatttcagctgcccttgtgtatccgtttatgcgttccttaatggagtctccctttcccgccccaggtaaaaccataaaggtcaagacctttctaccaggcgcaggcaatgaggtgctggagctacgcaggcctatggattctagattggagcacgtggacttcgaatgtctgttcacatgcctgagcgttagacagctgatccgtatttttgccagcctgctgttagagcgaagagttatattcgtggccgacaagctgagcaccctctcttcttgcagccacgcggtcgtggccttattgtatcccttctcatggcagcacaccttcatccctgttttacctgctagtatgatagacattgtgtgttgcccgaccccctttctggtcggattgctctccagttcccttcctaagctgaaagagttacccgtcgaagaagcattgatggtcaatctgggaagtgacagatttatcagacagatggatgatgaggatacccttctgccgcgaaaattgcaggcggctttggaacaggccctggaaaggaagaatgagctgatctcccaggactctgactccgactccgacgatgagtgcaacacgctcaatggactggtctcagaggtttttatacgattttttgtggaaaccgtcggccactactcgctgttcttgacccagagtgaaaagggtgaacgcgccttccagcgtgaagcctttcgaaagtctgtcgcttccaagtcaatcaggcgattccttgaggtcttcatggagtcccagatgttcgccgggttcattcaagacagggagctcaggaagtgccgggccaaaggtctgtttgagcaaagagtggaacagtatctggaggagctcccagatacggagcagtcaggaatgaacaaatttttgaggggactggggaataaaatgaagtttctgcacaagaaaaattag

SEQ ID NO: 155819 - DNA, 1830 bp, Artificial Sequence
  derived and/or modified sequence
atgtggagcccccaggaccggaagtacaacagcccccccacccagttgagcctgaaaccaaattctcagtccctgcgaagcggtaattggtccgagcgcaagtcccacagactgccaagactgcctaaaagacactctcatgatgacatgctgcttctggcacagcttagcctgccctcttcaccttcttccttaaacgaagattctctgtcgacaacatctgagctgttgtctagccgtcgtgccagaagaatcccaaagttggtgcagcggataaacagcatttacaacgccaaacgcggaaagaaaagactcaaaaagctgtcaatgagcagcatcgagacagcttctctccgagatgaaaacagtgaatccgaaagcgattcggatgatcgcttcaaggcccacactcagaggctggtccacatacagtctatgctcaagcgggcaccttcatacaggactctcgagcttgagctgttagaatggcaggaaagggagctgtttgagtatttcgttgttgtgagcctgaaaaagaagccctcccgcaatacctacctgcctgaagtctcttatcagttccctaagttggataggcccaccaaacagatgagagaagccgaggaaagactgaaagctattcctcagttttgtttccccgacgcgaaagattggttgcctgtttctgagtactctagtgaaaccttctcatttatgctgacaggggaggatggaagcagaagattcggttactgcagacgattgcttccctccgggaaaggcccccggctgccagaggtttattgcgtgatctcaagactgggttgcttcggtttgttcagtaaggtcctggacgaggtggagcgtcgtaggggcatttccgcggctcttgtttatcctttcatgcgcagccttatggagtctcccttccctgcgcccggaaagacaatcaaggtgaagaccttcctgccaggagcaggcaacgaagtgctggagctacgtcgtcccatggattcccgccttgaacacgttgactttgaatgtctgttcacctgtctgtcagtccgtcaactgatccgcatttttgcttctctcctcctggagcgcagggttatcttcgtagcagataagctgtcgactctctcctcctgcagtcatgccgtggttgcactgctgtatccattctcttggcagcatactttcatccctgtgctgcccgcttccatgatcgacattgtttgctgccctacaccatttttggtgggtctgctttcgtcctcactgccaaagctgaaggagctgcccgtcgaagaggccttgatggtgaatctcggctctgaccgattcatacgacaaatggatgatgaggacacactcctccccagaaagctacaggccgcactagagcaggctctggagaggaagaatgaattaatctcccaagatagcgattcagactccgacgacgaatgcaacacattaaatggccttgtgtccgaggtttttataagattctttgtcgagacagtaggacattactctctcttcctcacacagagcgaaaagggagagagagccttccagcgagaggcattccgaaagagtgtcgcctctaaaagcatcaggcgcttcttggaagtgtttatggagagtcaaatgtttgccgggtttattcaggacagagaattgcgtaagtgccgcgccaagggactcttcgaacagagggtggaacagtaccttgaagaactcccagacacggagcagtccgggatgaacaaattcctgagagggctgggcaacaaaatgaaattcctccacaaaaagaattag

SEQ ID NO: 155820 - DNA, 3414 bp, Artificial Sequence
  derived and/or modified sequence
atgaccatgaccgccaacaagaacagcagcatcacccacggcgccggcggaacaaaagctccccggggaactctttcccggagccaatcagtttcccccccacccgtattgtcgccccctcgctcgccaatctaccctctaagtgattctgaaaccagcgcctgcagatatccgagccacagcagctctcgggtgttgctcaaagaccgacacccccccgcgcccagcccccagaaccctcaagatcccagtccggatacctcaccccccacgtgcccatttaagaccgccagctttgggtacctcgatcgcagcccttcagcgtgtaagagggacgcccagaaggagagtgtgcagggggctgcgcaggatgtcgctggtgtggccgcatgtttacccttagcccagtcaactccattccctggaccagcagccggtccccgcggagtcctcttgaccaggacaggaaccagagcccattccctgggcattcgtgaaaaaatctccgcttgggaggggcgacgggaggcttcacccagaatgtcgatgtgcggtgagaaacgggaagggtctggcagcgagtgggccgcctccgaaggctgccctagtttaggctgcccttcggtggtccccagcccttgcagctccgagaaaacctttgactttaagggccttcgcagaatgtctaggacattctccgagtgcagctaccctgagaccgaagaggagggggaggccttacctgtgcgagactctttttacagactggagaaacgcttgggtcgaagtgaacctagcgcgtttctgcgtgggcacggttcccgcaaagagagcagcgcagtgttgagtaggatccaaaaaatcgagcaggtgcttaaagagcagccggggcggggcttgccgcaactgcccagcagttgctatagcgtcgacagaggtaagcgtaagacaggtaccttagggagtcttgaggaacctgccggtggcgcctccgtgtcagccggcagccgggcagtcggcgtggcaggtgtggcaggcgaagcggggccacctcccgaaagggagggttccggcagtaccaagcccgggactcccggaaatagtccaagctctcaaagactgccgtcaaaaagcagtcttgaccccgctgttaatcccgtcccaaagccgaaacgcacctttgaatatgaagctgacaaaaatcctaaaagcaagcctagcaacggtctgccccctagtccaactcctgcagccccacccccactccccagtactcctgccccacctgtgacccgcagacccaagaaagatatgcgcggacaccgtaagtcccaatccagaaaatctttcgagttcgaggacgcctcttccctgcagagcctgtacccatcttcccccactgagaatggaacagagaatcaacccaaatttggatctaagtccactctggaagaaaatgcgtacgaggatattgttggcgacctgcctaaggaaaacccatatgaagacgtcgacctaaagagccgacgtgctgggagaaaaagtcaacagctcagcgaaaattctctagattcgttgcataggatgtggtcacctcaggacaggaagtataattccccacctactcagttgtctttaaagccaaacagccaatctctgcgatccgggaactggagtgagagaaagtcacaccgcttgccgagattaccaaagaggcatagccacgatgacatgctcctgctcgcccagctgtcccttcctagcagcccctcctcactgaacgaagactcattatctaccacctcagagctcctgtcatctcgccgggccagacgtatccccaaactcgtacagcgaattaactccatatataacgcaaagcggggcaagaaacgtctgaagaaactttcaatgtccagtatcgagaccgccagcctccgcgacgaaaattcggagagtgagtctgacagtgatgacaggtttaaggcgcatactcagagactggttcatatacagagcatgctcaaaagagccccaagctatcggacactggaacttgaactacttgaatggcaggaacgagagctgtttgagtattttgtcgtggtgtctctgaaaaaaaaaccttctcgcaatacctacctgcctgaagtgtcataccagtttccgaagctggacaggccgaccaagcaaatgcgcgaagcagaagagcggctgaaagccattccccagttctgtttccccgacgctaaagattggttaccagtttccgaatattcgtctgagacctttagttttatgcttacaggtgaggacggaagccgccggtttggatactgtagaagactgctgccttcgggtaaagggcctaggctgccagaggtttattgtgttatctccagactaggttgtttcggcctgttcagcaaagtgctagatgaggtggaaaggcgacggggaatcagcgcagcactcgtgtatccatttatgagatcgctcatggaaagccccttccctgctcccggaaagacaatcaaagtaaagacgtttctcccaggcgcggggaatgaggtcctagaactccggcggcctatggattccaggcttgaacacgtggatttcgagtgtttatttacttgcctgagcgtccggcagttgatccggatatttgccagcttactgctcgagaggagggtaattttcgtggctgacaaactgagcaccctttcatcttgctcacatgcagtggttgcgctgctgtacccgtttagctggcaacacacgtttattcctgttctgccagcatccatgatcgatatagtgtgctgccccaccccttttctagtaggcctgctgtccagtagcttaccaaaactgaaggagttacctgtcgaggaagcccttatggtaaacttagggagtgatcgatttattcggcagatggacgatgaggacacgctactcccacggaaactgcaggcagccttggagcaggctctggagcgtaagaatgaactgatctctcaggactccgattccgattcagacgacgaatgtaatacccttaacggcctggtgtctgaagtgtttatacgcttctttgtcgaaactgtgggccactattcgctctttctgacccagtctgagaagggtgagcgggcattccagcgggaggcctttaggaagtccgtcgcatcgaagtccattcgacgtttccttgaagtgtttatggaatcccagatgttcgcaggattcattcaagacagagagctgcgtaagtgcagagctaagggactgtttgagcagcgggttgaacagtacttagaggaactcccagacacagagcaaagtggaatgaacaaattcttgagagggctggggaataagatgaaatttctgcataagaagaattag

SEQ ID NO: 155821 - DNA, 3414 bp, Artificial Sequence
  derived and/or modified sequence
atgactatgaccgctaacaaaaattctagcatcacccatggagctggaggaaccaaggcccctagaggcactttgtcccgttcccagtctgtaagcccaccgccagtcctctcccccccacgcagtcccatctaccccctttcggacagcgagacatcagcttgtagatatcccagtcactcatcttctagggtcctattgaaggaccggcatcctcccgcacctagtcctcagaacccccaagacccatcccccgacacatcccctcccacttgcccattcaaaactgctagtttcggatacctggaccggtctccgagcgcatgcaaaagggatgcacagaaggaatcagtgcagggcgcagcacaggacgtggcgggagttgctgcatgcctgcctctagcgcaaagtactcctttcccaggaccggctgccggtccacgcggtgtactgctgaccagaaccggcactagagcccatagtttggggattcgggaaaagataagcgcctgggaaggaagacgagaggctagtcccagaatgtctatgtgcggggagaaacgggagggctcaggatccgagtgggccgcatccgaggggtgcccctctcttggctgccctagcgtggttccttctccctgttccagtgaaaagacctttgacttcaaaggacttaggcggatgagtcggaccttcagcgagtgctcttaccctgagactgaggaagaaggagaagccttgcccgtcagggattctttctatagactggagaagcggctgggacgctctgagccctcagcattcttaaggggccacggctcccggaaggagtccagcgcagttctgtcgcggatccagaagatagagcaggtcttgaaggaacagccgggacgcggtctgccccagctgccaagttcctgttacagtgtggaccggggaaagcgcaagactgggaccctggggtccttggaagagcctgccggaggcgctagcgtgtcagcgggtagtcgagccgttggtgtggcaggcgtggctggagaagccggtcccccacctgagcgggagggtagcggttccactaagcccggaacccccggaaatagcccctcctcacagcggcttcctagtaagtctagcctggatccagcagtcaaccctgtgcctaaacccaaaaggacctttgaatacgaagcagataagaaccctaagtccaaaccttctaatgggttacccccttcaccaactccagcagcaccgccaccgctgcccagtactcctgcaccacccgtcaccagacgcccaaaaaaagatatgcgagggcaccgcaagagccagtcacgtaagtcgttcgagtttgaagatgccagcagtctccaaagcctttaccccagctcacccacagaaaacggtacggaaaaccagcccaaattcggcagcaagtccacactagaggaaaacgcctacgaagatattgtgggcgaccttcccaaggaaaacccctacgaggacgtggatctcaagtctcgacgggctggccgtaagtctcaacagcttagcgagaattctcttgactccctccatcggatgtggtctccacaggatcgaaaatacaacagcccaccaacccaactttctctgaaacctaatagccaatcccttaggagcggaaactggagcgaacggaaaagtcaccgactgcccaggctccccaagcgccactcgcatgacgacatgctcctactggctcaactctctctgcccagttccccatctagcctgaacgaggacagtctgtcaactacatccgagctcttgtcgagcagaagggccagaaggattccgaaactggtccagaggatcaactctatttacaacgccaagcgtggtaaaaaacgactaaagaagttgagcatgagctcaattgagaccgccagcttgagagacgagaacagtgaatccgaatccgactcagacgacaggtttaaggcccacacacaaagattagtgcacatacagtcaatgttgaagcgagccccttcataccgaactctggagctggagctgcttgaatggcaggagagagaactttttgagtacttcgttgtagtgtccctcaaaaaaaagccctcacgaaatacgtatcttccagaagtaagttatcaatttcctaagttggacagaccaacgaagcagatgcgcgaagctgaggagcgcctaaaggctattcctcaattctgttttccggatgccaaagactggctgcccgtttccgagtacagctccgagacattttcattcatgttgactggggaggatggcagtagaagatttgggtattgtagacggcttctgccttctgggaagggcccaaggctgccagaggtgtactgtgtcatttcgcgactcggctgtttcggcctgtttagtaaagttctggacgaagtagagagaaggagaggaatttccgcagctcttgtgtaccctttcatgagatctttgatggagagtccttttcccgctcccggtaaaaccattaaggtcaagactttccttcccggtgcaggaaatgaggttctggaattgagacgtcctatggacagcaggttggagcatgtcgactttgaatgcctttttacctgcctgagtgtgagacagcttattaggatctttgcatcactgctcttggagcgcagagtcatctttgttgccgataagcttagcacactaagttcttgtagccacgcggttgtggccttactgtatccattctcttggcagcataccttcattccagtgctgcctgcctctatgattgatatagtttgctgccccacccccttcctggtcgggttgttgagtagtagtctgccaaagttgaaagagctgccagtcgaagaagcattgatggtcaaccttggaagcgaccgatttataagacagatggacgacgaggatactctgctcccgagaaaattacaggccgctctggagcaggctctggagcggaaaaacgagctgatatcccaggacagcgactccgatagcgatgacgaatgcaacaccctcaatggcctggtcagtgaggtgtttattcgctttttcgttgaaaccgtggggcactacagcttattcctcacacagagtgagaaaggcgagcgcgctttccagcgtgaagcatttagaaaatcagtggcctcgaaaagcatccgccgatttttagaagtttttatggagagccagatgtttgccggtttcattcaggaccgtgaattgcgcaagtgtcgcgctaaggggctctttgagcaacgagtcgagcagtacctggaagagctccccgacaccgagcaatctgggatgaacaagttcctgcggggactgggaaacaaaatgaagtttttgcacaagaaaaattag

SEQ ID NO: 155822 - DNA, 3414 bp, Artificial Sequence
  derived and/or modified sequence
atgacgatgaccgctaataaaaattcaagcatcacccatggggctgggggtacaaaggcaccaagaggcacactgtcgcgttcgcaatcagtgagtccccctcctgtgttgtcaccgccacgttctcccatctaccctctgtccgactctgaaacttctgcatgccgatacccgagccacagctctagtagggtcctgttaaaggaccggcaccctcctgctccgagtccccagaacccgcaggacccatcacccgacaccagtccgccaacatgtccatttaagaccgcttcttttgggtaccttgaccgaagcccatccgcttgtaagcgggatgcgcagaaagaatccgtacagggagccgcacaggacgtggctggcgtagccgcatgtttacccttggcccagtctactccatttcccggtccagccgcagggccacgaggcgttctcctgacgcggactggaacacgcgcacatagtctgggcatacgcgaaaaaattagcgcttgggaggggagaagagaggcttcccccaggatgtcgatgtgtggtgaaaagcgagaggggagtggcagcgagtgggccgcttccgaaggctgcccgagtctcggatgtcctagtgtggtgccttctccctgctcttcagagaagacatttgacttcaaaggactgagacgtatgtccagaacctttagcgagtgtagttacccggaaacagaggaggagggcgaagccctgccagtgagagactcgttctatcgtctcgaaaaaagacttggccgatccgaaccctccgcttttctgcgtggccacggtagccgtaaggaatcttcagcggtcctatctcggatccagaaaatcgaacaggtgcttaaggagcagcctggtcgcggactgccacagctcccatcttcttgttactccgtggatcggggaaagagaaagaccggcaccctgggttctttagaagaaccggcaggcggagcctctgtctccgccggaagccgagccgtgggcgtggccggagtcgctggcgaagccggtccacccccagaaagggagggttcgggttccactaaacccggaacccctgggaattcaccgtcatcccagaggttgccgtctaagtcatcactggacccagccgtgaatcccgtgccaaagccgaagagaactttcgaatacgaggcagacaaaaacccaaaatcaaagccgtccaatggacttcccccttctcccaccccagccgcaccaccgccacttccctcaacacccgctccaccagtgacgcgacggccaaagaaggacatgagaggccataggaaatcacagagccggaagagttttgagtttgaagatgcctcttcactccaatctttgtacccaagctctccaactgagaatggcacagaaaaccaacctaaattcggcagtaagtcgacactggaggaaaacgcctacgaggatatcgtaggcgacctgccaaaggaaaatccctacgaggacgtggatctcaagtccaggcgagctggacgaaaatcccagcaactatctgagaactcgttggacagcctgcaccggatgtggtcaccccaggatcgaaagtacaattctccccctactcagttgtccctgaagcctaattcgcagagcctgagatcagggaattggtccgaacgcaagtctcatcggctccctaggctcccgaaacggcattcacacgatgacatgttgttgctcgcccagttatcccttcccagctccccctcttccctgaatgaagattcactgtcaacaacgagcgagctgttgtctagtagaagggcgaggcgcatcccaaagttagtacagcggatcaactcaatttataatgccaagcgaggtaaaaaacggctcaagaaactctctatgtcttctattgaaactgctagcctgagggatgagaattctgagagcgagtccgacagcgacgatcgtttcaaagcacacacgcagcgcctggtccatatccagtctatgttgaagcgcgctcccagttatcgtaccctggaactcgaacttctagagtggcaggagagagagttatttgagtattttgtggttgtgagccttaagaagaaaccctcccgaaacacttatctgcctgaggtctcttatcagtttccaaagctagatcgtcccaccaagcaaatgagagaggcggaagagagactgaaggccattccacagttttgcttcccagacgccaaagactggctgcctgtgagcgagtactcctccgagaccttttcctttatgctgacaggagaggacggctctcggaggttcggttattgccgtcggctgctgcctagcggcaagggaccccgtttgccggaagtgtactgcgtgattagcaggctcggctgtttcggcttgttttctaaggttctcgacgaagtggaacgccgacggggaatcagcgccgcactggtttaccctttcatgagatcgttgatggaatctccgttcccagccccagggaagactattaaggtcaagacatttcttcctggcgctgggaacgaggtgctggaattacggaggcccatggacagtagactggagcacgtggatttcgaatgcttgttcacgtgcctgtctgtgagacagctgatacggatttttgccagtttactgcttgagcggagggtcatcttcgtcgctgataagttatctacactctcttcttgctcacatgccgtggtcgcactgttgtacccattcagctggcagcacaccttcatccctgtgctgcccgcttccatgatcgatattgtgtgctgtccaactcccttcctggtaggtcttctttcgtccagcctgcctaagttaaaagaattaccggttgaggaagcactcatggttaatttggggtcagacagatttatccgccagatggacgatgaggatacgctccttccacggaagctgcaggcagcactcgagcaagccctggagcgtaaaaatgaactcatttctcaggattcagacagcgacagtgacgatgaatgcaacaccttaaacggcttggtgtctgaagtgttcattcgcttttttgtggagacagttggccactactccctatttctcacccagtctgaaaagggggaaagggcttttcaacgggaagccttcagaaaatcagttgcctccaagtctattagacgttttctggaggtatttatggagtcccaaatgttcgccggatttattcaggacagagagctgcgcaagtgccgagccaaggggctcttcgagcagagagtggagcaatatctcgaagagctgcccgatacagagcagtcaggcatgaacaagtttttgagaggactggggaacaagatgaagtttctgcataaaaagaattag

SEQ ID NO: 155823 - DNA, 1830 bp, Artificial Sequence
  derived and/or modified sequence
atgtggagcccacaggatcggaaatataattctccccctacacaactttccctgaagcccaatagccagagccttcgctcagggaattggtccgagaggaaaagtcatcgactccccaggctgccgaaacggcacagtcacgacgacatgttgctgctggcgcagctgtccctccctagcagtccaagttccctaaatgaggactctctatccactacctctgagctgttgtcctcccggcgtgcccgtaggattcccaagctggtccagcgtattaatagcatatacaacgctaaaaggggcaagaagaggctcaaaaagcttagcatgtccagtattgaaacagcaagcctgagggatgaaaacagcgagtccgagtctgactcggacgatcgtttcaaagcccacacccaaagattagtacacattcaaagcatgctgaagcgagccccttcttaccgcacgctggagctggagctgcttgagtggcaagagagggagttgttcgagtacttcgtggtggtgagcttgaagaaaaagcccagcagaaacacttatctccccgaggttagctaccagttcccgaaattggataggccaacaaagcaaatgcgcgaagctgaggagagacttaaggctataccccagttctgtttcccagatgcgaaagactggctgcctgttagcgaatactcctcagagacgtttagcttcatgctcactggcgaggacgggtcccggaggtttgggtattgcagacgactactcccatccggtaaagggcctaggctgcctgaggtctattgtgtgatctctcgtctgggctgtttcggtcttttttccaaagtgctggacgaagtagaacgtcggagaggtattagcgccgctctggtttatcctttcatgcgcagcctcatggaatcccctttccctgcacccggaaagacaataaaggtgaagacctttcttcccggagctggcaacgaagtgctcgagctgaggcggcctatggatagcaggttagagcatgtcgacttcgaatgtctattcacctgcctgtcagtccggcaactaattcgcatcttcgcgtctctgttattggagcggagagtgatattcgtggcagacaagctgagcactctttcctcctgcagccacgccgtagtcgccctgttataccctttcagctggcaacacacattcatacctgtcctgcccgcatccatgattgatatcgtgtgctgtccaactccatttcttgtcggcctcctatcaagttctctccccaagctaaaagaactccctgttgaagaggcactcatggtgaatctggggagcgacaggtttattagacagatggatgatgaggacaccctattgcctcggaagctgcaggccgctttggaacaagccttggaacggaagaacgagctgataagccaggattccgatagcgattctgacgatgagtgcaataccctgaatggcctggtctccgaagtgtttatccgcttctttgtggagactgtggggcactactccctgtttctcacacagagcgagaaaggcgagcgggcatttcagagggaagcctttagaaagtctgtcgcaagtaaaagcattcgccgatttttggaggtcttcatggaatctcagatgtttgccggatttatccaggatagggaactcagaaagtgcagggctaagggacttttcgagcagcgcgtagaacagtacctcgaggagctgccagacaccgagcaatccgggatgaataagtttctgcgagggttgggtaacaaaatgaagttccttcacaagaagaactag

SEQ ID NO: 155824 - DNA, 3414 bp, Artificial Sequence
  derived and/or modified sequence
atgactatgacagctaacaagaactcctctataactcacggggcaggaggcaccaaggcccctaggggaactctatctaggagccagagcgttagccctccaccggttctgtcaccacccaggtcccccatatatcctttgagcgactccgagacgtcagcatgcaggtacccttcacactcaagttcacgggtgttgctcaaggatagacaccctcccgctcctagcccacaaaatccacaggatccttctcccgatacttctcctccgacttgccccttcaagactgccagctttggatacctggatagaagccccagtgcatgtaaacgcgacgcacagaaggagtcggtacaaggagctgcacaagatgtggccggtgttgcggcatgtctacctttggcacagtccactccctttcccggaccagcagctggaccgaggggggtgctgttaacacggactggcacgcgagcccactccctgggtataagagaaaaaatttcagcctgggaaggacgacgcgaggcctccccacgcatgtcgatgtgtggagagaaaagagaaggctccggatcggaatgggcagcgagtgaaggttgtccgagcctgggttgtccctctgtcgttccctctccctgcagcagtgaaaaaacttttgacttcaaagggctgaggcgaatgagtagaacatttagcgagtgttcttatcccgaaacagaagaagaaggagaggctttacccgtaagagactccttctaccggttggagaagcgactgggcaggagtgagccatcagcctttttgagaggacacggtagccgcaaagagtcctccgccgtgctgtctcgcatccagaaaatcgagcaggttttaaaagaacagcccggacgaggcctcccccagctacctagttcctgttattctgttgatcggggtaagcgaaaaacgggcacgctcggttctttggaagaacccgctggtggcgcatccgtatcggccggtagccgagctgtgggcgtagctggagtggcaggcgaggctgggccaccacccgaacgcgaaggttccggatctaccaagccaggcacaccaggaaattcgcccagtagccagcgtctgccttctaaatcctctctggaccccgcagtgaaccccgtgcctaaacccaaacggacttttgaatacgaagctgacaagaatcctaagtcaaagccttccaacgggctgccccctagccccacccccgcagccccaccccctctaccctccacaccagctcctcccgtcacaaggagacccaaaaaagacatgcgaggccatagaaagtcgcaatctcgtaagtctttcgagttcgaggacgccagctctttgcagagtctctacccctctagtcccacggagaatggaaccgaaaatcagccaaagtttggttccaagagcaccttagaagagaatgcgtatgaagacatcgtgggggaccttcctaaggaaaacccttatgaggacgtggatctcaagtcccgcagggccggtagaaaatctcaacagctaagcgagaactcgctagacagtttgcatcgcatgtggtcccctcaggatcggaagtataactcaccacctacacagctttcattgaaacccaattctcaatccctgagatccggaaactggtcggagcgcaagtcccataggctccctcgtctacccaagaggcattcccacgacgacatgctcttactggcacagctctccctgccatcgagcccaagctcgctcaatgaggactctctctccaccactagcgaactgctctcctcccggcgtgctagaaggatcccgaagctggtacagcgcataaactctatttataacgctaaacggggtaagaagagactcaagaagctttctatgtctagcatcgaaacagcttcactgagggatgagaactctgaaagcgagagcgattccgacgatcgcttcaaagcccacactcagcgcctggtgcacattcaatccatgctcaaaagagcccctagctatcggaccctcgagcttgagctgttggagtggcaagagcgcgagttatttgaatacttcgtggtggtgtccctcaagaagaagccctcccgtaacacctaccttccagaggtgagttaccagttcccaaagctggaccggcctactaagcagatgcgggaagctgaggagcgcctgaaggccattccacagttctgctttcccgatgccaaagattggctacctgtctcagaatacagctcggaaacgttctcatttatgttgaccggcgaagacggcagccgacgcttcggctattgtcgacggttgctcccatcagggaaggggccaagactccctgaagtttattgcgtcatctcccgactggggtgttttggcctgttctccaaggtccttgatgaggtcgagcggaggaggggaatttctgccgcacttgtgtacccttttatgcgatccctcatggaaagtccttttccagcccctggcaagaccattaaagtaaaaacctttctacccggtgcaggaaatgaggtactggagctgaggaggccaatggacagtcgcctagagcacgtggatttcgagtgtcttttcacttgcctgtctgtacgacagctaatccggatctttgcatcgctcctgctcgagcgtagagtaatattcgtcgctgataaattaagcaccctgagttcatgttcgcatgcagtcgtggcgctgctgtatccgttttcctggcagcataccttcatcccagtcctgccggctagtatgatcgatattgtgtgctgtcctaccccctttctggtaggactcctcagctccagtttacccaaactgaaggaactgcctgtcgaagaagccttgatggtgaatctgggcagtgacaggttcatccgccagatggatgacgaagacacgctactcccacgtaagctgcaggctgccctggagcaagccttagagaggaaaaacgagctgatctctcaggacagcgacagcgacagtgacgatgaatgtaatactctgaacggtctcgtcagcgaggtcttcattcggttttttgtcgagacagtgggacactactccctgttccttacccagtccgagaagggagagcgtgccttccagcgcgaggccttccgcaagagtgtggccagtaagtctatccggagattcttggaagtgtttatggagtctcagatgttcgccggtttcatccaagacagggaattacggaagtgcagggccaaaggcctattcgaacagcgcgtggagcaatatctggaggagcttccagatacggaacagagcgggatgaacaagttccttcggggactgggtaacaagatgaagttcctccataagaaaaattag

SEQ ID NO: 155825 - DNA, 3396 bp, Artificial Sequence
  derived and/or modified sequence
ttctgcctgcttcctgaggagtggggtctgagttcctctggggcgtaaggcacattcagacatctgtagaacaagtgtgggactcagtggcacccaggctcaatcctgctgctgagcagaggtgctggagtgagtcctgctctgcagcaggaaaatagggaaaggggtgcagagagggctgtgttctgagttccccagggacctgttcaccccacggattctgccaccaggattgagctaggactgacccggcccatggtgttactctattttagaaaatgtgtgtgttggaggggtgggggcaggagatacagcttgtggaaaggagtgccactcaacatcttcaagggcagggattctgttttggacttttctgagattttctggtaatgccaatacaatgcccgctgccagagattttagaactagtcctgagaagcaagaactcccctcacccccaccctttggcccagactccttccaagcctttcacacctcccctgtgtcacagcaggagagtttgttccaaaaggggagtgttgatggttctctttttgctgagatcagcggtagagggaatagacactacagtaggagagtcatcgaacagatcattactgaacacttcctccttgctaatcactgttccgttccgaggttgcctcagtgaacaacacaaaaccctgccctaaaagacttgttgaacggcatcgtaggagatctgcccaaggagaatccatatgaggatgtggacttaaagagccgaagagcaggacgaaaatcccagcaactgtctgagaactccttggactctttgcacaggatgtggagtcctcaggacaggaagtacaacagcccgcccacacagctttccctgaaacccaacagccagtccctgcgcagtgggaactggtcagaaaggaagagccaccggctgccacgattacccaagaggcacagccatgacgacatgctgctgctggctcagctgagtctgccgtcctcaccctccagcctcaatgaagacagcctcagcaccaccagcgagctgctgtccagccgccgggcccgccgcattcccaagcttgtccaaagaattaactccatctacaatgccaagagaggaaagaagagattaaaaaagttgtctatgtccagcattgaaacagcatcactgagagatgaaaacagtgagagcgagagcgactctgatgacaggttcaaagcccacacacagcgcctggtccacatccagtcgatgctgaagcgcgcccccagctatcgcacgctggagctggagctgctggagtggcaggagcgggagctttttgagtactttgtggtggtgtccctcaagaagaagccatcgcgaaacacctacctccccgaagtctcctaccagtttcccaagctggaccgacccaccaagcagatgcgagaggcagaggaaaggctcaaagccattccccagttttgcttccctgatgccaaggactggcttcctgtgtcagagtatagcagtgagaccttttctttcatgctgactggggaagatggcagcagacgctttggctactgcaggcgcttactgccaagtgggaaagggccccggttgccagaggtgtactgtgtcatcagccgccttggctgcttcggcttgttttccaaggtcctagatgaggtggagcgccggcgtgggatctccgctgcattggtctatcctttcatgagaagtctcatggagtcgcccttcccagccccagggaagaccatcaaagtgaagacattcctgccaggtgctggcaatgaggtgttagagctgcggcggcccatggactcaaggctggagcacgtggactttgagtgcctttttacctgcctcagtgtgcgccagctcatccgaatctttgcctcactgctgctggagcgccgggtcatttttgtggcagataagctcagtaccctctccagctgctcccacgcggtggtggccttgctctaccccttctcctggcagcacaccttcattcctgtcctcccggcctccatgattgacatcgtctgctgtcccacccccttcctggttggcctgctctccagctccctccccaaactgaaggagctgcctgtggaggaggcgctgatggtgaatctgggatctgaccgattcatccgacagatggacgacgaagacacgttgttacctaggaagttacaggcagctctggagcaggctctggagaggaagaatgagctgatctcccaggactctgacagcgactccgacgatgaatgtaataccctcaatgggctggtgtcggaggtgtttatccggttctttgtggagaccgttgggcactactccctctttctgacacagagtgagaagggagagagggcctttcagcgagaggccttccgcaaatctgtggcctccaaaagcatccgccgctttcttgaggtttttatggagtctcagatgtttgctggcttcatccaagacagggagctaagaaagtgtcgggcaaagggcctttttgagcagcgagtggagcagtacttagaagaactcccagacactgagcagagtggaatgaataagtttctccgaggtttgggcaacaaaatgaagtttctccacaagaagaattaagcctccttctcagtagcagagtccagtgccttgcagagcctgaagcctggggagaaggcccagcctgggaccctctgggctgctgtggctcctctgcccccacagatcctatcctccaagccagcccacctctgccttcatcatatcccaggatactgtttgtaaataatctgctgtaagctttcttaactgttttttgtaacaagcaaagagaatatggcaaatatttgtatattcccaaggggccgggtgctttcctgtcctgccagagcatggatgaagtttcgctgggtgctcgtgactggccagttttgtgcagctgactgtctcagccaaaccactgatcttccctggaggccttcggcctgcctgcctgcctgaggtccccgctgccagtcccgggccctggagagcagatgctgtcttgttatgtacaggaggaccttttaaaaaaatcaagtttctattttttgctggtagtccgcatacccataccctctgtttttgaaaggcaaaggccaatcagtccccatttgtagcatggcaccagggtcttaggcctagtcctctcattcctcccaccctccgagatggtcagtgtgtcatgggaagcccacccccagctctgccagtgctctctgggcctggctcccagtcagtggtggccacgatgcggtacagggcatccctccttcccatctacgggtgttctcaataaacaatgtacagttgtttgggcccag

SEQ ID NO: 155826 - protein, 851 aa, Artificial Sequence
  derived and/or modified sequence
MAQWEMLQNLDSPFQDQLHQLYSHSLLPVDIRQYLAVWIEDQNWQEAALGSDDSKATMLFFHFLDQLNYECGRCSQDPESLLLQHNLRKFCRDIQPFSQDPTQLAEMIFNLLLEEKRILIQAQRAQLEQGEPVLETPVESQQHEIESRILDLRAMMEKLVKSISQLKDQQDVFCFRYKIQAKGKTPSLDPHQTKEQKILQETLNELDKRRKEVLDASKALLGRLTTLIELLLPKLEEWKAQQQKACIRAPIDHGLEQLETWFTAGAKLLFHLRQLLKELKGLSCLVSYQDDPLTKGVDLRNAQVTELLQRLLHRAFVVETQPCMPQTPHRPLILKTGSKFTVRTRLLVRLQEGNESLTVEVSIDRNPPQLQGFRKFNILTSNQKTLTPEKGQSQGLIWDFGYLTLVEQRSGGSGKGSNKGPLGVTEELHIISFTVKYTYQGLKQELKTDTLPVVIISNMNQLSIAWASVLWFNLLSPNLQNQQFFSNPPKAPWSLLGPALSWQFSSYVGRGLNSDQLSMLRNKLFGQNCRTEDPLLSWADFTKRESPPGKLPFWTWLDKILELVHDHLKDLWNDGRIMGFVSRSQERRLLKKTMSGTFLLRFSESSEGGITCSWVEHQDDDKVLIYSVQPYTKEVLQSLPLTEIIRHYQLLTEENIPENPLRFLYPRIPRDEAFGCYYQEKVNLQERRKYLKHRLIVVSNRQVDELQQPLELKPEPELESLELELGLVPEPELSLDLEPLLKAGLDLGPELESVLESTLEPVIEPTLCMVSQTVPEPDQGPVSQPVPEPDLPCDLRHLNTEPMEIFRNCVKIEEIMPNGDPLLAGQNTVDEVYVSRPSHFYTDGPLMPSDF

SEQ ID NO: 155827 - DNA, 4576 bp, Artificial Sequence
  derived and/or modified sequence
tggcagccagtgtcggggtggcggctgggaatgggggccgctccggacttccgctgccaactacaagggggcgggtccgaggggggttagccgaagttgtaggcggggcgcgaggttctagtacccgagctcatactagggacgggaagtcgcgaccagagccattggagggcgcggggactgcaaccctaatcagagcccaaatggcgcagtgggaaatgctgcagaatcttgacagcccctttcaggatcagctgcaccagctttactcgcacagcctcctgcctgtggacattcgacagtacttggctgtctggattgaagaccagaactggcaggaagctgcacttgggagtgatgattccaaggctaccatgctattcttccacttcttggatcagctgaactatgagtgtggccgttgcagccaggacccagagtccttgttgctgcagcacaatttgcggaaattctgccgggacattcagcccttttcccaggatcctacccagttggctgagatgatctttaacctccttctggaagaaaaaagaattttgatccaggctcagagggcccaattggaacaaggagagccagttctcgaaacacctgtggagagccagcaacatgagattgaatcccggatcctggatttaagggctatgatggagaagctggtaaaatccatcagccaactgaaagaccagcaggatgtcttctgcttccgatataagatccaggccaaagggaagacaccctctctggacccccatcagaccaaagagcagaagattctgcaggaaactctcaatgaactggacaaaaggagaaaggaggtgctggatgcctccaaagcactgctaggccgattaactaccctaatcgagctactgctgccaaagttggaggagtggaaggcccagcagcaaaaagcctgcatcagagctcccattgaccacgggttggaacagctggagacatggttcacagctggagcaaagctgttgtttcacctgaggcagctgctgaaggagctgaagggactgagttgcctggttagctatcaggatgaccctctgaccaaaggggtggacctacgcaacgcccaggtcacagagttgctacagcgtctgctccacagagcctttgtggtagaaacccagccctgcatgccccaaactccccatcgacccctcatcctcaagactggcagcaagttcaccgtccgaacaaggctgctggtgagactccaggaaggcaatgagtcactgactgtggaagtctccattgacaggaatcctcctcaattacaaggcttccggaagttcaacattctgacttcaaaccagaaaactttgacccccgagaaggggcagagtcagggtttgatttgggactttggttacctgactctggtggagcaacgttcaggtggttcaggaaagggcagcaataaggggccactaggtgtgacagaggaactgcacatcatcagcttcacggtcaaatatacctaccagggtctgaagcaggagctgaaaacggacaccctccctgtggtgattatttccaacatgaaccagctctcaattgcctgggcttcagttctctggttcaatttgctcagcccaaaccttcagaaccagcagttcttctccaacccccccaaggccccctggagcttgctgggccctgctctcagttggcagttctcctcctatgttggccgaggcctcaactcagaccagctgagcatgctgagaaacaagctgttcgggcagaactgtaggactgaggatccattattgtcctgggctgacttcactaagcgagagagccctcctggcaagttaccattctggacatggctggacaaaattctggagttggtacatgaccacctgaaggatctctggaatgatggacgcatcatgggctttgtgagtcggagccaggagcgccggctgctgaagaagaccatgtctggcacctttctactgcgcttcagtgaatcgtcagaagggggcattacctgctcctgggtggagcaccaggatgatgacaaggtgctcatctactctgtgcaaccgtacacgaaggaggtgctgcagtcactcccgctgactgaaatcatccgccattaccagttgctcactgaggagaatatacctgaaaacccactgcgcttcctctatccccgaatcccccgggatgaagcttttgggtgctactaccaggagaaagttaatctccaggaacggaggaaatacctgaaacacaggctcattgtggtctctaatagacaggtggatgaactgcaacaaccgctggagcttaagccagagccagagctggagtcattagagctggaactagggctggtgccagagccagagctcagcctggacttagagccactgctgaaggcagggctggatctggggccagagctagagtctgtgctggagtccactctggagcctgtgatagagcccacactatgcatggtatcacaaacagtgccagagccagaccaaggacctgtatcacagccagtgccagagccagatttgccctgtgatctgagacatttgaacactgagccaatggaaatcttcagaaactgtgtaaagattgaagaaatcatgccgaatggtgacccactgttggctggccagaacaccgtggatgaggtttacgtctcccgccccagccacttctacactgatggacccttgatgccttctgacttctaggaaccacatttcctctgttcttttcatatctcttgcccttcctactcctcatagcatgatattgttctccaaggatgggaatcaggcatgtgtcccttccaagctgtgttaactgttcaaactcaggcctgtgtgactccattggggtgagaggtgaaagcataacatgggtacagaggggacaacaatgaatcagaacagatgctgagccataggtctaaataggatcctggaggctgcctgctgtgctgggaggtataggggtcctgggggcaggccagggcagttgacaggtacttggagggctcagggcagtggcttctttccagtatggaaggatttcaacattttaatagttggttaggctaaactggtgcatactggcattggcccttggtggggagcacagacacaggataggactccatttctttcttccattccttcatgtctaggataacttgctttcttctttcctttactcctggctcaagccctgaatttcttcttttcctgcaggggttgagagctttctgccttagcctaccatgtgaaactctaccctgaagaaagggatggataggaagtagacctctttttcttaccagtctcctcccctactctgcccctaagctggctgtacctgttcctcccccataaaatgatcctgccaatctaatgtgagtgtgaagctttgcacactagtttatgctacctagtctccactttctcaatgcttaggagacagatcactcctggaggctggggatggtaggattgctggggatttttttttttttaaacagggtctcactctgttgcccaggctagagtgcaatggtgcaatcacagctcactgcagcctcaacctcctgggttcaagcaatcctcctacctcagcctcctgggtagctagcaccatggcatgcgccaccatgccctattttttttttttaaagacagggtcttgctatattgcccaggctggtcttgaactgggctcaagtgatcctcacgccttggcctcccaaagtgctgggattataggcatgagccactgtgcttggccaggatttttttttttttttttttgagatggagtttctctcttgttgtccaggctggagtgcaatggtgtgatctcggctcactgcaacctccgccttccgggttcaagtgactctcctgcctcagcctccccagtagctgggattacagatctgcaccaccatgcccagctaattttgtatttttagtagagacggggtttctccatgttggtcaggctggtctcgaactcctgacctcaagtgatctgtccacctcggcctcccagagtgctgggattacaggcgtgagccactgttcccagcaggaatttcttttttatagtattggataaagtttggtgtttttacagaggagaagcaatgggtcttagctctttctctattatgttatcatcctcccttttttgtacaatatgttgtttacctgaaaggaaggtttctattcgttggttgtggacctggacaaagtccaagtctgtggaacttaaaaccttgaaggtctgtcataggactctggacaatctcacaccttagctattcccagggaaccccagggggcaactgacattgctccaagatgttctcctgatgtagcttgagatataaaggaaaggccctgcacaggtggctgtttcttgtctgttatgtcagaggaacagtcctgttcagaaaggggctcttctgagcagaaatggctaataaactttgtgctgatctggaaaaaaaaaaaaaaaaaaaaaaaaaaaa

SEQ ID NO: 155828 - DNA, 2556 bp, Artificial Sequence
  derived and/or modified sequence
atggcccagtgggagatgctgcagaacctggacagccccttccaggaccagctgcaccagctgtacagccacagcctgctgcccgtggacatcagacagtacctggccgtgtggatcgaggaccagaactggcaggaggccgccctgggcagcgacgacagcaaggccaccatgctgttcttccacttcctggaccagctgaactacgagtgcggcagatgcagccaggaccccgagagcctgctgctgcagcacaacctgagaaagttctgcagagacatccagcccttcagccaggaccccacccagctggccgagatgatcttcaacctgctgctggaggagaagagaatcctgatccaggcccagagagcccagctggagcagggcgagcccgtgctggagacccccgtggagagccagcagcacgagatcgagagcagaatcctggacctgagagccatgatggagaagctggtgaagagcatcagccagctgaaggaccagcaggacgtgttctgcttcagatacaagatccaggccaagggcaagacccccagcctggacccccaccagaccaaggagcagaagatcctgcaggagaccctgaacgagctggacaagagaagaaaggaggtgctggacgccagcaaggccctgctgggcagactgaccaccctgatcgagctgctgctgcccaagctggaggagtggaaggcccagcagcagaaggcctgcatcagagcccccatcgaccacggcctggagcagctggagacctggttcaccgccggcgccaagctgctgttccacctgagacagctgctgaaggagctgaagggcctgagctgcctggtgagctaccaggacgaccccctgaccaagggcgtggacctgagaaacgcccaggtgaccgagctgctgcagagactgctgcacagagccttcgtggtggagacccagccctgcatgccccagaccccccacagacccctgatcctgaagaccggcagcaagttcaccgtgagaaccagactgctggtgagactgcaggagggcaacgagagcctgaccgtggaggtgagcatcgacagaaaccccccccagctgcagggcttcagaaagttcaacatcctgaccagcaaccagaagaccctgacccccgagaagggccagagccagggcctgatctgggacttcggctacctgaccctggtggagcagagaagcggcggcagcggcaagggcagcaacaagggccccctgggcgtgaccgaggagctgcacatcatcagcttcaccgtgaagtacacctaccagggcctgaagcaggagctgaagaccgacaccctgcccgtggtgatcatcagcaacatgaaccagctgagcatcgcctgggccagcgtgctgtggttcaacctgctgagccccaacctgcagaaccagcagttcttcagcaacccccccaaggccccctggagcctgctgggccccgccctgagctggcagttcagcagctacgtgggcagaggcctgaacagcgaccagctgagcatgctgagaaacaagctgttcggccagaactgcagaaccgaggaccccctgctgagctgggccgacttcaccaagagagagagcccccccggcaagctgcccttctggacctggctggacaagatcctggagctggtgcacgaccacctgaaggacctgtggaacgacggcagaatcatgggcttcgtgagcagaagccaggagagaagactgctgaagaagaccatgagcggcaccttcctgctgagattcagcgagagcagcgagggcggcatcacctgcagctgggtggagcaccaggacgacgacaaggtgctgatctacagcgtgcagccctacaccaaggaggtgctgcagagcctgcccctgaccgagatcatcagacactaccagctgctgaccgaggagaacatccccgagaaccccctgagattcctgtaccccagaatccccagagacgaggccttcggctgctactaccaggagaaggtgaacctgcaggagagaagaaagtacctgaagcacagactgatcgtggtgagcaacagacaggtggacgagctgcagcagcccctggagctgaagcccgagcccgagctggagagcctggagctggagctgggcctggtgcccgagcccgagctgagcctggacctggagcccctgctgaaggccggcctggacctgggccccgagctggagagcgtgctggagagcaccctggagcccgtgatcgagcccaccctgtgcatggtgagccagaccgtgcccgagcccgaccagggccccgtgagccagcccgtgcccgagcccgacctgccctgcgacctgagacacctgaacaccgagcccatggagatcttcagaaactgcgtgaagatcgaggagatcatgcccaacggcgaccccctgctggccggccagaacaccgtggacgaggtgtacgtgagcagacccagccacttctacaccgacggccccctgatgcccagcgacttctag

SEQ ID NO: 155829 - DNA, 2556 bp, Artificial Sequence
  derived and/or modified sequence
atggctcagtgggaaatgctgcaaaatttggatagccctttccaggaccagttacatcaactttactcacattcgctgcttccagtcgacattagacagtacctcgccgtttggattgaagatcagaattggcaggaagccgctctgggatctgacgacagcaaggctaccatgctgttctttcactttctggaccagttgaactacgaatgcggtcgatgctctcaagacccagagtcactgcttttacagcataacctgagaaaattttgcagggatatacagcccttttcacaggatccaacacaattagccgaaatgatatttaacctgctgctggaggaaaagaggattctgatccaggctcagcgagcacaattggagcaaggcgagcccgtccttgagacacctgtcgaatcgcagcagcatgagattgagtcccggattctggacctcagggccatgatggaaaagctggtaaaatcaatcagccagttgaaggatcaacaggacgtgttttgcttccgctataagatacaggccaagggcaagactccctcccttgatcctcaccagaccaaggagcagaaaattctgcaggaaacactcaatgaactggacaagcgaaggaaggaagttttggacgcgtcaaaggcgttgctgggtcgtctaaccacccttatcgagctgctgctgccgaagctggaggagtggaaagcacaacaacagaaagcctgcattcgcgcgccaattgatcacggactcgagcagcttgagacatggtttaccgcgggcgcaaagctgttatttcatttgcgacagctcctgaaggagctcaaggggctgtcttgtcttgtgtcttatcaggacgatccactgaccaagggtgtagatctaaggaatgcccaagtgacagaattgttgcagcgcctgctgcaccgggctttcgtagtggagacgcaaccgtgtatgccacagacgccgcatcgccccctgatccttaagacaggcagcaagttcacagttcggacgaggttgctggttaggctacaggaaggcaacgagtcactgacagttgaggttagcatagatcgcaatccaccgcagcttcaaggtttccggaaattcaatatactgacctccaaccaaaagacactcacccccgaaaaggggcagtcacagggcttgatctgggatttcgggtatctgactcttgtggaacagcgaagtggcggcagtggcaaaggcagtaataagggaccattgggtgtcacagaggagctgcacatcatttccttcactgttaagtatacatatcaagggctgaaacaagagctgaaaaccgacactctccctgttgtgatcatttctaatatgaatcagttatcgatcgcttgggccagtgtgctctggttcaacctgctgtcacctaatctccaaaatcagcaattctttagcaatcctcctaaggctccttggtcgctgttagggccagccctcagttggcagtttagttcatacgtggggcgtgggctaaattctgatcagctgtcaatgctgcgtaataagctgtttggacagaactgcaggacagaagaccccctgctgtcttgggcggattttaccaagagagaatcaccaccaggcaagctacctttctggacctggttggataagattttagagttggttcatgatcatcttaaagatctctggaatgacggcaggattatgggttttgttagccgatcccaagaaagacggttgttaaagaagactatgtcaggcacattccttctccgcttttccgaatcatcagaaggtggtatcacttgttcgtgggttgagcaccaggatgatgacaaggtgcttatttacagtgtccaaccctacaccaaggaagtcttacagtcacttccactgacggaaattatacgccattatcagttgctgaccgaggagaacattcccgaaaatccgctacggttcctatatccgcgcattccacgggatgaggcatttggctgttattaccaggagaaggtgaaccttcaagaacgccgcaagtatttgaaacatcgccttattgtggtgagcaataggcaggttgatgaactccaacaacctcttgagctgaagcctgaaccagagttggagtctctcgagttggagctggggttagtccccgagccagaactaagcttagaccttgaacctctccttaaagccgggttggatctgggtcccgagttggagtcagtcctcgaatcgacactggagcctgttatagaaccgacactatgtatggtatctcagacagtcccagagcccgaccaaggaccggtcagccagcctgtcccagagccagaccttccatgcgatttgaggcacttgaacaccgagcccatggagatttttcgcaattgcgttaaaatagaggaaataatgccaaatggagatccgcttctggccggacaaaacaccgtggacgaagtgtacgtctcgaggcctagccacttttacacagatggaccgctgatgccttcagatttttag

SEQ ID NO: 155830 - DNA, 2556 bp, Artificial Sequence
  derived and/or modified sequence
atggcccagtgggagatgctgcagaacctggacagccccttccaggaccagctgcaccagctgtacagccacagcctgctgcctgtggacatccggcagtacctggccgtgtggattgaggaccagaactggcaggaggccgccctgggcagtgatgacagcaaggccaccatgctgttcttccacttcctggaccagctgaactatgaatgtggccgctgcagccaggaccctgagagcctgctgctgcagcacaacctgaggaagttctgccgggacatccagcccttcagccaggaccccacccagctggccgagatgatcttcaacctgctgctggaggagaagaggatcctgatccaggcccagagggcccagctggagcagggcgagcctgtgctggagacccctgtggagagccagcagcatgaaattgagagccgcatcctggacctgcgggccatgatggagaagctggtgaagagcatcagccagctgaaggaccagcaggatgtgttctgcttccgctacaagatccaggccaagggcaagacccccagcctggacccccaccagaccaaggagcagaagatcctgcaggagaccctgaatgagctggacaagaggaggaaggaggtgctggatgccagcaaggccctgctgggccgcctgaccaccctcatcgagctgctgctgcccaagctggaggagtggaaggcccagcagcagaaggcctgcatccgggcccccatcgaccacggcctggagcagctggagacctggttcaccgctggggccaagctgctcttccacctgcggcagctgctgaaggagctgaagggcctgagctgcctggtgtcctaccaggatgaccccctgaccaagggcgtggacctgagaaatgcccaggtgacagagctgctgcagaggctgctgcaccgggcctttgtggtggagacccagccctgcatgccccagaccccccaccggcccctcatcctgaagacaggcagcaagttcaccgtgaggacccggctgctggtgcggctgcaggagggcaatgaaagcctgactgtggaggtgtccattgacagaaatccaccccagctgcagggcttcaggaagttcaacatcctgaccagcaaccagaagaccctgaccccagagaagggccagagccagggcctcatctgggactttggctacctgaccctggtggagcagaggtctgggggcagcggcaagggcagcaacaagggccccctgggcgtgacagaggagctgcacatcatctccttcaccgtgaagtacacctaccagggcctgaagcaggagctgaagacagacaccctgcctgtggtgatcatcagcaacatgaaccagctgagcatcgcctgggcctctgtgctgtggttcaacctgctgagccccaacctgcagaaccagcagttcttcagcaacccccccaaggccccctggagcctgctgggccctgccctgtcctggcagttcagcagctatgtgggccggggcctgaacagcgaccagctgtccatgctgaggaacaagctgtttggccagaactgcaggacagaggaccccctgctgtcctgggccgacttcaccaagcgggagagccccccaggcaagctgcccttctggacctggctggacaagatcctggagctggtgcatgaccacctgaaggacctgtggaatgatggccgcatcatgggctttgtgagccgcagccaggagcggcggctgctgaagaagaccatgagcggcaccttcctgctgcgcttcagcgagagcagcgagggcggcatcacctgctcctgggtggagcaccaggatgatgacaaggtgctgatctacagcgtgcagccctacaccaaggaggtgctgcagagcctgcccctgacagagatcatccgccactaccagctgctgacagaggagaacatccctgagaaccccctgcgcttcctgtacccccgcatccccagagatgaggccttcggctgctactaccaggagaaggtgaacctgcaggagaggaggaagtacctgaagcacaggctcatcgtggtgagcaaccggcaggtggatgagctgcagcagcccctggagctgaagccagagcctgagctggagagcctggagctggagctgggcctggtgcctgagcctgagctgagcctggacctggagcccctgctgaaggccggcctggacctgggccctgagctggagagcgtgctggagagcaccctggagcctgtgattgagcccaccctgtgcatggtgtcccagacagtgcctgagccagaccagggccctgtgtcccagcctgtgcctgagccagacctgccctgtgacctgcggcacctgaacacagagcccatggagatcttcaggaactgtgtgaagattgaggagatcatgcccaacggggaccccctgctggccggccagaacacagtggatgaggtgtatgtgtcccggcccagccacttctacacagatggccccctgatgcccagcgacttctag

SEQ ID NO: 155831 - DNA, 2556 bp, Artificial Sequence
  derived and/or modified sequence
atggcccagtgggagatgctgcagaacctggacagccccttccaggaccagctccatcagctgtattcacattctctactgccggtggacatacggcagtacttggctgtgtggatagaagaccagaactggcaagaggctgcattgggtagcgatgattccaaggccacaatgctcttctttcatttcctggatcagctaaattatgagtgcggaaggtgctcacaagaccccgaatctctgcttctgcagcataatctgagaaagttttgtagggatatccagccattctcccaggatcctacacagcttgcagagatgatcttcaatctgcttttggaagagaagcggatcctgatccaagcacagagggctcagctggaacaaggagagccggtgctcgaaactccagtagaatcacaacagcacgaaattgagtctaggatcctggatctcagagccatgatggaaaaactggtgaagtccatatcacagctgaaggaccagcaggacgtgttctgctttcgttataagatacaggccaagggtaaaacccctagtctcgatcctcaccagacaaaggaacagaagatcctccaggaaactctcaatgaactagataagcgtcggaaagaagtgcttgacgcatcaaaagcactcctgggccgccttaccactcttattgaacttctgcttcccaagttggaggaatggaaggcacaacaacaaaaagcctgtatccgagctcccatcgaccacggactggaacagctggagacgtggtttacggccggtgccaagctgctgttccacctgcggcagttgctcaaggagctgaagggcctaagctgtcttgtgagctaccaggacgatcccctaacaaaaggggtcgatctaaggaacgcccaggtaaccgagctgctgcagagactcctccaccgagccttcgtggtcgaaacccaaccgtgtatgccacaaaccccacatcggccactcatccttaagacaggctctaaatttacggtgagaactcgcctactcgtccggctccaagaggggaatgaaagtttgaccgtggaggtcagtatcgacaggaacccgccacagctccagggcttccgtaagtttaacattttgacgtccaaccaaaaaacactaacccctgaaaaaggacagagccagggactcatatgggatttcggctatctgaccctggtggaacagcgatcagggggctcaggaaagggatccaacaaggggcccctgggcgtgaccgaggaactacacattataagcttcacagttaaatacacatatcaggggctaaagcaggagctcaagaccgacacccttcccgttgttatcatctctaatatgaatcagctctcaatagcctgggcatctgtcctgtggttcaacctgctgtcgcctaatctgcagaatcagcagttctttagcaacccacccaaagcaccttggagtcttctggggccagctctctcctggcaattctccagttacgtaggacgaggacttaattccgatcaactatcgatgctccggaacaaactcttcggacaaaattgcaggacagaagatccactcttaagctgggcagactttacgaagagggagagcccacctggcaagctgcctttctggacgtggctggataagattctagaactggtgcacgatcaccttaaagacctgtggaacgacgggagaatcatgggtttcgttagccgcagccaggagcggcgcctcctcaaaaagacaatgagtggaacttttctgctgcgattcagcgaaagctcagagggaggcataacctgttcctgggtggagcatcaagacgacgacaaggttttgatctattccgtgcagccgtataccaaggaggtgctgcagagcctcccgctcacggagatcatccgccattatcaactgttgacggaggagaacatccccgaaaatcctctgcggtttctctacccacggattccacgggacgaagcatttggttgttactaccaggagaaagtgaacctacaggagcgcaggaaatatctgaaacacaggctgattgtcgtttcgaacaggcaagtagatgagttgcagcagcctttagagctaaagcccgagcctgagcttgaaagtctggagctcgaactaggcctcgtcccagagcctgagctgagcttggacctggaaccactgttgaaggccggcttagatttgggcccggaactggaatccgttctcgagtctacactggagccagttatcgagccgacactctgcatggtttcccagacagttccggagccagaccaggggccagtcagtcagccagtaccagagccggatctcccctgtgacctcagacacctgaatacagagccaatggaaatttttagaaattgcgtgaagatagaagagatcatgccgaacggcgatccacttcttgccggtcaaaacaccgtggacgaggtttacgtatcccggccatcgcatttctacacggatggccctcttatgccctcagatttctag

SEQ ID NO: 155832 - DNA, 2556 bp, Artificial Sequence
  derived and/or modified sequence
atggcccagtgggaaatgctgcaaaacctagactccccatttcaggatcagctgcaccaactttactcacactccctcctcccagtggacattagacagtacttggccgtatggattgaggaccaaaattggcaggaggccgcattagggagcgacgatagtaaagctaccatgctcttttttcattttctggaccagctgaactatgagtgtggcagatgtagtcaggatcccgaatcattgcttttgcagcacaacctccgcaaattctgcagggatatacagccatttagccaggatcctactcagctggccgagatgatatttaacttactgctggaagagaagcggatcctgattcaggcccagcgggctcagttggaacaaggtgagcccgtgttagaaactccagtggaatctcagcagcatgagattgaaagtcgaatcctggacttgcgggcaatgatggaaaaactagttaagagcatctctcagctcaaagatcagcaagatgtgttttgcttccgatacaagattcaagcaaaggggaagaccccctcgttagatccccaccagaccaaggagcagaagatcctccaggagaccctcaacgaactagacaaacgacgcaaggaggtcttagacgcttccaaggctctattggggagactgaccactctcattgaactcttgctccctaaacttgaggagtggaaagctcagcagcagaaggcttgcattcgggctccaatcgaccacggcctagaacagctcgaaacatggttcaccgccggagctaagctgctgtttcaccttcgacagcttctcaaggaactgaagggtttgtcatgcctagtgagctaccaggatgatccccttaccaagggtgttgatctgcgcaacgctcaagtgaccgagttactgcagagacttctgcacagagccttcgtggtcgaaacacagccatgcatgccccagacacctcatagacccctaatcttgaaaaccggctcgaaatttactgttcggacacgtcttctcgtgcggttgcaggagggcaacgagtccctgaccgttgaagtgtcaatcgaccggaacccaccacagctgcaaggtttccgcaaattcaatatactcaccagtaaccagaagaccctgacccccgaaaagggccagtcacagggcctgatctgggattttggttacttgacactggtcgagcaaaggtcaggcggtagcggtaaggggtcgaataaggggcctctgggcgtcactgaagaacttcatattatatccttcacagtcaaatacacataccagggactgaaacaagaacttaagacagataccctgcccgttgtgatcatctccaacatgaatcagcttagcatcgcttgggcgtccgtcctttggtttaatctactctctcccaatctacagaatcagcaattcttctcgaaccccccaaaagccccatggtctctgctcggccctgccctctcatggcagttttcaagctatgtggggaggggtttgaattctgaccagctgtccatgctccgtaacaagttgttcgggcaaaattgtcggacagaggaccctctgttgtcatgggccgattttacaaagcgagagtcccctcccggaaaactcccattctggacttggctcgataagattttggagctggtgcacgaccacctgaaagacctgtggaacgatgggcgaataatgggattcgtgtcccggtcgcaggaaaggcgtctgcttaagaagacaatgagtgggaccttcctgttgaggttttctgaatcttctgaagggggaataacttgttcttgggtagagcaccaggacgacgacaaggtcctgatctatagcgtgcagccctacacgaaggaggtgctgcaaagcctgcctctgacagagattattaggcactaccagctactgaccgaagaaaacattccagaaaatcccttacgctttctgtatcccagaatccctagggacgaggcctttggctgctattatcaggaaaaggttaacctacaagagcggagaaagtatctgaagcacaggttaatcgttgtttctaaccggcaagttgatgaactgcagcagcctctcgaactgaagcctgaaccagaactcgaaagtctcgaactggaattagggttggtccccgaacctgaactgtctctagatctggaacccctattgaaggccggattggatctgggaccagaactggagagtgtcctcgagagtaccctggagcccgtcattgaaccaaccctttgcatggtatcccaaactgtgcccgagcccgaccagggtccagtaagccagccggttcctgagcccgatttaccatgtgacttacgacaccttaatactgagcctatggaaatttttaggaactgcgtgaagatagaggaaatcatgccaaacggcgatcctctcctcgcagggcagaataccgtagatgaagtgtacgtgagcagacctagtcatttctacaccgatggtccactaatgccatcggatttttag

SEQ ID NO: 155833 - DNA, 3259 bp, Artificial Sequence
  derived and/or modified sequence
actgcaaccctaatcagagcccaaatggcgcagtgggaaatgctgcagaatcttgacagcccctttcaggatcagctgcaccagctttactcgcacagcctcctgcctgtggacattcgacagtacttggctgtctggattgaagaccagaactggcaggaagctgcacttgggagtgatgattccaaggctaccatgctattcttccacttcttggatcagctgaactatgagtgtggccgttgcagccaggacccagagtccttgttgctgcagcacaatttgcggaaattctgccgggacattcagcccttttcccaggatcctacccagttggctgagatgatctttaacctccttctggaagaaaaaagaattttgatccaggctcagagggcccaattggaacaaggagagccagttctcgaaacacctgtggagagccagcaacatgagattgaatcccggatcctggatttaagggctatgatggagaagctggtaaaatccatcagccaactgaaagaccagcaggatgtcttctgcttccgatataagatccaggccaaagggaagacaccctctctggacccccatcagaccaaagagcagaagattctgcaggaaactctcaatgaactggacaaaaggagaaaggaggtgctggatgcctccaaagcactgctaggccgattaactaccctaatcgagctactgctgccaaagttggaggagtggaaggcccagcagcaaaaagcctgcatcagagctcccattgaccacgggttggaacagctggagacatggttcacagctggagcaaagctgttgtttcacctgaggcagctgctgaaggagctgaagggactgagttgcctggttagctatcaggatgaccctctgaccaaaggggtggacctacgcaacgcccaggtcacagagttgctacagcgtctgctccacagagcctttgtggtagaaacccagccctgcatgccccaaactccccatcgacccctcatcctcaagactggcagcaagttcaccgtccgaacaaggctgctggtgagactccaggaaggcaatgagtcactgactgtggaagtctccattgacaggaatcctcctcaattacaaggcttccggaagttcaacattctgacttcaaaccagaaaactttgacccccgagaaggggcagagtcagggtttgatttgggactttggttacctgactctggtggagcaacgttcaggtggttcaggaaagggcagcaataaggggccactaggtgtgacagaggaactgcacatcatcagcttcacggtcaaatatacctaccagggtctgaagcaggagctgaaaacggacaccctccctgtggtgattatttccaacatgaaccagctctcaattgcctgggcttcagttctctggttcaatttgctcagcccaaaccttcagaaccagcagttcttctccaacccccccaaggccccctggagcttgctgggccctgctctcagttggcagttctcctcctatgttggccgaggcctcaactcagaccagctgagcatgctgagaaacaagctgttcgggcagaactgtaggactgaggatccattattgtcctgggctgacttcactaagcgagagagccctcctggcaagttaccattctggacatggctggacaaaattctggagttggtacatgaccacctgaaggatctctggaatgatggacgcatcatgggctttgtgagtcggagccaggagcgccggctgctgaagaagaccatgtctggcacctttctactgcgcttcagtgaatcgtcagaagggggcattacctgctcctgggtggagcaccaggatgatgacaaggtgctcatctactctgtgcaaccgtacacgaaggaggtgctgcagtcactcccgctgactgaaatcatccgccattaccagttgctcactgaggagaatatacctgaaaacccactgcgcttcctctatccccgaatcccccgggatgaagcttttgggtgctactaccaggagaaagttaatctccaggaacggaggaaatacctgaaacacaggctcattgtggtctctaatagacaggtggatgaactgcaacaaccgctggagcttaagccagagccagagctggagtcattagagctggaactagggctggtgccagagccagagctcagcctggacttagagccactgctgaaggcagggctggatctggggccagagctagagtctgtgctggagtccactctggagcctgtgatagagcccacactatgcatggtatcacaaacagtgccagagccagaccaaggacctgtatcacagccagtgccagagccagatttgccctgtgatctgagacatttgaacactgagccaatggaaatcttcagaaactgtgtaaagattgaagaaatcatgccgaatggtgacccactgttggctggccagaacaccgtggatgaggtttacgtctcccgccccagccacttctacactgatggacccttgatgccttctgacttctaggaaccacatttcctctgttcttttcatatctcttgcccttcctactcctcatagcatgatattgttctccaaggatgggaatcaggcatgtgtcccttccaagctgtgttaactgttcaaactcaggcctgtgtgactccattggggtgagaggtgaaagcataacatgggtacagaggggacaacaatgaatcagaacagatgctgagccataggtctaaataggatcctggaggctgcctgctgtgctgggaggtataggggtcctgggggcaggccagggcagttgacaggtacttggagggctcagggcagtggcttctttccagtatggaaggatttcaacattttaatagttggttaggctaaactggtgcatactggcattggcccttggtggggagcacagacacaggataggactccatttctttcttccattccttcatgtctaggataacttgctttcttctttcctttactcctggctcaagccctgaatttcttcttttcctgcaggggttgagagctttctgccttagcctaccatgtgaaactctaccctgaagaaagggatggataggaagtagacctctttttcttaccagtctcctcccctactctgcccctaagctggctgtacctgttcctcccccataaaatgatcctgccaatctaa

SEQ ID NO: 155834 - protein, 294 aa, Artificial Sequence
  derived and/or modified sequence
MNSELDYYEKFEEVHGILMYKDFVKYWDNVEAFQARPDDLVIATYPKSGTTWVSEIVYMIYKEGDVEKCKEDVIFNRIPFLECRKENLMNGVKQLDEMNSPRIVKTHLPPELLPASFWEKDCKIIYLCRNAKDVAVSFYYFFLMVAGHPNPGSFPEFVEKFMQGQVPYGSWYKHVKSWWEKGKSPRVLFLFYEDLKEDIRKEVIKLIHFLERKPSEELVDRIIHHTSFQEMKNNPSTNYTTLPDEIMNQKLSPFMRKGITGDWKNHFTVALNEKFDKHYEQQMKESTLKFRTEI

SEQ ID NO: 155835 - DNA, 1780 bp, Artificial Sequence
  derived and/or modified sequence
caaatgcagaagtggttctcatctttttttgcagcttaagatctgccttggtatttgaagagatataaactagatcaatttctttcacaggatcaactaaacagtgtaccacaatgaattctgaacttgactattatgaaaagtttgaagaagtccatgggattctaatgtataaagattttgtcaaatattgggataatgtggaagcgttccaggcaagaccagatgatcttgtcattgccacctaccctaaatctggtacaacctgggttagtgaaattgtgtatatgatctataaagagggtgatgtggaaaagtgcaaagaagatgtaatttttaatcgaatacctttcctggaatgcagaaaagaaaacctcatgaatggagtaaaacaattagatgagatgaattctcctagaattgtgaagactcatttgccacctgaacttcttcctgcctcattttgggaaaaggattgtaagataatctatctttgccggaatgcaaaggatgtggctgtttccttttattatttctttctaatggtggctggtcatccaaatcctggatcctttccagagtttgtggagaaattcatgcaaggacaggttccttatggttcctggtataaacatgtaaaatcttggtgggaaaagggaaagagtccacgtgtactatttcttttctacgaagacctgaaagaggatatcagaaaagaggtgataaaattgatacatttcctggaaaggaagccatcagaggagcttgtggacaggattatacatcatacttcgttccaagagatgaagaacaatccatccacaaattacacaacactgccagacgaaattatgaaccagaaattgtcgcccttcatgagaaagggaattacaggagactggaaaaatcactttacagtagccctgaatgaaaaatttgataaacattatgagcagcaaatgaaggaatctacactgaagtttcgaactgagatctaagaaggtctttctttacttaacatatctgatattaaagatttcttttcattattctccactttttcttattttagattgctagaaaagacataatcatggattatgttgacattttctttttaaatttttgtttaactttttttttttttttttgagacagagtctcactctgttgcctaggctggaggacagtggcacaatcatggctgattgcagccttgacctccttgactcaattgatcctcccatctcagcctcccaagtagctaggactacagacatgtgcaaccatgtttggctaatttttttaatgtttttttgtagagatgaggtcttattatattgtccaggctggtcttgaattcctgggctcaagcttcccaagtagctgcaacaacaggcacacaccaccatgctcaactaattttatttctattttttgtatagacaggggcttgctatagtgtccaggctggtctgaaacccttgagctcaagtgatcttcccacaccagcctcccaaaatactgggattacaggcttgagcctccatgcctggcccaggtaacatgtttattgagctgtacatgcatatgagaaataagaaacttttttttcctactatcatctcttaaattttgttttctttttcttttgcttcctcttcttcttttctattttttataaatatcatgcacaactataacctatgggaatgatgtagtaacacagattattcatcttgttagagttgtattaaaaataaacaagcatttcaaatta

SEQ ID NO: 155836 - DNA, 885 bp, Artificial Sequence
  derived and/or modified sequence
atgaattccgaactggactactatgaaaaattcgaggaggttcatggtatcctcatgtacaaggatttcgtcaagtattgggataacgtagaagctttccaggcaagacccgacgacttggtgattgccacctatcccaagagcggtactacctgggtgagtgagattgtttacatgatttacaaggagggagatgtcgaaaaatgcaaagaggatgtgatttttaatcgcattcctttcctggagtgccgcaaggagaatctcatgaacggcgtcaagcaactggatgaaatgaattctcctcgaattgtgaagactcatctgcccccagaactgttgccagcttctttttgggagaaggattgtaaaatcatctatttatgtaggaacgccaaggatgtggcagtctccttttattatttctttctgatggtggccggtcatcctaaccccggatccttccctgagttcgtggagaaatttatgcagggacaggtgccatacgggtcttggtacaaacacgtgaaaagctggtgggagaaagggaagtctccccgagtccttttccttttctatgaagatctgaaggaggacattcgcaaagaagtgattaagttgatccactttctcgaacgaaagcctagtgaagaactcgtcgacaggatcattcatcatacgtcgtttcaagagatgaaaaataaccccagtacaaattacaccacgctcccagatgagataatgaatcagaagttgagtccattcatgcggaagggaataactggagattggaagaatcactttacagtagcccttaacgagaagtttgataagcactacgagcagcagatgaaggaatccacacttaagtttcgcacggaaatatag

SEQ ID NO: 155837 - DNA, 885 bp, Artificial Sequence
  derived and/or modified sequence
atgaacagcgagctggactactacgagaagttcgaggaggtgcacggcatcctgatgtacaaggacttcgtgaagtactgggacaacgtggaggccttccaggccagacccgacgacctggtgatcgccacctaccccaagagcggcaccacctgggtgagcgagatcgtgtacatgatctacaaggagggcgacgtggagaagtgcaaggaggacgtgatcttcaacagaatccccttcctggagtgcagaaaggagaacctgatgaacggcgtgaagcagctggacgagatgaacagccccagaatcgtgaagacccacctgccccccgagctgctgcccgccagcttctgggagaaggactgcaagatcatctacctgtgcagaaacgccaaggacgtggccgtgagcttctactacttcttcctgatggtggccggccaccccaaccccggcagcttccccgagttcgtggagaagttcatgcagggccaggtgccctacggcagctggtacaagcacgtgaagagctggtgggagaagggcaagagccccagagtgctgttcctgttctacgaggacctgaaggaggacatcagaaaggaggtgatcaagctgatccacttcctggagagaaagcccagcgaggagctggtggacagaatcatccaccacaccagcttccaggagatgaagaacaaccccagcaccaactacaccaccctgcccgacgagatcatgaaccagaagctgagccccttcatgagaaagggcatcaccggcgactggaagaaccacttcaccgtggccctgaacgagaagttcgacaagcactacgagcagcagatgaaggagagcaccctgaagttcagaaccgagatctag

SEQ ID NO: 155838 - DNA, 885 bp, Artificial Sequence
  derived and/or modified sequence
atgaattctgaattggattattacgagaagttcgaggaagtccacggtattttgatgtacaaggactttgttaagtattgggataatgtggaggcattccaggccagacccgacgatttagtgatcgcaacttacccaaagagcggcactacatgggtaagtgagattgtgtacatgatatacaaagagggtgatgtggagaaatgcaaagaagacgtgatcttcaaccgtattccatttctcgaatgcagaaaggagaacctgatgaacggcgtgaaacagctggatgagatgaacagcccccgtatcgttaagacccacctgcccccggagctgctccccgcgtcattctgggagaaggattgcaagatcatctacctgtgccgaaatgcaaaggacgtcgcagtttctttttactatttcttcctaatggtcgccggccaccccaatccagggtccttccccgagttcgtcgagaagtttatgcaggggcaggtcccctatggatcttggtataagcatgtcaaatcctggtgggaaaaaggcaaatccccacgcgtactattcctgttttacgaggacttaaaagaagatattcggaaggaggtaattaagctgatccattttctggagagaaagccctccgaggaactggtggatagaattatccaccacacctcttttcaggaaatgaaaaataatcccagcacgaactatacaacactcccggacgaaataatgaatcaaaagctgtcaccattcatgcgcaagggaataactggtgattggaagaatcactttactgtcgctctgaatgagaagtttgacaagcactacgaacaacagatgaaagagagtacactgaagtttcgcactgagatatag

SEQ ID NO: 155839 - DNA, 885 bp, Artificial Sequence
  derived and/or modified sequence
atgaacagcgagctggactactatgagaagtttgaggaggtgcacggcatcctgatgtacaaggactttgtgaagtactgggacaacgtggaggccttccaggcccggccagatgacctggtgattgccacctaccccaagagcggcaccacctgggtgtctgagatcgtgtacatgatctacaaggagggagatgtggagaagtgcaaggaggatgtgatcttcaaccgcatccccttcctggagtgcaggaaggagaacctgatgaatggagtgaagcagctggatgagatgaacagccccagaattgtgaagacccacctgcccccagagctgctgcctgccagcttctgggagaaggactgcaagatcatctacctgtgcagaaatgccaaggatgtggccgtgtccttctactacttcttcctgatggtggccggccaccccaaccctggcagcttccctgagtttgtggagaagttcatgcagggccaggtgccctacggctcctggtacaagcacgtgaagtcctggtgggagaagggcaagagcccccgggtgctcttcctgttctatgaggacctgaaggaggacatcaggaaggaggtgatcaagctgatccacttcctggagaggaagcccagcgaggagctggtggaccgcatcatccaccacaccagcttccaggagatgaagaacaaccccagcaccaactacaccaccctgcctgatgagatcatgaaccagaagctgagccccttcatgaggaagggcatcaccggggactggaagaaccacttcaccgtggccctgaatgagaagtttgacaagcactatgagcagcagatgaaggagagcaccctgaagttcagaacagagatctag

SEQ ID NO: 155840 - DNA, 885 bp, Artificial Sequence
  derived and/or modified sequence
atgaacagcgagctggactactacgagaagttcgaggaggtgcacggaatactgatgtataaggacttcgtgaaatactgggataacgttgaggcttttcaggctcgtcccgacgacttggtgatcgccacatacccaaagagtggtactacgtgggtatcagaaattgtctacatgatttataaggaaggtgatgtcgagaagtgtaaggaggacgtgatttttaacaggatccccttcctcgagtgtcggaaagagaaccttatgaacggcgtaaaacagctcgatgagatgaatagccctcgcattgtaaaaactcatcttcccccggaactgcttcccgcaagtttttgggaaaaagactgtaaaatcatatacctgtgccgcaatgccaaagatgtggccgtttcattctactatttctttctgatggtggcggggcatccaaaccccgggagctttcccgagtttgtagaaaaatttatgcagggccaagttccttatggttcttggtacaagcatgtgaagagttggtgggaaaaagggaaatccccacgtgtgctgtttctgttttatgaggacctgaaggaagatatccgaaaagaagtgatcaagctcatccattttctggaacgcaagcccagcgaggagctagtcgacagaattatacatcacacttcatttcaagagatgaagaataacccctccactaactacaccaccctgccagacgagattatgaatcagaagctgtccccttttatgcgcaagggcataaccggagactggaagaaccactttactgttgcattaaatgaaaagttcgataagcattatgaacagcagatgaaagagtcgacactaaagtttagaaccgagatctag

SEQ ID NO: 155841 - protein, 108 aa, Artificial Sequence
  derived and/or modified sequence
MTRKIFTNTRERWRQQNVNSAFAKLRKLIPTHPPDKKLSKNETLRLAMRYINFLVKVLGEQSLQQTGVAAQGNILGLFPQGPHLPGLEDRTLLENYQVPSPGPSHHIP

SEQ ID NO: 155842 - DNA, 656 bp, Artificial Sequence
  derived and/or modified sequence
ccctgagggccctttctctttccatctcaggaactcaaacatgaccaggaagatcttcacaaataccagggagcggtggaggcagcagaatgtcaacagcgcctttgccaagctgaggaagctcatccccactcaccctccagacaaaaagctgagcaaaaatgaaacgcttcgcctggcaatgaggtatatcaacttcttggtcaaggtcttgggggagcaaagcctgcaacaaacgggagtggctgctcaggggaacattctggggctcttccctcaaggaccccacctgccaggcctggaggacagaactctgcttgagaactaccaggttccttcacctggtccaagccaccacattccttagtgtggctctggctgtcatctcccagggcagcacttgcccagaaatcactgcctgtggacagacttttgcatgttccagagttgacctgatgataactcgtgaagcatgaattctagcttcctgggaggtggctcagagacagctgcagggagctgaaagaagccatgaggaatgtcacttgtgggccgccaccccccagggatgtcaggtagagcggcctacctctgcctattttaaatccaggttctgcataagacttttggagaaaaaattctaaataaaaaaaaaa

SEQ ID NO: 155843 - DNA, 327 bp, Artificial Sequence
  derived and/or modified sequence
atgaccagaaagatcttcaccaacaccagagagagatggagacagcagaacgtgaacagcgccttcgccaagctgagaaagctgatccccacccacccccccgacaagaagctgagcaagaacgagaccctgagactggccatgagatacatcaacttcctggtgaaggtgctgggcgagcagagcctgcagcagaccggcgtggccgcccagggcaacatcctgggcctgttcccccagggcccccacctgcccggcctggaggacagaaccctgctggagaactaccaggtgcccagccccggccccagccaccacatcccctag

SEQ ID NO: 155844 - DNA, 327 bp, Artificial Sequence
  derived and/or modified sequence
atgacaagaaagatcttcaccaacacaagagagcgctggaggcaacagaatgttaactccgctttcgctaagctgaggaaactgatccccacacatcctccggacaagaagctgagtaagaatgagaccctccgcttggcaatgcgatacattaactttctggtcaaggtgcttggggagcaatcactgcaacagactggcgtggcagcccaagggaacattctggggctttttcctcagggacctcatcttcctggactggaagatcggacccttcttgaaaattaccaggtcccatctcccgggccatcccaccacatcccatag

SEQ ID NO: 155845 - DNA, 327 bp, Artificial Sequence
  derived and/or modified sequence
atgaccaggaagatcttcaccaacacccgggagcgctggaggcagcagaatgtgaacagcgcctttgccaagctgaggaagctgatccccacccaccccccagacaagaagctgagcaagaatgagaccctgcggctggccatgagatacatcaacttcctggtgaaggtgctgggggagcagagcctgcagcagacaggagtggccgcccagggcaacatcctgggcctcttcccccagggcccccacctgcccggcctggaggacaggaccctgctggagaactaccaggtgcccagccctggccccagccaccacatcccctag

SEQ ID NO: 155846 - DNA, 327 bp, Artificial Sequence
  derived and/or modified sequence
atgacccggaagatcttcaccaacacccgggagcggtggcggcagcaaaacgtgaactccgcctttgcgaaactgcgtaagctcatccctacccacccaccagacaaaaagttaagcaagaacgagactctaaggcttgctatgcgctatatcaattttctcgtaaaagttctgggcgagcagtctctgcagcagacaggcgttgccgcacagggcaatattcttggactgtttccccagggccctcatcttcctggtctcgaggatagaaccctgctggagaactaccaagtgccgagtccaggcccctcccatcacattccatag

SEQ ID NO: 155847 - DNA, 327 bp, Artificial Sequence
  derived and/or modified sequence
atgacccgaaagatcttcactaacacacgtgaaagatggcggcaacaaaacgtgaactccgcctttgccaagctgaggaagctcatacctacccaccccccagacaagaagctgtccaagaacgagacgctccgtctggccatgcggtacatcaattttctggtaaaggttctcggagagcagagccttcagcagactggcgtggcagcacaaggcaatatcttggggctctttccacaggggcctcacctccccggactggaagacagaaccctgttagaaaactaccaggtcccctcccctggtccctcacaccatatcccgtag

SEQ ID NO: 155848 - DNA, 630 bp, Artificial Sequence
  derived and/or modified sequence
ccctgagggccctttctctttccatctcaggaactcaaacatgaccaggaagatcttcacaaataccagggagcggtggaggcagcagaatgtcaacagcgcctttgccaagctgaggaagctcatccccactcaccctccagacaaaaagctgagcaaaaatgaaacgcttcgcctggcaatgaggtatatcaacttcttggtcaaggtcttgggggagcaaagcctgcaacaaacgggagtggctgctcaggggaacattctggggctcttccctcaaggaccccacctgccaggcctggaggacagaactctgcttgagaactaccaggttccttcacctggtccaagccaccacattccttagtgtggctctggctgtcatctcccagggcagcacttgcccagaaatcactgcctgtggacagacttttgcatgttccagagttgacctgatgataactcgtgaagcatgaattctagcttcctgggaggtggctcagagacagctgcagggagctgaaagaagccatgaggaatgtcacttgtgggccgccaccccccagggatgtcaggtagagcggcctacctctgcctattttaaatccaggttctgcataagacttttgg

SEQ ID NO: 155849 - protein, 2155 aa, Artificial Sequence
  derived and/or modified sequence
MNYSSFLRIWVSFIFALVQHQAQPRELMYPFWQNDTKTPKVDDGSSSEIKLAIPVFFFGVPYRTVYVNNNGVVSFNVLVSQFTPESFPLTDGRAFVAPFWADVHNGIRGEIYYRETMEPAILKRATKDIRKYFKDMATFSATWVFIVTWEEVTFYGGSSTTPVNTFQAVLVSDGSYTFTLFNYYEINWTTGTASGGDPLTGLGGVMAQAGFNGGNLTNFFSLPGSRTPEIVNIQETTNVNVPGRWAFKVDGKEIDPANGCTSRGQFLRRGEVFWDDLNCTVKCRCLDFNNEIYCQEASCSPYEVCEPKGKFFYCSAVETSTCVVFGEPHYHTFDGFLFHFQGSCAYLLARQCLQTSSLPFFSVEAKNEHRRGSAVSWVKELSVEVNGYKILIPKGSYGRVKVNDLVTSLPVTLDLGTVKIYQSGISTAVETDFGLLVTFDGQHYASISVPGSYINSTCGLCGNYNKNPLDDFLRPDGRPAMSVLDLGESWRVYHADWKCDSGCVDNCTQCDAATEALYFGSDYCGFLNKTDGPLWECGTVVDPTAFVHSCVYDLCSVRDNGTLLCQAIQAYALVCQALGIPIGDWRTQTGCVSTVQCPSFSHYSVCTSSCPDTCSDLTASRNCATPCTEGCECNQGFVLSTSQCVPLHKCGCDFDGHYYTMGEFFWATANCTVQCLCEEGGDVYCFNKTCGSGEVCAVEDGYQGCFPKRETVCLLSQNQVLHTFDGASYAFPSEFSYTLLKTCPERPEYLEIDINKKKPDAGPAWLRGLRILVADQEVKIGGIGASEVKLNGQEVELPFFHPSGKLEIYRNKNSTTVESKGVVTVQYSDIGLLYIRLSTTYFNCTGGLCGFYNANASDEFCLPNGKCTDNLAVFLESWTTFEEICNGECGDLLKACNNDSELLKFYRSRSRCGIINDPSNSSFLECHGVVNVTAYYRTCLFRLCQSGGNESELCDSVARYASACKNADVEVGPWRTYDFCPLECPENSHFEECITCTETCETLTLGPICVDSCSEGCQCDEGYALLGSQCVTRSECGCNFEGHQLATNETFWVDLDCQIFCYCSGTDNRVHCETIPCKDDEYCMEEGGLYYCQARTDASCIVSGYGHYLTFDGFPFDFQTSCPLILCTTGSRPSSDSFPKFVVTAKNEDRDPSLALWVKQVDVTVFGYSIVIHRAYKHTVLVNSERLYLPLKLGQGKINIFSFGFHVVVETDFGLKVVYDWKTFLSITVPRSMQNSTYGLCGRYNGNPDDDLEMPMGLLASSVNEFGQSWVKRDTFCQVGCGDRCPSCAKVEGFSKVQQLCSLIPNQNAAFSKCHSKVNPTFFYKNCLFDSCIDGGAVQTACSWLQNYASTCQTQGITVTGWRNYTSCTVTCPPNSHYESCVSVCQPRCAAIRLKSDCSHYCVEGCHCDAGYVLNGKSCILPHSCGCYSDGKYYEPKQLFWNSDCTRRCRCFRRNVIQCDPRQCKSDEECALRNGVRGCFSTKTSYCLAAGGGVFRTFDGAFLRFPANCAFVLSTICQKLPDISFQLIINFDKWSAPNLTIISPVYFYINEEQILINDRNTVKVNGTQVNVPFITGLATKIYSSEGFLVIDTSPDIQIYYNGFNVIKISISERLQNKVCGLCGNFNGDLTDDYVTLRGKPVVSSVVLAQSWKTNGMQKRPLAPSCNELQFSQYAAMCDNVHIQKMQGDGYCLKLTDMKGFFQPCYGLLDPLPFYESCYLDGCYSHKKFQLCGSLAAYGEACRSFGILSTEWIEKENCSGVVEDPCVGADCPNRTCELGNGRELCGCIEPPPYGNNSHDIIDAEVTCKAAQMEVSISKCKLFQLGFEREGVRINDRQCTGIEGEDFISFQINNTKGNCGNIVQSNGTHIMYKNTLWIESANNTGNIITRDRTINVEFSCAYELDIKISLDSVVKPMLSVINLTVPTQEGSFITKMALYKNASYKHPYRQGEVVLTTRDVLYVGVFVVGADATHLILTLNKCYATPTRDSNDKLRYFIIEGGCQNLKDNTIGIEENAVSLTCRFHVTVFKFIGDYDEVHLHCAVSLCDSEKYSCKITCPHNSRIATDYTKEPKEQIISVGPIRRKRLDWCEDNGGCEQICTSRVDGPLCSCVTGTLQEDGKSCRASNSSMELQVWTLLLIMIQISLWHFVYKSGTTS

SEQ ID NO: 155850 - DNA, 6468 bp, Artificial Sequence
  derived and/or modified sequence
atgaactacagcagcttcctgagaatctgggtgagcttcatcttcgccctggtgcagcaccaggcccagcccagagagctgatgtaccccttctggcagaacgacaccaagacccccaaggtggacgacggcagcagcagcgagatcaagctggccatccccgtgttcttcttcggcgtgccctacagaaccgtgtacgtgaacaacaacggcgtggtgagcttcaacgtgctggtgagccagttcacccccgagagcttccccctgaccgacggcagagccttcgtggcccccttctgggccgacgtgcacaacggcatcagaggcgagatctactacagagagaccatggagcccgccatcctgaagagagccaccaaggacatcagaaagtacttcaaggacatggccaccttcagcgccacctgggtgttcatcgtgacctgggaggaggtgaccttctacggcggcagcagcaccacccccgtgaacaccttccaggccgtgctggtgagcgacggcagctacaccttcaccctgttcaactactacgagatcaactggaccaccggcaccgccagcggcggcgaccccctgaccggcctgggcggcgtgatggcccaggccggcttcaacggcggcaacctgaccaacttcttcagcctgcccggcagcagaacccccgagatcgtgaacatccaggagaccaccaacgtgaacgtgcccggcagatgggccttcaaggtggacggcaaggagatcgaccccgccaacggctgcaccagcagaggccagttcctgagaagaggcgaggtgttctgggacgacctgaactgcaccgtgaagtgcagatgcctggacttcaacaacgagatctactgccaggaggccagctgcagcccctacgaggtgtgcgagcccaagggcaagttcttctactgcagcgccgtggagaccagcacctgcgtggtgttcggcgagccccactaccacaccttcgacggcttcctgttccacttccagggcagctgcgcctacctgctggccagacagtgcctgcagaccagcagcctgcccttcttcagcgtggaggccaagaacgagcacagaagaggcagcgccgtgagctgggtgaaggagctgagcgtggaggtgaacggctacaagatcctgatccccaagggcagctacggcagagtgaaggtgaacgacctggtgaccagcctgcccgtgaccctggacctgggcaccgtgaagatctaccagagcggcatcagcaccgccgtggagaccgacttcggcctgctggtgaccttcgacggccagcactacgccagcatcagcgtgcccggcagctacatcaacagcacctgcggcctgtgcggcaactacaacaagaaccccctggacgacttcctgagacccgacggcagacccgccatgagcgtgctggacctgggcgagagctggagagtgtaccacgccgactggaagtgcgacagcggctgcgtggacaactgcacccagtgcgacgccgccaccgaggccctgtacttcggcagcgactactgcggcttcctgaacaagaccgacggccccctgtgggagtgcggcaccgtggtggaccccaccgccttcgtgcacagctgcgtgtacgacctgtgcagcgtgagagacaacggcaccctgctgtgccaggccatccaggcctacgccctggtgtgccaggccctgggcatccccatcggcgactggagaacccagaccggctgcgtgagcaccgtgcagtgccccagcttcagccactacagcgtgtgcaccagcagctgccccgacacctgcagcgacctgaccgccagcagaaactgcgccaccccctgcaccgagggctgcgagtgcaaccagggcttcgtgctgagcaccagccagtgcgtgcccctgcacaagtgcggctgcgacttcgacggccactactacaccatgggcgagttcttctgggccaccgccaactgcaccgtgcagtgcctgtgcgaggagggcggcgacgtgtactgcttcaacaagacctgcggcagcggcgaggtgtgcgccgtggaggacggctaccagggctgcttccccaagagagagaccgtgtgcctgctgagccagaaccaggtgctgcacaccttcgacggcgccagctacgccttccccagcgagttcagctacaccctgctgaagacctgccccgagagacccgagtacctggagatcgacatcaacaagaagaagcccgacgccggccccgcctggctgagaggcctgagaatcctggtggccgaccaggaggtgaagatcggcggcatcggcgccagcgaggtgaagctgaacggccaggaggtggagctgcccttcttccaccccagcggcaagctggagatctacagaaacaagaacagcaccaccgtggagagcaagggcgtggtgaccgtgcagtacagcgacatcggcctgctgtacatcagactgagcaccacctacttcaactgcaccggcggcctgtgcggcttctacaacgccaacgccagcgacgagttctgcctgcccaacggcaagtgcaccgacaacctggccgtgttcctggagagctggaccaccttcgaggagatctgcaacggcgagtgcggcgacctgctgaaggcctgcaacaacgacagcgagctgctgaagttctacagaagcagaagcagatgcggcatcatcaacgaccccagcaacagcagcttcctggagtgccacggcgtggtgaacgtgaccgcctactacagaacctgcctgttcagactgtgccagagcggcggcaacgagagcgagctgtgcgacagcgtggccagatacgccagcgcctgcaagaacgccgacgtggaggtgggcccctggagaacctacgacttctgccccctggagtgccccgagaacagccacttcgaggagtgcatcacctgcaccgagacctgcgagaccctgaccctgggccccatctgcgtggacagctgcagcgagggctgccagtgcgacgagggctacgccctgctgggcagccagtgcgtgaccagaagcgagtgcggctgcaacttcgagggccaccagctggccaccaacgagaccttctgggtggacctggactgccagatcttctgctactgcagcggcaccgacaacagagtgcactgcgagaccatcccctgcaaggacgacgagtactgcatggaggagggcggcctgtactactgccaggccagaaccgacgccagctgcatcgtgagcggctacggccactacctgaccttcgacggcttccccttcgacttccagaccagctgccccctgatcctgtgcaccaccggcagcagacccagcagcgacagcttccccaagttcgtggtgaccgccaagaacgaggacagagaccccagcctggccctgtgggtgaagcaggtggacgtgaccgtgttcggctacagcatcgtgatccacagagcctacaagcacaccgtgctggtgaacagcgagagactgtacctgcccctgaagctgggccagggcaagatcaacatcttcagcttcggcttccacgtggtggtggagaccgacttcggcctgaaggtggtgtacgactggaagaccttcctgagcatcaccgtgcccagaagcatgcagaacagcacctacggcctgtgcggcagatacaacggcaaccccgacgacgacctggagatgcccatgggcctgctggccagcagcgtgaacgagttcggccagagctgggtgaagagagacaccttctgccaggtgggctgcggcgacagatgccccagctgcgccaaggtggagggcttcagcaaggtgcagcagctgtgcagcctgatccccaaccagaacgccgccttcagcaagtgccacagcaaggtgaaccccaccttcttctacaagaactgcctgttcgacagctgcatcgacggcggcgccgtgcagaccgcctgcagctggctgcagaactacgccagcacctgccagacccagggcatcaccgtgaccggctggagaaactacaccagctgcaccgtgacctgcccccccaacagccactacgagagctgcgtgagcgtgtgccagcccagatgcgccgccatcagactgaagagcgactgcagccactactgcgtggagggctgccactgcgacgccggctacgtgctgaacggcaagagctgcatcctgccccacagctgcggctgctacagcgacggcaagtactacgagcccaagcagctgttctggaacagcgactgcaccagaagatgcagatgcttcagaagaaacgtgatccagtgcgaccccagacagtgcaagagcgacgaggagtgcgccctgagaaacggcgtgagaggctgcttcagcaccaagaccagctactgcctggccgccggcggcggcgtgttcagaaccttcgacggcgccttcctgagattccccgccaactgcgccttcgtgctgagcaccatctgccagaagctgcccgacatcagcttccagctgatcatcaacttcgacaagtggagcgcccccaacctgaccatcatcagccccgtgtacttctacatcaacgaggagcagatcctgatcaacgacagaaacaccgtgaaggtgaacggcacccaggtgaacgtgcccttcatcaccggcctggccaccaagatctacagcagcgagggcttcctggtgatcgacaccagccccgacatccagatctactacaacggcttcaacgtgatcaagatcagcatcagcgagagactgcagaacaaggtgtgcggcctgtgcggcaacttcaacggcgacctgaccgacgactacgtgaccctgagaggcaagcccgtggtgagcagcgtggtgctggcccagagctggaagaccaacggcatgcagaagagacccctggcccccagctgcaacgagctgcagttcagccagtacgccgccatgtgcgacaacgtgcacatccagaagatgcagggcgacggctactgcctgaagctgaccgacatgaagggcttcttccagccctgctacggcctgctggaccccctgcccttctacgagagctgctacctggacggctgctacagccacaagaagttccagctgtgcggcagcctggccgcctacggcgaggcctgcagaagcttcggcatcctgagcaccgagtggatcgagaaggagaactgcagcggcgtggtggaggacccctgcgtgggcgccgactgccccaacagaacctgcgagctgggcaacggcagagagctgtgcggctgcatcgagccccccccctacggcaacaacagccacgacatcatcgacgccgaggtgacctgcaaggccgcccagatggaggtgagcatcagcaagtgcaagctgttccagctgggcttcgagagagagggcgtgagaatcaacgacagacagtgcaccggcatcgagggcgaggacttcatcagcttccagatcaacaacaccaagggcaactgcggcaacatcgtgcagagcaacggcacccacatcatgtacaagaacaccctgtggatcgagagcgccaacaacaccggcaacatcatcaccagagacagaaccatcaacgtggagttcagctgcgcctacgagctggacatcaagatcagcctggacagcgtggtgaagcccatgctgagcgtgatcaacctgaccgtgcccacccaggagggcagcttcatcaccaagatggccctgtacaagaacgccagctacaagcacccctacagacagggcgaggtggtgctgaccaccagagacgtgctgtacgtgggcgtgttcgtggtgggcgccgacgccacccacctgatcctgaccctgaacaagtgctacgccacccccaccagagacagcaacgacaagctgagatacttcatcatcgagggcggctgccagaacctgaaggacaacaccatcggcatcgaggagaacgccgtgagcctgacctgcagattccacgtgaccgtgttcaagttcatcggcgactacgacgaggtgcacctgcactgcgccgtgagcctgtgcgacagcgagaagtacagctgcaagatcacctgcccccacaacagcagaatcgccaccgactacaccaaggagcccaaggagcagatcatcagcgtgggccccatcagaagaaagagactggactggtgcgaggacaacggcggctgcgagcagatctgcaccagcagagtggacggccccctgtgcagctgcgtgaccggcaccctgcaggaggacggcaagagctgcagagccagcaacagcagcatggagctgcaggtgtggaccctgctgctgatcatgatccagatcagcctgtggcacttcgtgtacaagagcggcaccaccagctag

SEQ ID NO: 155851 - DNA, 6468 bp, Artificial Sequence
  derived and/or modified sequence
atgaattactctagtttcctccgaatatgggtgtcttttatcttcgcattagtccagcaccaggcccagccacgggagctgatgtatcccttttggcaaaacgacaccaagactcccaaagtggatgatggcagtagcagcgagattaagttagccatccccgtgtttttttttggagtgccatacagaacagtttatgttaacaacaacggggtcgtatccttcaacgttctggtgtcgcagttcacacctgaaagtttcccactcactgatggccgtgctttcgtggctcctttctgggcagacgtgcataacggaatccgaggcgaaatttattacagagagacgatggagccagcgatcctcaagagggcgacgaaggacatacgaaagtattttaaagatatggccacgttctcagccacatgggttttcatcgtaacatgggaggaggtgacgttctacggcggcagctctaccacacctgttaacacctttcaggcggtcctcgttagtgacgggagttacacttttacactgttcaattactatgaaataaactggactaccgggacggccagcggaggagatcccctcacagggctggggggcgtaatggctcaagctggcttcaacggggggaacctgactaacttcttcagtctacccggatccagaacgcctgagattgtgaatatacaggagactactaatgtgaatgtccccggcagatgggcgttcaaagtcgatggcaaagagattgacccagctaacggctgtactagcagaggccagttcctgcgccgcggggaagtcttctgggacgacttaaattgtaccgtcaaatgcagatgtctcgactttaataatgaaatttattgtcaggaggcatcgtgcagcccttacgaggtgtgcgaacctaaaggcaagttcttttactgtagcgctgtagaaactagtacatgtgtggttttcggggaaccccactatcacactttcgatggctttttgttccatttccagggtagttgcgcatatctgctggcaagacagtgcctccagacttcttccttgcctttcttttccgtcgaggcgaaaaacgagcatcgtagaggatcggccgtgtcatgggtgaaggaactatcagttgaggtaaacggctacaagatactgattccaaaaggctcctacggaagggtcaaggtgaatgatctggtgacctccttgccggtgacactcgatctcggcacagtgaaaatttatcagtcaggaatcagtacagctgtggagacagattttggattgctggtgacctttgacggtcagcactacgcctcaataagcgtgcctgggagttacatcaattctacatgcgggctctgcggtaactataataagaatcctctcgatgattttctccgtcccgacggtagaccggccatgagtgtcttggatctcggtgagtcctggcgcgtgtaccacgctgactggaaatgcgattctggctgtgtggataattgcactcagtgcgacgccgctaccgaggccctatatttcggctcggattattgcgggttcctcaataagactgatgggcccctgtgggagtgtggaaccgtggtcgaccctacagcattcgttcacagctgtgtttatgacttgtgttcagtgcgggacaatggcacgctgctctgtcaagccatacaggcctatgctttagtctgtcaggctctggggattccgatcggagattggcggactcaaactggatgtgtgagcaccgtccagtgcccttccttctcccactacagcgtttgcacgtcttcttgtcccgacacctgcagcgatctgacagctagcagaaactgcgcgaccccttgcactgagggatgcgaatgcaaccagggctttgtactctccactagccagtgtgtccccttacacaagtgtggatgcgacttcgatggccattactacactatgggcgagttcttctgggccactgccaactgcacagtgcagtgcctctgtgaggaaggtggtgacgtttactgcttcaacaagacctgcgggtctggggaagtctgcgccgtcgaagatggttaccagggctgcttccctaaacgagagacagtatgcttgctgagtcaaaatcaggtccttcacactttcgacggggcatcgtacgctttcccatcagagtttagttacaccctcctgaagacatgccccgagagaccagaatatctcgagatcgatattaacaaaaaaaagcctgatgctggccctgcctggctcaggggactcagaatacttgtcgcagaccaagaagttaagatcggtggcatcggagctagcgaagtcaaacttaacgggcaagaagtcgagcttccctttttccaccccagcgggaagttggaaatttatcggaataagaattctaccaccgtggaatcaaaaggcgtggttaccgtgcagtacagcgacatcggcctgctctatatccggctgtctaccacgtacttcaattgtaccgggggactctgcggattttataatgcaaatgcaagtgatgagttttgtctgcccaatgggaagtgtacagataacttggctgtctttttagaaagctggacaaccttcgaagagatttgcaatggcgagtgcggagaccttctgaaggcatgtaataacgacagcgaactacttaaattttaccgttccaggtccaggtgtggaatcattaacgacccctccaactcttcattcctggagtgtcacggggtggttaatgtgaccgcttactacaggacttgtctgtttcggctctgtcaaagcggggggaacgagtcagagctgtgtgactcagttgctcgctatgcctccgcttgtaaaaatgccgatgtggaggtcggaccttggaggacttatgatttctgcccccttgaatgccccgagaattcccattttgaggagtgcattacatgcacagaaacttgcgagactttgacactgggcccgatatgcgtcgattcatgctcggaaggctgtcaatgcgacgagggatatgcactgcttggttctcagtgtgttacccggagtgagtgcggctgcaatttcgagggtcaccagctcgcaacgaacgagaccttctgggtagatctggactgccagatattctgctactgctctggtactgataaccgcgtccactgtgaaactattccatgtaaagacgatgaatactgtatggaggagggaggactgtactattgccaggcccgaactgacgcttcatgtatagtgtccggatatggccactacctgacctttgacgggtttccattcgactttcagacctcatgcccactaattctgtgtaccacaggatcaaggccctcctccgacagtttcccaaagtttgttgtcaccgccaaaaacgaggatcgagaccctagtctggcactgtgggtcaagcaggtcgacgtgactgtatttggatactcaattgtgattcaccgcgcttataagcacaccgtgcttgttaatagcgagaggctatacctgccgcttaaactggggcaggggaagattaatatcttttcttttgggttccacgtggtggtggagactgattttggtctaaaggttgtgtacgactggaaaacattcctgtccattacagtgccacgttccatgcagaactccacgtatggactctgcgggagatacaatggcaatcctgacgacgatctggaaatgcccatgggtctgttagcttcttccgtcaatgagtttggacaaagctgggtgaagagagacaccttctgtcaggtcggatgtggagacaggtgtccctcatgcgccaaggtagagggcttctctaaagtccaacagttgtgctctctaatcccaaaccagaacgctgctttttctaagtgtcatagcaaggtgaacccaaccttcttctacaaaaactgtctgtttgatagttgtatcgacggcggggcagtgcagaccgcctgttcctggcttcagaattacgccagcacttgtcaaacccaaggcattaccgtcactgggtggcgcaattacacatcatgtaccgtgacatgtccccccaacagccactacgagagctgtgtgtccgtctgccagccaagatgcgcggcaataaggcttaagtctgactgttctcactactgtgtagaaggctgccattgcgatgcgggttacgtgctcaatggtaaatcatgtatcttaccacattcgtgcggctgttactctgatggaaaatattatgaaccaaagcaactgttctggaatagtgattgtacgagacgttgccggtgcttccgacgcaatgtcattcagtgtgaccctaggcagtgcaagagtgatgaagaatgtgccttacggaacggggtgcgggggtgctttagtactaagaccagttattgcctagcggcaggcggcggggtgtttcgaacctttgacggcgcctttctaagatttcccgctaattgcgcatttgtgctgagcacaatttgccagaaactccccgacattagttttcagcttattatcaattttgataagtggagcgccccaaatttaactattatttctcctgtgtacttctacatcaacgaagaacagattctcattaacgacaggaatactgtcaaagtgaatggcacccaagttaacgttccatttattacagggctcgcaaccaagatatactcttcagaagggttcttggtaatcgacacctctccagacattcaaatttactacaatgggtttaatgtcattaaaattagtattagcgaaagactgcagaataaagtttgcgggctgtgtggcaacttcaatggcgatctgacagacgattatgtaacattgaggggaaaaccggtcgtttcctccgtcgtccttgcgcagtcctggaaaaccaatggaatgcagaaacgccctcttgcccccagctgtaacgaacttcagttttcccagtacgcggctatgtgcgacaacgtgcacatccaaaagatgcagggcgatggatactgtctgaaactcactgacatgaagggctttttccagccctgttacggtttattggacccactgcctttttacgagagctgctatctggacggttgctactcacacaagaaattccagctgtgtggctctttggcagcttacggggaagcctgccggtcattcggtatactgagcaccgagtggatcgaaaaggagaactgtagcggagtggtggaagatccatgcgtgggcgctgactgtcccaaccgcacatgcgaactgggcaatggtcgagagttatgcggctgtatcgaacctcctccctacggtaataactctcacgacataatcgacgccgaggtgacttgcaaagccgctcagatggaggtgagtatctctaagtgcaagctgtttcaactgggcttcgagcgcgagggggtacgtatcaacgatcgacagtgtacagggatcgaaggggaggatttcatctcctttcagatcaataatacaaaaggcaattgcggcaacatagtgcagagcaatggaacccacatcatgtacaaaaatacactttggatagagtctgccaacaacaccggaaacattatcactagagatcgcacaataaacgtggagttcagttgcgcctatgaactcgacatcaagatctccctggattccgtagtgaagcccatgctgtccgtaattaacttgacggtccccacacaggaggggagttttatcaccaagatggcactctataagaacgcctcatataaacacccctacagacagggtgaagttgtccttacgactcgtgacgtgctgtacgtgggggtattcgtagtgggcgcggacgctactcacctcattctcaccctgaataagtgttatgccacgccaactcgcgactccaacgacaaactcaggtacttcattattgaaggtgggtgtcaaaatctcaaagataatactatcgggattgaggagaatgctgtgtctttaacgtgcagatttcatgtgaccgtattcaagtttatcggcgactacgacgaagttcacctgcactgcgccgtttccctgtgcgacagcgaaaagtacagctgtaagattacctgtccccataatagccggatagccaccgattatacaaaagagccaaaagaacaaatcatatctgtcggaccaatcaggaggaagcgtctggactggtgcgaggacaacggcgggtgcgagcaaatctgtacaagtagagtcgatgggccactgtgcagctgcgtgacaggcaccttgcaggaggacgggaagtcatgcagagcatccaattccagcatggagctccaggtttggaccctgcttctcatcatgatccagatcagcttgtggcactttgtctacaagtcggggaccacctcatag

SEQ ID NO: 155852 - DNA, 6468 bp, Artificial Sequence
  derived and/or modified sequence
atgaattatagttccttcctccgcatttgggtgagctttattttcgcactggtgcagcaccaagctcagccccgggagctcatgtatcctttctggcagaatgacactaaaacacctaaagtggacgacggctcaagcagtgagatcaaactcgctattccagtgttctttttcggggttccgtaccgcacagtgtacgtgaacaacaatggcgtcgttagctttaacgtgctggtgtcacagttcacaccagaaagcttccctttaactgatggtcgtgcctttgtggcaccattctgggccgacgtgcataatggaattcggggtgagatctattaccgcgagaccatggagcccgcaattcttaaacgcgcaacaaaggatattcggaaatacttcaaagatatggcgacattttcggcgacctgggtatttatcgttacgtgggaagaagtcacgttctacggaggttcatctaccacccctgttaataccttccaggccgttcttgtgtcggatgggtcctatacgtttaccctgttcaattactatgagatcaattggactacgggaaccgctagcggcggcgacccgcttaccggcctaggaggcgtcatggctcaggcgggcttcaacggcggaaaccttaccaactttttttccttacccggatcccggacaccagagattgttaatattcaggagaccaccaacgtcaacgtccctgggagatgggccttcaaagttgatggtaaggagattgatcccgcaaacggctgtacctcaagggggcagtttttacggcgtggagaggtgttctgggatgacctcaactgtaccgtgaagtgtaggtgcttggacttcaacaacgagatctactgccaggaggcctcttgtagcccatatgaagtgtgcgagcccaagggaaagttcttctactgttctgctgtagaaacgagcacatgcgtggtttttggggagcctcattaccacacctttgacggcttcttgttccattttcagggaagttgcgcttacttacttgcaaggcagtgtctacagactagcagccttccgttcttctcagttgaagctaaaaatgagcacagacgcggctcagcagtctcctgggtgaaggagttgagcgtcgaggttaacggctataagatcctaattcctaaaggctcttacgggcgcgtgaaggtcaacgacctcgtgacctctttgcccgtgacgctggacttaggcactgtgaagatctatcagtctgggatctccaccgccgtcgagactgacttcggattgctggtgaccttcgatggccaacattacgccagcatttctgtcccaggctcctacattaactcaacctgtggtctctgcgggaactacaacaaaaaccctttggacgactttttgcggcctgatggcagaccagccatgagtgtcctggatttgggcgaaagttggcgagtttaccacgccgactggaaatgcgactcagggtgcgtagacaactgcacccagtgcgacgcagcaacagaggccctgtatttcggatcagactattgcggctttcttaacaaaaccgacggcccattatgggagtgcggcaccgtagtcgatcccacagctttcgtccattcttgcgtgtatgatctgtgctccgtacgtgacaatgggactctgctgtgccaagctattcaggcttatgctcttgtgtgccaagccctgggtattcccattggcgactggcgtacccaaactggctgcgtgagcactgtgcaatgtccaagtttctctcactactcggtttgtacgtcctcctgcccagatacatgctcagacctgacagctagtcggaattgtgcaacaccatgcaccgagggttgcgagtgtaaccagggttttgtgctctccactagtcagtgcgtgcctttacacaagtgcgggtgcgatttcgatggccactattacacaatgggcgaatttttctgggccacagcgaactgcacagtccaatgcctgtgcgaggagggcggagatgtgtattgcttcaataaaacttgcggctcaggggaggtgtgcgcagtagaagatggctatcaaggatgtttcccaaagcgcgaaacagtttgtctgctgtcccagaaccaagtcctgcatacattcgatggcgcgtcttatgctttccctagtgaattttcttacaccttactgaagacctgccccgagcgtcccgaatatcttgaaatcgatataaataaaaaaaaacccgacgccggtccagcctggttaaggggactgcgaatcctggtagcagatcaagaggtcaagataggcggcattggggcaagcgaggtgaaactgaacgggcaggaggtcgagttgccctttttccatccttccggtaagctggaaatctatcgcaataagaattcaacaaccgtagagagcaagggtgtcgttaccgtgcagtactccgatatcggcctcctgtacatccggctgagcacaacttactttaattgtacaggagggctgtgcggcttttacaacgccaatgcttctgatgagttttgtttgccaaacggcaaatgcaccgataatctcgctgtgttcctggaaagctggaccactttcgaggaaatatgtaatggagaatgcggcgatcttctaaaagcgtgcaacaacgactctgagctgctcaaattttaccgatccaggtccaggtgcgggattattaacgatccaagtaactcctctttcctcgagtgccacggggtggtaaacgtcactgcctattatcggacatgcctctttaggctttgccagagtgggggcaacgagagcgaactgtgtgattccgtggcaaggtatgcctcggcctgcaagaatgcagatgtggaagtagggccttggagaacctatgatttctgtcccttggaatgtcctgagaactcccatttcgaggagtgtattacctgtaccgaaacatgtgagacactaacattagggccgatctgcgtggacagctgttcagaagggtgtcagtgcgacgagggctacgccttgctgggctcccaatgcgtcacccgttcagagtgcggctgcaattttgaaggtcaccaactcgccaccaacgagacgttctgggttgacctggattgtcaaatcttttgctattgttcagggaccgacaatagagtacattgcgagaccattccttgtaaggacgatgagtattgcatggaggaaggtgggctatactattgccaggccagaaccgatgccagctgtattgtctctggctacggtcactatcttacattcgacgggttcccgtttgatttccaaactagttgtccactgattctctgcaccaccggttcccgaccttcaagtgattcttttcctaagttcgtggtcacagccaaaaatgaggacagagaccctagccttgcgctgtgggtgaaacaagtagatgtaacagtgtttggctatagcatcgttattcacagggcctacaaacacactgtgttggtaaactccgaaagactgtacctacccctgaagcttggtcagggaaagatcaacattttttctttcgggttccatgttgttgtcgagacagattttgggctcaaggtggtgtatgattggaaaactttcctgagtatcaccgtgccaaggtctatgcagaactcgacatatgggctgtgcggtcgatacaatggtaatcccgacgatgatcttgaaatgccaatgggcctgctcgcttcaagcgtgaatgagtttggccagtcatgggttaagagagacactttttgccaggtgggatgcggcgaccgatgcccgagctgcgccaaggtcgaaggcttctctaaggtacagcagctgtgttccttgatcccgaaccagaatgcggccttcagtaaatgccactcaaaagtgaatccaactttcttctacaagaattgcttgtttgattcctgcatcgacggcggcgccgttcagaccgcgtgctcatggttgcagaactacgcctctacatgccagactcagggcattaccgtaacgggctggagaaactatacgtcctgcaccgttacctgtccgccgaacagccactacgagtcatgcgtgtctgtttgccagccccggtgtgccgctatccgtctgaagtccgattgtagtcactactgtgtggaagggtgtcactgcgacgcagggtacgtgttaaatggcaaatcttgcattttaccccattcttgtggctgctatagcgacggaaagtattatgaacctaagcagctcttctggaatagcgactgcaccagacgatgtcgttgcttccggcgcaacgtgatccagtgcgaccctcggcagtgcaaatcagacgaagaatgcgcactccgcaatggtgttcggggctgcttttcaaccaaaacaagctattgtctggctgccggcggcggagtttttcgcacatttgatggggccttcctcagattcccagcaaattgcgcattcgtgttgtcaactatctgtcaaaagcttcccgatattagcttccagctcatcatcaattttgacaagtggtcggcccccaatctaacaataatctctccagtgtatttttatatcaatgaagagcagattctcatcaatgaccgcaatacagtaaaggtgaatggcacacaggttaacgtccctttcataaccggactagccacaaagatatattcatcagagggcttcctggtcattgacacaagccctgacatccagatctattataatggctttaacgtcattaaaatttccatttccgaacgactccaaaataaggtgtgcggtttatgtgggaatttcaacggcgatttgaccgacgattacgtaacgttaaggggcaagcctgtcgtctcgtcggtcgtcctagctcagtcttggaagactaacgggatgcaaaagagaccactggccccatcctgcaatgagctacagtttagtcagtacgctgcaatgtgcgataatgtgcatattcagaaaatgcaaggtgatggctactgtctgaagcttaccgacatgaaaggcttcttccagccctgctatggcctattagatcccttgcctttctacgagagttgctatttagatggctgctacagccataagaagttccagctgtgtgggtcacttgcagcctatggtgaagcgtgtaggagcttcggcattctgagcacagagtggatcgagaaagagaattgctcaggcgtggtcgaggatccatgcgtaggagctgattgtcctaatagaacttgcgagttgggaaatggaagagagctgtgcgggtgtatcgagccacctccctatggcaataattcgcatgacatcatcgacgcagaagtgacctgtaaggccgcgcaaatggaggtgagcatctccaagtgcaaactgttccagctgggtttcgagagagagggtgtaaggattaacgatcgacagtgcacgggcatagagggagaagatttcatttcttttcaaatcaataatacaaaaggcaattgtggtaatatcgtgcagagcaatgggacacacatcatgtataaaaacacactgtggatcgagtctgcaaataatacagggaatattataaccagagacagaacaatcaatgtggaatttagttgtgcttatgagctggatattaagattagtttagacagcgtcgtcaagcctatgctgagtgtcatcaatctgaccgtacctacacaggaagggtcatttatcaccaaaatggctctgtacaaaaatgcctcctacaaacacccttacagacagggagaagtcgttctgaccacaagagacgtcctgtacgttggagtgttcgtggtaggagccgacgcgactcatctgattctgaccctcaataaatgctacgctacaccaacgcgagattccaacgacaagctgagatactttatcatagagggggggtgccagaatctgaaggataacactatcggcattgaggaaaacgcagtgtcgctgacttgtaggtttcatgtgacggtgttcaagtttattggggattacgacgaggttcacctacattgcgccgtctcgctttgtgactctgagaagtacagttgtaagattacatgtccgcataattctaggatcgccacggactataccaaggagccgaaggaacagataatcagtgtcggccctatacgcagaaagaggttggattggtgcgaagataacggaggatgtgaacagatttgcaccagtcgggttgatgggcccctgtgctcctgtgtgaccggcacattgcaggaggacgggaagtcctgtcgggcttccaattcgtccatggagttacaggtctggaccctgctcctgataatgatccagatctctctctggcattttgtgtacaaaagtggcaccacatcatag

SEQ ID NO: 155853 - DNA, 6468 bp, Artificial Sequence
  derived and/or modified sequence
atgaactacagcagcttcctgcgcatctgggtgtccttcatctttgccctggtgcagcaccaggcccagccccgggagctgatgtaccccttctggcagaatgacaccaagacccccaaggtggatgatggcagcagcagcgagatcaagctggccatccctgtgttcttcttcggcgtgccctacagaacagtgtatgtgaacaacaacggggtggtgtccttcaacgtgctggtgtcccagttcaccccagagagcttccccctgacagatggccgggcctttgtggcccccttctgggcagatgtgcacaacggcatccggggggagatctactaccgggagaccatggagcccgccatcctgaagagggccaccaaggacatcaggaagtacttcaaggacatggccaccttcagcgccacctgggtgttcatcgtgacctgggaggaggtgaccttctatggaggcagcagcaccacccctgtgaacaccttccaggccgtgctggtgtctgatggcagctacaccttcaccctcttcaactactatgagatcaactggaccaccggcacagccagcggcggggaccccctgaccggcctgggcggcgtgatggcccaggccggcttcaacggcggcaacctgaccaacttcttcagcctgcccggcagcaggaccccagagatcgtgaacatccaggagaccaccaacgtgaatgtgcccggccgctgggccttcaaggtggatggcaaggagattgatcctgccaacggctgcaccagccggggccagttcctgcggcggggggaggtgttctgggatgacctgaactgcaccgtgaagtgccgctgcctggacttcaacaatgagatctactgccaggaggccagctgcagcccctatgaggtgtgtgagcccaagggcaagttcttctactgcagcgctgtggagaccagcacctgtgtggtgtttggagagccccactaccacacctttgatggcttcctgttccacttccagggcagctgtgcctacctgctggcccggcagtgcctgcagaccagcagcctgcccttcttctctgtggaggccaagaatgagcaccggcggggcagcgctgtgtcctgggtgaaggagctgtctgtggaggtgaatggctacaagatcctgatccccaagggcagctatggccgggtgaaggtgaatgacctggtgaccagcctgcctgtgaccctggacctgggcaccgtgaagatctaccagagcggcatcagcacagctgtggagacagactttggcctgctggtgacctttgatggccagcactacgccagcatctctgtgcccggcagctacatcaacagcacctgtggcctgtgtggcaactacaacaagaaccccctggatgacttcctgcggccagatggccgcccagccatgtctgtgctggacctgggggagagctggagggtgtaccacgccgactggaagtgtgacagcggctgtgtggacaactgcacccagtgtgatgctgccacagaggccctgtactttggaagtgactactgcggcttcctgaacaagacagatggccccctgtgggagtgtggcaccgtggtggaccccacagcctttgtgcacagctgtgtgtatgacctgtgcagcgtgcgggacaatggcaccctgctgtgccaggccatccaggcctatgccctggtgtgccaggccctgggcatccccatcggggactggaggacccagacaggctgtgtgtccacagtgcagtgccccagcttcagccactacagcgtgtgcaccagcagctgcccagacacctgcagcgacctgacagccagcaggaactgtgccaccccctgcacagagggctgtgagtgcaaccagggctttgtgctgagcaccagccagtgtgtgcccctgcacaagtgtggctgtgactttgatggccactactacaccatgggagagttcttctgggccacagccaactgcaccgtgcagtgcctgtgtgaggagggcggagatgtgtactgcttcaacaagacctgtggcagcggggaggtgtgtgctgtggaggatggctaccagggctgcttccccaagcgggagaccgtgtgcctgctgagccagaaccaggtgctgcacacctttgatggagccagctatgccttccccagcgagttctcctacaccctgctgaagacctgcccagagaggcctgagtacctggagattgacatcaacaagaagaagccagatgctggccctgcctggctgcggggcctgcgcatcctggtggccgaccaggaggtgaagattggaggcattggagccagcgaggtgaagctgaatggccaggaggtggagctgcccttcttccaccccagcggcaagctggagatctacagaaacaagaacagcaccaccgtggagagcaagggcgtggtgacagtgcagtacagcgacatcggcctgctgtacatccggctgagcaccacctacttcaactgcacaggaggcctgtgtggcttctacaatgccaatgccagtgatgagttctgcctgcccaacgggaagtgcacagacaacctggccgtgttcctggagagctggaccacctttgaggagatctgcaatggagaatgtggggacctgctgaaggcctgcaacaatgacagcgagctgctgaagttctaccgcagccgcagccgctgtggcatcatcaatgaccccagcaacagcagcttcctggagtgccacggcgtggtgaatgtgacagcctactaccgcacctgcctcttccggctgtgccagagcggcggcaatgaaagtgagctgtgtgacagcgtggcccgctatgccagcgcctgcaagaatgctgatgtggaggtgggcccctggaggacctatgacttctgccccctggagtgcccagagaacagccactttgaggagtgcatcacctgcacagagacctgtgagaccctgaccctgggccccatctgtgtggacagctgcagcgagggctgccagtgtgatgagggctacgccctgctgggcagccagtgtgtgaccaggagtgaatgtggctgcaactttgagggccaccagctggccaccaatgagaccttctgggtggacctggactgccagatcttctgctactgcagcggcacagacaacagagtgcactgtgagaccatcccctgcaaggatgatgagtactgcatggaggagggcggcctgtactactgccaggccaggacagatgccagctgcatcgtgtctggctacggccactacctgacctttgatggcttcccctttgacttccagaccagctgccccctcatcctgtgcaccaccggcagccggcccagcagtgacagcttccccaagtttgtggtgacagccaagaatgaagatcgggaccccagcctggccctgtgggtgaagcaggtggatgtgacagtgtttggctacagcatcgtcatccaccgggcctacaagcacacagtgctggtgaacagcgagcggctgtacctgcccctgaagctgggccagggcaagatcaacatcttctcctttggcttccacgtggtggtggagacagactttggcctgaaggtggtgtatgactggaagaccttcctgagcatcaccgtgcccaggtccatgcagaacagcacctacggcctgtgtggccgctacaatggaaatccagatgatgacctggagatgcccatgggcctgctggccagctctgtgaatgaatttggccagagctgggtgaagagggacaccttctgccaggtgggctgtggggaccgctgccccagctgtgccaaggtggagggcttcagcaaggtgcagcagctgtgcagcctcatccccaaccagaatgctgccttcagcaagtgccacagcaaggtgaaccccaccttcttctacaagaactgcctgtttgacagctgcattgatggcggcgctgtgcagacagcctgctcctggctgcagaactatgccagcacctgccagacccagggcatcaccgtgacaggctggaggaactacaccagctgcaccgtgacctgcccccccaacagccactatgagagctgtgtgtctgtgtgccagccccgctgtgccgccatccggctgaagagtgactgcagccactactgtgtggagggctgccactgtgatgctggctacgtgctgaatggcaagagctgcatcctgccccacagctgtggctgctacagtgatggcaagtactatgagcccaagcagctgttctggaacagcgactgcacccggcgctgccgctgcttcagaagaaatgtcatccagtgtgacccccggcagtgcaagagtgatgaagaatgtgccctgagaaatggagtgcggggctgcttcagcaccaagaccagctactgcctggccgccggcggcggcgtcttccgcacctttgatggagccttcctgcgcttccctgccaactgtgcctttgtgctgagcaccatctgccagaagctgcctgacatctccttccagctgatcatcaactttgacaagtggagcgcccccaacctgaccatcatcagccctgtgtacttctacatcaatgaggagcagatcctgatcaatgacaggaacacagtgaaggtgaatggcacccaggtgaatgtgcccttcatcaccggcctggccaccaagatctacagcagcgagggcttcctggtgattgacaccagcccagacatccagatctactacaacggcttcaacgtcatcaagatcagcatcagcgagcggctgcagaacaaggtgtgtggcctgtgtggcaacttcaacggggacctgacagatgattatgtgaccctgcggggcaagcctgtggtgtcctctgtggtgctggcccagagctggaagaccaacggcatgcagaagaggcccctggcccccagctgcaatgagctgcagttcagccagtatgctgccatgtgtgacaacgtgcacatccagaagatgcagggagatggctactgcctgaagctgacagacatgaagggcttcttccagccctgctacggcctgctggaccccctgcccttctatgagagctgctacctggatggctgctacagccacaagaagttccagctgtgtggcagcctggccgcctatggagaggcctgccgcagctttggcatcctgagcacagagtggattgagaaggagaactgcagcggcgtggtggaggacccctgtgtgggcgctgactgccccaacagaacctgtgagctgggcaatggccgggagctgtgtggctgcatcgagcccccaccctacggcaacaacagccatgacatcattgatgctgaggtgacctgcaaggccgcccagatggaggtgtccatcagcaagtgcaagctgttccagctgggctttgagcgggagggcgtgcgcatcaatgaccggcagtgcaccggcatcgagggggaggacttcatctccttccagatcaacaacaccaagggcaactgtggcaacatcgtgcagagcaatggcacccacatcatgtacaagaacaccctgtggattgagagcgccaacaacacaggcaacatcatcacccgggacaggaccatcaacgtggagttcagctgtgcctatgagctggacatcaagatcagcctggacagcgtggtgaagcccatgctgagcgtcatcaacctgactgtgcccacccaggagggcagcttcatcaccaagatggccctgtacaagaatgccagctacaagcacccctaccggcagggcgaggtggtgctgaccaccagagatgtgctgtatgtgggcgtgtttgtggtgggcgcagatgccacccacctgatcctgaccctgaacaagtgctacgccacccccacccgggacagcaatgacaagctgcgctacttcatcattgaaggaggctgccagaacctgaaggacaacaccatcggcattgaagaaaatgctgtgtccctgacctgccgcttccacgtgacagtgttcaagttcatcggggactatgatgaggtgcacctgcactgtgctgtgtccctgtgtgacagcgagaagtacagctgcaagatcacctgcccccacaacagccgcatcgccacagactacaccaaggagcccaaggagcagatcatctctgtgggccccatccggaggaagaggctggactggtgtgaagataatggaggctgtgagcagatctgcaccagccgggtggatggccccctgtgcagctgtgtgacaggcaccctgcaggaggatggcaagagctgccgggccagcaacagctccatggagctgcaggtgtggaccctgctgctgatcatgatccagatcagcctgtggcactttgtgtacaagagcggcaccaccagctag

SEQ ID NO: 155854 - DNA, 6468 bp, Artificial Sequence
  derived and/or modified sequence
atgaactacagcagcttcctgcggatctgggtgagcttcatcttcgccttggtgcagcaccaggcgcagccacgggagcttatgtatcccttctggcaaaacgacaccaagacaccgaaggttgacgatgggtcctcctctgagataaaactggccatccctgtcttctttttcggagtaccctacagaacagtctacgtaaacaacaacggcgtggtgagttttaatgtgctcgtttcccaattcactcctgagagctttcctcttacagacgggcgggcatttgtggccccattctgggctgacgtgcacaatggtattagaggagaaatatactatcgcgaaactatggagccggcgatattgaaacgcgcaaccaaggatattcgtaagtacttcaaagacatggcaaccttttccgccacatgggttttcatcgtgacctgggaggaggttactttctatggaggcagttccaccactcccgtgaacacgttccaggcagttttagtcagcgatggcagttacactttcacacttttcaactattatgaaatcaactggaccactggcactgccagcggcggtgaccccctcaccgggctgggtggagttatggcacaggcaggcttcaacggaggcaatctgactaacttcttcagtctgcctgggagccggacccccgagatcgtgaacatacaggagactacaaatgttaatgtgcccggacgctgggcttttaaggtggacggaaaagaaatcgatcctgctaacggctgcacaagcaggggccagttcctgcgacgcggcgaagtgttctgggatgatctcaactgtaccgtgaaatgcagatgcctcgacttcaacaacgaaatttattgccaggaggccagctgcagcccatacgaggtgtgtgaaccaaaaggaaagtttttctattgctctgctgtggagaccagcacctgtgttgtttttggtgaaccacattaccacaccttcgacggcttcctgtttcacttccaaggatcctgtgcttacctcctggcgagacagtgtttgcaaacctctagtctgccctttttcagcgttgaggcgaagaacgagcatcggcgcgggagcgctgtgtcatgggtaaaagagctgagtgtagaggtgaacggctataaaatcctaatccccaagggatcgtatggcagagttaaggttaatgatcttgtcacatcccttcctgtgactcttgatttgggaactgtaaagatataccagagcggtatctcaactgccgtggagaccgactttggcctactggtaactttcgatggacaacattatgccagtatctctgtgccgggttcctatattaacagtacgtgtggcctttgtggtaattataataagaaccctctggacgattttctgcgccccgatggtagacccgcaatgtcagtactcgatctgggagaatcatggagagtctatcacgcggactggaaatgcgacagtgggtgcgtggataactgtacacagtgcgacgcagccaccgaggcactgtattttggcagcgattactgtggctttctgaacaagacggacggccctctctgggaatgtggtacagttgtggatcccacagcctttgtccactcttgtgtgtatgacctgtgcagtgtacgggataacggtactttgctgtgccaggccatccaggcatatgcattggtgtgtcaggcattaggcataccaatcggtgactggcggactcagactggttgtgttagtacggttcaatgcccatccttctctcattactcggtgtgcacaagctcctgccctgatacctgctctgatcttactgcaagccgcaattgtgctaccccgtgtaccgaagggtgcgagtgtaaccaggggttcgtgctgagtacaagccaatgcgttcccttgcacaagtgcggctgtgattttgacggacactactacaccatgggcgagttcttttgggccacagcaaattgtaccgtgcagtgtctgtgcgaggagggaggggacgtgtattgctttaataagacatgtggatctggcgaggtgtgtgctgtggaggatggctaccagggctgtttccccaagcgagagacggtctgcttactgagccagaatcaagtcctgcatacatttgatggggcttcgtacgcattcccttctgaattctcttacaccttgctcaagacctgccctgaaagacccgaatacctggagattgatattaacaagaagaagccagatgcgggccctgcgtggctcagagggcttcgtattctagtggccgaccaggaagtgaagatcggaggaatcggggccagcgaagtgaaactgaatggtcaagaggtcgaacttccctttttccacccatccggcaaactcgagatctaccggaataagaacagtacaactgtggagagcaaaggagtagtcactgtgcaatatagtgatattggactcctctacatcagactctctacgacctatttcaactgtacaggcggattgtgcggtttttacaatgcaaacgcatccgatgagttctgcctgccaaacggcaaatgcaccgacaatctcgctgtcttcctcgagagttggacaaccttcgaggaaatttgcaacggagagtgcggcgacctcttgaaggcctgtaacaatgactccgaactgcttaaattctatcggagccgcagccggtgcggcattatcaacgatccatctaattcaagctttcttgaatgtcacggtgtggtaaatgtgaccgcatattatcggacatgcctgtttaggctgtgtcagagtggggggaatgagtccgagctgtgcgacagcgtggccagatatgccagcgcctgtaaaaatgctgatgtggaggtgggcccgtggaggacctatgatttttgtcctctcgagtgtcccgaaaactctcactttgaggagtgcatcacgtgtactgagacctgcgagacccttactctgggcccaatctgtgtggatagttgctcagaaggctgccaatgcgatgaggggtacgccctcctggggtcccaatgcgtgacccgatctgaatgcggatgcaatttcgaaggtcatcagctggccaccaatgaaactttctgggtcgatcttgattgccagattttctgttattgctctggaactgacaatagggttcattgtgagacaatcccctgcaaggatgacgaatactgcatggaagaggggggtttgtactattgccaggccagaacagacgccagctgtatcgtgtccgggtacggacattatctgacctttgacgggttccccttcgattttcagacaagctgtcctctgattctttgcaccacaggcagccgaccctccagtgatagctttccaaaattcgttgtcacggcaaaaaacgaggacagagatccatcgctggcactttgggtcaaacaggtcgatgtaaccgtgttcggctatagcatcgtaattcatagggcatataaacatacagtgttagtcaactccgaaaggctttatctgccactgaagttgggtcaaggtaagattaacattttttcctttgggttccatgttgtcgtcgaaactgacttcggcctgaaggtggtgtacgattggaagaccttcttaagcattacggtgccgcggtctatgcaaaattcaacttatggtctttgtggccgatacaatggcaatcctgacgatgatttggaaatgccgatgggcctgttggcctcttctgtcaatgagttcggacaaagttgggtcaagcgtgacaccttctgtcaggtggggtgcggggaccgttgtccctcatgcgccaaggtggagggcttttctaaagtccagcagctgtgctctctgataccaaaccagaacgctgcattcagcaagtgtcacagcaaagtgaatccaacctttttctacaaaaactgtctgttcgactcttgtatcgatggaggcgcagtccaaaccgcttgtagctggctacagaattatgccagtacctgtcagacccagggcatcactgtgacgggctggcgcaactatacgtcctgcacagtgacctgcccccccaactcccactatgagtcatgtgttagtgtctgccagccccgctgcgccgccattagattgaagtctgattgctcccattactgcgtcgaaggctgtcactgtgacgccgggtacgtcctcaacggtaagtcttgtatcctgccacacagctgcggatgctactccgacgggaagtactatgagccaaagcagttgttttggaatagcgactgtactagaagatgtcgttgtttccggcgcaatgtgatacaatgcgacccgcggcagtgtaaatcagatgaagagtgcgcactaagaaacggggtgcgcggttgtttctccaccaaaacatcatactgcctggcagccggcggaggtgttttccggactttcgatggtgctttcctgaggttcccagccaactgtgcctttgtcctctccaccatctgccagaagttgcctgatatctcctttcagctcatcatcaactttgataagtggagtgctccaaatctcacaatcatctcccctgtttatttctacataaatgaggagcagattctgataaacgaccggaacacggtgaaagtcaatggcactcaggtcaacgtgccattcatcacaggcctggctaccaaaatatattcatccgagggcttccttgtaatcgatacaagccctgatatccagatatactataatggctttaatgttatcaagatatccataagcgagcgtttgcagaacaaggtttgcggtttgtgtggcaacttcaatggggaccttaccgatgactacgtgactctacgtggaaaacctgtggtgagtagcgttgtgctggcccagagttggaaaaccaatggtatgcagaagcggcctcttgcacctagctgtaacgaactccagtttagccagtacgccgcgatgtgtgataatgtgcacatccagaagatgcagggggacggctactgcctgaagttaactgatatgaaggggttcttccaaccctgttacggactgcttgatcctttacccttctatgaatcttgttatctagacgggtgttacagtcacaaaaaatttcagctctgcggttccctagctgcctatggagaagcctgtaggagctttggcattctgtctactgaatggattgagaaagagaattgtagcggagtcgtggaagacccttgcgtgggggccgactgccccaatcggacatgcgaactcggcaacggaagagaactgtgcggatgcatagaaccgccaccttacggcaataacagccatgatatcattgatgcagaagttacctgcaaagcggcacagatggaggtctccatcagtaaatgcaaactttttcagcttggttttgaacgtgagggagtgcgcattaatgacagacaatgcacagggatcgaaggtgaggactttatttcttttcagatcaataatacaaagggcaactgcggaaatatcgttcaatccaatggaacgcacattatgtacaagaacaccctctggatcgagagtgccaataacaccggaaacatcattacccgagatcgaacaataaatgttgaattctcttgcgcctacgagctggacattaaaatttcgcttgatagcgtcgttaagcccatgctgagcgtcatcaacttaaccgttcctacccaggaaggcagttttatcacaaaaatggccctgtataagaacgcaagttataaacatccataccgtcagggagaggtcgtattgacaactcgggacgtgctatatgtcggagtgtttgtcgtaggggctgacgccacgcacctcatactcacacttaataaatgctacgctaccccaacacgtgattccaacgacaaactgcgttattttataattgaaggcggctgtcagaacttgaaagataatacaatcggaattgaagagaatgcggtcagcttgacatgtaggtttcacgtgaccgttttcaaattcattggggactatgacgaggtccacctccactgcgccgtgagcttatgtgattccgaaaaatactcctgcaaaatcacgtgtccacataatagtcggattgcaaccgattacactaaagaacccaaagagcagatcattagcgtaggaccgattcggagaaaacgccttgactggtgcgaggacaacggcggatgcgaacagatttgtacatctcgcgttgatggacccttatgcagctgtgtgacaggaacactgcaggaagacggcaaaagctgccgcgctagtaacagctcgatggaacttcaggtatggaccctgctcctcatcatgatccaaatctctctctggcacttcgtttataaaagtgggacgacgtcctag

SEQ ID NO: 155855 - DNA, 6468 bp, Artificial Sequence
  derived and/or modified sequence
atgaactacagcagcttcctgcggatctgggtgagcttcatcttcgcattggtccagcaccaggctcagcctagagagcttatgtatccgttttggcagaatgacactaaaaccccaaaagtggacgatgggagttcgtccgaaatcaaacttgctatccccgtgtttttcttcggtgtgccttatagaactgtgtatgtcaacaacaatggagttgtgtcttttaacgtgctggtatcgcagttcactccagagtcttttcctctgactgatggacgcgcgtttgtcgctcccttctgggctgacgtccacaacgggatccggggtgagatctactacagagagaccatggaacctgctattctgaagagagccaccaaagacatacgcaagtattttaaagatatggctaccttctccgcaacctgggtgttcatcgtgacatgggaggaagtcaccttctacggcgggtctagcaccactcctgtgaatacgtttcaggccgtgttggttagcgacggatcctacacattcactctgttcaactactatgaaataaattggacgacaggcaccgcctctggcggggacccactgactggcctcggcggagtgatggcacaggcaggttttaacggagggaaccttactaacttcttcagtctcccgggatccaggacacccgagattgttaacattcaggaaactacaaatgtgaacgtccccggtaggtgggcgtttaaggtggacgggaaagaaattgacccggccaatggctgtacctcccgcgggcagtttctccggcgcggagaggttttctgggacgatcttaattgtaccgtgaagtgtagatgtctggactttaataacgagatttactgccaggaggccagctgttctccatacgaggtgtgtgaaccaaagggaaagttcttctactgctctgctgtcgaaacgagtacctgcgtagtgttcggagaaccacactaccacaccttcgacggatttttgttccattttcagggcagctgcgcatatctattagccagacaatgccttcagacaagctctctgcccttcttctctgtggaggccaaaaacgaacaccgccgagggtctgcagtgtcatgggtgaaggaactttccgtggaagtgaatggctacaagatccttatcccgaaagggagctatgggcgcgtgaaggtaaacgacctggtgactagcctgcccgttaccctggatctgggcactgtgaagatataccaatccggtatctcgactgctgtagagacagatttcgggctcctggttacttttgacggacagcactacgcatctatatccgtcccagggagttatataaacagcacctgcggcttgtgcggtaactacaataaaaatcctctggatgactttcttcgaccggatggacgaccggccatgtccgtgctggacctgggggaaagctggcgggtttatcacgcagactggaagtgcgactctggttgtgtggacaactgcacccagtgcgacgcagcaactgaggctttgtattttggttccgattactgtggtttcttgaataagactgatgggcccctttgggagtgcggaaccgtggttgaccctactgcctttgtgcattcctgcgtgtacgatctgtgttccgtgagagataacgggactctgctttgccaagctattcaagcatacgcacttgtctgccaggccctagggatccctatcggtgactggagaacccagaccgggtgtgttagtactgtgcagtgtccgtcgttctctcactacagcgtgtgtacctctagttgccctgacacctgctcagatttaaccgcttcacggaactgtgccaccccatgcaccgagggttgcgagtgtaatcagggatttgtcctgagcaccagccagtgtgttcccctgcataaatgcggatgtgactttgacggccattattacaccatgggcgagttcttttgggctacagctaactgtacagtgcagtgtctttgcgaagagggaggggatgtttactgttttaataagacatgcggctccggggaagtctgcgctgtggaagacggctatcaggggtgcttccccaagagagaaacagtatgcctcttgagccagaatcaagtcctgcacactttcgatggggcgtcttatgccttcccatcagaattctcctacaccctccttaaaacttgtccagagcgacccgagtacctcgagatagacattaacaagaaaaagcccgacgccgggccagcttggcttcggggcctgaggatcttggtggccgaccaggaagtcaaaatcgggggcatcggtgcgtcagaagtcaagctgaacgggcaggaagtcgagctgcctttctttcatcccagcggcaagcttgagatatacagaaataagaactccacaacagtggagagcaaaggcgtagtcactgtacaatattctgatatcgggctgttatatataagattatccaccacatactttaattgcacgggaggcctctgcgggttctacaatgccaacgcgtccgatgagttttgcctgcccaatggaaaatgcacggataacctcgctgtgttcctggagagctggaccacctttgaagaaatctgtaatggagaatgtggcgacctccttaaagcgtgcaacaatgacagcgagctcctgaaattctaccgttcccgatctcgctgtgggatcatcaatgacccaagtaacagctcatttcttgaatgccatggagtcgtgaatgttacggcctattaccgcacttgcctgttcagactctgccagagcggtggcaacgaatcggaactgtgtgattccgtagccaggtacgcgtccgcctgtaaaaatgcggacgttgaagtaggcccttggcgaacttacgacttctgtcccttagagtgtcctgagaatagccacttcgaggaatgtatcacttgcactgaaacgtgcgagacattaaccctcggtcccatttgcgtagatagctgtagcgaaggttgccaatgtgatgaggggtatgcactcttggggtcacagtgcgtcacacgtagcgagtgtgggtgtaactttgagggtcaccagttggccacaaacgagacattctgggtcgacctggattgccagatcttttgctattgttcggggaccgataaccgcgtccactgcgagacaatcccatgtaaggacgatgagtactgcatggaggaaggcggcctgtattattgtcaggcgcgtaccgacgcttcctgcatcgtttccggatacggtcactacttgacttttgacgggttcccgttcgacttccaaaccagctgtccgctgatcctgtgcaccacaggaagccgtccctcctcggatagttttcctaagtttgtcgttaccgcaaagaatgaggatcgggacccatccttggccctttgggtgaagcaggtggacgttactgtgtttggttattctatcgttatccacagagcctacaaacacacggttcttgtgaactctgaaagattgtaccttcccttgaaactggggcaggggaaaattaatatcttcagttttggattccatgtcgtggtagagacagatttcgggctgaaagtcgtgtacgactggaaaacattcttatctattacggtgccacgatccatgcagaacagcacttacggactttgtggtagatacaatgggaatcccgatgacgacctcgagatgcctatgggactcctggcttcctcagttaatgaattcgggcagtcttgggtgaagcgggacacattttgccaggtcggctgtggcgatcgatgcccgtcgtgcgccaaagtcgaaggcttctcaaaggtacagcaactgtgttccctgattccgaaccaaaatgccgcgttttctaagtgtcatagcaaagtgaatccaacttttttttataagaattgtctgttcgactcttgtatcgacggcggagccgtgcaaactgcctgcagctggctacaaaactatgccagtacatgtcagacacaaggcatcacagtcacgggatggcggaactataccagctgcactgtgacttgtccgcccaacagccattacgagtcttgtgtctcagtctgtcagcctcggtgtgccgcgattaggctgaagtcggactgtagccactactgcgtggaagggtgtcattgtgatgcgggatacgtgttgaacggaaaaagctgcattcttcctcactcctgtggatgttactctgatggtaaatactatgagcctaagcaactgttttggaacagtgattgtacgcggcggtgtcggtgtttccgtagaaacgtgattcagtgcgatcctagacagtgcaaatcggacgaggaatgtgctctacgcaatggtgtgagaggctgtttctccaccaagacgtcatattgcttggccgccggtggcggggtctttcggaccttcgatggagcattcttacgttttcccgcgaactgcgcatttgtcctgagtacaatttgtcaaaaactgcctgatatatccttccagctgatcatcaatttcgacaagtggtccgcccccaatctgaccatcataagccccgtatacttctatatcaacgaggagcagatcctcatcaacgatcggaacaccgttaaagtgaacggcactcaggtgaacgtgcccttcatcaccgggttggccaccaagatctacagctccgaaggcttcctcgtgatcgatacgtcacccgacatccaaatatattacaacggattcaacgtgatcaaaatcagtatctctgagcgcctgcaaaataaggtgtgcggcctgtgtggcaatttcaatggagacttaaccgacgactatgttaccctgaggggaaaacccgtggtgtcaagcgtggtactggctcagtcttggaaaaccaacgggatgcaaaaaagacccctcgctccttcttgcaacgagctgcaattttctcaatacgctgcgatgtgtgataacgtccatatccaaaagatgcaaggcgatggatactgcctgaaactgaccgatatgaagggctttttccagccctgttatggtcttctggacccactgcccttttacgagtcctgttatctcgacggttgctattcccataaaaagtttcagctgtgtggctcactagcggcctacggagaggcctgtaggtcttttggcattctgtcaacagaatggatcgagaaggaaaattgttccggcgttgttgaggacccttgtgtcggtgcggattgcccaaatcgcacgtgcgagctggggaatggacgcgagctatgcgggtgcatagagcctccgccatacggcaacaacagccacgacattatcgatgcggaagtcacttgcaaggccgctcaaatggaggtatccatcagcaaatgcaaactatttcaacttggcttcgaacgcgagggcgtgcgcattaacgaccgtcaatgcaccggtatagaaggcgaggatttcatttcttttcagatcaataacaccaaaggtaactgcgggaacatcgtccagtccaatgggacgcacattatgtacaagaacaccctgtggatcgaaagtgcgaataatacgggtaacatcatcacgcgggatcggaccatcaatgtagagtttagctgcgcctacgagctcgacattaaaatctccttggacagcgtggtgaaacctatgttgtctgttatcaacttgaccgttccaacccaggagggttcctttatcactaaaatggccctgtacaagaacgccagttacaagcatccataccgccagggggaggtcgtactaacgactagagatgttttgtacgtgggcgtcttcgtcgtgggcgctgacgcaacccatctgatattaacactgaataagtgttatgcaacccctactcgggacagtaacgataaattgaggtactttataatcgagggtggatgtcagaacttaaaagacaatactatcgggatcgaagagaatgcagtgagtcttacttgtcgctttcacgtgacagtctttaagttcattggggactacgacgaggtgcatctgcattgcgcagtctccctctgtgatagcgagaagtactcatgtaaaataacgtgcccacacaactcccgaattgcaacagactacaccaaggagcccaaggagcaaatcataagtgtggggcctattagacggaaaagactggattggtgtgaggataacggggggtgcgagcaaatttgtacctcaagggttgatggaccgctctgctcttgcgtaacagggactctccaggaggatggcaaatcgtgtcgcgctagtaacagcagtatggagctccaagtctggactttactcttaatcatgatccagatctccctctggcatttcgtgtacaaaagtggcaccacatcctag

SEQ ID NO: 155856 - DNA, 6468 bp, Artificial Sequence
  derived and/or modified sequence
atgaattactccagcttcctccgaatttgggtctcctttatttttgctctggttcagcatcaggcgcagccgagagaactgatgtaccctttctggcagaatgataccaaaacgccaaaggtggatgatggatcttcctctgagatcaaactggccatccccgttttcttttttggcgttccttatagaaccgtgtacgtaaataacaacggcgtcgtttccttcaacgtgctcgtcagccagttcacccccgagagctttccgctgaccgacggcagggcctttgtggcaccattctgggctgacgtgcacaatggcatacgaggagaaatctattatcgagagacgatggagcccgctattctgaagagggccaccaaagatatcagaaaatacttcaaggacatggcgacattttcagccacctgggtgttcattgtgacctgggaggaagtaacattctacggaggctcttctactacccccgtgaacacatttcaggccgtcctggtatccgatggctcatacacttttactctgtttaactactacgaaataaactggaccacagggactgcctccgggggtgaccctctgacaggactcgggggagtaatggcgcaggctggatttaatggcggaaatctaacaaatttcttttcgttgcccggttccagaactccagagatcgtcaatatacaggaaaccaccaacgtaaatgtgcccggtagatgggctttcaaggtggatggaaaagagatcgacccagccaacgggtgtacgtcgaggggccaattcctgcgccgaggagaggtcttctgggatgatctcaattgtactgtaaagtgccggtgcttggattttaacaatgaaatctactgtcaagaggcctcttgctccccttacgaagtgtgtgagcccaaagggaagtttttttattgttcagcagtggagaccagcacatgtgttgtttttggtgaaccccactaccacacttttgatggcttcctcttccacttccagggctcttgcgcctacttgctggccagacagtgcctgcagaccagcagcttgccattttttagcgtggaggccaagaacgaacaccgacgtggatctgccgtcagttgggtcaaggagttgagcgtggaagtgaacgggtataagatattgatccctaaaggaagttatggaagggttaaggtgaacgacttggtgacatctttgccagttacccttgacctgggcacagtaaagatctaccagagcggaatttcgacagcagtggagaccgacttcgggctgctggtgacttttgatggacagcattatgcatccatctctgttccaggcagttatataaattctacttgcgggttatgcgggaactataacaagaaccctctggatgacttcctccgccctgacgggagacctgcaatgtctgtgctggacctgggggagtcatggcgagtgtaccacgccgactggaaatgcgacagcggctgtgttgataactgcacacaatgtgacgcggcaaccgaggctctgtatttcggttccgattattgcggcttcctcaataaaaccgacggacccctctgggagtgcggtaccgtcgttgaccccacagcttttgtgcactcatgtgtctacgatctgtgctccgttagggataatggcaccctgctgtgtcaagcaatacaggcctatgctctggtttgccaggccttggggattcccatcggagattggaggactcagaccggttgtgtttccaccgtccaatgcccttcattttctcattactccgtgtgtacgtcaagttgtcctgacacatgtagtgacttaacggcaagtaggaattgtgctactccctgcacagaaggctgtgagtgtaatcaaggatttgtactctctacatcccagtgcgtcccactccacaaatgtggatgtgacttcgacggacattattacacaatgggggaatttttttgggcaaccgctaattgtaccgtccaatgcctgtgcgaagagggcggagatgtgtactgttttaacaaaacctgtgggtctggagaagtctgtgcagtcgaagacggttaccaaggatgctttcccaagcgcgaaaccgtctgcctactttcacagaaccaggtgctacacacattcgatggagcctcctacgcatttccgagtgagtttagttataccctcttgaaaacatgcccagaacggcctgagtacctggaaatcgacatcaacaaaaagaaaccagacgctggcccagcatggctccgaggcctgagaattctggttgcagatcaggaagtcaaaatcgggggaatcggggcaagtgaggtgaagctgaacggccaagaggtggaactgcctttttttcacccatccggcaagctggaaatctaccgtaataaaaactcgactaccgttgagagcaagggggttgtgacagtccagtattcagatattggacttctctatattagactatctacaacctactttaactgcacgggtggactctgcggattttataacgccaacgcctcagacgaattctgtctgcccaatggcaagtgcaccgataatctcgccgttttcctggaatcatggaccacatttgaagaaatttgtaacggagagtgtggcgacttgctgaaagcctgcaacaacgactccgaactgctgaagttttaccgctcccggtcccgctgcggcatcattaatgacccgagtaatagctcattcttggagtgtcatggcgtcgtcaatgtgacagcttactatcggacctgtctattcagactctgccagagcggagggaatgagtccgagctgtgtgactcggtggctaggtacgcatccgcctgtaaaaacgccgatgttgaagtgggcccatggcggacttatgacttctgccccctagaatgtccagagaacagtcatttcgaagagtgtattacctgcactgagacctgtgagaccttgacactgggacctatctgcgtagattcttgtagcgaagggtgccagtgtgatgagggttacgccctgttaggatctcagtgtgtgactcgcagcgagtgcggttgcaacttcgaagggcaccagcttgccacgaacgagacgttctgggtggatctcgattgtcagatcttctgttactgcagtggaacagataaccgcgtgcattgtgaaaccattccatgtaaggatgatgagtactgtatggaggagggcggattgtactactgtcaggctagaaccgacgccagttgcatcgtgtctgggtatggacattatctcacattcgacggcttcccttttgactttcagacatcctgtccattgattctctgtactacaggatctaggccatcctcagattccttccccaaatttgtggttactgcaaaaaacgaggatagggaccctagcctcgctctctgggtgaagcaggtcgatgtgactgtttttggctactcaatcgtcattcatcgtgcatataagcacacagtcctcgtgaacagcgagaggctctatctgcccctgaaactgggccaaggcaagatcaacatcttttcatttgggttccatgtggtcgtggaaactgacttcgggctcaaggtggtgtacgactggaagacgttcctcagtatcacagtgcccagatctatgcagaatagcacttatggactttgtggtaggtataatggtaacccagacgacgacctggaaatgcccatgggtctgctggcatcgagcgtaaacgaatttggacaaagctgggtaaaacgagataccttctgtcaggtcggatgtggcgatagatgcccttcctgcgccaaggtggagggattctcgaaagtgcagcaactgtgttccctgattcccaaccagaacgcggcattctccaagtgccactcaaaagtgaaccctaccttcttctacaaaaattgtctgttcgacagctgcatagacgggggagctgtgcaaaccgcctgctcttggttgcagaactatgcatccacttgtcagacacaaggcatcactgtcacgggctggaggaactacacttcctgtaccgtcacttgtcccccaaactcgcactacgaatcctgcgtcagtgtctgtcaaccacggtgtgctgccattcgcctgaagtccgactgtagtcattattgtgtagagggctgccactgtgatgcgggttatgtcctgaacggaaagagttgcattctgccacactcctgcggctgctattccgatgggaaatactatgagcctaagcagctgttctggaactctgattgtacacggagatgtaggtgtttccggcgtaatgtgatccagtgcgatccgagacaatgtaagtcagatgaggaatgcgctctgaggaacggagttcgcggatgcttcagtaccaaaacttcatactgcctggccgcagggggaggcgtcttcaggacctttgatggggctttcctgcgcttccccgcaaactgcgctttcgtcctctccacaatctgccagaagttacctgatatttccttccaactcattatcaatttcgacaaatggtccgctcccaatttgacaattatctcaccagtttatttctacatcaacgaggagcagatcctgatcaacgacaggaacacagtaaaagtcaacggaacacaagtcaatgtcccatttataaccggacttgccacgaagatctattctagtgagggcttcctagtgatcgatacatcaccggacatacaaatctactacaatgggtttaacgtgattaagatctcaatctctgaacggctacaaaataaagtgtgtggcctgtgtggcaactttaacggagacctcaccgacgattacgtcacactgcggggaaagcctgtggtgtcgagtgttgttcttgcccaatcctggaaaacgaacggaatgcagaaaaggcctttagcccctagctgcaacgaactccaattcagccaatacgccgctatgtgcgataatgtccacatccagaaaatgcaaggagacgggtattgcttgaaattaacagacatgaaggggttctttcaaccctgttacgggctcttagaccccttgccattctatgagagctgttaccttgatggctgttatagtcacaagaagttccagctgtgtgggtctctagctgcatacggggaagcctgccgctcttttgggatccttagcaccgaatggatcgaaaaagaaaattgctctggcgtagttgaagatccatgtgtgggggctgactgtcccaaccgcacctgtgaactgggcaatgggagggagctgtgcggatgtatcgaaccacctccctacggtaataatagccatgacatcattgacgccgaagtaacctgcaaagctgcacagatggaagtgagcatcagtaaatgtaagttattccaactcggctttgaacgagagggggtgagaattaacgaccgacaatgtactggcatcgaaggagaggatttcatctctttccaaattaacaatacaaaaggcaactgtgggaacatcgtccagtctaacggcactcatatcatgtacaagaacacactttggattgaatcggctaacaacaccggcaatatcatcacccgcgaccgtacgatcaacgtagaattctcttgcgcatacgaactcgacattaagatctctctcgacagtgtggtgaagccaatgctgtccgtgatcaacctgacagtgccaacccaggaagggagcttcattacgaaaatggccttgtacaagaacgcttcttacaaacatccatatagacagggcgaggttgtcctaaccacacgcgatgtcctgtacgtgggggtattcgtggtcggcgcagacgctacccatctcatattgactttgaataagtgttacgctacaccaacgcgggattccaacgacaaacttcggtattttatcatcgagggtgggtgtcagaacctgaaagacaacacgatcgggattgaagaaaacgccgtcagcctgacgtgcagatttcacgtgacagtgtttaagttcatcggtgattatgacgaggtgcatctgcattgcgctgtgtccctgtgcgatagcgagaagtactcatgcaaaatcacatgtcctcacaactcacgtatagctaccgattataccaaggagcccaaggaacagattatctccgtggggcctattagacgtaaaagactggattggtgcgaagacaatggcggatgcgagcagatctgtactagccgggtggacggtcctctgtgttcgtgcgtgactggcaccctccaagaagacggaaagtcttgccgggcatccaatagtagcatggaactgcaggtatggacattgctgctaattatgattcaaatatctctgtggcactttgtatacaagtcgggcaccaccagctac

SEQ ID NO: 155857 - DNA, 6467 bp, Artificial Sequence
  derived and/or modified sequence
atgaactactcgtctttcctacggatttgggtcagctttatttttgctttagtgcagcaccaggctcagcctcgcgagttgatgtatcctttctggcagaacgacaccaaaactccaaaagttgacgacggaagttcctcggaaattaaactggcaattcctgtctttttctttggcgtgccttaccgaactgtttatgttaataataacggcgtggtatcctttaatgtgcttgttagtcaatttactccggaatcctttccgctaaccgacggacgcgcttttgtcgcccctttctgggctgatgtgcataatggaatccgaggtgaaatatattatagagaaaccatggagcctgcaatactgaagagagcaactaaagatatcagaaaatatttcaaggatatggccactttctccgcaacgtgggtctttattgttacatgggaggaggtgactttttatggcggtagctcgactacacccgtaaatacgtttcaggctgtacttgttagcgacggcagctacacctttaccctgtttaactactacgagataaattggaccaccggcaccgcttcaggcggagatcctctaaccgggttagggggtgtaatggcacaagcagggttcaacggaggcaatctcaccaatttcttttcactcccagggtccagaacgcctgaaatcgtgaatattcaagagaccacaaatgtgaacgtccccggtcgctgggccttcaaagtggatgggaaagagattgatcctgccaacggttgtacttcgcgtggccagttccttcgaagaggggaggtgttctgggatgatctgaactgtaccgtgaagtgccgatgtctggatttcaataatgaaatttattgccaggaagccagctgcagcccgtacgaggtttgtgagccaaagggcaaattcttttattgctcagcagtggaaacttcaacctgcgtggtattcggcgagcctcactatcacacctttgatggctttctgtttcactttcagggttcctgtgcgtacctgctggcccgtcagtgcctgcagacctcctcccttccattcttcagtgtagaagccaaaaatgaacaccgcaggggatcagccgtctcttgggtgaaagaactgagcgtagaagtcaacgggtacaagattctcattcctaaaggctcttacggtagagtcaaagttaacgacctggttacctccctgccggtcacgctggatctgggaaccgtgaagatttatcagtccggaatttcaaccgcggttgaaactgacttcggacttttggtcacattcgacgggcagcactatgcatccattagcgtccctggcagttacattaattctacatgcggcttgtgcggaaactacaacaagaatccactagatgactttttgcgaccggacggccgtcctgctatgtcagtgctagatttgggagagtcctggagagtctaccacgcagattggaaatgcgattcgggctgcgtagataattgcacacagtgtgacgctgccacagaggcactctattttggatccgactattgcggcttcctgaataaaaccgatggtcccctgtgggaatgcggtactgtagtcgatccgacagcattcgtccactcttgtgtctatgatctctgttctgtgcgggacaacggaacactgttgtgtcaggccatccaagcttacgcgctcgtgtgccaagccttagggatcccaattggggactggcgcacccaaaccggctgcgtgtccactgtgcagtgcccttctttcagccactacagtgtttgcaccagcagctgtcccgatacatgttctgacctgacagcttcgagaaattgtgccacgccttgtacagaggggtgtgagtgcaatcagggctttgtgctctccacttcacagtgtgtcccgctgcataaatgtgggtgtgacttcgacggacattactacactatgggagaatttttctgggccaccgcaaattgcactgttcagtgtctgtgtgaagagggaggcgatgtgtattgcttcaacaaaacatgcgggagcggagaagtgtgcgcagtagaggacggctaccagggttgcttcccaaaacgggagacagtgtgcctccttagtcagaatcaggtcctgcatacgtttgacggcgcttcctacgccttccctagcgaattctcctatactctcctgaagacatgcccagaacgacccgagtacctggaaatcgatataaataaaaagaagcccgacgctggccctgcatggctgaggggcttgcgtatccttgtggccgatcaggaggtgaagattggcggtataggcgcatcggaggtcaaacttaatggccaagaggtagagttacccttcttccatccgtccggaaagctggaaatttaccggaataagaactccactacggttgagagcaagggcgtggtgacggtccaatatagtgatatcggtctcctgtatatcaggctgtccacaacctacttcaattgcactgggggtctgtgtgggttttataacgcgaatgcctccgacgagttctgtctgccaaacggtaagtgcacggacaacctcgccgtcttcctggaatcttggacaaccttcgaagaaatttgcaacggtgagtgcggcgacctcctaaaggcatgtaataatgacagtgagcttcttaaattttaccggagtaggtccagatgtggcatcattaatgacccatctaactcttcctttctggaatgtcatggggtcgtgaacgtgacagcatattacaggacctgcctttttcgtctgtgtcaaagtgggggtaacgagagcgagctgtgcgattcagtggcacgatacgccagcgcttgcaagaacgccgacgtggaggtcggaccttggcggacctacgatttttgtcctctcgagtgccccgagaactctcacttcgaagaatgcatcacatgcaccgagacatgtgagacgctgacgctgggtccaatttgtgtggattcctgcagtgaaggctgtcagtgcgatgaaggatatgctctgctgggttcacaatgtgtcaccaggagtgaatgcgggtgtaattttgaaggccatcaactggcgactaatgagactttctgggtggatctcgattgtcagatcttttgttattgcagcgggacagataatcgagtgcactgcgaaactattccatgcaaagatgatgaatattgtatggaggaaggaggcttatattattgtcaggcacgtacggacgcctcatgcattgtctcaggatatggacactatctgacttttgatggctttcctttcgatttccagaccagctgtccactgattctgtgcactacaggctccaggccatctagcgatagtttccccaagttcgtggttaccgcaaagaacgaggacagagatcctagcctggccctctgggtgaaacaggtggacgtgacagtgtttggttacagtatcgtgattcatagagcgtataagcatactgtcttggtgaactccgagagactttacttacccctcaagctggggcagggcaaaataaacatcttttcctttggctttcatgtggttgtggaaacggactttggccttaaagtggtttatgactggaagaccttcttaagcatcactgtcccacgatctatgcaaaacagcacctacggcctgtgcggaaggtacaatggaaatcctgacgatgaccttgaaatgcctatggggctgttagcctcaagtgtaaatgagtttgggcagtcatgggtgaaacgggatacattctgccaggtgggctgcggcgatcggtgtccatcttgtgccaaagtcgaggggtttagcaaggtccaacagctttgttcgctgattcccaatcaaaatgcggcattttcaaagtgtcattctaaagtgaatcccaccttcttttacaagaattgtctgttcgactcgtgtatcgacggaggcgcagttcagactgcttgcagctggttgcaaaattatgccagtacttgtcaaactcagggaattaccgttaccggatggcgaaattacacaagctgcaccgtcacttgcccccctaactctcactatgaaagttgcgtctccgtgtgccagccgcgatgcgcggctatacgactcaagtccgattgcagccactactgcgtagaaggttgtcactgtgacgctggctatgtgcttaacggcaagtcctgtatcctgccccattcatgcgggtgctattctgacggaaaatactacgagccaaagcagctgttctggaacagcgactgcactagacgctgtagatgtttccggaggaatgtgattcagtgtgacccccgacagtgcaagtccgatgaagaatgtgccctcaggaatggtgtcagagggtgtttcagcactaagactagctactgcctggctgccggtggaggtgtatttagaacatttgacggcgcattcctgaggttccccgcaaattgcgccttcgtgctcagcactatctgccagaaactgccagacatctccttccagctcatcatcaacttcgacaagtggtcagcgccaaatctgacgatcataagcccagtttacttttatattaacgaggaacagatacttatcaacgacagaaacacagtcaaggtcaacggcactcaggtgaatgttccttttattaccggtttggccacaaagatatacagctccgaagggttcttagttattgatacctctcccgatattcaaatctactataacggcttcaatgtcatcaagataagcatctccgagagactgcaaaataaggtttgcggtctttgtggcaactttaacggggatctgactgatgactatgtcaccctgcgcggaaagcctgtggtgagctctgtggtgctcgctcagtcttggaagacgaacggtatgcagaagcgccctttagccccttcttgcaacgaacttcagttcagccagtacgctgcaatgtgcgacaacgtgcacatccagaaaatgcagggtgacggatattgcctgaaattaaccgacatgaaaggcttttttcaaccctgttacgggctgctcgacccactgcccttttatgagtcctgttacctcgacggatgctatagtcataagaaatttcaactgtgtggtagtttggctgcctacggcgaggcgtgtaggtcctttgggatcctttctactgaatggatcgagaaggagaattgctccggcgtggtcgaggacccttgtgtcggcgcagactgcccgaatcggacttgcgagttgggcaacggtagggagctatgcggctgcatagagcctccaccctatgggaacaacagccacgatatcatcgacgctgaagttacctgcaaggcggcacagatggaagtgagtattagcaagtgcaagctcttccagctgggatttgagcgtgaaggcgtgaggatcaacgataggcagtgcaccggcatcgaaggagaggacttcatttccttccaaattaataatacaaaaggaaattgtggcaacatagtacaatctaatggcacgcacatcatgtataagaacacactgtggattgagtccgcaaacaatacgggaaatatcatcactcgcgaccgcacgataaatgtggaattttcatgcgcgtacgagctcgatataaagatatcgttggacagtgtggtgaagccaatgctgagcgtgatcaatctcacagtgcccacacaggagggatcgttcatcacaaaaatggccctctataagaatgcatcttacaagcatccataccgccagggtgaggtggtacttaccacacgggatgtgctgtatgtcggggtgttcgttgtcggcgcagacgccacacatcttatattaacactgaataagtgttacgccacccccacaagggatagcaatgacaagctacggtattttatcatcgaaggaggctgtcaaaacttgaaagataatactatcgggatcgaggaaaacgctgtgagcttgacatgtcgcttccacgtcactgtttttaaattcattggggattacgatgaagtacacctgcattgcgccgtgtccctgtgcgattccgagaagtatagttgcaagattacctgcccacacaactctaggatagcaacagactacacaaaggagcctaaggaacagattatcagcgtgggaccaattaggcgcaagagactcgactggtgcgaagacaacggagggtgcgagcagatctgtaccagccgcgtggacggccctctttgcagctgcgtgacaggaacgctgcaagaagatggcaaaagctgtcgcgcttccaattcctcgatggaactgcaggtgtggaccctgcttctgatcatgatccagataagcctgtggcacttcgtgtataagagcggtacaacctcata

SEQ ID NO: 155858 - DNA, 6468 bp, Artificial Sequence
  derived and/or modified sequence
atgaattattcatcattccttagaatttgggtctctttcatcttcgcacttgtacagcaccaagctcagcccagggagctcatgtatccattttggcagaatgacaccaaaacccctaaagtagatgatggaagctcatctgagattaagttggccatcccagttttcttctttggcgttccttaccgcactgtctatgtcaataacaacggagttgtttccttcaatgtgctagtgagccagttcacgccagaatcctttcccctgacagatgggagagccttcgtcgccccattttgggcagatgtgcacaatggaattcgaggcgagatctattacagagagaccatggagcctgccatcttgaaaagagccaccaaggacatcaggaagtacttcaaagacatggcaaccttctctgccacttgggttttcattgtgacatgggaggaagtcacgttttatggaggcagcagcaccacacctgtgaacaccttccaggccgtcctagtgtccgatggctcctatacattcaccctcttcaattattacgaaatcaactggaccacggggacggcgagtggcggcgaccccctgacaggtcttggtggagtgatggcacaggcaggatttaatggtggaaacctcaccaatttcttcagcctcccggggtcaagaacccccgagatcgtgaatatccaggagaccacaaacgtcaatgttccaggccgctgggcatttaaagttgatggaaaggaaattgacccagccaatggctgcacctcaaggggacaattccttcggcgaggggaggtgttttgggatgacttgaactgcaccgtcaagtgccgctgtctggatttcaacaatgagatctactgccaggaggcttcctgtagcccctacgaggtgtgcgaacccaaaggcaaattcttctactgcagcgctgtggagaccagcacatgcgtggtgtttggggagccacactaccacacttttgacggcttcctcttccacttccaaggctcctgtgcctacttgctggcccgacagtgtttgcagacttccagcctccctttcttcagtgtggaggccaagaatgaacaccgcagaggttcagccgtctcctgggtgaaggagctctcagtggaggtgaatggctacaagattctcatccccaaaggaagctatggaagagtcaaggttaatgacctagtgacttctttgcctgtcaccttagacttggggacagtgaaaatctaccagagtggcatatctactgccgtggaaacagattttgggctcttagtgacttttgatggccagcactacgcctccatttccgtcccaggctcctatataaactccacctgtggactctgtggaaactataataaaaacccactggatgacttcctccgcccggatggcaggccggccatgtctgtcctggatctgggagagagctggcgtgtgtaccacgcagactggaagtgcgactccggctgcgtcgacaactgcacccagtgcgacgctgccactgaagccctctactttggctctgactactgcggcttcctcaacaagacagacggccctctgtgggagtgtggcactgtcgtggaccccactgcttttgtgcacagctgcgtgtatgacctgtgcagtgtgagggacaatggcacgctcctctgccaagccatccaggcctatgctcttgtgtgccaagcccttggcattccaattggagactggcgaacccagactgggtgtgtgtccacagtgcagtgcccgagcttcagccactactccgtgtgcacaagcagctgccccgacacatgctccgacctgacggcctcgcggaactgcgccacgccgtgcacagagggctgcgagtgcaaccagggcttcgtcctcagcaccagccagtgcgtccctctgcacaagtgcggctgcgacttcgacggccactactacaccatgggggagttcttctgggccacggccaactgcactgtgcaatgcctgtgcgaggagggcggggacgtctactgcttcaacaagacctgcggcagcggggaggtgtgcgccgtggaggacggctaccagggctgcttccccaagcgggagaccgtgtgcctgctcagccagaaccaggtgctgcacacctttgacggcgcctcctacgccttcccctccgagttctcctacaccctcctgaagacctgccctgagcgcccagagtacttggaaatcgacatcaacaagaagaagcccgatgcaggacctgcttggctgcggggacttcggatcctggtggccgaccaggaggtcaagataggaggcatcggggcttcggaagtcaagttgaatggtcaggaagtggaattgccttttttccatccttcggggaagctggaaatttatcgaaacaaaaacagtacgacagtggagtccaagggcgtggtgactgtccagtactcagacataggtctattgtacatccggctgtccaccacatacttcaattgcacagggggcttgtgcggcttctacaatgccaacgccagtgacgagttctgtctccccaacggcaagtgcacggacaacctggcagtgttcctggaaagctggacaactttcgaggagatctgcaatggagagtgtggggacctgctgaaggcctgcaacaatgactcggagctgctcaagttttatcgaagccgctccaggtgcggcatcatcaacgacccctccaacagctccttcctggagtgccatggggtggtgaacgtcactgcctattaccgcacctgccttttccgcctgtgccagagtgggggcaatgagtcagagctctgtgactctgtggcccggtatgcaagcgcctgcaagaatgcggacgtggaggtggggccctggcggacctatgacttctgcccactggagtgcccagagaacagccactttgaggagtgcatcacatgtacagagacctgtgagacccttaccctgggccccatctgcgtggatagctgctctgagggatgtcagtgtgatgagggctatgctctactgggcagccagtgtgtcacgcggagtgagtgtggctgcaactttgaggggcaccaacttgccaccaatgagaccttctgggtggacctggactgccagatcttctgctattgcagtggcacagacaacagggtccactgcgagaccattccctgcaaggatgatgagtactgcatggaggaaggtggcctgtactactgccaagcccgcaccgacgcctcctgcatcgtctcaggctacggccactacctcacctttgatggcttcccctttgacttccagaccagctgcccactcatcctgtgcaccacaggaagcaggccaagctcagactctttccccaagtttgttgtcacagccaagaatgaggaccgggacccgtcactggccttgtgggttaagcaggtggacgtgaccgtgtttggctacagcatcgtgatccaccgagcttacaagcacactgtgctggtcaacagtgaacggctctatctgcccctgaagctggggcaagggaagataaatatcttttcctttggcttccacgtggtggtggaaactgattttggcctgaaggttgtatatgactggaagaccttcctgtccatcacagtccctcggagcatgcagaacagcacctatggtctgtgtggccgctacaacggcaaccctgatgatgacctggagatgcccatgggtctgcttgcatcgagtgtcaatgagtttgggcagagctgggtgaagagggacaccttctgccaggtgggctgtggggaccgctgtccgtcctgtgccaaggtggaaggtttctccaaagtgcagcagctgtgcagcctgatccccaaccagaacgctgccttctccaagtgtcacagcaaagttaaccccaccttcttctataagaactgcctgtttgactcttgcatcgatgggggcgcggtgcagaccgcctgcagctggctgcagaactacgccagcacctgccagactcaggggattacggtgactggctggaggaattacacgtcctgcactgtcacctgccctccaaacagccattacgagagctgcgtgagtgtctgccagccccgctgcgccgccatccgcctgaagagtgactgcagccactactgcgtggagggctgtcactgcgacgctggctacgtcctcaacggcaagagctgcatcctgccccacagctgcggctgctactccgatggcaaatattacgagcccaagcagctattttggaacagcgactgcacgcggcgctgccgctgtttccgtcgcaacgtgattcagtgcgacccgcgccaatgcaagtcagacgaggagtgtgcgctgcgcaacggggtgcgcggctgcttcagcaccaagacctcctactgcctggcggccggcggcggcgtcttccgcaccttcgacggcgccttcctgcgcttcccagccaactgcgccttcgtgctgtccaccatctgccagaaactgcccgacatctccttccagcttatcatcaacttcgacaagtggtcggcccccaacctcaccatcatttcgcccgtctacttctacattaacgaagagcagattctcatcaacgaccggaacacggtcaaggtgaatggcacacaagtgaatgttccatttataactggtttggcaaccaaaatctacagcagtgaggggtttctggtgattgacaccagcccagacatccagatatactacaatggtttcaacgtcattaaaatcagcatcagcgagaggctgcagaacaaagtgtgcggtctctgtggcaacttcaacggggacctaacagatgattatgtgaccttgcgagggaagccggtggtaagcagcgtggtgctggcccagagctggaaaaccaatggcatgcagaagagacctcttgcccccagctgcaacgagctgcagttctcacagtatgcagccatgtgtgacaatgtgcacatccagaagatgcagggtgatggctactgcctgaagctcaccgacatgaagggcttcttccagccctgctatgggcttctcgatcccctcccattctacgagtcctgctacctggacggctgctacagccacaagaagttccagctgtgcggctccctggccgcctacggggaggcctgccgctccttcgggatccttagcaccgagtggattgagaaggagaattgctcaggagtggttgaagatccctgtgtgggggcggactgtcccaaccgaacttgcgagctgggcaatggcagggagctgtgtggctgcatcgagccacccccctatggaaataactcacatgacattatcgatgcagaggtgacctgcaaagcagcccaaatggaagtgtccatatctaagtgcaagctcttccagctcggttttgagagggagggcgtgaggatcaatgacagacagtgcaccggcatcgagggggaagattttatctcctttcagatcaacaacaccaaagggaattgtggaaacattgtgcagtccaatggcacgcatatcatgtataaaaacacactctggatcgaaagcgccaacaacactggcaacatcatcaccagggaccgcacgatcaatgtggaattttcatgtgcttatgagctggatatcaagatctccttggattctgttgtgaagcctatgctaagtgtaattaacctgacagttccaacccaagaaggcagcttcatcaccaagatggctctctacaaaaacgcctcctacaaacatccttaccgccagggtgaagtagtgttgacgactcgagatgtgctgtatgtaggggtttttgtggttggagctgacgccacacatttaatcctaacactcaacaaatgctatgccacacccacccgagatagcaatgataagctccgatatttcatcattgaaggagggtgtcagaacctcaaagataacaccattggcatcgaggagaatgcagtctccctgacctgtcgctttcacgtcaccgtctttaaattcataggggattacgacgaagttcaccttcactgtgcagtgtcactctgcgactcagaaaagtactcctgtaaaatcacttgcccacacaattccaggattgccacagattacacaaaagagcccaaagaacagatcatttcagtgggacctattaggagaaaaaggctggactggtgtgaggacaatggagggtgtgagcagatttgcacgagccgggtggatgggcctctctgcagctgtgtaacaggaaccctgcaggaggacggcaagagctgcagagcctctaattcttcaatggaacttcaagtctggacgcttcttctcatcatgatccagatttcattatggcattttgtctataaatcaggcacgacctcataa

SEQ ID NO: 155859 - DNA, 7426 bp, Artificial Sequence
  derived and/or modified sequence
cgcaatcctgaaactgatctttagatttacttttccttaatcaatagaaaaaaacttgattgcagctcaacacttacctgtctctagtgcaggactaacttaatttttggttttaagagtacgagattcagacattatttcaggaatcagaaattattggcaacaagttgaggagaactgacatgaattcttgttttacctaattttttctggcttaccaagatttggcttaatatttctgactcagttcctccagcctctacagaacaggatgaattattcatcattccttagaatttgggtctctttcatcttcgcacttgtacagcaccaagctcagcccagggagctcatgtatccattttggcagaatgacaccaaaacccctaaagtagatgatggaagctcatctgagattaagttggccatcccagttttcttctttggcgttccttaccgcactgtctatgtcaataacaacggagttgtttccttcaatgtgctagtgagccagttcacgccagaatcctttcccctgacagatgggagagccttcgtcgccccattttgggcagatgtgcacaatggaattcgaggcgagatctattacagagagaccatggagcctgccatcttgaaaagagccaccaaggacatcaggaagtacttcaaagacatggcaaccttctctgccacttgggttttcattgtgacatgggaggaagtcacgttttatggaggcagcagcaccacacctgtgaacaccttccaggccgtcctagtgtccgatggctcctatacattcaccctcttcaattattacgaaatcaactggaccacggggacggcgagtggcggcgaccccctgacaggtcttggtggagtgatggcacaggcaggatttaatggtggaaacctcaccaatttcttcagcctcccggggtcaagaacccccgagatcgtgaatatccaggagaccacaaacgtcaatgttccaggccgctgggcatttaaagttgatggaaaggaaattgacccagccaatggctgcacctcaaggggacaattccttcggcgaggggaggtgttttgggatgacttgaactgcaccgtcaagtgccgctgtctggatttcaacaatgagatctactgccaggaggcttcctgtagcccctacgaggtgtgcgaacccaaaggcaaattcttctactgcagcgctgtggagaccagcacatgcgtggtgtttggggagccacactaccacacttttgacggcttcctcttccacttccaaggctcctgtgcctacttgctggcccgacagtgtttgcagacttccagcctccctttcttcagtgtggaggccaagaatgaacaccgcagaggttcagccgtctcctgggtgaaggagctctcagtggaggtgaatggctacaagattctcatccccaaaggaagctatggaagagtcaaggttaatgacctagtgacttctttgcctgtcaccttagacttggggacagtgaaaatctaccagagtggcatatctactgccgtggaaacagattttgggctcttagtgacttttgatggccagcactacgcctccatttccgtcccaggctcctatataaactccacctgtggactctgtggaaactataataaaaacccactggatgacttcctccgcccggatggcaggccggccatgtctgtcctggatctgggagagagctggcgtgtgtaccacgcagactggaagtgcgactccggctgcgtcgacaactgcacccagtgcgacgctgccactgaagccctctactttggctctgactactgcggcttcctcaacaagacagacggccctctgtgggagtgtggcactgtcgtggaccccactgcttttgtgcacagctgcgtgtatgacctgtgcagtgtgagggacaatggcacgctcctctgccaagccatccaggcctatgctcttgtgtgccaagcccttggcattccaattggagactggcgaacccagactgggtgtgtgtccacagtgcagtgcccgagcttcagccactactccgtgtgcacaagcagctgccccgacacatgctccgacctgacggcctcgcggaactgcgccacgccgtgcacagagggctgcgagtgcaaccagggcttcgtcctcagcaccagccagtgcgtccctctgcacaagtgcggctgcgacttcgacggccactactacaccatgggggagttcttctgggccacggccaactgcactgtgcaatgcctgtgcgaggagggcggggacgtctactgcttcaacaagacctgcggcagcggggaggtgtgcgccgtggaggacggctaccagggctgcttccccaagcgggagaccgtgtgcctgctcagccagaaccaggtgctgcacacctttgacggcgcctcctacgccttcccctccgagttctcctacaccctcctgaagacctgccctgagcgcccagagtacttggaaatcgacatcaacaagaagaagcccgatgcaggacctgcttggctgcggggacttcggatcctggtggccgaccaggaggtcaagataggaggcatcggggcttcggaagtcaagttgaatggtcaggaagtggaattgccttttttccatccttcggggaagctggaaatttatcgaaacaaaaacagtacgacagtggagtccaagggcgtggtgactgtccagtactcagacataggtctattgtacatccggctgtccaccacatacttcaattgcacagggggcttgtgcggcttctacaatgccaacgccagtgacgagttctgtctccccaacggcaagtgcacggacaacctggcagtgttcctggaaagctggacaactttcgaggagatctgcaatggagagtgtggggacctgctgaaggcctgcaacaatgactcggagctgctcaagttttatcgaagccgctccaggtgcggcatcatcaacgacccctccaacagctccttcctggagtgccatggggtggtgaacgtcactgcctattaccgcacctgccttttccgcctgtgccagagtgggggcaatgagtcagagctctgtgactctgtggcccggtatgcaagcgcctgcaagaatgcggacgtggaggtggggccctggcggacctatgacttctgcccactggagtgcccagagaacagccactttgaggagtgcatcacatgtacagagacctgtgagacccttaccctgggccccatctgcgtggatagctgctctgagggatgtcagtgtgatgagggctatgctctactgggcagccagtgtgtcacgcggagtgagtgtggctgcaactttgaggggcaccaacttgccaccaatgagaccttctgggtggacctggactgccagatcttctgctattgcagtggcacagacaacagggtccactgcgagaccattccctgcaaggatgatgagtactgcatggaggaaggtggcctgtactactgccaagcccgcaccgacgcctcctgcatcgtctcaggctacggccactacctcacctttgatggcttcccctttgacttccagaccagctgcccactcatcctgtgcaccacaggaagcaggccaagctcagactctttccccaagtttgttgtcacagccaagaatgaggaccgggacccgtcactggccttgtgggttaagcaggtggacgtgaccgtgtttggctacagcatcgtgatccaccgagcttacaagcacactgtgctggtcaacagtgaacggctctatctgcccctgaagctggggcaagggaagataaatatcttttcctttggcttccacgtggtggtggaaactgattttggcctgaaggttgtatatgactggaagaccttcctgtccatcacagtccctcggagcatgcagaacagcacctatggtctgtgtggccgctacaacggcaaccctgatgatgacctggagatgcccatgggtctgcttgcatcgagtgtcaatgagtttgggcagagctgggtgaagagggacaccttctgccaggtgggctgtggggaccgctgtccgtcctgtgccaaggtggaaggtttctccaaagtgcagcagctgtgcagcctgatccccaaccagaacgctgccttctccaagtgtcacagcaaagttaaccccaccttcttctataagaactgcctgtttgactcttgcatcgatgggggcgcggtgcagaccgcctgcagctggctgcagaactacgccagcacctgccagactcaggggattacggtgactggctggaggaattacacgtcctgcactgtcacctgccctccaaacagccattacgagagctgcgtgagtgtctgccagccccgctgcgccgccatccgcctgaagagtgactgcagccactactgcgtggagggctgtcactgcgacgctggctacgtcctcaacggcaagagctgcatcctgccccacagctgcggctgctactccgatggcaaatattacgagcccaagcagctattttggaacagcgactgcacgcggcgctgccgctgtttccgtcgcaacgtgattcagtgcgacccgcgccaatgcaagtcagacgaggagtgtgcgctgcgcaacggggtgcgcggctgcttcagcaccaagacctcctactgcctggcggccggcggcggcgtcttccgcaccttcgacggcgccttcctgcgcttcccagccaactgcgccttcgtgctgtccaccatctgccagaaactgcccgacatctccttccagcttatcatcaacttcgacaagtggtcggcccccaacctcaccatcatttcgcccgtctacttctacattaacgaagagcagattctcatcaacgaccggaacacggtcaaggtgaatggcacacaagtgaatgttccatttataactggtttggcaaccaaaatctacagcagtgaggggtttctggtgattgacaccagcccagacatccagatatactacaatggtttcaacgtcattaaaatcagcatcagcgagaggctgcagaacaaagtgtgcggtctctgtggcaacttcaacggggacctaacagatgattatgtgaccttgcgagggaagccggtggtaagcagcgtggtgctggcccagagctggaaaaccaatggcatgcagaagagacctcttgcccccagctgcaacgagctgcagttctcacagtatgcagccatgtgtgacaatgtgcacatccagaagatgcagggtgatggctactgcctgaagctcaccgacatgaagggcttcttccagccctgctatgggcttctcgatcccctcccattctacgagtcctgctacctggacggctgctacagccacaagaagttccagctgtgcggctccctggccgcctacggggaggcctgccgctccttcgggatccttagcaccgagtggattgagaaggagaattgctcaggagtggttgaagatccctgtgtgggggcggactgtcccaaccgaacttgcgagctgggcaatggcagggagctgtgtggctgcatcgagccacccccctatggaaataactcacatgacattatcgatgcagaggtgacctgcaaagcagcccaaatggaagtgtccatatctaagtgcaagctcttccagctcggttttgagagggagggcgtgaggatcaatgacagacagtgcaccggcatcgagggggaagattttatctcctttcagatcaacaacaccaaagggaattgtggaaacattgtgcagtccaatggcacgcatatcatgtataaaaacacactctggatcgaaagcgccaacaacactggcaacatcatcaccagggaccgcacgatcaatgtggaattttcatgtgcttatgagctggatatcaagatctccttggattctgttgtgaagcctatgctaagtgtaattaacctgacagttccaacccaagaaggcagcttcatcaccaagatggctctctacaaaaacgcctcctacaaacatccttaccgccagggtgaagtagtgttgacgactcgagatgtgctgtatgtaggggtttttgtggttggagctgacgccacacatttaatcctaacactcaacaaatgctatgccacacccacccgagatagcaatgataagctccgatatttcatcattgaaggagggtgtcagaacctcaaagataacaccattggcatcgaggagaatgcagtctccctgacctgtcgctttcacgtcaccgtctttaaattcataggggattacgacgaagttcaccttcactgtgcagtgtcactctgcgactcagaaaagtactcctgtaaaatcacttgcccacacaattccaggattgccacagattacacaaaagagcccaaagaacagatcatttcagtgggacctattaggagaaaaaggctggactggtgtgaggacaatggagggtgtgagcagatttgcacgagccgggtggatgggcctctctgcagctgtgtaacaggaaccctgcaggaggacggcaagagctgcagagcctctaattcttcaatggaacttcaagtctggacgcttcttctcatcatgatccagatttcattatggcattttgtctataaatcaggcacgacctcataattaactcaaggttgctatataaagtactgtaatttacttacttcaacaccctgtaggataaaaagtgtgtgcccttaagtcaaaacctatttgaaagtgtccagcatctcaaaatgatgccacctgcctccaatggtccaaggtccagaaaccagcgaccatccaagctcctctttcagagtatgaaacggggcttctacaagccagttatggaaagtatctctcttgtgtaaaattcccaaacagttgtcactagagactttggttcacatgaaaaaccagtaaaggaaaaaaattctggttagagaaatctgactggaaatctgaccagagaaatctgtcaagccagtgctatttctggatcacagttttttacagagagagggcctgttggaacgattttgaagtgatgactggaaggtttgactccctctaaggaatcttgctggtgtttggaagtgtccgatctacgttatgcacgtgttctgtctatgaggcgcttctccacccactgtgtccttcaaccttgccatggcagctttggccactggggatattgttgacctggggaaccccacccactctcctaccccctcgaacccaatcccttctctttttacaaatcaaccaaatactttttaatgtgttttatccttaaataaactttgtgttcaagtattctcatta

SEQ ID NO: 155860 - protein, 129 aa, Artificial Sequence
  derived and/or modified sequence
MGRRDAQLLAALLVLGLCALAGSEKPSPCQCSRLSPHNRTNCGFPGITSDQCFDNGCCFDSSVTGVPWCFHPLPKQESDQCVMEVSDRRNCGYPGISPEECASRKCCFSNFIFEVPWCFFPKSVEDCHY

SEQ ID NO: 155861 - DNA, 390 bp, Artificial Sequence
  derived and/or modified sequence
atgggcagaagagacgcccagctgctggccgccctgctggtgctgggcctgtgcgccctggccggcagcgagaagcccagcccctgccagtgcagcagactgagcccccacaacagaaccaactgcggcttccccggcatcaccagcgaccagtgcttcgacaacggctgctgcttcgacagcagcgtgaccggcgtgccctggtgcttccaccccctgcccaagcaggagagcgaccagtgcgtgatggaggtgagcgacagaagaaactgcggctaccccggcatcagccccgaggagtgcgccagcagaaagtgctgcttcagcaacttcatcttcgaggtgccctggtgcttcttccccaagagcgtggaggactgccactactag

SEQ ID NO: 155862 - DNA, 390 bp, Artificial Sequence
  derived and/or modified sequence
atgggcagacgggacgcccagctgctggccgcgctgcttgtgttggggctctgtgcacttgcaggctcagaaaaaccatcgccatgccagtgctcgcgactatctccccacaacagaacaaactgcgggtttcccggtataacttctgatcagtgtttcgacaatggctgctgcttcgactcctctgtaaccggcgtgccatggtgcttccatcctctgcctaaacaagaatccgaccaatgtgtcatggaagtgtccgataggcgcaattgcggctatcccggcatttctccagaagaatgcgcttctaggaagtgctgctttagcaatttcattttcgaggtcccttggtgcttttttcccaagagtgtggaggactgccattactag

SEQ ID NO: 155863 - DNA, 390 bp, Artificial Sequence
  derived and/or modified sequence
atgggcagaagagatgcccagctgctggccgccctgctggtgctgggcctgtgtgccctggccggcagcgagaagcccagcccctgccagtgcagccggctgagcccccacaacagaaccaactgtggcttccctggcatcaccagtgaccagtgctttgacaatggctgctgctttgacagctctgtgactggagtgccctggtgcttccaccccctgcccaagcaggagagtgaccagtgtgtgatggaggtgtctgacagaagaaactgtggctacccaggcatcagccctgaggagtgtgccagcaggaagtgctgcttcagcaacttcatctttgaggtgccctggtgcttcttccccaagtctgtggaggactgccactactag

SEQ ID NO: 155864 - DNA, 390 bp, Artificial Sequence
  derived and/or modified sequence
atgggccggcgggacgcccagctgctggccgccctgctggtgctggggctctgtgccctggcaggctccgaaaaaccttccccttgccagtgcagcaggctgagtccacacaatcggactaactgtggcttcccaggtattacaagtgatcaatgttttgataacggatgctgttttgatagcagcgtaacaggtgtcccctggtgcttccaccctctgcctaaacaggaaagcgaccagtgcgtaatggaagtcagcgaccgccgaaattgcggttacccaggcattagcccagaagaatgcgcctccagaaaatgttgtttcagtaatttcattttcgaagttccttggtgtttctttcctaagtctgtggaggattgccactattag

SEQ ID NO: 155865 - DNA, 390 bp, Artificial Sequence
  derived and/or modified sequence
atggggaggcgggacgctcagctgttggctgctcttcttgtgttaggcctttgcgctctcgcaggctcagagaaaccatcgccctgtcagtgctcccggttgagcccgcataacaggaccaattgcggttttccaggtatcacaagtgatcagtgctttgacaacgggtgttgcttcgacagttccgttactggtgtcccatggtgttttcaccctctgccaaaacaggagtcggatcagtgtgtgatggaggtaagtgatcgacgcaactgcggttatccaggaatcagcccagaagagtgcgcgtcacgaaagtgctgtttttctaatttcatcttcgaagtgccctggtgttttttccccaaatctgtggaggactgccactattag

SEQ ID NO: 155866 - DNA, 737 bp, Artificial Sequence
  derived and/or modified sequence
acagctgcctcttgcctcctcttcgcctccacggtggaagggctggggccacggggcagagaagaaaggttatctctgcttgttggacaaacagaggggagattataaaacatacccggcagtggacaccatgcattctgcaagccaccctggggtgcagctgagctagacatgggacggcgagacgcccagctcctggcagcgctcctcgtcctggggctatgtgccctggcggggagtgagaaaccctccccctgccagtgctccaggctgagcccccataacaggacgaactgcggcttccctggaatcaccagtgaccagtgttttgacaatggatgctgtttcgactccagtgtcactggggtcccctggtgtttccaccccctcccaaagcaagagtcggatcagtgcgtcatggaggtctcagaccgaagaaactgtggctacccgggcatcagccccgaggaatgcgcctctcggaagtgctgcttctccaacttcatctttgaagtgccctggtgcttcttcccgaagtctgtggaagactgccattactaagagaggctggttccagaggatgcatctggctcaccgggtgttccgaaaccaaagaagaaacttcgccttatcagcttcatacttcatgaaatcctgggttttcttaaccatcttttcctcattttcaatggtttaacatataatttctttaaataaaacccttaaaatctgctaaa

SEQ ID NO: 155867 - protein, 138 aa, Artificial Sequence
  derived and/or modified sequence
MDTQTHSLPITHTQLHSNSQPQSRTCTRHCQTFSQSCRQSHRGSRSQSSSQSPASHRNPTGAHSSSGHQSQSPNTSPPPKRHKKTMNSHHSPMRPTILHCRCPKNRKNLEGKLKKKKMAKRIQQVYKTKTRSSGWKSN

SEQ ID NO: 155868 - DNA, 417 bp, Artificial Sequence
  derived and/or modified sequence
atggacacccagacccacagcctgcccatcacccacacccagctgcacagcaacagccagccccagagcagaacctgcaccagacactgccagaccttcagccagagctgcagacagagccacagaggcagcagaagccagagcagcagccagagccccgccagccacagaaaccccaccggcgcccacagcagcagcggccaccagagccagagccccaacaccagccccccccccaagagacacaagaagaccatgaacagccaccacagccccatgagacccaccatcctgcactgcagatgccccaagaacagaaagaacctggagggcaagctgaagaagaagaagatggccaagagaatccagcaggtgtacaagaccaagaccagaagcagcggctggaagagcaactag

SEQ ID NO: 155869 - DNA, 417 bp, Artificial Sequence
  derived and/or modified sequence
atggacacacagacgcacagccttcccattacacatacccagttacactctaatagccagccacaatcaagaacatgtacacgtcactgccaaaccttctcacaaagctgccgccagagccacagaggcagtagaagccagagttcatcacagagtcccgcctcacatagaaatcctacgggggcacattcctcaagcggccaccagtcgcaaagccccaacacatcgccccctcccaagagacataaaaagactatgaactctcaccactcccccatgaggccaacaatccttcactgtcgatgtccaaagaatcgcaagaacctggaaggaaagctaaagaaaaagaaaatggccaagaggattcagcaggtttacaaaaccaaaactagatccagtggttggaagagtaattag

SEQ ID NO: 155870 - DNA, 417 bp, Artificial Sequence
  derived and/or modified sequence
atggacacccagacccacagcctgcccatcacccacacccagctgcacagcaacagccagccccagagcaggacctgcaccaggcactgccagaccttcagccagagctgccggcagagccaccggggcagccgcagccagagcagcagccagagccctgccagccacaggaaccccaccggggcccacagcagcagcggccaccagagccagagccccaacaccagccccccacccaagaggcacaagaagaccatgaacagccaccacagccccatgaggcccaccatcctgcactgccgctgccccaagaacaggaagaacctggagggcaagctgaagaagaagaagatggccaagaggatccagcaggtgtacaagaccaagaccaggagcagcggctggaagagcaactag

SEQ ID NO: 155871 - DNA, 417 bp, Artificial Sequence
  derived and/or modified sequence
atggacacccagacccacagcctgcccatcacccacacccagctgcattctaacagtcaacctcagagccgtacttgtacccgacattgccaaaccttttcccaaagctgccggcagtcgcatcggggatcaaggtcccagtcaagctcccagagtcccgcttctcaccgcaacccaacaggtgcccacagttcgtctgggcaccaaagtcaatcccctaataccagccctccgcccaaaagacacaaaaaaacaatgaattcgcaccattccccaatgcggcctacaatcctgcattgtaggtgccctaagaatcgcaagaacctggaaggcaagctgaaaaagaaaaagatggcgaaaagaatacagcaggtgtataagaccaagaccagaagtagtggctggaagtccaattag

SEQ ID NO: 155872 - DNA, 417 bp, Artificial Sequence
  derived and/or modified sequence
atggatacccaaacccactcccttccgattacccacacacagctgcactccaatagccaaccccagagtcggacttgtacccgccactgccagaccttctcacagagctgtagacagtctcaccgcggatctaggtctcagagctcatcccaatcgcctgccagccacaggaaccctactggagcccacagttcctcgggacaccagtctcagtcacccaacactagcccccctccgaagagacacaaaaaaaccatgaactcccaccattcacccatgcgtccgacaattctgcattgtcgctgcccgaagaatcgcaagaaccttgagggcaagctgaagaagaagaagatggcaaagcgaattcaacaagtctataagaccaaaaccaggtcatccgggtggaagagcaattag

SEQ ID NO: 155873 - DNA, 626 bp, Artificial Sequence
  derived and/or modified sequence
ggcctctgtaaagctaggcctgctgggagaggatgaggaggaggccctgcccctccaaacgtggcctcctatggacacccagactcacagccttcctatcacccacactcagctccatagcaactctcagccccaaagccgcacctgcacccgccattgccaaaccttcagccagagttgcagacagagccatcgtggcagccggagccagagctccagccagagcccggccagccaccgcaacccaactggagcccacagctcatccggccaccagagccagagtcccaacactagtccaccaccaaagcgccacaaaaagactatgaactcccaccactctcccatgcggcccaccatcctgcactgccgctgccccaagaacagaaagaacttggaaggcaagctgaaaaagaaaaaaatggccaagaggatccagcaggtgtacaaaaccaagacgcggagctcaggatggaaatccaactaatgagaccgcactccttggcttgttcctgcgtgtttcacccaaaggagaaaatgctaggatgaagtcaatcttcttgcaggaacatgttactatggtgatttctacgcaacactaattaaagcttgtacctggaagacta

SEQ ID NO: 155874 - protein, 845 aa, Artificial Sequence
  derived and/or modified sequence
MELWRQCTHWLIQCRVLPPSHRVTWDGAQVCELAQALRDGVLLCQLLNNLLPHAINLREVNLRPQMSQFLCLKNIRTFLSTCCEKFGLKRSELFEAFDLFDVQDFGKVIYTLSALSWTPIAQNRGIMPFPTEEESVGDEDIYSGLSDQIDDTVEEDEDLYDCVENEEAEGDEIYEDLMRSEPVSMPPKMTEYDKRCCCLREIQQTEEKYTDTLGSIQQHFLKPLQRFLKPQDIEIIFINIEDLLRVHTHFLKEMKEALGTPGAANLYQVFIKYKERFLVYGRYCSQVESASKHLDRVAAAREDVQMKLEECSQRANNGRFTLRDLLMVPMQRVLKYHLLLQELVKHTQEAMEKENLRLALDAMRDLAQCVNEVKRDNETLRQITNFQLSIENLDQSLAHYGRPKIDGELKITSVERRSKMDRYAFLLDKALLICKRRGDSYDLKDFVNLHSFQVRDDSSGDRDNKKWSHMFLLIEDQGAQGYELFFKTRELKKKWMEQFEMAISNIYPENATANGHDFQMFSFEETTSCKACQMLLRGTFYQGYRCHRCRASAHKECLGRVPPCGRHGQDFPGTMKKDKLHRRAQDKKRNELGLPKMEVFQEYYGLPPPPGAIGPFLRLNPGDIVELTKAEAEQNWWEGRNTSTNEIGWFPCNRVKPYVHGPPQDLSVHLWYAGPMERAGAESILANRSDGTFLVRQRVKDAAEFAISIKYNVEVKHIKIMTAEGLYRITEKKAFRGLTELVEFYQQNSLKDCFKSLDTTLQFPFKEPEKRTISRPAVGSTKYFGTAKARYDFCARDRSELSLKEGDIIKILNKKGQQGWWRGEIYGRVGWFPANYVEEDYSEYC

SEQ ID NO: 155875 - DNA, 2538 bp, Artificial Sequence
  derived and/or modified sequence
atggagctgtggagacagtgcacccactggctgatccagtgcagagtgctgccccccagccacagagtgacctgggacggcgcccaggtgtgcgagctggcccaggccctgagagacggcgtgctgctgtgccagctgctgaacaacctgctgccccacgccatcaacctgagagaggtgaacctgagaccccagatgagccagttcctgtgcctgaagaacatcagaaccttcctgagcacctgctgcgagaagttcggcctgaagagaagcgagctgttcgaggccttcgacctgttcgacgtgcaggacttcggcaaggtgatctacaccctgagcgccctgagctggacccccatcgcccagaacagaggcatcatgcccttccccaccgaggaggagagcgtgggcgacgaggacatctacagcggcctgagcgaccagatcgacgacaccgtggaggaggacgaggacctgtacgactgcgtggagaacgaggaggccgagggcgacgagatctacgaggacctgatgagaagcgagcccgtgagcatgccccccaagatgaccgagtacgacaagagatgctgctgcctgagagagatccagcagaccgaggagaagtacaccgacaccctgggcagcatccagcagcacttcctgaagcccctgcagagattcctgaagccccaggacatcgagatcatcttcatcaacatcgaggacctgctgagagtgcacacccacttcctgaaggagatgaaggaggccctgggcacccccggcgccgccaacctgtaccaggtgttcatcaagtacaaggagagattcctggtgtacggcagatactgcagccaggtggagagcgccagcaagcacctggacagagtggccgccgccagagaggacgtgcagatgaagctggaggagtgcagccagagagccaacaacggcagattcaccctgagagacctgctgatggtgcccatgcagagagtgctgaagtaccacctgctgctgcaggagctggtgaagcacacccaggaggccatggagaaggagaacctgagactggccctggacgccatgagagacctggcccagtgcgtgaacgaggtgaagagagacaacgagaccctgagacagatcaccaacttccagctgagcatcgagaacctggaccagagcctggcccactacggcagacccaagatcgacggcgagctgaagatcaccagcgtggagagaagaagcaagatggacagatacgccttcctgctggacaaggccctgctgatctgcaagagaagaggcgacagctacgacctgaaggacttcgtgaacctgcacagcttccaggtgagagacgacagcagcggcgacagagacaacaagaagtggagccacatgttcctgctgatcgaggaccagggcgcccagggctacgagctgttcttcaagaccagagagctgaagaagaagtggatggagcagttcgagatggccatcagcaacatctaccccgagaacgccaccgccaacggccacgacttccagatgttcagcttcgaggagaccaccagctgcaaggcctgccagatgctgctgagaggcaccttctaccagggctacagatgccacagatgcagagccagcgcccacaaggagtgcctgggcagagtgcccccctgcggcagacacggccaggacttccccggcaccatgaagaaggacaagctgcacagaagagcccaggacaagaagagaaacgagctgggcctgcccaagatggaggtgttccaggagtactacggcctgccccccccccccggcgccatcggccccttcctgagactgaaccccggcgacatcgtggagctgaccaaggccgaggccgagcagaactggtgggagggcagaaacaccagcaccaacgagatcggctggttcccctgcaacagagtgaagccctacgtgcacggccccccccaggacctgagcgtgcacctgtggtacgccggccccatggagagagccggcgccgagagcatcctggccaacagaagcgacggcaccttcctggtgagacagagagtgaaggacgccgccgagttcgccatcagcatcaagtacaacgtggaggtgaagcacatcaagatcatgaccgccgagggcctgtacagaatcaccgagaagaaggccttcagaggcctgaccgagctggtggagttctaccagcagaacagcctgaaggactgcttcaagagcctggacaccaccctgcagttccccttcaaggagcccgagaagagaaccatcagcagacccgccgtgggcagcaccaagtacttcggcaccgccaaggccagatacgacttctgcgccagagacagaagcgagctgagcctgaaggagggcgacatcatcaagatcctgaacaagaagggccagcagggctggtggagaggcgagatctacggcagagtgggctggttccccgccaactacgtggaggaggactacagcgagtactgctag

SEQ ID NO: 155876 - DNA, 2538 bp, Artificial Sequence
  derived and/or modified sequence
atggaattgtggcgtcagtgcacacattggctcattcagtgtcgcgtcctgcccccatcacacagggttacctgggatggagcacaagtctgtgaactcgcccaggccctgagggacggcgtgttgctgtgtcagttgctgaataacctgctgccacacgccatcaatctgcgggaagtgaacctgagaccacagatgagccagttcctttgcctgaagaacatccgcacattcctgagcacatgctgcgagaagttcgggctgaagagatctgagctctttgaggccttcgacctgtttgacgtgcaagacttcggaaaggtcatctataccctgagcgccctgagctggaccccaattgctcagaaccgggggattatgccattcccaacggaggaggagtcggtgggagatgaggacatctacagcggtttgtccgatcagatagacgatactgtggaggaagatgaagatttgtacgactgcgtcgaaaacgaggaggctgaaggcgatgagatatacgaggatcttatgagatcagagcctgtcagtatgcctcctaaaatgacagaatacgacaagaggtgctgttgtctgcgagaaatccagcagaccgaagagaaatacaccgataccctggggagtattcagcagcattttctgaaacccttgcagcgatttctaaagccacaggatatcgaaatcatcttcatcaacattgaagacttactgcgtgtacacactcatttcctgaaggagatgaaggaagctttggggacaccaggtgctgccaacttataccaggtgtttatcaagtataaggagaggtttctagtgtatgggagatactgttcccaggtggaatccgcttctaaacaccttgaccgcgtggcagcagctcgcgaagatgtgcagatgaagctggaagaatgctcacaaagggcaaacaatgggcgctttacacttcgggacttattgatggtccctatgcagagagtacttaaatatcaccttctgcttcaggaactggttaagcacacacaggaagccatggaaaaggagaacctgaggctggccctcgacgccatgagggatttagcacagtgtgtcaatgaagttaagagggataatgaaaccttacggcagatcacgaacttccagctgagtatcgagaacctagaccagtctctggcacactatggcaggccaaagattgacggcgaactcaaaattactagcgttgaacgacggagtaagatggaccgttacgcttttctgctggacaaggccctgctgatctgtaagcgccggggggactcatacgacctgaaagactttgtcaacctccactcctttcaagttagggatgacagtagcggagatcgggataataagaagtggtcgcatatgtttctgctgatagaggatcagggcgcacaaggctatgaactgttcttcaagactcgagagctgaagaagaagtggatggaacagtttgaaatggccatttcaaatatatatcctgaaaatgccacagccaacggtcatgattttcagatgttctccttcgaggaaaccacctcctgtaaggcctgccagatgcttttgaggggcacattctatcagggataccgctgtcacagatgtagagcctctgcccacaaagaatgtctgggacgggttcccccctgtgggcggcacgggcaggatttccccggaactatgaagaaggataagttgcaccggcgcgcacaggacaaaaaacgtaacgagctgggcctgccaaagatggaagtgttccaggagtactacggcctgccgccccctcctggtgctatcgggccctttctgcggctgaaccccggtgacatcgtcgaactgacaaaagccgaggcggaacagaactggtgggagggaagaaatacatcaaccaatgaaattggctggtttccctgtaaccgcgtaaagccatatgtccacggacccccgcaggacctttctgtgcacctgtggtatgccgggcccatggagcgggccggcgccgagtccattctggctaaccgcagcgacgggaccttcttagtgcggcagcgggtcaaggatgccgctgagttcgctatatcaatcaaatataacgtggaagttaagcacattaagattatgactgctgagggcctctatcggatcacagagaaaaaggcatttcgagggttaactgaattggtagagttttaccagcagaatagtttgaaagattgtttcaaaagcctggacacaaccttgcagtttccgttcaaggagcccgaaaagaggaccatctcaagacctgccgtgggttcgactaaatatttcggcaccgcgaaggcaagatacgatttttgcgcaagggacaggtcagagctgtctctaaaagaaggcgacatcattaaaattctgaacaaaaagggacagcagggctggtggcgaggcgaaatctatgggagggtgggctggttccctgcaaactacgtggaagaagattacagcgagtactgctag

SEQ ID NO: 155877 - DNA, 2538 bp, Artificial Sequence
  derived and/or modified sequence
atggaactatggaggcagtgtacccattggcttattcagtgcagagtgctccctccgagccaccgggtaacctgggatggggcccaagtctgcgaactggcccaagccctgcgggacggggttttgctgtgccagttgcttaataatctccttccccacgccattaatttgagggaggtaaacctccgaccacagatgtcccaatttctttgcctgaaaaacatccgaaccttcctgtccacctgttgtgaaaaatttggcctgaaaaggagtgaacttttcgaagcattcgatcttttcgacgtgcaagattttggcaaagtgatatacaccctctcagcgctctcctggactcccattgctcagaatcgtggtattatgcctttccccaccgaagaggagagtgtgggggacgaagacatctacagcggcctttctgaccagattgatgacactgtcgaagaagacgaggatctatacgattgtgtcgagaacgaagaagctgaaggggacgagatatatgaagacctcatgaggtctgaacccgtgagtatgcctccaaagatgactgagtatgataaacgctgctgctgcctacgcgagatccaacagaccgaggaaaagtatacagacacgcttgggtcgatccaacagcattttctcaagccactgcagagattcctcaagccacaagacatcgagattatttttataaacattgaagacttgttgcgtgtgcacacccactttctgaaagagatgaaagaagctctcgggacaccgggcgcagctaacctataccaggtctttataaagtataaagagcggttcctagtctatggtcgttattgctcccaggtagagtcggcctctaagcatctggaccgagtcgccgctgcccgcgaagatgtccagatgaagctcgaagaatgcagccaacgggctaacaatggcagatttacccttcgagatcttctgatggttcctatgcagcgggtgctcaaataccatctgcttctccaagagcttgtgaaacatacgcaggaagcaatggaaaaagaaaaccttaggctggcactcgatgccatgagagacctcgctcagtgtgtgaacgaagttaagcgggacaacgagacattgagacagatcactaactttcagctgtcaattgagaatctggaccagtcccttgcgcactacggtaggccgaaaatagatggagaactgaaaattacatctgtggagaggcggtccaaaatggatagatacgctttcctactggataaggccctactgatttgcaagcgtcgcggcgatagctacgatctcaaggacttcgtgaaccttcactcctttcaggtgagggacgactccagcggcgacagagacaataaaaaatggagccacatgtttctgctgattgaggaccaaggggctcaaggctacgaattattcttcaagaccagggagctgaagaagaagtggatggagcagttcgagatggctatttctaatatttatcccgaaaacgctacagctaacgggcatgactttcaaatgtttagtttcgaagaaacaacctcgtgcaaagcgtgccagatgctcctgaggggtacgttctatcaaggctaccgctgccacaggtgcagagcctcggcacacaaggagtgcctgggacgggtgccaccttgcggacgacacggccaagactttcctgggactatgaaaaaagacaagcttcataggcgagcccaggacaagaaaagaaatgagctggggctcccaaaaatggaggtgtttcaagagtactatggcctgcccccaccgcccggcgccatcggtccttttctcaggctgaaccctggcgacatagtggaactgactaaggctgaagccgagcagaactggtgggagggtaggaatacatcgactaatgagatagggtggtttccgtgtaaccgagttaaaccctacgtccacggtccaccacaagacctctcagttcacctatggtatgctggacccatggagcgggccggagctgaatctatactggctaacagaagtgacggaacattcctggtgagacagcgcgtgaaagacgctgccgagttcgccatcagcataaagtataatgtcgaggtcaagcatataaaaataatgaccgcagaagggttataccggattactgagaagaaggcattccgcggccttacagagctcgttgagttttatcagcagaacagtcttaaggattgttttaagtctctggatactacactgcagtttccttttaaagagcccgagaagcgcaccatatccaggcccgctgtgggctccactaagtatttcgggacggcgaaagctcgttatgacttttgcgctcgggacagaagcgaattgtccctgaaggagggggacatcataaagatcctgaacaagaaagggcagcagggctggtggaggggggaaatatatggacgagtcggctggtttcccgcaaattacgtagaagaagactattctgagtattgttag

SEQ ID NO: 155878 - DNA, 2538 bp, Artificial Sequence
  derived and/or modified sequence
atggagctgtggaggcagtgcacccactggctgatccagtgccgggtgctgccccccagccaccgggtgacctgggatggagcccaggtgtgtgagctggcccaggccctgagagatggagtgctgctgtgccagctgctgaacaacctgctgccccacgccatcaacctgcgggaggtgaacctgcggccccagatgagccagttcctgtgcctgaagaacatccgcaccttcctgagcacctgctgtgagaagtttggcctgaagaggtctgagctgtttgaggcctttgacctgtttgatgtgcaggactttgggaaggtgatctacaccctgagcgccctgtcctggacccccatcgcccagaacagaggcatcatgcccttccccacagaggaggagagcgtgggagatgaggacatctacagcggcctgagtgaccagattgatgacacagtggaggaggatgaggacctgtatgactgtgtggagaatgaggaggccgagggagatgagatctatgaggacctgatgaggtctgagcctgtgtccatgccacccaagatgacagaatatgacaagcgctgctgctgcctgcgggagatccagcagacagaggagaagtacacagacaccctgggcagcatccagcagcacttcctgaagcccctgcagcgcttcctgaagccccaggacatcgagatcatcttcatcaacatcgaggacctgctgcgggtgcacacccacttcctgaaggagatgaaggaggccctgggcaccccaggagctgccaacctgtaccaggtgttcatcaagtacaaggagcgcttcctggtgtatggccgctactgcagccaggtggagagcgccagcaagcacctggacagagtggccgccgcccgggaggatgtgcagatgaagctggaggagtgcagccagagggccaacaacggccgcttcaccctgcgggacctgctgatggtgcccatgcagagggtgctgaagtaccacctgctgctgcaggagctggtgaagcacacccaggaggccatggagaaggagaacctgcggctggccctggatgccatgagggacctggcccagtgtgtgaatgaggtgaagagggacaatgagaccctgcggcagatcaccaacttccagctgagcattgagaacctggaccagagcctggcccactacggccggcccaagattgatggagagctgaagatcacctctgtggagcggcgcagcaagatggacagatatgccttcctgctggacaaggccctgctgatctgcaagagaagaggagacagctatgacctgaaggactttgtgaacctgcacagcttccaggtgagagatgacagcagcggggaccgggacaacaagaagtggagccacatgttcctgctgattgaggaccagggcgcccagggctatgagctgttcttcaagacccgggagctgaagaagaagtggatggagcagtttgagatggccatcagcaacatctacccagaaaatgccacagccaacggccatgacttccagatgttctcctttgaggagaccaccagctgcaaggcctgccagatgctgctgcggggcaccttctaccagggctaccgctgccaccgctgccgggccagcgcccacaaggagtgcctgggccgggtgcccccctgtggcagacatggccaggacttccctggcaccatgaagaaggacaagctgcaccggcgggcccaggacaagaagagaaatgagctgggcctgcccaagatggaggtgttccaggagtactacggcctgcccccacctcctggggccatcggccccttcctgcggctgaaccctggggacatcgtggagctgaccaaggccgaggccgagcagaactggtgggagggcaggaacaccagcaccaatgaaattggctggttcccctgcaacagagtgaagccctacgtgcacggccccccccaggacctgtctgtgcacctgtggtacgccggccccatggagagagctggagctgagagcatcctggccaacagaagtgatggcaccttcctggtgcggcagagggtgaaggatgctgctgagtttgccatcagcatcaagtacaacgtggaggtgaagcacatcaagatcatgacagctgagggcctgtaccgcatcacagagaagaaggccttccggggcctgacagagctggtggagttctaccagcagaacagcctgaaggactgcttcaagagcctggacaccaccctgcagttccccttcaaggagcctgagaagaggaccatcagcaggcctgctgtgggcagcaccaagtacttcggcacagccaaggcccgctatgacttctgtgcccgggacagaagtgagctgagcctgaaggagggggacatcatcaagatcctgaacaagaagggccagcagggctggtggagaggagagatctacggccgggtgggctggttccctgccaactacgtggaggaggactacagcgagtactgctag

SEQ ID NO: 155879 - DNA, 2538 bp, Artificial Sequence
  derived and/or modified sequence
atggagctgtggcggcagtgcacccactggctgatccagtgccgggttctccctcccagtcaccgtgtgacttgggatggggcccaagtgtgcgaactcgcacaggcactgcgggatggagtcctgctttgtcagttactgaataacctcctccctcatgcgatcaacctgagggaggtcaatctgcggccccaaatgagccagttcttgtgtttgaagaatatccgcacattcctgagcacctgttgtgaaaagttcgggctaaagaggagtgagctgttcgaggcctttgacctgttcgatgtacaagacttcggaaaggtgatctacaccctctccgccctgagctggactcccatcgcccagaataggggaattatgccattccccacagaggaggagagcgttggagacgaagatatctattcaggattatcagatcaaatcgacgacaccgtagaggaggacgaagacttgtacgactgcgtcgaaaacgaggaggcggagggggacgagatctacgaggatctcatgagatcagaaccggtcagcatgccgccaaaaatgacagagtacgacaagcggtgctgctgtctgagagaaatacagcagactgaagagaaatacacagacactctcgggagcattcagcaacacttcctgaaacctctgcagcgttttctgaaacctcaggatattgaaatcattttcattaacattgaggaccttctgagagtacatacacactttctgaaggagatgaaggaagccctagggaccccaggggccgccaacttgtaccaggtgttcattaaatataaagagcgcttcctcgtctatggcagatattgctcccaagtcgagagcgcctccaaacacctcgacagagtggccgcggcacgcgaagacgtgcaaatgaaactggaagagtgcagccagagagcaaataacgggagatttacactgcgcgacttgctgatggtccccatgcagcgagtgcttaagtaccacctgctgctacaagagctcgtgaaacacacacaggaggcgatggagaaagagaatctcagactggccctcgacgctatgcgggacctggcccagtgcgtcaacgaagtcaagagagataacgagacactcaggcagatcactaattttcaactaagtatcgaaaatctggatcaatccctggctcattacggtcggccaaaaatcgacggcgaacttaagatcacttccgtggagcgaagaagcaagatggatagatatgcttttttgctagataaagccttgttgatctgcaaaaggcgtggcgacagctatgacctgaaagatttcgtgaaccttcactcctttcaggtgcgcgatgattccagtggagacagggacaataaaaaatggtcccatatgttcctgctaatcgaggatcaaggggctcagggatacgagctgttctttaagacgcgtgagctgaaaaaaaagtggatggaacagtttgaaatggcaatcagtaacatctaccccgagaacgcaactgcaaatggacatgacttccagatgttcagcttcgaggagacgacttcctgtaaagcctgtcagatgctacttagggggaccttttaccaaggatacagatgtcaccggtgcagagcaagcgcccataaagagtgtcttggcagggtgcctccctgcggccgacacgggcaggacttcccaggcactatgaaaaaagataagcttcacaggcgagcacaggacaaaaagcggaacgagcttggtttgcccaagatggaagttttccaggagtactacggtttgcctccgccgccaggtgccattggaccctttttgaggctgaatccaggagatatcgtagagctgaccaaagccgaggcagagcaaaattggtgggaggggcggaatacatcaaccaacgagatcggatggtttccatgtaacagagtgaagccttatgttcacgggcctccccaggatttgtcagtgcacctctggtacgcaggacctatggaaagggcgggggcagagagcatactcgcaaacagatcagatgggaccttcctggtgaggcagcgcgtaaaggacgccgcagaattcgccatctccattaaatataacgtggaggtaaagcacatcaagattatgacagctgaagggctttatcggattaccgaaaagaaagccttcagaggacttaccgaactcgttgagttctaccagcagaactctctcaaggactgctttaagagtctcgacacaactctccagtttccatttaaggagccagagaagcgcaccatttctcgacctgctgtcgggtccacaaaatattttggaacagccaaagcccgttatgacttttgcgcaagggacaggtccgaattgtccctcaaagagggagacatcataaaaatactgaataaaaaagggcagcagggttggtggcggggtgaaatttatggccgagtaggctggtttcctgcaaattacgtcgaggaggactattcagaatactgctag

SEQ ID NO: 155880 - DNA, 2538 bp, Artificial Sequence
  derived and/or modified sequence
atggagctgtggcggcagtgcacccactggctgatccagtgccgggttttgccaccttcacaccgggtgacttgggatggggcacaggtatgtgagctggcgcaggctctgcgcgacggggtgttgttatgtcaattgcttaataacttacttccacacgctataaatctgcgagaggtgaatctgcgaccccagatgagccagttcctgtgtctgaagaacatccgcaccttcctgtcaacttgctgtgagaaatttgggctgaaaaggagcgagttgtttgaagcctttgatttatttgacgtgcaggacttcggcaaggtgatttacaccctctctgctttgagctggacaccgatagcccagaaccgaggaatcatgccattcccaactgaggaggagtccgtgggagatgaagatatatactctggcctttctgatcagatcgatgacaccgttgaggaagatgaggatttatacgattgcgtcgagaacgaagaagccgaaggagacgaaatttacgaggacttgatgaggtcagagcctgtctccatgccacccaagatgactgagtatgataaacgatgttgttgcctgagagagattcagcagaccgaggaaaagtacacagataccttgggctccatccaacaacattttctgaaaccgttacaacgatttttaaagccacaggatattgagatcattttcattaacatcgaggatctgctgagggtgcacacccacttcctgaaagagatgaaggaggccctcggtaccccaggggccgcgaacctataccaagtgttcataaaatataaagagcggttcctggtatacgggcgctattgttctcaggtcgaaagtgcttctaagcatctggacagagtggccgccgcccgcgaggatgtccagatgaagctcgaagaatgcagccaaagggcaaataatggaagatttacccttagagacttactcatggtgcctatgcaaagggtgcttaagtaccacctactcttacaggaattggtcaagcacactcaggaagccatggagaaggagaatctacggcttgctttagacgctatgagggatctggcgcagtgtgtgaacgaagtaaaaagagacaatgagacccttcgccagatcactaatttccagctaagcatagaaaatctcgaccagtctcttgcccactatggccgcccaaagatcgatggcgagctgaagatcacgagtgttgagaggcggagcaaaatggataggtatgcattcctcctcgataaggcattgctcatctgcaagagaagaggcgacagctacgaccttaaggactttgtcaacctgcactcatttcaggtccgagatgactccagtggtgatagggacaacaaaaagtggagtcatatgttcctactgatcgaggaccagggggcgcaggggtacgagttattcttcaagacccgcgaactcaaaaagaagtggatggaacagttcgagatggctatctctaatatctatccggaaaacgctactgcaaacgggcatgatttccagatgttctcttttgaggagaccaccagttgtaaggcctgccaaatgctgctgcggggcacattctatcagggatacaggtgccaccgatgccgagcctccgcccacaaggaatgtcttggacgtgtgcccccttgtggacgtcatggacaagatttcccaggcacaatgaagaaggataaactgcaccgccgagcacaggataagaaacgtaatgaactggggctgccaaaaatggaggtgttccaggaatattatggcctgccccccccccccggagctattggaccctttctgaggctcaacccaggcgatatcgtggaactgacaaaggccgaggctgagcaaaactggtgggagggaagaaatacctccaccaacgagatcggctggttcccctgtaatagggtcaagccctatgttcacggaccgccacaggacctgtcagtgcatctttggtacgccgggcctatggaacgagcaggggctgagtctatacttgccaatcgctcagatggtacattcctcgttaggcagcgggtgaaggatgccgcagagtttgctatttctattaaatataatgttgaggtgaagcacatcaagataatgactgctgagggactctatagaatcaccgagaagaaagctttccgcggcctgacagagctggtcgaattctatcagcaaaacagcttgaaggactgcttcaaatccttagatactactctacagtttccctttaaggagcccgagaaaaggaccatatctcggcccgccgtgggttccactaagtattttggtactgcaaaggctaggtacgatttttgtgctagagaccggtctgaactctccctgaaggagggcgacatcatcaaaattttaaataagaaaggtcaacaggggtggtggcgtggggagatatacggtcgcgtgggctggtttccagctaattacgtcgaagaggactactcagagtattgttag

SEQ ID NO: 155881 - DNA, 2538 bp, Artificial Sequence
  derived and/or modified sequence
atggagttatggaggcaatgcactcactggctgatccagtgccgtgtacttcctcccagtcatcgagtaacctgggatggagcgcaggtgtgcgagttggcccaggctctacgcgacggagttcttctttgtcagctcctcaacaacctgctaccccatgccattaaccttagggaggttaacctgcggccacagatgtcccagtttttgtgtctgaagaatattcggacattcctctcaacatgttgcgaaaagttcgggctcaaaaggtctgagttgtttgaggcgttcgacctgtttgatgtgcaagattttggaaaagtaatctatacactgtccgctctctcgtggaccccgatcgcgcagaacaggggaatcatgcccttcccaaccgaagaggaaagcgtgggagatgaggatatttattcaggtcttagcgatcagatcgatgacacagtcgaggaagatgaggatctgtacgattgtgtagaaaatgaggaagcagagggggacgagatttacgaggacctgatgcgctccgagcctgtatctatgcctccaaagatgacagaatacgataagcgatgctgctgcttgcgcgaaattcagcagacagaggaaaagtatacggacacactcgggtcaatccaacaacatttcctaaaaccgttgcaacggtttctgaagccacaggatatcgaaataatatttatcaacatagaggacttgctcagagttcacacacattttctcaaggagatgaaggaggcattgggcacccccggagctgcaaacttgtaccaggtcttcattaaatacaaagagaggttcttagtgtacggcagatattgctcgcaggtcgagagcgcatccaaacacctcgaccgcgttgcagctgccagggaggatgttcaaatgaaactcgaggagtgcagccagcgcgctaacaacgggaggttcaccctgcgggacctgctgatggttccaatgcagagggtgttaaaataccatctcctgctccaggaactcgtgaagcacacacaggaggccatggagaaggagaaccttaggctggctttagacgccatgcgggatttggcccagtgcgtcaacgaagtgaagagggataacgagaccctgcgtcagattacaaatttccagctttccattgaaaatctggatcaatccctggcccactacggacgcccaaagattgatggggagctgaaaattacttctgtggagagacgctccaagatggacagatatgccttcttacttgacaaggcactcctgatttgcaagcgccgaggcgactcttacgatctgaaggactttgtgaacctacacagttttcaggtgcgcgatgatagcagtggggatcgggataacaagaagtggtcccacatgtttctacttatcgaggaccaaggagctcaagggtatgagttgtttttcaagacccgtgaactcaaaaaaaagtggatggaacaatttgaaatggccatctccaacatatatcccgagaacgccactgctaatggacatgactttcagatgtttagcttcgaagaaactacttcatgcaaagcgtgtcagatgctcctccggggtaccttctatcaaggttatagatgccataggtgccgcgcatccgcccacaaggagtgtcttggtagagtgccaccttgcgggaggcacgggcaggacttccctggcactatgaagaaagataagttgcatcggcgtgctcaggataaaaagcgaaacgaactaggactcccaaaaatggaagtattccaggaatattatggtctcccaccccctccgggagcaatcggcccttttttaagactgaatcccggagatatcgtcgagctgacaaaggcagaagcagagcagaactggtgggaaggcagaaacaccagcaccaacgaaatcggctggttcccttgcaacagggtgaagccatatgtacatggccctcctcaggatctctctgtccacctgtggtacgctggtcctatggagcgtgccggagccgaatctatcctcgcaaatagatcggacggaacatttcttgtccgccagcgcgttaaggacgcggctgagttcgcgatatctataaaatataacgtcgaagtaaagcacatcaaaattatgacagctgagggattgtatcgcatcaccgagaaaaaggcgtttaggggccttacggaactggtggagttttaccagcagaactctctcaaagactgcttcaagtctttggatactactcttcagttccccttcaaagagcccgagaaacgaaccatctcccgtccagcagttggtagcactaaatactttggcacagcaaaagctaggtatgatttctgcgccagggatcggagcgaactgagcctcaaggaaggcgacatcatcaaaatccttaataaaaagggccaacaggggtggtggaggggtgagatttacggacgggtaggttggtttccggctaattacgtggaagaggactatagcgagtattgttag
